United States Patent Application Publication US 2011/0014706 A2 - sequence listing, part 37

SEQ ID NO: 96492 - DNA, 1478 bp, Arabidopsis thaliana columbia
  unsure (1)..(1478): unsure at all n locations
aatacgactcactttagggaaagcacgtacgcctgcaggtaccggtccggaattcccgggtcgacccacgcgtccgcttcagcaaaactcgtctctcttgcactccaaaaagcaaccatgtctgcttttgtcggcaaatacgcagatgagctgataaagacggctaagtacattgccacaccgggaaagggcattttggcagcagacgagagcacgggaactattgggaaacgattcgccagcatcaatgttgagaacattgagtccaaccgccaagctctccgtgagctcctcttcacgtcccctggcactttcccttgcctctccggtgttatcctcttcgaggaaaccctctaccagaaaaccacggatggcaaacccttcgttgagctcctcatggaaaacggagttatccctggaatcaaagtggacaagggtgtggttgatctagcaggaaccaatggcgagaccactactcagggtctagattcacttggtgcacgttgccaggagattacaaggcaggagctcggtttgcaaaatggcgtgcagtcctcaagattggggccaccgagccaagcgtgctctccatccaagaggacgccagggggctagcccgctatgccatcatctgccaggagaatggactcgtcccgatcgtcgagccagaggtgctgaccggcgggagccacgacatcaagaaatgtgcagcggtgaccgagaccgttcttgctgccgtgtacaaggccttgaacgaccaccatgtcctcctcgaaggcactctgcttaaaccgacatggtcactcccggctccgacagcccaaaggttgcaccggaactaattgcggaatacacggtgactgctctgcgccgcacagtcccaccagctattccgggaatcgtgttcctctcaggcatacagcgcgaagagcaagcgacactaaatctaaacgcaatgaacaagcttgatgtgttgaagccatggacgctcactttctcttttggcggagccctccagcaaagtgctatcaaggcttgggccggtaagcccgagaacgtagccaaagctcaggccaagttcctgaccaggtgcaaggctaacaaggacgctaccctcgggaaatacaccggctgggcttctggtgactcggccgctttcgagaacttggttgtgataggatacaggtactaggagcctttgagaacgggcgtctgcctttgatgcggtttgagtagatgtctaatgtttcgtgggcgttttaactgtttgaatgttcaattttgcagactgctaataattgttattttccggttactgtcaaactatccatgtgaaattcacgttttgaaaagctaataataatgtttttattgtatgagnnnnnnnnnnnnnnnnnnnnnnnnnnnnnnnnnnnnnnnnnnnnnnnnnnnnnnnnnnnnnnnnnnnnnnnnnnnnnnnnnnnnnnnnnnnnnnnnnn

SEQ ID NO: 96493 - DNA, 706 bp, Arabidopsis thaliana columbia
  unsure (1)..(706): unsure at all n locations
acgcctgcaggtaccggtccggaattcccgggtcgacccacgcgtccgggttattgactttctcattcagtgaagcttgaatcatggcctcgagaattgctaaagatgtgactgaattgattgggaacactccattggtgtatttgaacaatgttgctgaaggatgtgttggtcgtgttgctgctaagcttgagatgatggaaccgtgctctagcgtcaaagacaggattggttttagcatgatttctgatgcagaaaagaagggtcttatcaaaccaggagagagtgtgctgattgagccaacaagtggaaacactggagttgggttagcattcacggcagctgccaaaggctacaagcttattattacaatgccagcttctatgagtactgagagaagaatcattctcttagcttttggagttgagttggttttaactgacccagctaagggcatgaaaggagctatcgcaaaggcggaagagattttggcgaaaacacccaatggttccatgcctcagcaggtttgagaaccctgccaaccccaagatccactatgggcctacggggcctgggatttggaaaggcactggtggcaaacccggtggcggtcctggggttgtccggggggccattccagggntgggnggnnccttaaancnnnnccgaacgcaacccgnttgggggggccccttaaaagnggtnt

SEQ ID NO: 96494 - DNA, 607 bp, Arabidopsis thaliana columbia
attttcttcaaaacgattcgggtcaaggttattgactttctcattcagtgaagcttgaatcatggcctcgagaattgctaaagatgtgactgaattgattgggaacactccattggtgtatttgaacaatgttgctgaaggatgtgttggtcgtgttgctgctaagcttgagatgatggaaccgtgctctagcgtcaaagacaggattggttttagcaattaaacttgcacagaggccagaaaacgctgggaagctatttgtggcgatattcccgagtttcggggagaggtatctatcaacggtacttttcgatgcgacaaggaaagaagcggaagccatgacctttgaggcttgaacattctccatttcttcttaagagacgccaaaataaaagagatgttcagtttctcctatagagactcttcatctttagttacattgcgtctttgcttccatctgtatcttctcttgtgtgccaataaaagtcaaactagattttctctgtttcttttgtgaaccacttgcttgttaatgaagtttaaatttgctaaaaaaaaaaaaaaaagggcgagccgctctagaggatccaagcttacgtacgcgtgg

SEQ ID NO: 96495 - DNA, 1303 bp, Arabidopsis thaliana columbia
  unsure (1)..(1303): unsure at all n locations
nnnnnnnnnnnnnnnnnnnnnnnnnnnnnnnnnnnnnnnnnnnnnnnncctgcaggtaccggtccggaattcccgggtttgacccacgcggccgtacccctgcgagaagacgacaaagggtacggctgcgagaagacgacagagggatacggctgcgagaagacgacagaagggtacggctgcgagaagacgacagaggggtacggctgcgagaagacgacagaagggggtcctcacaagattcaagggataggagctggttttataccaagtgtattgaatgttgatcttattgacgaagttgttcaggtttcaagtgatgaatccattgacatggcaaggcagcttgctcttaaagaaggtcttcttgtgggaatatcatccggtgcagcagctgctgcagcaattaaacttgcacagaggccagaaaacgctgggaagctatttgtagcgatattcccgagtttcggggagaggtatctatcaacggtacttttcgatgcgacaaggaaagaagcggaagccatgaccttcgaggcttgaacattctccatttcttcttaagagacgccaaaataaaagagatgttcagtttctcctatagagactcttcatctttagttacattgcgtctttgcttccatctgtatcttctcttgtgtgccaataaaaggcaaactagattttctctgtttcttttgtggaaacactggagttgggttagcattcacggcagctgccaaaggctacaagcttattattacaatgccagcttctatgagtactgagagaagaatcattctcttagcttttggagttgagttggttttaactgacccagctaagggcatgaaaggagctatcgcaaaggcggaagagattttggcgaaaacacccaatggttacatgcttcagcagtttgagaaccctgtcaaccctaagatccactatgagactacgggacctgagatatggaaaggcactggtggcaaaatcgatggctttgtttctgggattggtactggtggtaccattacaggtgctgggaagtatcttaaagaacagaacgcaaacgtcaagctgtatggagtggagccagttgaaagtgctattctatccggtgggaagccaggtcctcacaagattcaagggataggagctggttttataccaagtatcatactgtttcatgatccnnnnnnnnnnnnnnnnnnnnnnnnnnnnnnnnnnnnnnnnnnnnnnnnnnnnnnnnnnnnnnnnnnnnnnnnnnnnnnnnnnnnnnnnnnnnnnnnnnnnnnnnnnn

SEQ ID NO: 96496 - DNA, 639 bp, Arabidopsis thaliana columbia
  unsure (1)..(639): unsure at all n locations
acccaanccggttgttttccngtttcnncncanaaagagggnttttcaacccggggnngtttcctgtttgcccnacaagnggaacccctgggttgggttaccntncccggnacttccaaaggctncaagcttttttttttncaatgccngcttctatgggtactgagagaagaatcattctctttagcttttggggttgagttgnttttaactgacccagctaagggcatgaaaggagctatcgcaaaggcggaagagattttggcgccaccacccaatggttacatgcttcagcagtgtgagaaccctgccacccctaagatccactatgagactacgggacctgagatatggaaaggcactggtggcaaaatcgatggctttgtttctgggattggttctggtggcaccgttccgggtgctgggccctctcttaaacacacggaccgcaaacgtcaacctgtatggagtggagccagttgaaagtgctattctatccggtgggaagccaggtcctcccaagattcaagggataggagctggttttatgccaagctctcatactgtttcatgagccgaaaaaaaaaagaagaacccacgcatggaacggccgctctagaggatccaagcttacgtacg

SEQ ID NO: 96497 - DNA, 1393 bp, Arabidopsis thaliana columbia
ttttactaaattgatagcgtgtgccatgtgactgacaccattgagatcatatatctcatcattcgaaacttttattccactacaaccggattttctccaattttcttcaaaacgattcgggtcaaggttattgactttctcattcagtgaagcttgaatcatggcctcgagaattgctaaagatgtgactgaattgattgggaacactccattggtgtatttgaacaatgttgctgaaggatgtgttggtcgtgttgctgctaagcttgagatgatggaaccgtgctctagcgtcaaagacaggattggttttagcatgatttctgatgcagaaaagaagggtcttatcaaaccaggagagagtgtgctgattgagccaacaagtggaaacactggagttgggttagcattcacggcagctgccaaaggctacaagcttattattacaatgccagcttctatgagtactgagagaagaatcattctcttagcttttggagttgagttggttttaactgacccagctaagggcatgaaaggagctatcgcaaaggcggaagagattttggcgaaaacacccaatggttacatgcttcagcagtttgagaaccctgccaaccctaagatccactatgagactacgggacctgagatatggaaaggcactggtggcaaaatcgatggctttgtttctgggattggtactggtggtaccattacaggtgctgggaagtatcttaaagaacagaacgcaaacgtcaagctgtatggagtggagccagttgaaagtgctattctatccggtgggaagccaggtcctcacaagattcaagggataggagctggttttataccaagtgtattgaatgttgatcttattgacgaagttgttcaggtttcaagtgatgaatccattgacatggcaaggcagcttgctcttaaagaaggtcttcttgtgggaatatcatccggtgcagcagctgctgcagcaattaaacttgcacagaggccagaaaacgctgggaagctatttgtggcgatattcccgagtttcggggagaggtatctatcaacggtacttttcgatgcgacaaggaaagaagcggaagccatgaccttcgaggcttgaacattctccatttcttcttaagagacgccaaaataaaagagatgttcagtttctcctatagagactcttcatctttagttacattgcgtctttgcttccatctgtatcttctcttgtgtgccaataaaagtcaaactagattttctctgtttcttttgtgaaccacttgcttgttaatgaagtttaaatttgctatgtaactttgttcataagtatcatactgtttcatgatcaaaactaaaccaacataaaaaaaaaaaaaaa

SEQ ID NO: 96498 - DNA, 524 bp, Arabidopsis thaliana columbia
tttctcttctctctctcgctaagaactatagaagatgggattgttctcccacaagatctccagagatgatctgaaaccaggcgatcacatctattcttggcgtaacgcttatatctactctcatcacggttccatctcttaacgtttgatcttagttatttctgggtttatcaacaaagatcacaaaatttgggttattccataacacgatatttccctgttttgcaatttttcaggagtctacgtaggagatgagaaagtcattcatttcactcgtggaggtggtctagaattcggaacaggaacagttttggacaagatcatcgatatttcaataccaaatcatggaagaagagacaaaaagtgtattgattgtggagatcaatccaatctcggtggtgtaatctcttcttgtcttgattgttttctcgccggaggaaatctacatctcttcgaatacagtgcctctccgtctatctttctagccaaacgaggtggtacatgcacgatagcatcttcagatc

SEQ ID NO: 96499 - DNA, 672 bp, Arabidopsis thaliana columbia
  unsure (1)..(672): unsure at all n locations
caaactcggatctccttctcttctctctctcgctaagaactatagaagatgggattgttctcccacaagatctccagagatgatctgaaaccaggcgatcacatctattcttggcgtaacgcttatatctactctcatcacggagtctacgtaggagatgagaaagtcattcatttcactcgtggaggtggtctagaattcggaacaggaacagttttggacaagatcatcgatatttcaataccaaatcatggaagaagagacaaaaagtgtattgattgtggagatcaatccaatctcggtggtgtaatctcttcttgtcttgattgttttctcgccggaggaaatctacatctcttcgaatacagtgcctctccgtctatctttctagccaaacgnggtggtacatgcacggtagcatcttcagatccctngtgatgaaggcattttctcggtgctaaatttctcccttttgcaaaaattggatttggtgagtacggtnctttttagncaacaatttttgaggttttncggnttttttcaaaaactgggtttgttttgtgttncgggttnannccaaggtttggnttnnggggccaagccaattcttnattctncagctggngggntttttccttttncggntaaaggttttgggngaaaaaaaannaa

SEQ ID NO: 96500 - DNA, 536 bp, Arabidopsis thaliana columbia
  unsure (1)..(536): unsure at all n locations
ggccactggtggaaaagtctccttcaaagtctctctgacttcggatcctaagcttcctttgagagttttcagcgccccagagggagctccgttcccgccgggtttctgaaatttcccaccagaagggttcaaggttcctccacaaaccagcgccatcatcactaatgatgggatcgggatcaatcctcaacagagtgcaggaaacgtttttctgaagcacggatctgaactaagattgatcccgcgtgatagagttggagctgtgtttgtgatggatccatagatgatgtgtaagcaatgattaaaaactcagttccaaaaaaaaacataataatatactgaaatgcttatgtacaacttcgttgaataaatatgtaattgtcacaattgaagtgagttgaatttggtcaagttatatgtctgttattattaataaaaaaaaaaaaaaaaaaaaaaannnnnnnnnnnnnnnnnnnnnnnnnnnnnnnnnnnnnnnnnnnnnnnnnnnnnnnnnnnnnnnntcgtcctaataaaat

SEQ ID NO: 96501 - DNA, 392 bp, Arabidopsis thaliana columbia
  unsure (1)..(392): unsure at all n locations
aacccaatgccgtncnccggttttgttcctctcttgcatgctttgattgccgatgtactaatagagtcttagaggatcactagtactgtccttaatggttgcgtgcttttcttttttggtgttccttagcctctaagtgacttcagtgcagtgtccataggaaagcaacctttagattatttacacacagtcgggttccgctgtaatatctcagctgtcttttttatggtgtggtcattagcaacatacaagtagaaatcaagctccttgttaatgaatgtggtgttgtgaatgatgtcaggaaacgtttttctgaagcacggatctgaactaagattgatcccgcgtgatagagttggagctgtgtttagtgatggatccatagatgatgt

SEQ ID NO: 96502 - DNA, 649 bp, Arabidopsis thaliana columbia
  unsure (1)..(649): unsure at all n locations
nnnnnnnnnnnnnnnnnnnnnnnnnnnnnnnnnnnnnnnnnnnnnnnnnnnnnnnnnnnnnnnnnnnnnnnnnnnccacgcgtccgtacggctgcgagacgacagaaggggcttggtgaatgcgtcattgaaacgccattatccgccgtgctaatctgaatctcctcccccgtcggaaaaaatggccactggtggaaaagtctccttcaaagtcactctgacttcggatcctaagcttcctttcaaagttttcagcgtaccagaaggagctccgttcacggcggttctgaaattcgcagcagaagagttcaaggttcctccacaaaccagcgccatcatcactaatgatgggatcgggatcaatcctcaacagagtgcaggaaacgtttttctgaagcacggatctgaactaagattgatcccgcgtgatagagttggagctgtgtttgtgatggatccatagatgatgtgtaagcaatgattaaaaactcagttccaaaaaaaacataataatatactgaaatgcttatgtatcaatttcggtgaataaatatgtaatcgccacatccttttcggattaagtgagttaattggtcaagttataaaaaaaaaaaaaaggcgaccgctcagaggaccaagctacgtacgc

SEQ ID NO: 96503 - DNA, 757 bp, Arabidopsis thaliana columbia
  unsure (1)..(757): unsure at all n locations
gtgcagcaaacaagaaaggtatgccggttttttgtgacccagcagctctcatcgccaaagagtctgacccattagtcttcaccggatccatccgggttaaaaccggctacgagatccttagaatcactgctcacttgcaacagaacctgaacaaagtgaaagttccctttcttgtgatgcacggtactgacgacacagttaccgatcctagcgcctcaaagaagctctacgaggaagctgcctcgtcagacaaatcactcaagctctacgacgggttgttgcacgatcttctttttgaacccgaacgagaaatcatcgctggagccatattagattggctaaaccagcgggtttagctcgttcaaaccaacaatcactatcgcatcgaatcaagagattcttgattcagacaagaataattaattcgcggaattttctgagtgtgttgactgagaaacgtgaggaaaaagaagttcttggtcgaattttctcaactcagaagtagaaggaagataagagaaaaagagagactccaaatctggactctcttgctatgcttcttgacgtcggtatattgttataaatcaataattttgtaaccttggattttaatatcttatacctgtaataccaattattatttatatcgaaacctatatatgaaaaaaaaaaaaaaagnnnnnnnnnnnnnnnnnnnnnnnnnnnnnnnnnnnnnnnnnnnnnnnnnnnnnnnnnnnnnnnnnnnnnnnntctatcc

SEQ ID NO: 96504 - DNA, 539 bp, Arabidopsis thaliana columbia
  unsure (1)..(539): unsure at all n locations
gggncantccgncntgcccccaagnccctcggggaccccccnncggccaanccctcaggccttcggccggnttntccccgacttctttttggncccngacggggaatccaccgctggacccatattagattggctaacccagcgggtttagctcgttcaacccaacaatccactatcgcatcgaatccaggagattctggattcagacaggattaattaattcgcggaattttctgagtgtgttgactgagaaacgtgaggaaaaagaagttcttggtcgaattttctcagctcagaagtagaagcaagataagagaaaaacagagactccaaatctggcctctcttgctaatgcttcttgacgtcggtatattgttataaatcaataagtttgtaaccttggattttaagatcttatacctgtaataccaattattatttatatcgaatctataagtacttttggctgtttcgatagttttccctcttgtaaaaactattcttaattttgtgatatttgctgtttgtgcaagaagaac

SEQ ID NO: 96505 - DNA, 535 bp, Arabidopsis thaliana columbia
  unsure (1)..(535): unsure at all n locations
ggaaggagcaaaaaagccctaattttcggctggaggagcaagacgatgatgacgatgatgatatgaaggaacctcggatccgtgtgcgcgaagtttggccgcggaacgagatcctatagcactaagaggtctggccaatctaaagatagaactttctccaccatgtcctcttcattggttgaggcagcagcaggattgccggaaaagggtttgatggtgtgcaaatggctaggcacaggttcagcaggttatggaggatacaaagcctctgagtatttttttcctattgacaacgaagagtttagggaaaaccttgaggattgggaatctacgttgcaaagttgggagaaactgaaaaattatttggagggtatgcacaaaggaccctcttggcaatcaaacaagaactcattgacgaattccaatcttggtggggagaaaccttttaatcctttcatggatctagttgtgtcatgttcaaggcaaaaatcttattatccatggtttgcacnttgtcaaattatnccntntcgtt

SEQ ID NO: 96506 - DNA, 823 bp, Arabidopsis thaliana columbia
cttcatcctcactaatgaattaataatacatttaaatataaaattattgaattcattatttgctcgattcggaaaatcgtaattgaattcagataatggaagctagaagactcgcgatcctctgttctcacctgaacccacctggtccgaacccgacccgagacccgactctcagggtctccgattgtagctctggttcttccggcgacgggaaagtggaatcatctactctccaaaacgactgcgttttctgcaagattatccgtggcgagtctccatgtctcaagttgtacgaggatgatatgtgtttgtgtattctggatactaatccactaagtcatgggcactctcttatcattccaaagttacattatccaaccttagaggaaactcctccctcagagcatgcaggttgttgctgccatgtgttctaaagtgcctcttatcagtaacgccatcgtgaaagctaccgggagtgactcatttaacttattggttaacaacggcgcagcagctggacaagtcatatttcacacacacattcacataatcccgcgtaaggaacgtgactgcttatgggcctccgagagcttacggagacactctctgaaacttgacaaggaagcatctcaactggtatcggggggtcgacgacacttgtgcagcctttctgaagaacaactggttcaaccctcggaaaagttcccttttaagaaacccattggtggaacctttagattccgaattccaaaccccaaggtatatttccggattggttcataaatcaggcctcaatttggaatttaatcctaaaaatccttgg

SEQ ID NO: 96507 - DNA, 453 bp, Arabidopsis thaliana columbia
caaatctttttctcattcatcaaaagaaaaaaccaaagcaaaaaaaactcaaaacgtttttgaagataatgatgatgatgacgaagatgtttgttcagatcgctgtggtttgtctattggcgacgatggccgttgtgtccgcccacgagggtcaccaccaccatgctccggctccagcaccaggacccgcatctagctcaaccgttgtttcggccaccaatatgttcaccgtcttggctattgctgccgtggctctcgtcgttggttccaaccactaagttggttattacattcgtcgttttgtttcggtttctatgaaattgttctcttgacttttaatatattttgaatttttctcatttgtttttaactctctctatgttgatctgatttcttgaataaaataaaagtttattgaacgtgtgtttttaattacgaagatttggattacaa

SEQ ID NO: 96508 - DNA, 523 bp, Arabidopsis thaliana columbia
tcccttgccttcaccttcttggaaaacccttggaggagaaattgcttgaaaaaccgaggattttaccaagacgacctaggaagcagcaaatgtaaagacgcagggggcgtccaagaaaacgtccggaaacagagcgaaagagactgtttgatgagcaaagtggaagcgatgaggatgagtctattagtggcgggtcagacagagaagataagctcgacgaggacgctcctctaatcgagacaattagatcggctgccagacggaaagcgctcaagggtgaacggtccaagggactctggcgtcgggtaaaacagtttatccatcgtcatgatttatgtgtttaaaagtttgtttctagttgatacagtcaaggaaaccagcagacctgctcctttgttatagaaatccgtcttttcaagttggggcaaaaaaaaaaaacacaaccacaaagggcggcgcgctatagaggatccaagcttacgtacgcgtgcatgcgacgtcaagctcttctataggtcaccta

SEQ ID NO: 96509 - DNA, 618 bp, Arabidopsis thaliana columbia
  unsure (1)..(618): unsure at all n locations
atntttttttccgcgganncccgtggtgccccntnttcccttttggacccttggggggaatncttnaanccgggntttcaggcgccagggncccccattttagccccngggccgcccagaaccgtccggaaccgggccgaaagagncttttgatgagccaagtggaagcgatgaggatgagtctattagtggcgggtcagacagagaagataagctcgacgaggacgctcctctaatcgagacaattagatcggctgccagacggaaagcgctcaagggtgaacggtccaagggacactgacgacgggtaaaacatttatcaatcgacataatttatgtgtttaaaagtttgtttctagttgatacagtcaaggaaaccaacaaaactgctctttgttatagaaatccatcatttcaagtttagacattaccatgaaatatctatcattagcagaacaaaattgagggcatataatgaaaaaaagaaacaaacaaaacttgtgatatngattagatcatctactacccgnatttctcatcaaaggagaaataagaccctgactctctagaagagactggtgtntcctaatctcctgattaacctccctcttcaagtac

SEQ ID NO: 96510 - DNA, 475 bp, Arabidopsis thaliana columbia
cggacacgtgggcggacgcgtgggcggacgcgtgggcgagacccaagaaaaagatctcaaaatgctcacgacacctccacgaacctttgtctctgtccctttcttcttcttcttcctcctcttcctttctctacctctctcatctttctctcaatcgaactctgtatacaactctttcctcaagtgtttctccgacaagacgaaatctccacaatcccaaatcactgacaatgtcttctctcagacaaaccctgctttctcctccgttcttcgtgcttacatccgcaatgcgaggttcaacacttcctctactcttaaacccaccatcataatcactcctcgctccgagagccacgtcagcgccgccgtcacttgctcaaaaaccctaaatttcctcctcaaaatccgaagcggcggccatgactacgatggtctctcttacatttccgacaaaccatttttcatcctcgacatg

SEQ ID NO: 96511 - DNA, 467 bp, Arabidopsis thaliana columbia
ggagacagagagatagagagagagataatgggcaaagaaaaagacaaaaacagaggagcttctccttcatcttacggcacgtttcaaggtgtccctacttatcctccaccgtcctatcctcatcctccgtcgcatcatccagtcatcggaattcctcagccgtctccacctcccggatcacctcatcacgacatttccgttcatcaatacattcaagaacatcaaaccgttgctggttaccctgtttctcaaggaagacctgcaagacaaaaccgtcttccttgttgtggtcttggcctcggttggttcttgttcatcattggtttcctccttggtgcaattccatggtatgtaggcgtattcattctagtatgtgctaggatcgatccacgagagaaaccaggatacgtagcttgtaccattgcagctgttgttgctacaattaccatagtttttggtgtcatggg

SEQ ID NO: 96512 - DNA, 530 bp, Arabidopsis thaliana columbia
cagttcgggcacgcgcacgctctcttttgtaaacctgcgatctgaatcttcccggcggtgaaaaatggttgcggagaagaaggcgaagaagtcccatgaaggaatcaacagcagattagctcttgtgatgaagagtggaaagtacactcttggatacaagtctgttctcaaatcccttcgcagctccaaaggtaagctgatattgatatctagcaattgcccaccgttgagaaggtcagagattgaatactatgcgatgcttgctaaagttggagttcatcgctacaatggcaacaatgttgatttgggtactgcttgtggtaaatacttccgagtttcttgcctcagcatcgttgatcctggtgattccgacatcatcaagacacttcctggagatcagtgattctgattttgatgattttgccatgttgttctctatgcttgattatgctttgtgttcttcaaagacttaatgttagatttctttggtttcccgacttcctcttaatggttataattaattactacaa

SEQ ID NO: 96513 - DNA, 742 bp, Arabidopsis thaliana columbia
  unsure (1)..(742): unsure at all n locations
aaaagcatnttcttatcttggatctaatatttcaactgnnatcgattaagctccagaaagaggctcatcaagtcctgatgaacttcgaggaacccttgaaggactatgttcgttatgtacaatcgattaaggcaacaatagcagaacgaggcactgctttcaaacaacattgtgaattgtcagaaacaacaaagttaaaagaaataaatcttgacaaactcatgctcacacgttcagacaaagtaggagaagctgagatcgaatccagagagataaaagcagaaagtgaggaagccacgagaagatttgagaggatagtaaagagaatggaagatgagatagtaaggtttcaagagcagaagacggaagagatgggagtggcattccatcagtttgcgaaaggacaagctcgcttagcaaacagtgtcgcggatgcttggagatcccttcttcccaaacttgaagcttcttattctgtctaaatccaaaactaaacttacctgtgtctgtgtgtgttccttcatgagagggtttgtgtctagaggcagtttgtttttgtgagaaattctggtgtttttttgtcaacttcaagtttagttaacttggcttgtttccacttgtaaagaagatacatatgcgtcattattactctccccaacgttcatatggccatttttttttagaaaaaatataaaaggaaaaggannnnnnnnnnnnnnnnnnnnnnnnnnnnnnnnaatcg

SEQ ID NO: 96514 - DNA, 538 bp, Arabidopsis thaliana columbia
  unsure (1)..(538): unsure at all n locations
atgannnnnnnnnnnnnnnnnnnnnnnnnnnnnnnnnnnnnnnnnnnnnnnnnnnnnnnnnnnnnnnnnnnnnnnnnnnnnccacgcgtccgcccacgcgtccgcggacgcgtgggtaaaacacaacccaaaaatggagttactaacgacggtcgcgagctttttcactccgacgactcttttcctccttcttaatcttatgatcggtacaatcgtcgtaacctctcgactcgggtcaggttcaagaaaacattaccagcatcacgatggattcgggtcaggtcatgctccggctccgttagctagagctccatcgattatcgaccgagtcaagtccatcaattttcatctctacaaatttcctcatccagaaactgagcttttctcgatgacagctcaccacgacataatcgggtcggatcttcatgtttacccggatccaaatccggctccgttacaacgtgctccttctcttttggatcgggtcaaatctatcaacatgtcttatttcaagttcccacacgacgtaaccgggtcg

SEQ ID NO: 96515 - DNA, 1013 bp, Arabidopsis thaliana columbia
  unsure (1)..(1013): unsure at all n locations
atggaacagggacacagcaggttatattattctttattgtctcccgatgcttgctcttcaacttgcggttgtgttgtccgagtcacgcctaaatggtggtagtggctcttatgtaaagctgccacacgacttcacaagaacgtattcccgagttattattgatcacgacgaggtggccttatgcacatatcctctactgagtaccatccttcttggtgtgtttgcagccggcctaacagcttacttgttctggcttggaaggcagatactgaaacttgtcattaacaagcgtttacagaagagagtatacactttgatattctcggtctcgagtttccttccattaaggattgttatgctctgtttgtcggttctcacaagcagcagacaagattatattcgaagccccttctttcttggccttcttctccctcttctgcttttgcgtggtacccacctgcttgcttgtctacttcccggtttcagattccatggccctgagaggtctaagagacacagatgatgaggatacggctgtgaccgaagaacgcagtggtgctctgttacttgcaccaaactcttcacaaactgatgagggattgagcttaagaggtcggagagactcgggatcgtctacacaggagaggtatgtggaactcagcctatttctggaagctgagaactaaaatcgccaaaggctgtttctatttggcttttggcaatgtacagattcctggtgaaacaagcagagagagagggataaagagtttaagtatgagaatatgtttgcgcaaaaaaaggcataatttcagttttgtggcaaagacactttgactgtaaaggagggtttaagggggtttactcttgtgagggtttgttgtttgaaatgttttctgcttgatggatcatatttttgtacctttaaaaaaaaccaaaaaaagnnnnnnnnnnnnnnnnnnnnnnnnnnnnnnnnnnnnnnnnnnnnnnnnnnnnnnnnnnnnnnnnnnnannnn

SEQ ID NO: 96516 - DNA, 922 bp, Arabidopsis thaliana columbia
  unsure (1)..(922): unsure at all n locations
nnnnnnnnnnnnnnnnnnnnnnnnnnnnnnnnnnnnnnnnnnnnnnnnnnnnnnnnnnnnnnnnnnnnnnnnnnnnnnnnnnnccacgcgtccgcccacgcgtccgaaatcgtgtcaaattttagggttttttcttttcgtacttcatcaaattctggaatctggttttttcttagttttcttctatatacctttgaatcgcatctttgatccaaattcattttagatatcaccttgaagtcgaatttgtgattttttcttttcctctcgaattctcaaagtctcacgcaactatgaaagaagacatggaagtactatcgctcgcttcactaccggttgggttcagatttagtccaacggacgaagagttagtccggtactatctccggctcaagatcaacggtcacgataacgacgttagagtaattcgtgagatcgatatctgcaaatgggagccttgggatttgcctgatttttctgtggtgaagacaacagactcagagtggctcttcttttgtcctttggaccggaaatatccgagtggaagtcgaatgaatagagctactgtggctggatactggaaggcgacgggaaaagaccgtaagatcaaatcaggaaagactaagattataggtgttaagaggactctagtgttttatacaggtcgtgctcctaaagggacacgaacttgttggattatgcatgagtatcgtgctactgagaaggatcttgatggaacaaagtctggccagaatccgtttgttgtttgtaagttgtttaagaagcaagatattgtgaacggagctgctgaaccagaagagtcaaagtcatgtgaagttgaaccagcggtatcgtctccaactgttgtggacgaggttgaaatgtctgaggtatctcctgttttccctaaaacagaagagac

SEQ ID NO: 96517 - DNA, 564 bp, Arabidopsis thaliana columbia
  unsure (1)..(564): unsure at all n locations
cggaatnaaccgggcccgacccgacgcgtccgcaagaaacacacacacaaatagcaaatggctaacatgatctttctcgtgtgcgcaacttttgccttctgcgtcctcctcaccaacgcctccatctaccgcaccgtggtcgaattcgacgaagatgacactaccgaccaagtaggcccattccgccaaccacagaaatgccagagggagtttcagcaagagcaacacctaagagcttgccagcaatggatccgccagcaacttgcgggatcacccttcagcgaaaaccagtggggtcctcagcaggggccgtcgctacgcgagcaatgctgcaacgagctttaccaggaagaccaagtgtgcgtttgccctactttgaaacaagcagccaagtcagttagggtccagggacagcacggaccattccagtccacccgcatctaccagatcgctaagaacttgccaaacgtttgcaacatgaaacaaattggaacatgtcccttcattgccatccctttctttcctgcttactaaatcctagtggtatcacacgatgatcatcat

SEQ ID NO: 96518 - DNA, 604 bp, Arabidopsis thaliana columbia
  unsure (1)..(604): unsure at all n locations
cggacacgtgggacgcgaacgagatcttttattgtactcaaggacaaacaaggattgaggtggttaactacaacggacggagcgttctggaccaacaagtgcaaaatggacagcttgtggtcattccacaaggattcacctatgttgtgcagtcccaccaaaacaacttcgaatggatttctttcaagacaaacgctaacgcgatggtcagcactttggccggtagaacctgggccttgagggcattgccactagaggtcataaccaacgctttccaaatttctctcgaggaagctagaaggatcaagttcaacacgcttgagaccactttgactcgtgcgcgcggtggacaaccccagttgatcgaggagatagtcgaggcttaagttaaaacgtttacttttactaataaagtagtgacatggttactattgtaatggtcagtttgtaatcatgtccactctaagtttttaacgtatgtgtaaaatatgtgtctaaagaacacgccggcacgtctcttgtatgtaacccttctcataaataaaaagggagtgtcgagttttnnaaaaaaaaannntaatnaaataaanattttatattattt

SEQ ID NO: 96519 - DNA, 560 bp, Arabidopsis thaliana columbia
  unsure (1)..(560): unsure at all n locations
caagattattccgataatgcagtcactctccaccccacacaccatctctcttcttctccccagaacctctccgtctcgtctttctccctctcttcactcccttgctttccccactcgattacggtctctttcctattcttctcaaacgtcgatcctccccgatgccggcgatgatttcattgtcggtgactgtctcgtctacgaggacggcgtcttcgaagacccttaccttgataaggaggtcactcaggttgcgaagcaggagcgcaagaagaatcggcgtggcggggctaagagattagatgaatccgagattgagcccgagaacctcgtgccagaggaatggagggatattcaggcggaggtgaatctgacgaagaaggacaagcgcaaatagcgcaggagattgagttcggggttcgggtggagaagaagaggcaagggctaattccgctgaggaaagttgacttgatgacttctcacgaaaaggancaattggccantgagctgtatttcgnaaacggaattttcgaganttgangcaagtggaaaccgtnntc

SEQ ID NO: 96520 - DNA, 471 bp, Arabidopsis thaliana columbia
gtctccgtcgccgtcgtagctcctccgcatcgttgcccattctctagtcatctgaatctgaacaagctttctcttcaaattcctagaaccggctggcggaggaaacagctagggtttgctttagcttctactgcggcttcagaatcgccatcggaagctacatatgatccggagctccgtttagttttcgagctcgctaccgattccgagttatatgagcttgagaaaatcctttttggtcccagctacttcagccctttgctgaaatcaatcccaaacaaaggaggaggtgaccggcttatgataggccaagacattgaagtgcgagatggttttatcgaagctcttgaatcgagattcttgtttctagctgcagatgctcgttcaacactcaggggttggaggccttcatacagaaacgtgttacttgcggtgagaaataatttgaatattccctgctccagccaattg

SEQ ID NO: 96521 - DNA, 485 bp, Arabidopsis thaliana columbia
cggacgcgtgggcggacgcgtgggcggacgcttgggctaccaccaatggcatacatctcccaatgtgtgtagtcgtgggtcactacatggaagtatccatgcctacacctgcaaacaccatatatgtttcttcattcgtctttcgaatctacaaaacttctcaaaccatataactagcaaagcttgaggttctgtaccttggcattctctggataagaccctcaccaaaatggttgtaagcaattgtaacttgcatcactttgtcccttgtgtatgaatcactatgccccagcaacataacctaaacaacacgcaaccgttactaaacccctaattctcaattccaataaaccctataaaatgtgaaactttagttatagagagtaaaaactctgtaaattaataactttagaaatataatattttattacttaataattaacaaaaagttattttatagaattgtagattttgatacatgtttt

SEQ ID NO: 96522 - DNA, 443 bp, Arabidopsis thaliana columbia
cacagatcggagaatctcctctgagagctctaatctctcagctttcttcaccggcgtctccggatctaataatcctgtaaggcctctactgcagaaaaaagattgaatttttacaatttggggtgactcaattttgttgactagagtgtttggagatatttctaactaaatgggaacaatgcaccgcagtggtgctcctcgaagaacgaatgaaaatgcaaaggttattattactactattttggggatagtgtttgggacttttattggtatcacattaccttcactttcgtttaagattaacttaccctcgcgccttatatcatctcttgatgtagccatatctggtgacaaatcccctgaagatttcggttcaagaaagtttcctgagatatatgttccaactaacccgcgttgtgcagaactactacctccaggaatcg

SEQ ID NO: 96523 - DNA, 788 bp, Arabidopsis thaliana columbia
  unsure (1)..(788): unsure at all n locations
caaaatatttgttaacaaaaagatttatatttcttctcttctttgttcataactaagaactcagaaagagaccaacgacactgcaaatggcggatgaatctccaaagtctatctacgacttcaccgtcaaggatatcggaggtaacgatgtgagtttggaccaatacaaaggcaaaactcttttggttgtaaacgttgcttccaaatgtggtctgacggatgcgaactacaaggaactgaatgttctgtacgagaaatacaaggagcaagggttggagatattagcattcccgtgtaatcagttcttaggacaagaaccaggaaacaatgaagagattcaacaaactgtctgcaccaggttcaaagctgaattccccatctttgacaaggtggatgtgaacggtaagaacacggcaccattatacaagtacttgaaagcagagaaaggaggtttgctcattgatgctatcaaatggaacttcaccaaattcttggtttctcctgatggcaaggtcttacagagatattctcccagaacctctcctcttcaattcgagaaggacattcaaactgcgttgggacaggcctcttcttaatcaccagaagaagaagtttcaagaactttcgtttggtccaaattatgatcttagaatcatcaacattgcaaacttattttctttgaattctatcattcttgttttaaataattgatgtattcgacgtcttttcatgggatgatatataatatattatcatgtgactctcgttcaaacaaaccnnnnnnnnnn

SEQ ID NO: 96524 - DNA, 659 bp, Arabidopsis thaliana columbia
  unsure (1)..(659): unsure at all n locations
ttnggccggccttgnccnggcgggtnccaagtgggcttggcccccccccccttnggtggcccnttttnncncaggcgggcccggncggaagtggcccaaatggcccccttgttcggggaccttcttagaccctcctgttaggaagaggaaccccgttgggatggagctcttaaggccgttcagaggcccaaaaaaaaccaagcattaaagctcaaagcttgatgaggtgggtgcaataagggttgctggctaaaaaagttgtagacattcccaattttgtattctgcactcgagtaggtgtcatggagactttagaagcacttttcaactcactgtagacagcttattaggttaaaagccccaactggtgaattcattccttgaagaagaaaggggaaatttgtgaaatgaagaagaagaatttagtatcataattgatttggtgtcagatttgtaacatttttcttggggtgttctattccatctcttttctgtctatatactcaatacaacacaaatcgttactattcatgtataataatttacttaccaattgatgttgttgaaaaagtaactgtcaataaaaaaaacaaagggcggccgctctagaggatccaagcttacgtacgcgtgcatggtacgtcatagtactctatagt

SEQ ID NO: 96525 - DNA, 486 bp, Arabidopsis thaliana columbia
  unsure (1)..(486): unsure at all n locations
cataaggcaacggnngagaagatgnnnagcattcttcacatttcgagtatgggacttgttatcggcagggaggcgtctaccatgccactttgcaacacgtgcaacaacagagtgatgagaccccaatggtgtgggagatacttctatacatgtacatcctttactcaccagattggcattaccgaagtacaatgcccacttttntnttcctctacggtgctgcctttgccatagtccatgcttacctcaggtttggaattggtttcaaggtccactacgtgntactttgccttctatgcatccctcggatgtacaagtactacattnacacagagggcacagcagccaaaaggattnngaaaatggtatgttgctacgntcttagtgggnaggcatatnctggttctntgncccgngttttttgaaaaanggtatctcagtgggcctctgaatccttcagggggcaannttcctttggnattntgt

SEQ ID NO: 96526 - DNA, 398 bp, Arabidopsis thaliana columbia
cggattgaaatttctggcggctctttcaaaggaaaattgtagatggtattcaaatacgttgaggaagaaagaaggtgacaaagaggaagacgaagaagaaagttgtagaaagtaatggtgttgtgggagttagctctaggaacagcttacttcttggggattaggcggacttaccggctcgcattgaagacccagcgtcggcttgttagccctaagcatccaaggattcgagattttatgcatcggaggacttatcaaatctttgatatggcacttagggtccacaagaacatacaacagagagacatggttattggtcggaatcttggaaactggattctccgggggcttgaccggatgaagccatcggctcaggttctactaccaaagaatacaga

SEQ ID NO: 96527 - DNA, 431 bp, Arabidopsis thaliana columbia
ccgagctggtggaagatgttctggtttggacagaagaagaggtgtattgttgaaaaaaccgacccgctgttgaagaaattgggttagaggttattgagaagcttcgagttaacggtttgagagagtttctttataaagaaggaagaatcgtctctcttaatctcggatcagctcctactgtgcatctaatgttcagttctccgttaaccaaatccacggctgagaaattccgaagccatattatgcaagcgtttgaggcagttcttgagtcacctgtcacaatagagatcagatgcgagacaaataaagacccgagaaacaacgtgcatcatcatcatcatcacccaactgtgaaagacaaaagcctgccacaatctttagcactcattggccatgattacaacatcgatggaaggtgaagaagtgagata

SEQ ID NO: 96528 - DNA, 438 bp, Arabidopsis thaliana columbia
  unsure (1)..(438): unsure at all n locations
caaagccgggagaagaagaaaatggcggtggcttctcttagtatttgcttctctgctcggccacatcttcttcttcgcaacttctctcctcgacccaaatttgttgctatggctgcaatgagtgaggatccaattcgtgaatggattcttacagaaggaaaagcaactcagataacaaagattggttctgttggtggtggatgcattaatcttgcaagtcattatcaaactgatgctggttctttcttcgttaaaactaacaggagtattggacctgcccatgtttgagggagaggctcttggtcttgaggctatgtatgaaaccagaacaatccgtgttccaaagcctcaccagcctggggaattgccaacaggtggatcttatatcatcatggagtttatagattttgcggacgcgtgcctccccccggcnnttcc

SEQ ID NO: 96529 - DNA, 470 bp, Arabidopsis thaliana columbia
aacaggacgaccctgagtactacactgtacatcattatcaagggctttgtgctgggtataagggtggcctcatcagagacctccgctttgacaatagagtgggcgatggcgagtttgttgaaccacccaaaagttttggacaaagtaaaattagagatcgacgagataatcggacaagaccgtttgatcgaagaatcagacatagcaaaccttccttacctccaaaacgtagtatccgagacactccggctacatccagcagcgccggttcttgtgccaagatcaacagcagaagacatcaagatcggaggatacgatgtgccacgtgacacaatggtaatggtgaacgcgtgggcgatacatagagatccagatctttggaccgaacccggagaggtttaaccctgagaggttcaacggtgggagaaggagaaaaagatgatgttcgtatgctgatagcgtttggaagc

SEQ ID NO: 96530 - DNA, 1079 bp, Arabidopsis thaliana columbia
cccggaattcctgggtcgacccacgcgtccgcgtcaaaccggttccaccaacggaactattatcttcggatgtgggtctaaacagtctggtcagctcggagagtcacaagctgcggttgatgggataatgggatttggacaatcaaattcatcgtttatatcgcagctagcttcacaaggaaaggtcaaaaggtcttttgcgcattgtctggataacaacaatggaggtggtatattcgccattggagaagtcgtgtcgccgaaagtaaagactacacctatgctctctaaatcagctcactatagtgtcaacctcaatgcaattgaagttggtaattcagttttagaactttcttcgaatgcttttgattcgggagatgacaaaggagttattattgatagtggtacaactctggtgtatcttcctgatgctgtttataacccgttactgaatgagatattggcttcacatccagagcttactttgcatacagttcaagagtcgtttacttgtttccattatacagacaaattagatcggttcccaactgtcacttttcagtttgacaagtctgtttcattggcggtttatcctcgggaatatctattccaagttcgagaagacacatggtgttttggctggcaaaatggtggattgcagactaaaggaggagcttcattaacaattcttggagacatggccctctctaacaagttagttgtctacgatatcgaaaaccaagtcattggatggaccaatcacaactgctcaggaggaatacaagtcaaggatgaagaaagtggagcaatctatactgttggtgctcacaacctctcatggtcgtcttctttagctattacaaaacttcttacacttgtttctctcttaattcctttcttctgtaacgttgctttatagtttcagataaaaaccctcttgggacaaagtttattccttctgttgtttatcattaaaggaactgattcccatttcttgaaaaaaaaaaaaaaaaagggcgaccgctctagaggatccaagcttacgtacgcgtgcgtgcgacgtcataaatcttctgata

SEQ ID NO: 96531 - DNA, 545 bp, Arabidopsis thaliana columbia
  unsure (1)..(545): unsure at all n locations
atctccctctctctctctttttctctctcacacgtttcttttttgtctctctccctgattcatcgccgtagctgtgtgaccgaacattgctgcgagttcctcaaaacccaaatctttcttcctcaaagactctgttttttctttcttcctttcttcaatggcgttatcgaaaaacagtaacagtaacagctttaacaagaagaaagtttcgtatatctcagtcccttctcagatcataaactctttatcatcttcctcattacaatctcttcttgtttctcccaagaaatcatcaagaagcaccaacagattcagcttctcttataggaaccctagaatctggttctttactctcttcctcgtctcactctttggaatgttgaaactcggttttcaacgttgacccaatctctctccctttctcacggtacccttgttcaacggcccaacaaccactaagcttcggcggggaacaaaacggtggatcccattttgggttggctaagnggcggttttgtttcnnggcatggattngatgnggtatc

SEQ ID NO: 96532 - DNA, 417 bp, Arabidopsis thaliana columbia
  unsure (1)..(417): unsure at all n locations
cccacgcgtccgctcgtgggctatatagaaaacaagtaaccaaagagagacgaagcaaaaacattcagagagaaaattcacaatttttgtaagctcaagcaacttgatccttcccaaaggggtttcctgagatcacaaagggccaagtatacaatggcgaaaggagttgcagttttgaacagcagtgagaggtgttacggggactatctttttcacccaggaaggcgatggtgtgaccactgtgagtggaacagtttctggccttaagcctggtcttcatgggttccatgtccatgctcttggtgacaccactaacggttgcatgtttactggtcccacatttcaaccccggtggtaaaacaaaacggtgncccctnagggtngtaatcggncaatgccttggnngntcttggggaa

SEQ ID NO: 96533 - DNA, 702 bp, Arabidopsis thaliana columbia
  unsure (1)..(702): unsure at all n locations
gggtcgncacgcgtccgatgcaatgagccacactaagctcataggtttttagccacacaccagaagacgacagaagggagagagaaaattcagcatttttgatagctcaagcacttgattctttccaaaggggtttcctgagatcacaaaggccaagtaacaatggcgaaagcgagttgcagttttgaacagcagtgagggtgttacggggactatctttttcacccaggaaggcgatggtgtgaccactgtgagtggaacagtttctggccttaagcctggtcttcatggtttccatgtccatgctcttggtgacaccactaacggttgcatgtctactggtccacatttcaaccccgatggtaaaacacacggtgcccctgaggatgctaatccacatgctggtgatctagggaaccatcactgtttggagatgatggnacctgccacctttcacaaatcaacttgattgccaagattcctcttacttggnccaaactctnattgtttggnagggcttttttnttgtccatgaaggcccttattgccccngggaaagggnggcattganctnagcctnggtnctttgaaacggaggcggccgttttcttngggataantnggttccagggtaaaggtntncggttcaaagaggggttnttnaanagggggcaccctagcctggttgaggtttgattntgg

SEQ ID NO: 96534 - DNA, 929 bp, Arabidopsis thaliana columbia
  unsure (1)..(929): unsure at all n locations
ggtgcacactatagaagagttatgacgtcgcatgcaagcaaagataagcgaagcaaaaacattcagagagaaaattcagcatttttgatagctcaagcacttgattctttccaaaggggtttcctgagatcacaaaggccaagtaacaatggcgaaaggagttgcagttttgaacagcagtgagggtgttacggggactatctttttcacccaggaaggcgatggtgtgaccactgtgagtggaacagtttctggccttaagcctggtcttcatggtttccatgtccatgctcttggtgacaccactaacggttgcatgtctactggtccacatttcaaccccgatggtaaaacacacggtgcccctgaggatgctaatcgacatgctggtgatctaggaaacatcactgttggagatgatggaactgccaccttcacaatcactgattgccagattcctcttactggaccaaactctattgttggtagggctgttgttgtccatgcagaccctgatgacctcggaaagggaggccatgaactcagcctggctactggaaacgcaggcggccgtgttgcttgcggcatcattggtctccagggctaaagctgctacgtttccaaagaagagattgatgtaataaggaggtccaaccttagacctgggtttggtagttgtgtgtatcttctggtgtgtggctaaaaacctatgagcttagtgtggctcaaagcatttttaattcagacagaaaacagagaaaattccgtacttttattatttcatgaataaaaaagagttgatttactgttaaaaaaaaaaaaaaaccccggaaannnnnnnnnnnnnnnnnnnnnnnnnnnnnnnnnnnnnnnnnnnnnnnnnnnnnnnnnnnnnnnnnnnnnnnntacaatctnnnnnnnnnnnnnnn

SEQ ID NO: 96535 - DNA, 783 bp, Arabidopsis thaliana columbia
ggagaagagtggtaccgaagagagtgaggttgaagagaagaaagacaatggtagtagcgaagagagtgaggttgaagagaagaaagaaaacagaggtatagacgagagcgaggagagtaaagagaaagatatagatgagaaagcgaatattgaagaggcaagagagaataattacaagggagatgatgcttctagtgaggtagttcatgagtctgaggagaagactagtgagtcggagaacagtgagaaagtggaagacaagtcgggtataaagactgaagaagtggaagattctgttatcaagagtgttttgcctaacacaacagataatggggaaagcagttgtgatgagaagagtactggttcgtcgtcaggtcatgaatcggattccttggagggaataaaatctgagggtgaatctatggagaagaatgagttgttggagaaggagttcaatgattctaacggtgagtcctctgtgaccggtaaatccacgggttctggagacggaggttctcaagaaacttctgaagtgtcatctcaagaggagagtaaaggcaaggaaagtgagacaaaggataaggaagaatcttcgtctcaagaggaaagtaaagacagagaaactgagacaaaggagaaagaagagtcttcatcgcaagaggaaactatggacaaagaaaccgaagcaaaggagaaagtagagtcttcttttcaagagaaaaacgaagacaaggaaactgagaaaatagagtcttcgtccctagaggaaactaaagaaaaaga

SEQ ID NO: 96536 - DNA, 978 bp, Arabidopsis thaliana columbia
  unsure (1)..(978): unsure at all n locations
acactatagaagaatttatgacgtgccatgcacgcgtccgtaagctcggaattcggctcgagagtttttgctttttcaaaaaattaaggaggaagaaacatctcgtttccatggctttgcgaggagatgagcatgagtttatgaacttaagagaatgggatcgaagagctcgattaatccgcgaaaacccgagttcaagaagattctcagcttcatacattggaagcttccgagaagatcaccacaagtcttcttttagaacaacaaacttcaacaacatctctagtactgcctcttctcctggctacactctcaaagaagagattgacccatcaacatattccttcaccaatgcactcaaagcattacaagcaaagacaatgtacaataacagggaatggttagcacaagaagggtttgcattgaattcgaagtggaacgtagcagagaaatatttctgcaatccattgtctggagaagtaccaatggagtgtttgtctgctaaaacattaagtgcaagatccttcagaaacttatcaaccatgtctgctcctcttcacttccctagtcccaatccattgatgaataatattgctcaaaacaaaccaaataataatcctaacgttagagtcattcacgaggatctttatgctcctgatcctgaacttcttgctctagcggaaaagaaagttgtggggatgaagcgagatgtgggcatacagagtacgacgtcggtggatcttagctccggtagccctagtccggcaaaaacggctccgattatggaaaggtcgttaaaacggcaacgtgggagcttgatgatttggccagtgggtatcaatntcaaagtgaaagggcaacaacaggntttgagtttggagggnangaaaaggtggtggggagcaagtttngcaccgaggggttttggnnngngngngggtgcagtttgtttagnggtttagggggggcggcnggggc

SEQ ID NO: 96537 - DNA, 1419 bp, Arabidopsis thaliana columbia
  unsure (1)..(1419): unsure at all n locations
tgcacgtaccggtccggaattcccgggtcgacccacgcgtccgcaaaagtttttgctttttcaaaaaattaaagaagaagaaacatctcgtttccatggctttgcgaggagatgagcatgagtttatgaacttaagagaatgggatcgaagagctcgattaatccgcgaaaacccgagttcaagaagattctcagcttcatacattggaagcttccgagaagatcaccacaagtcttcttttagaacaacaaacttcaacaacatctctagtactgcctcttctcctggctacactctcaaagaagagattgacccatcaacatattccttcaccaatgcactcaaagcattacaagcaaagacaatgtacaataacagggaatggttagcacaagaagggtttgcattgaattcgaagtggaacgaagcagagaaatatatctgcaatccattgtctggagaagtaccaatggagtgtttgtctgctaaaacattaagtgcaagatccttcagaaacttatcaaccatgtctgctcctcttcacttccctagtcccaatccattgatgaataatattgctcaaaacaaaccaaataataatcctaacgttagagtcattcacgaggatctttatgctcctgatcctgaacttcttgctctagcggaaaagaaagttgtggggatgaagcgagatgtgggcatacagagtacgacgtcggtggatcttagctccggtagccctagtccggcaaaaacgcctccgattatggaaaggtcgttaaaacgacacgtggaagctgatgattggccagtggatatcaatctcaaagtgaaaggtcaacaacaggatgtgaagttggaagagaaagaaaaagaagaagagaagcaagatatgagcaacgaaggagatgaagaagaagaagaagaagagaagcaagatatgagtgaagaagatgataaagaagaagaagacgaacaagaagaagaagagaagaccaagaagaagaagagaggacctggatgtttctcatgggtgagatcaagacaaagacaagcaagaaaatcaaagtatatcttccctatttgtgttcctcatcttgtcaaaggttgttgaaaaacctttaaaccgagagaatcaataaaggtttaaaggtttaaaccatcctttcaaaggttcctcttatttgtttctctttttcaatctattttatattatcaaaaacaaaatcatgatgatattatatttagttcttcctctttcatatagattcatcattcatgggagtgtcaaaagcttaaccatatgcttttgctccccttttctctaaaaaaaaaaaaaaaaagnnnnnnnnnnnnnnnnnnnnnnnnnnnnnnnnnnnnnnnnnnnnnnnnnnnnnnnnnnnnnnnnnnnnnnnnnn

SEQ ID NO: 96538 - DNA, 1518 bp, Arabidopsis thaliana columbia
  unsure (1)..(1518): unsure at all n locations
nnnnnnnnnnnnnnnnnnnnnnnnnnnnnnnnnnnnnnnnnnnnnnnnnnnnnnnnnnnnnnnnccacgcgtccgctcttcaccaactggcataagcagaagaagaagaagaagacaacgacgacgactttgaagaagaacaaactcttccttcaatctcaatctctctctcagatgggttgtggtggaactttgttctacccacttctcataactctctccgttgctctaatcacttacaacatcatcatctccgctaatgctcctctcaaacaaggcttcccaggccgatcttcttcctccgatatctccattgacccagtcatcgaattaccacgtggcggcggatccagaaacaacgatggtaaaaggataagacttttccacacggcggtgacggcgtctgattccgtctataacacttggcaatgtagagttatgtactattggttcaaaaagattcaagcttctgctggacccggttctgaaatgggtgggtttactcggatcttgcattccggtaaaccggatcagtatatggatgagattcctacttttgttgctcagcctttaccttctgggatggatcagggttatgttgtgttgaataggccatgggcatttgtacaatggcttcaacaaacagatataaaagaagattatattttgatgtctgagcctgatcatatcattgttaaacctataccaaatttggctaaagatgggcttggagctgcgtttcctttcttttacattgaaccgaaaaagtatgagaaggtgttgaggaagtattatcctgaagtgagaggaccggttactaatatcgatccgataggaaactctcctgtcattgttggaaaggatgctttgaagaagattgctccaacttggatgaatgtttctttggctatgaagaaggatcctgaagcagacaaggcttttggatgggttcttgaaatgtatgcttatgctgtctcatctgcattgcatggtgttagcaatattctacacaaagacttcatgattcagcctccatgggatatagaggttggtgacaagtacatcatacactacacttatggatgtgattatgatatgaagggtaaattaacttatgggaaaatcggggaatggagatttgacaaaagatcgtatgatagcaaaccaccaccaaggaaccttacaatgcctccacctggtgtttcacaaagtgtggtaacactagtgaagatgataaatgaagccacggccaacataccaaactggggatcataaagagacagagagagagaaaccgtaatctatatgtacctgtgagttgctcctttcttttcaaaataccttgtcctgctctttagtttctcctttggttgtggctaggtttgtaacatatatagtgattcaaacaaagcctttctttggcaaaaaaaaaaaaaaagnnnnnnnnnnnnnnnnnnnnnnnnnnnnnnnnnnnnnnnnnnnnnnnnnnnnnnnnnnnnnnnnnnnnnnnnnnnnnnn

SEQ ID NO: 96539 - DNA, 528 bp, Arabidopsis thaliana columbia
cgtggtgtgtggcgaatggtaaaacgacgaaggagaagcttcaggaaggtctcgactacgcttgtggcgaaggaggtgctgattgccgtccgattcaaccgggtgccacgtgttataatcctgaatcgttagaagctcacgcttcctacgcgttcaacagttactatcagaagaacgcacgtggagttggcacgtgtaattttggtggtgcagcgtacgtggtctcgcaacctcctaagtatgggaaatgcgagtttccaacagggcattgaaatggatatagagaagaagaggatcgtgcggatttatttacgttatttattttgatacattgttcttttgtcattcgagtatatgatttgcgtatatttatttttattattgtatatttggttggtttcatcggataaatagtcagattttctttcaaaaaaaaacaaagaaaaaaaaaaagggcggacgctctagaggatccaagcttacgtacgcgtgcgttcgacgtcataactcttctatagtgttacctaa

SEQ ID NO: 96540 - DNA, 443 bp, Arabidopsis thaliana columbia
aaaatcctaattccacctccgccaccgccttgcccaagggtcttgatgaggatcagagctctattcctcatcctacagggaagcaaatgcccaatcagatgcacaatgtggtcgtcaacaccatggcggttagggcaaaccctccgaggaagtcgactagcaacggtgtgagccagagtaatggtgtgaagcaacctagcagtgtacagcagcaccagaattcgacttcgagcgcatccaagactcgagagctggaagactcagccaccaagtgtcagattaaggcgatggccgcgagagcgctgtggaagctggcgaaaggcaattccaccatctgcaaaagcatcacagagtccagagctcttctctgcttcgctgttctgattgagaagggcgacgaggaggtcagatacaactcagctatggcgttgatggagatcacc

SEQ ID NO: 96541 - DNA, 457 bp, Arabidopsis thaliana columbia
gaatttatggcttaagatagtcttcaaagctacatacaaaactatattacaatttcgaagctgcccatggccatggcgttacagattatagcttcttcttcttcatcaccaacgattacaaaatctcaccttttctcttatcctcctctgcaatctcgttataaagcttcgaaacctaacctctcctcatggttttctcttctgggttcttctcggttctctccttacattggtttaaagcatttgggcatctcaatctcgccgaaatcttcaaacccagagaagaagagaagatgtaagagtatgatgattcgtgcgtctctgtttggtgttggagcacctgaggctttggttattggtgttgttgctttgttagtctttggtcctaaaggtcttgcttgggtagctcggaatcttggaaaaactctgcgtacatttcagccaacgattagagagc

SEQ ID NO: 96542 - DNA, 443 bp, Arabidopsis thaliana columbia
gttcatctaccaacaaatcctcaactccttcttcttcactaatagtataccacaaaacctcaaaattgtaatttattagattatcgtgatggccttagctaaagagttaatgggttatcctctcatcacagaaaggtcatcacttgtctcgtcggcgtcgcatttcaagaagaggacacagtcaacacagttctcgatcaacccttttgaccggagaccaagaaaaaccaaatccggcgtcgttgcagccatcagcgaggatttggtcaaaacgctgcgtttttccacaacgaccggagacagaaagagcgaagaggaggagaaagcggcggtgaagttcaaggtgagagctgtggttactgtgaggaacaagaacaaggaggatttgaaagagactcttgttaagcatttggatgcttttgctgataaaattggtcgaaaca

SEQ ID NO: 96543 - DNA, 367 bp, Arabidopsis thaliana columbia
ctagcggtcaactgttgtaattcactgcaattccatgagagtcgggagcatcagccgcgtcgccaacggcgaaaagcttcaattttggatcttccagactcttagccttggcgcagcagctgcgtgtatacaagccgccgctttcgtcatccttcgacgagagggaagagctgcttgcgtacaaggaaagcaccaggaaatcgataacccacgttgggtttcaggaatctatggctccggtgaggttcagaccgaagaaagctgctgtcttgatatgtctcttcgaaggagacgatggtgatttgcgtgtgattcttactaagaggtcttccacattgtctactcactcaggagaagtttctttgcc

SEQ ID NO: 96544 - DNA, 996 bp, Arabidopsis thaliana columbia
  unsure (1)..(996): unsure at all n locations
atgatcctccagcaactatacngactcaccttagggaaagctcgtacgcctgcaggtaccggtccggaattcccgggtcgacccacgcgtccgcccacgcgtccgctcaaaacaaaatttgtttgttcgtttgatctttcttaaaaatatgaaaattaacatcagagattccaccatggtccggcctgccaccgagacaccaatcactaatctttggaactccaacgtcgaccttgtcatccccagattccatacccctagtgtctacttctacagacccaccggcgcttccaatttctttgaccctcaggtcatgaaggaagctctttccaaagcccttgtccctttttaccctatggctggtcgcttgaagagagacgatgatggtcgtattgagatcgattgtaacggtgctggtgttctcttcgttgtggctgatactccttctgttatcgatgattttggtgattttgctcctacccttaatctccgtcagcttattcccgaagttgatcactccaccggcattcactctttcccgcttctcgttttgcaggtgactttctttaaatgtgggggagcttcacttggggttgggatgcaacatcacgcggcagatggtttctctggtcttcattttatcaacacatggtctgatatggctcgtggtcttgacctaaccattccacctttcattgatcgaacactcctccgagctagggacccggcacagcctgcttttcatcatgttgaatatcagcctgcaccaagtatgaagggtccctcttgatccatccaaatcaggacctgagaataacaaccggggacaatattcaaattaacacgagaccaggcttggtgccccaangngaaaccaaggngggatnggnacactggcagcaaaagcncaaatgantgttgnangcatgtgtggannagtgggaaaggccaagggtccaacggcaagggcgaacgnnatgaacgntgngggtacgc

SEQ ID NO: 96545 - DNA, 647 bp, Arabidopsis thaliana columbia
  unsure (1)..(647): unsure at all n locations
ctatgacgacgnctgcacgcctacgtaagctcggaattcggttcgaggaaggaatcaaaacttaaaaactatcagaatgggaacgttcttaggacactttgtgcctggtctctcacttgctcttcttggtctttggcatctcttcaacaccataagatcttactgtcttaaaggccctgaagctttctctgcaaaattctggttccctttccctaaactcaaacatcttgagcttatcttgattctcttcttctccttcctctccatcactctcctcaccctagatttccctaatttcaacttctcctctctcaaaccagacaacctagaacatgcttccatgttcctccacctcattatctttgcgtgtttcgctctcttctgcgagctaaccctttgctcagatctcttctccggtctaatcggagttctttctgcctctgtcttcgctcaagaactcttccttcttcattttnattccactgatcattcaggtcttgaaggtcactaccatttccttctccaactcattgctttcgtctccttctcctcggcgctagttcntgcttcgttccctaaatccttctntgcggctctattcctcccganatcggtaatgtttcaaggatgctggttcttgaacatgg

SEQ ID NO: 96546 - DNA, 527 bp, Arabidopsis thaliana columbia
  unsure (1)..(527): unsure at all n locations
nnnnnnnnnnnnnnnnnnnnnnnnnnnnnnnnnnnnnnnnnnnnnnnnnnnnnnnnnnnnnnnnnnnnnnnnncataaattggacagaacatatcaagcatgtaatatacagaagccgacaaattgcaaaatttacctaaaccccatcttacaccaccgtcagattctgatgtaagtattatcaaagctcaagaacaatcacatcatcagaatctaacttatatatcaaaggtccagaattttctccattgaagctggattctaaggaaagttatcaaaagttttgagagctttggatagtgaagctcaaagaactaaacaatgggcttcagagtttgtgttattgtcgtcttcttgggttgtcttcttctagtccctgagaaaacaatggctcaagaaatgaaacgtgcatcgatcgttatccaaggagctcgacgagtttgtgagaccgatgagaactttgtctgtgcgacattggactggtggcctcatgacaagtgcaactatgaccaatgtccttggggtta

SEQ ID NO: 96547 - DNA, 400 bp, Arabidopsis thaliana columbia
atcttctccaaatcatccaaccaccaaccaattccttacgacgtggatccgctttccggatacggaatgcgatcggagtcatcgtatctgccagcgacgattcataagaagccaagcatcgagtacatgagccggatcggatcggcaggcggcaaaatccctctaagcttgaaacggaaagtgctaagggttgttgtgacaggtggagcagggttcgtcgggtcacacctggtggaccggttgatggctcgaggagacaacgtgatcgtggtcgacaatttcttcacgggaaggaaagagaacgtgatgcaccatttcaataaccctaatttcgagatgatccgtcacgatgtagtggagccgatccttctagagggtgatcagatctaccatttggcat

SEQ ID NO: 96548 - DNA, 496 bp, Arabidopsis thaliana columbia
  unsure (1)..(496): unsure at all n locations
accccggtaattcaccatgttgagctcgctaagtggtcaagagacaatgacccgaacgcaaaatagagtcagaccaaacacagagggcgcctccacacaagaggaacccagacatctcaaaggccaaagagcttcttggttgggaaccaaagcgtggctctacgccaaaggactccctacttatggtcaaagatttccgtcaacgtgtctttggcgaccaaaagcaggattcttccaccacttcatcatcaacagagtaactgtcgctggagattctcgtttctcttcgttttcatttttaattttgatatttctattcctgtcaatgtagtgatattgaaacctcaccgattttaaagttttattttttttaatgcaatcaccgtagttttgagcttggaaaaaaaaaaaaaaaaaaaaagaaaaaaaaccttannaaataaaaaaaaaaaaaaaaaaaattttanaattatttttttatatattatatatattn

SEQ ID NO: 96549 - DNA, 849 bp, Arabidopsis thaliana columbia
  unsure (1)..(849): unsure at all n locations
gggaaggctggtccccttccaggacccggcccgaatttccgggttcgaccaagccgtccggggatggtggttgatatttctttcattggagggaagaagaccgtaatgcaccatttcagtaaccttaccttggagagaatccgccacaatgtggttgagccaattcttcttgaggttgatcaaatctaccatttggttggccttgtttatcctgttcattacaaattcaatcccgtcaagactatcaggacaaatgtggttggaacattgaacatgcttggtttggttaaccgagttggggctagatttcttctgacgagtaccagtgaggtctatggagatcctctgcagcatcctcaggttgagacttactggggcaacgttaatcccatcggtgttcggagttgctacgacgaaggcaaacgtacggctgagacgttgaccatggactatcaccgaggcgccaatgttgagggcaggattgctaggatattcaacacttatggcccaaggatgtgtatcgatgacggtcgtgtggttagcaacttcgttncccaggcattaagaaaagagcctttgactgtttatggtgatggtaagcagactaggagtttccagtttgtctctgatctggtggaaggtctgatgaggtttatggaggggagaccatgtcggtccatttaancttggtaaccccggtgaattaccatgnttcgagctcgctaaggggggtcaagngccaatttncccnaccgaaaagtagggtttagnccaaancaggggcggnccncanaagggnacccgnntncaaaggccaaggntttttgttgnnccaggggnttcgcaggt

SEQ ID NO: 96550 - DNA, 517 bp, Arabidopsis thaliana columbia
  unsure (1)..(517): unsure at all n locations
tacaggtcgactcagtctccggctagttcgactcggtaaaatcacgattactttctccttccatttatcacgatcgtggatccagaaactctgaaagatggcgtctgagctgacaaaccggcgacacgagatagagcaaccagaagcggaatcttattatccaaagccgataaagccatggttcgtagcgattcgtccgatccgttacatgctcagagaacagagactcgtcttcgtcctcgtcggcattgccatcgccacattaggattcacaatcttctccaaatcatccaaccaccaaccaattccttacgacgtggatccgctttccggatacggaatgcgatcggagtcatcgtatctgccagcgacgattcataagaagccaagcatcgagtacatgagccggatcggatcggcaggcggcaaaatccctctaagcttgaaacggaaagtgccttgggggggttttttttttcaaagtttgggtnaaggttttttgggggnaaaancntgg

SEQ ID NO: 96551 - DNA, 555 bp, Arabidopsis thaliana columbia
  unsure (1)..(555): unsure at all n locations
nnnnnnnnnnnnnnnnnnnnnnnnnnnnnnnnnnnnnnnnnnnnnnnnnnnnnnnnnnnnnnnnnnnnnnnnccacgcgtccgaatttgtgtttggtggaatattgaaagagtagtgatatggcaaattggaacaggtgttcggagttgttacgacgaaggcaaacgtacggctgagactttgaccatggactatcacagaggcgctaatgttgaggttaggattgctaggatattcaacacttatggcccaaggatgtgtatcgatgacggtcgtgtggttagcaacttcgttgcccaggcattaagaaaagagcctttgactgtttatggtgatggtaagcagactaggagtttccagtttgtctctgatctggtaatccccttttactttttcctccttaagttttcaaattcatgattagataaaaacaaggaaaagttcaattcatggtgtagtagccctacttcttcaaattttgccatgaccacatctttttcaattgttactttcatggggtatacttcagacttgacatggtaaaaacagaaaaca

SEQ ID NO: 96552 - DNA, 868 bp, Arabidopsis thaliana columbia
  unsure (1)..(868): unsure at all n locations
nnnnnnnnnnnnnnnnnnnnnnnnnnnnnnnnnnnnnnnnnnnnnnnnnnnnnnnnnnnnnnnnnnnnnnnnnnnnnccacgcgtccgtacggctgcnataagacgacagaagggaatcccattggtgttcggagttgctacgacgaaggcaaacgtacggctgagccgttgaccatggactatcaccgaggcgccaatgttgaggtcagaattgctagggtggtcgacacctatggcccaaggatgtgtatcagatgacgggcgtgtggttagcaacttcgttgcccaggcattaagaaaagagcctttgactgtttatggtgatggtaagcagactaggagtttccagtttggctctgatctggtggaaggtctgatgaggttgatggagggagaacatgtcggtccatttaaccttggtaaccccggtgaattcaccatgctcgagctcgctaaggtggttcaagagacaattgacccgaacgcaaagatagagttcagaccaaacacagaggacgacccacacaagaggaaaccagacatcacaaaggccaaagagcttcttggttgggaaccaaaggtggctctacgccaaggactcccacttatggtcaaagatttccgtcaacgtgtctttggcgaccaaaagcaggattcttccaccacttcatcatcaacagagtaactgtcgctggagattctcgtttctcttcgttttcatttttaattttgatatttctattcctgtcaatgtagtgatattgaaacctcaccgattttaaagttttattttttttaatgcaacaaaaaaagggcggccgctctagaggatccaagcttacgtacgcgtgcatgcgacgtcatgct

SEQ ID NO: 96553 - DNA, 1884 bp, Arabidopsis thaliana columbia
  unsure (1)..(1884): unsure at all n locations
atgannnnnnnnnnnnnnnnnnnnnnnnnnnnnnnnnnnnnnnnnnnnnnnnnnnnnnnnnnnnnnnnnnnnnnnnnnnnnccacgcgtccggtccgactcagttcccggcgagttcgactcggtgattgattttttcctagaaaaataaaatttcttcttaacgattgatcgattttggttttctatctttcgattctagatctagaattcaatttgtgaggtttggagatggcgagcgagctgatcaatcggcgacacgagacggatcaaccaaccgccgatgcttattacccgaaaccaatcaaaccatggttcacggtgactcgtccgatgcgttacatgctccgtgaacagagacttatcttcgttctcgttggcattgcaatcgctactttggttttcacaattttccctcgctccacacaatcaaccccttactcggatcctttctccggttacggaatccgacccgacgaatcgtacgttccggctatacaagctcagaggaaacctagcctcgagtacctgaaccggatcggagcaacaggcgggaaaatcccactgggattgaaacgcaaagggctaagagtggttgtgaccggtggtgctggattcgttggatcgcatctcgtggatcgtttgatggctagaggagatactgtgattgttgttgataatttcttcactggaaggaaagagaacgttatgcaccatttcagtaaccctaactttgagatgatccgtcacgatgtggttgagccgattcttcttgaggttgatcagatctaccatttggcttgccctgcttctcctgttcattacaaattcaatcccgtcaagactatcaagacgaatgtggttggaacattgaacatgcttggtttggctaagcgagttggggctagatttcttctgacgagtaccagtgaggtttatggtgatcctctgcagcatcctcaggttgagacttactggggcaacgttaatcccattggtgttcgtagttgctacgatgaaggaaaacgtacggcagagacgttgaccatggactatcaccgaggtgccaatgttgaggtcagaattgctaggatcttcaacacctatggtccaagaatgtgtatagatgatgggcgtgttgttagtaacttcgttgcacaggcactaaggaaagagccattgactgtttacggtgatgggaagcagacaaggagtttccaatttgtttctgatctggttgaaggtttgatgagactgatggaaggagaacatgtcggcccattcaacctcggtaaccctggtgaattcacgatgctcgagctcgctaaggtggtccaagagacaattgatccgaatgcaaacatagagttcagaccaaacacagaagacgaccctcacaagagaaagcctgacatcacaaaggccaaagagcttttaggttgggaaccaaaggtctctcttcgtcagggactgcctctcatggtcaaagatttccgtcaacgtgtctttggtgaccagaaggaaggctcctccgcagctgcaaccaccaccaagacaacttcagcttgagcaaatgcagaatctgagtagcagccactgcggctggtagtgggtttataacaaaattgcaagagcgtcgtttctttaaatttatttcgcttttgatttctgttttgataatcgtgtaaacgtagagtaagaatttggtacctttacttactactattcatggacctcactacagttttaaaagaaaaaagaacttctcttttgataaaaaaaaaaaaaaaaaaaagggcggccgctttaaaggattcccagcttacgtacgcgtgcattgcgacgtcatagaatctnctatagtgtgtnnnnnnnnnnnnnnnnn

SEQ ID NO: 96554 - DNA, 439 bp, Arabidopsis thaliana columbia
ctctctatctgtatcttcttcttcttcttcaaccttcagacttttctagttgcaactctcattcaattgttcaatttctctgtaaaaatcaaagctttttggaatctttcttcggcgagatatttcttcaccggcgcaagcttctcttgagcgtgattcatcactgggtttgcattttttcctggtgggtattcttcaaattgttcaaagctccgaccttttcttccttagaatctgattactggaatcttgaagctggagagactcgagtttatatggtttcaagcatcgttgagtcagtcggatgatgtgaaagtgctagagaatgtgaatatggttgtagataataacaattacaagacgcagattgagtttgcgggatcatcagttgctgcttcttcgaatccatctacaaacactcagcaagaaaaatcagaat

SEQ ID NO: 96555 - DNA, 705 bp, Arabidopsis thaliana columbia
gcggccgccctttttttttttttttcatgtaatctactttttatatttacgccaaaagaacacgaaatttacatgcgctgtaacaaaaaagttacccaatcatgaaagcaagaatcgaagagaaaaattatttaaaaagcaaaaagaaaacagtaagaaaaaggaaagggaataatggaacaaaaatgaaaaaaaattggaaggatgaaattaatcgaaagcagctcatccgattcccctgaggcgattatggtgtctcctccttctcactctcgctcttagtagtagtctttcttctccgatcgccgactaacctccggagctttcttcggcggtctctcctctctgttttctacttgaggtttctctcttctcttactttttttattctttgtgcatatctctcttctcttactttactcaccaaatttctaggaatactttttctcctgagatttgggcttttaatttagcttaattcttctgttaagtagaaatatatcatggcgaatctatgaaattatttcttctgttaagtagacattgaaatttgttacaatggcgaatcgtgttttttttttggtctgtctccattttttggtattgtctctaagaaaataagacgtttgtggtattcatttaaccctgcgattgtattttctgaactttggttactaacatatttaacttttgggaggcggtttg

SEQ ID NO: 96556 - DNA, 1819 bp, Arabidopsis thaliana columbia
aacgatacgtccctataaattagcaatgtcgctggttcgaacagtgacgatcgttctttttataatcgcgtttctgcaaaacctgcggctcagaaaagacagcaaagtattgttaagtctcgcggtgcttgcgacagatgatggacggtgttctgttatcgggatgcgtgttcttcgtgaaggaggaaacgcgattgatgcgtctgtggctgctgctctgtgtttgggcgttgtaagtcccgcgtctggactaggcggtggagcgtttacagtggttaagatagctggtgggaaagaaattgcttatgattctagagaaaccgctcctctaagagccactgagaatatgtatggaggtaatgttgacctaaagaagaaaggagccttatcagtaggcgttcccggggaagtcgcaggtctattcacggcttggaaacaacatgggaagctaccgtggaagcgttcagtgactcctgcagagaaacttgcagagggattcaagatttccaagtatctttatatgcagatgaacgcgactagaagcgatatcttagcagacaaaggtctctctgacctatttgtttcaaatggagagctcaagaggccagggacgatttgccataacccaaaattggctttaaccttgaagctaattggagagtacggtccaaaagcattttacaatggcacagttggggttaacctagcgagagatatcaaaaaatctggaggaataataactttgaaagatctgcaaagttatagagttaagattaaagaaccgttgtctgcagaacttcttggatatagagtccttggtatgcctcctccttcatctggtggcgctgcaatgatgcttgttttgaacatctttctcaatatgggatcatcagtgttcaggcctctcggtgttcatcgactaatcgaggctctgaaacatgcattcgcagttagaatgaacctcggggatccagatttcactgatgttaccaaggttgtttcggatatgttgtcgccaaagtttgcaaaagacttgaagagcaagataaacgaccaaaaaacttttgatccaaaatattacgggggcatgtggaatcagatcgacgaccacgggacaagtcatttatcgatcatagaccgcgagaggaacgctgtgtctatgactagtacaataaatggttactttggggcattgatgctatctccgagcacaggaatagttctgaacaacgaaatggacgatttctcaatccctatgaaatctaacggtaacttagatgttccaccaccagcaccagctaacttcatccgtcctggaaaacgacctttgtcctctatgtcacccaccattgtactcaaggacggtaaagtgaaagccgctgtgggtgcgagcggaggagccaacattattgccgggacaacggaagtttacttgaatcattttttcctcaagatggatcctctttcttccgtcttagctccaagaatctaccatcagctgataccaaacagagcttcgtacgagaactggacaacagtattcaatgatcatttcgagattcctaaagcaacaagagttgtgttggagaagaaaggtcatgtcctatctcctattgccggagggacgattgctcagttcatagttcaagaatccggtgagaactccggtggaagaagtgagcttgtggcagttagtgatcctcgaaaaggagggttcccttcaggatattgagaattttagatcgagatttattttatgtttttattgtttctttgattattgaaccgaactttgtgatcaatataattttatttcact

SEQ ID NO: 96557 - DNA, 636 bp, Arabidopsis thaliana columbia
agtcaggagaaacaaagtgcgaatttctttgacaagacctgagccttttcgtgaaattatagccatgtctgatgtgggatcctttacaggcattactggctctgcttgctttgtgtaaacgactcttccatcaaggaaaggaggcttcgtatcatgaaaaggctcaggtcttgtcaaagaaattcgggagaaacaaagtgcgaataattcacgacagcgattctggaagcttgcaggttctaatcttggtaatatccttggtattgaaaaatcagccgagcagattgatgccgatactgctgtagttggtgacgacggtgaagtagattttaaaggtgaggctaaatttccacaacatatgaagaagggagaagctgtgagtgaatttcccatgtcaaagaccatggcagagcaacggcagtatcttcccatatttcctgttagagatgaactattgcaggtaataagagaaaaccaggtgatagtggtggttggcgaaactggttcgggaaagaccactcaacttacacagtatctttccatgagggttggttacacttataaatggtatagttggttgcacccaaccaaggcgtgtagcagccatgagtgttgcaaagagagttagtgaagaga

SEQ ID NO: 96558 - DNA, 950 bp, Arabidopsis thaliana columbia
aaggcacaaaagcttgagcctccacgggggggggggccgttttaaaactaggggatcccccggcctgcaggtatttcgcgtttgccctatccctgattcacctctaggtccagacgcgtatcgagagtatgaaaccttacttgttcaggattacaatgaacatactaagaaaagcgacaaaatatctaaagacaaaggggtttctaagttctcttctgcacttgaatcccttactatggagcctattgaaagcgaaaatgtagatatttcatcaggtggtgcacaaggtttggttgtctcagttcaccacttccccttgattatttgtcctttcactcctcgagcgtttgtcttaccttcccaaggatcagtcgcagaagcgtccttgtcccgtcaacatgaggattctcttagttttggtttgcctcccataagtactggatctatgtctgacactgatgatgttcctcctggtgcaactcttaccgcacattttctttaccagctggcccttaagatggagttgaagttggaaatattttcacttggtgaccaatcgaagaatgttgggaagattctaacagacatgtcaagtgtgtatgatgtagcgcgtcgtaagcgatctgctggcttggtacttgttgaccgcacacttgatcttatcactcccttgctgtcacggggattcacttttcggatcgtatcttttcatctttgccttcggccagaaagattttcttcacaagcacagcttaaacaaggggtcccaagcatcaatcgtccttctcttgatgttcaagtgccgcttggggaactgcttaatgaagaaccaagcaagattcgggattctggtctttctgaaagaattgaaacttttttacgtggctgggattcatatacctctgctccacaaaatgtatgtttgtttaatgaatgtgacaagaaaatta

SEQ ID NO: 96559 - DNA, 522 bp, Arabidopsis thaliana columbia
  unsure (1)..(522): unsure at all n locations
nnnnnnnnnnnnnnnnnnnnnnnnnnnnnnnnnnnnnnnnnnnnnnnnnnnnnnnnnnnnnnnnnnnnnnnnnnccacgcgtccgattcgattcagaatcaaaccatttttgaagaaccctaaaagttctcttcttcccccaaatttgaatttgttcttgcaatcggattcgaaatccgaaagtcttagtctcgaatttgagctcaacagtttcttatggctccgaagaagtctgaaggaggcgctttgctttccgtttacagggatgaagatgaccaagagatggaagacgccgaggaagaggaagaagaggatgacaaccagagaaatcaggaggagagggaaaaaatatttgaagaagatcagggagaagaagcgaattatttggatgaagaagagaaaggaggaggaggaaaatattctaaaaccgccgagggctattagatggggggggggcttcttttaggcgtcagggggactcctcggtctttggagacgcaggatcatgggggcccggttggg

SEQ ID NO: 96560 - DNA, 373 bp, Arabidopsis thaliana columbia
catcgaaaagagttttctctgataatctttctcggacaagatggcacctgatatgaacaacaagttgagctacggagaaaagaagagagcgtacgttacgttcctcgccggaaccggagactacgtgaaaggagtggttggtctggctaaagggctaaggaaaactaaaagcaagtacccattagtggttgctgtgttacctgacgtgccggccgatcaccggagacagctattggaccaaggctgcgtcatcaaggagattcagccggtttacccaccggataaccaaactcagtttgctatggcttactacgtcctcaactactctaaacttcgtatttggaagtttgtagagtacagcaagctgatatac

SEQ ID NO: 96561 - DNA, 432 bp, Arabidopsis thaliana columbia
ctgcagtaccggtccggaattccgggttacccacgcgccgggcaacaaaaataatctcagactctcggtcaacggaatcgaagcaaaactctgcctctagttccgtagaattcaccggagactgaacaaaaatcccgtgagttttttagttttccgttacattctctgtctcaattctgaaacttttcacatgggttgtgctcaaatttcctttttaatggttgtcgagatttatctataaagtcaatgatctgggtttgatcaaagtctcaatctttctcttaaatttcgaatatttgatgatcccacgagttagtctctctaaatctgatctggctatgcttaatccgccacattgttgctctcaagctctggatttgattgtatcatgaaaagttatccaatttgatccgattaaggcttttattcctt

SEQ ID NO: 96562 - DNA, 1897 bp, Arabidopsis thaliana columbia
gcgagctaaagccaagagcagcggtgtcaaaaacctcatccgccgcaaaacccctaaaacctccggcaccggaactttctctttcttctatcactttcctttgactgtctctatcgagatttcaatcactgaatcgattgaatcttaagcaatgatgggccaagaagcagctccgacgggaccacccaacagagaactctacgcgctcctgaatttatcaccggaggcctccgacgaagaaatcagaaaagcttatcgtcaatgggctcaagtttatcaccctgacaagatccaatctcctcagatgaaggaagtggctacggagaatttccaacggatatgtgaagcatatgagatattgtcggatgagactaagaggctaatatatgacttatatggcatggaaggattgaattcaggattagagcttggtcctaggttgagtaaggctgatgagatcaaagaggagcttgaaaggattaagaggagaaatgaagaagctaagaagatggctcattttcaacccactggttctattctcttcaatttgtctgtcccacattttttagtaggcgatggcatcatgagaggaatggttatggctagtcaagtgcagtctcagttgtcaaaagatgatgcaattgccattggtggaaatttggcggccaatgaaaagtctggtggcggagtcgctactgccatactgagacgtcagatttctccagtgtcatccatagagtttgtcgcttcaacgggtttgcagtcgcttattggagtgcagacaacacgtcagttaaccatacattcaactgccacaatcaatatttcaaagtcgttgagtgatggctccatcaatcttaccaacacgtggactcgacagctttcagaaacttcaagcggaaatattgaactggcactgggtatgcgatcagcaattacagttggatggaaaaagagagacgagaatgtatctgctgctggtgactttaagattgaatctggtggactcggagcatcagctcgttatactcgtaaactttcatccaaatctcatggtcgcattgtgggtagaatcggaagcaatgctcttgagattgagctcggtggtggaaggcaaatttctgagttcagtacagtaagaatgatgtatacagtaggactcaagggtattttctggaaagtagagctacaccgtggtagccaaaagctgattgttcccattctactctccgcacatttagctccagtatttgcaactggagcattcattgttccaacatctctttactttttgttaaagaaatttgtggtgaagccatatttgcttaaaagagaaaaacaaaaggccttggagaatatggagaaaacttggggccaggttggggaagcaagggcaagggctgagaaagcccagcaattgctacaaaccgtagccacaaggaagaaaaaccgtcaagttgaaacagatgggctcatagtaacgaaagcgttgtatggtgacccaaaagcaatagagagaagaaacgaagaaggagtggaaggactggattcgggagtcattgacgtgacagtgccgatgaacttccttgtgagtgactcagggcagctcaagctccatgagggagtgaagaaatcagggatcatgggtttttgcgatccctgtcccggccaacctaagcagttatacattgcatacacttaccattctcagccatttgaggtaatagttggtgactatgaagagctgagtataccacaagaaggccagtgagagtatgaaaacggtactctccactttgttgtttttattaatacgaacgaatggcttctttcggggatttgtaactcttttacacattcatttctttctcaataaattaagcattcttgtttgcct

SEQ ID NO: 96563 - DNA, 551 bp, Arabidopsis thaliana columbia
ctctcatacgactcacttagggaaagctgctacgcctgcaggtaccggtccggaattcccgggtcgacccacgcgtccgctcgattatacagttttcctctctttcactctctccgtagtctgagactcgccggaaaagcttgtattggcttctcttcgatttctggcggaagtaaggatatcacgtgagctatgaagttcctcatgcaatccatttctgggaggaatcgatctctggttcgagctctagttagtcggcgttacttcgcttcatcgccggaggaaatcgcaaagagaaattacgccaacgatctgtcggaatacaacaccgctgtcaactccgtcacagctcagcgcaggcactatttgctgagggatgtttatgatgatatgaagcttgatggtgtgcagcctacagctgatatcttccattcatttgtcgtgggaacgatgaagggtgctcggttaagcgatgcgttctttttccgggaagaaatgaaagccatggggattgctccagatgtgaacttgtacaactttttaatttccac

SEQ ID NO: 96564 - DNA, 380 bp, Arabidopsis thaliana columbia
ccaacgcgtccgctcaagatctctctctgtctttgtcatcaccactctatcgtctactagagggaagagatcatcattcgacagtttcaagaagataccatttccaagactatccccctatctgcacttgtagtgaaactgtggaagaagcaaaaatggggactttgagtaaggtgctatgtctcatgctgctttgctgtatcgtggctgctgctgagggtactttgaagtacaaggacccaaagcagcctttgggtgcaagagtcagagatttgatgaaccgtatgactctacaagagaagattggtcagatggttcagatcgaacgcagcgtcgctacacctgaagtcatgaagaaatacttcattgggagtgttttg

SEQ ID NO: 96565 - DNA, 477 bp, Arabidopsis thaliana columbia
  unsure (1)..(477): unsure at all n locations
cgcggacggacgcgtnccgcacgnaagaagcagcatgcagcacgcacactttctcaagaaatctctctctgtctttgtcatcaccactgctatcgtctactaggagggaagagatcatcattctacagtttcaagaagataccatttccaagacttgaaactgtggaagaagcaaaaatggggactttgagtaaggtgctatgtctcatgctgctttgctgtatcgtggctgctgctgagggtactttgaagtacaaggacccaaagcagcctttgggtgcaagaatcagagatttgatgaaccgtatgactctacaagagaagattggtcagatggttcagatcgaacgcagcgtcgctacacctgaagtcatgaagaaatacttcattgggagtgttttgagtggtggaggaagtgtgccctcggaaaaagctactcctgaaactggggtgaacatggtcaatgagattcaaaag

SEQ ID NO: 96566 - DNA, 931 bp, Arabidopsis thaliana columbia
aaaaccctggacccttattctgctactctcatttgtagttgttaaactaaaataacccatttgtgttttaaatctaaaatggctagaaatttcgagctttctttgattctctttgttctgtatctgtccactgcagcaatagtcatggctagaaaccttgaagaggaatcaagtggtgatacagagttcattaaagcctcttgtgagacgacgtcgtacccagaccgatgcttccagtctctgtcttcatatgcaagcgagatcaagaagcagccacgtaagcttgctgagaccgcgcttgccgttagcatagcccgagcaaagtcagccaaaacctatgtatcagagatgactgattataaaggaatcacaaagaggcagcacgaggctgtagcggactgtctagaggagatgggagacactgttgacaggttgagcaattcgctgaaggaactgaagcatctggaggaaggtgacagcggagaagacttttggttctgtctgagcaatgtccggacgtggacaagcgcagcactgacagatgagaccgcgtgtatggatgggtttggagggaaggccatggctggggagctgaaaagtttaatcagaacacacattgtgagtgttgcggaagagacgagcaatgccttggctttgatcaatgactttgcttccaagcattgaaatcatttcaaaggggtttagtctttgggacaagagtttttctcgtattcaacactgcttgtgtttttttttctctctttaaagtttctactttatcttaacttatcatttttcatattatgcataaattaatctgtattaaaattaaaatacttcataattcatttcaaaaaaaaaaaaaaaaaagggcggccgctctagaggatccaagcttacgtacgcgtgcatgcgacgtcagagctcgtct

SEQ ID NO: 96567 - DNA, 726 bp, Arabidopsis thaliana columbia
  unsure (1)..(726): unsure at all n locations
nnnnnnnnnggtgtcactactacaagaatctatgacgaagctgtgcacgcgtgcgtgagctgggatcctatagaggggtcgacccacgcgtccgcccacgctgttcgatcaaagacaaaaaccaaacctctttcactattacacttttcctcaaaaaaaagaaaaatgtatttgttagtgtttaaactctttctatttttgtctcttcttcaaatctctgtctctgctagaaacctagcttcacaagaaccaaaccagtttcaactactcaagtaccacaaaggagctcttctctccggcaaaatctccgttaacctaatctggtacggcaaattcaaaccatctcaaagagcaatcatctccgacttcattacctcactcacacacacttctcctacgtccaaaactctccaccaaccatctgttgccacgtggtggaaaaccacagaaaaatactacaaactcgcaacacccagcaaaaactcatcacctctgtctctaactctcgggggacaaatcatcggcgggtcttgctctctaggaaaatctttaaccggtaaaaagattcaaaccctagcttcgaaaggggacccaacgcaacgccatccaacgtcggtttgacttcagctgacgttacgggtacaggatttggtatgagtcggtgcgggactagggcacgttggggtttggaannggggncaggttgttnatttgggtggnctttgg

SEQ ID NO: 96568 - DNA, 602 bp, Arabidopsis thaliana columbia
gcaccccccccgaggtcgactgtatcgataagcttgatatcgaattcgcggccgtacgatcaaagacaaaaaccaaacctctttcactattacacttttcctcaaaaaaaagaaaaatgtatttgttagtgtttaaactctttctatttttgtctcttcttcaaatctctgtctctgctagaaacctagcttcacaagaaccaaaccagtttcaactactcaagtaccacaaaggagctcttctctccggcaaaatctccgttaacctaatctggtacggcaaattcaaaccatctcaaagagcaatcatctccgacttcattacctcactcacacacacttctcctacgtccaaaactctccaccaaccatctgttgccacgtggtggaaaaccacagaaaaatactacaaactcgcaacacccagcaaaaactcatcacctctgtctctaactctcgggaaacaaatcatcgacgagtcttgctctctaggaaaatctttaaccgattaaaaagattcaaacccctaacctttcgaaaagggaagacccaaaccgccaaaccgcccaattcaaaccggttccggttttttggaacctttc

SEQ ID NO: 96569 - DNA, 410 bp, Arabidopsis thaliana columbia
cagacatcctaagaccggtgactggtacccatctttttacaaacctgttggagttctttactggcttcaacacagtgaaggggccaagcgtgtggattgggtcgttattcttgatgctgacatgatcattcgaggtcctatcatcccttgggtcctcggtgctgaaaggggaagaccctttgccgcccattacggctacttggtgggctgcgataacctccttgtgcggtggcacacaaagcatcctgtactctgtgtcaaagttggcggtcttctcgctatgcatatcgacgatctttgggtcttggcccctctctggctgtcaaagaccgaagacgttcgccaagatacagcttactggaccaccaatcttaccggagatatttacggtaaaggttggatcagtgaga

SEQ ID NO: 96570 - DNA, 599 bp, Arabidopsis thaliana columbia
  unsure (1)..(599): unsure at all n locations
atcctttcttcttatttctgagcaaagttttttcttcctttcatattgtgaggatgtccaaaaccaatatgaaattttgcaatagttattttctggtcgatccgaccaaagcaagttttcttgatctccttttgcttttgttttcctccaacctgaccagtgcaagattcatcgattctcctccggatacgcttaaaggcttccggagaagtttcgcgagtcgatggatccttgcgttggccatcttccttcaaaaagtattaatgctcttaagtaaaccttttgcattcattggtcaaaagctcacatattggctcaaccttcttacggcaaatggaggcttcttcaacttgatacttaaccttatgtcaggaaagcttggtcaagcctgacaaattctttgggcgacggaatactttctttttatagggtgctcaggtccggcggatttggagctttgccggggaaggtaaaatggttgggtacgnatcggatncaaattcgattttgtcaaaaaatgggtnctaagngcctnttattggggggancccttnnataactntccgtggnaaaaacantttgnnggtggccttggtggg

SEQ ID NO: 96571 - DNA, 707 bp, Arabidopsis thaliana columbia
tctctcaaatctcaaatctcaaaatctcaatttcttcaacaatgtcatcgaagaacggagttgttcgtagctgtttaggatcaatggacgacatcaaaaaagtcttccaacgattcgacaaaaacggcgacgggaaaatctccgtcgacgagctaaaagaagtgatccgcgctctctcaccaacagcatcaccggaagaaacagtaacgatgatgaaacaattcgatctagacggtaacggattcatagatctggacgaattcgtcgcgcttttccaaatcggaattggaggaggaggtaataatcgaaacggcgtaagcagttttgaaaggaagcgttttgagttatatgatttagatggtaatggaaggatctcggcgaaagagcttcattcagtgatgaagaatttgggtgagaagtgctctgttcaagattgtaagaagatgattagtaaagttgatattgatggtgatggttgcgttaattttgatgagtttaagaagatgatgagtaatggtggtggtgcttgaggatttgaaagatttcgccggagattagattagtcgacggtgatgattcgtattagcagattaattttagtgacggcgattaaaaaccctacaagtatgtggtgattgatgaatattgattttaactatataaggttgttcctatttcctcagctctcttcaatgtcaatatgcttt

SEQ ID NO: 96572 - DNA, 400 bp, Arabidopsis thaliana columbia
cccacgcgtccgtccagttcttctttttggcactcataggaataacagcgaaccaaggattttacttgttgggactggacaacacttcaccaacatttgcttcctccatgcaaaactctgttcccgccattacctttctcatggctgctcttctcaggattgagaaagtaagaataaacagaagagacggtatctccaaaatcttaggaacagctctttgtgtcgccggagcttccgtcatcaccctctataaaggtccaaccatctacactccggctagccacctccacgctcatctactcaccacaaactccgccgtcttagcgccgctaggaaacgccgcgcctaaaaactggacccttggttgcatctacctaatcggtcactgtctctcgtggtc

SEQ ID NO: 96573 - DNA, 596 bp, Arabidopsis thaliana columbia
  unsure (1)..(596): unsure at all n locations
ctctaccacgactcactatagggaaagctgctacgcctgcaggtaccggtccggaattcccgggtcgacccacgcgtgcgcacaaacacacacacacacagcctttttccttcgttgatcgattgttaagctcgatccaatggcggataacaccgataatcggagatccttatggggagttccggagaagcttcagcttcacatagcgatgctgacgttgcaattcggttacgccggattccacgtggtgtctcgagctgctcttaacatgggaatcagcaaactcgtcttccctgtttatcgtaacatcatcgccttgcttcttctccttcccttcgcttacttccttgaaaagaaggagagaccagcgattactctcaactttctcatccagttcttctttttggcactcataggaataacagcgaaccaaggattttacttgttgggactggacaaacacttcaccaacatttgtttcctccatgcaaaactatgttccggcattaccttttttatggntgctnttttagggtnngnaagnagggtaaccagnggggcggttttccaaaatnttnggccagttttgtntgcnc

SEQ ID NO: 96574 - DNA, 510 bp, Arabidopsis thaliana columbia
gtttgttatacaaaaaaaaaagagaagaagaagccagatgtctgagagttttataagtaacgaaaatgaaatcgaccgtcatgatgattttcctcattatctacctcctcatcgccgtgccttgcttcgctaaaggatcggagcaaacggattcagaggtgtacgagatcgattacaggggaccagagactcataactctagacctccaccggaaactatgcacggcaagccaccgtacatccaccataatacctccgccgctgggctcggtgctcatgtaggaggaaagaactagagagagagcgagaccctttccaaggagaagactcagaagttgaagaggaagattacgagagttgtgatatatatatgagtaattaatgatgttaattgatacaaatttatactttaattatttatcatatgaagatgatcatcgatgtgtgatcagtccagttagtgtgaatacccactactctcctgatggcatggccggctttaattattcc

SEQ ID NO: 96575 - DNA, 646 bp, Arabidopsis thaliana columbia
  unsure (1)..(646): unsure at all n locations
cccctcacccgctatctacacagccagtgtgagggaaagtcagatgcccagtccgatatcccaccagcaatttcgggaaagaccccgtgtccaaatgtgctaaaccggttgactgttaagccagtttgtgccccagagacatctgtaagcacttggagaccttanagccaaccattgagccctttgtctacanaatgtatanccaaccaatacagagagagttgaaggaaagaaattgtaagctgtgtttaaaatatgtgtgtgtgtgtgttagtttgaacagagacatttgtgggttagagtagtttcagatagataagagagaagagtctgtagagttgtgatgagtctcgggcaattccgtggctcattaaaaacgttcaggccaccggtcaccaccgaccattttaaccggttatggagaccgggattggtgggtctgaatgaagtcagtttaaggtttggttttgatttgtctttgtaatcaactaaagagggttcaggtttaggagaaaggagatcctatggtgacccatttctttcaaacctattgtcgtttcactttctaaaaaaaaaaaaaagggcggccgctctagaggatccaagcttacgtacgcgtgcatgcgacgtcatagatctctatagt

SEQ ID NO: 96576 - DNA, 588 bp, Arabidopsis thaliana columbia
  unsure (1)..(588): unsure at all n locations
atgatactgccnnnnnnnnnnnnnnnnnnnnnnnnnnnnnnnnnnnnnnnnnnnnnnnnnnnnnnnnnnnnnnnnnnnnnnnccacgcgtccgctcaccatatccacaatcctcaagctatctcctttgtgtccataatcgaaacgctttttgcgatttatcctaatcttttttctatcttctgctacaaatttggttcttttttggttgaatttggataaaatcataatctcctcttcaattttcttgtgaaatggaagtttcagtgattggaaatcctcaagcgaggatctgcagagcagaattagcttacagagagcttggatttagatttggctctgatgtaatctccggtgaatcgagaaatagggttagtttctgcaaccaaagctctaaatggaaagagatcgcgatacgttgctcttcgagatctgtcaaatgtgaagccatcgtctccgatgacgcttctccgtttctcaaatccactccaaaatctaaatcgctcgagagtgtaaaattatttgttgggcttccgttagacacagtttcagactgcaacaatgtgaatcacttgaaagctattacagc

SEQ ID NO: 96577 - DNA, 576 bp, Arabidopsis thaliana columbia
  unsure (1)..(576): unsure at all n locations
ggaatctctcatttgcctcctttatctttaagctcttatccttttgtctgctgcttctatgacccacatatgttggtcacttacaatcccccaatatttgctttggtgcaacaacagagtacgggaattacaaagaggaatacgaaggagacatgtattggagaagtgagtgcattgatggggagatgtcatggtttaatgcaggtgtaagggttggtgttgggataggacttggtgtctgtgttggtcttgggattggtgccggtcttctcgttcgtacttatcaatcaactaccagaaccttcaggaggaggcttctcctagtttagtaatacccccccttgcacctcttttttttaccttgcaattttgaaagaattctctttttttgtatttgggtgtgatgtgaatcaaccactttggggtggggttctgatggtactatttgttttgctgtaaataaaggaatgagagtgtagtttcttttgtaaaacaaaaaacaaagggcgcccgctctagaggatccaagcttacgtacgcgtgcatgcgacgtcaaaatnttntatagtgcaccta

SEQ ID NO: 96578 - DNA, 550 bp, Arabidopsis thaliana columbia
  unsure (1)..(550): unsure at all n locations
gcaattcctgagtatgaaactgcagagcctcagaaagacacctcctatgcacttgatcttcaggcaacaacagagtacgggaattacaaagaggaatacgaaggagacatgtattggagaagtgagtgcattgatggggagatgtcatggtttaatgcaggtgtaagggttggtgttgggataggacttggtgtctgtgttggtcttgggattggtgtcggtcttctcgttcgtacttatcaatcaactaccagaaccttcaggaggaggcttctctagtttagtaatatatacatttgcaccttttttttttaccttgcaattttgaaagaattctctttttttgtatttgggtgtgatgtgaatcaaacactttggtgtgtggatatgatggtactatttgttttgctgtaaataaaggaatgagagtgtagtttcttttgtattaaaaaaaaaaaaaaaaaaaaggctttaaaggatcccagcttacggaagggggcatgcgacgtcaaagctcttctatannnnnnnnnnnnnnnnnnnnnaatcg

SEQ ID NO: 96579 - DNA, 535 bp, Arabidopsis thaliana columbia
  unsure (1)..(535): unsure at all n locations
caggattttcnagccctgagtccccngnaccntagccccnngcccaaggcngggaccgggggggatcccctnganatcccccgggaaataaataagggccagngangcttaccacccccccggggtttttacctaccagtatgggggagttccggcctgtaaattgggttatggnccattttagattccnccagcctaccaacctagtagaagagaagacnctggaaaagacttttaccccaaaaaaaaaggngctgaataataaaagaagcttgtttgttgtggcngcttctgagtttggcnatgagttttttttttttttctgcatttgttgcttatgtgaattttgtttggcttttgaaaagtctttttaggggtagagacggtattgtagagaggataacaaatctttttccgccttttacgggtttttttttccatgtggggtgagtataaggttgtgagaatgcagagttgtactcctttttctgcttttttttttttttaatcaataaaaatagtttatgttatccct

SEQ ID NO: 96580 - DNA, 679 bp, Arabidopsis thaliana columbia
gcaaccacccaaaaacaatattacataacctatttctctacttcttcatacatttatagcaaatcctcttttgctttaaacccaccaaataactcagagcttttttgcattttttcccattctctattttgttttgtacttttggtctcactttaaaagatcataagttgaaagatttctgcagagaacaatatgttggaaggtcttgtctctcaagaaagcttgtccttaaactctatggacatgtctgtacttgaaaggcttaaatgggtacaacagcaacaacagcaactgcaacaagttgtgtcccatagcagtaataattcacctgaacttcttcagatacttcagttccatggaagcaacaatgatgagttgttggagagtagtttcagccaatttcaaatgcttggatctggttttggaccaaactataacatgggttttggtcctccacatgaatccatttcaagaacaagtagctgccatatggaacctgtggatacaatggaggttttgttgaagaccggtgaagaaaccagagccgttgccttgaagaacaagagaaaaccagaggttaagacatgggaagagcaaaagacagagaagaagatcaaagtagaggctgagacagagtcaagcatgaaaggaaaatcaaacatgggaaacactgaagcat

SEQ ID NO: 96581 - DNA, 468 bp, Arabidopsis thaliana columbia
cacatttgtaacactaattctcaaatcctaaacatgtaaccttcatcaccaatttcactcactaggtcttctattgctagaaaagcgtcgcttttctccttacctcttcacactcttagccttcattcttttcgtctctgtcctctatggtgaagattttatgcgcatctttggacagctcgtgcctaacttcgtcctcccgccttctcgaacacccgaaaagaataagaaatcggagaagcttgcgtttgctattggttaaacagaggaaagctgtgacgttttcagcggcaaatgggtgagagatgaagtctcccgaccacttgtatgaggaatgggagtgtccgtacattcaacctcagcttacatgtcaagaacacggccgtcccgacaaagactaccagttttggcggtggcagcctaatcactgcgatcttccctcgttcaacgcgtcactgatgctggaga

SEQ ID NO: 96582 - DNA, 1499 bp, Arabidopsis thaliana columbia
  unsure (1)..(1499): unsure at all n locations
atgannnnnnnnnnnnnnnnnnnnnnnnnnnnnnnnnnnnnnnnnnnnnnnnnnnnnnnnnnnnnnnnnnnnnnnnnnnnnnccacgcgtccggttttaattgaatattctctgttgcccttttttgaatctcttgttctgtctctctgataaaatctttgaaagaacaaacggagacagagagtgagagaaaatggcaatggttgctccaaaagaagggcttgtggttatggacaaggaatctgtttcttcagcttcatcggattctcatcttcgtctccaacctcactttcctgacttcactattcctgttaaagatttcttcaagtctagggaagcccgtgagtttcttagtggggctttagctggagctatgaccaaagctgttcttgctccacttgagactataaggacaagaatgattgttggtgttggatcgagaagcattccaggtagttttctggacgttgtacagaagcaagggtggcaaggtctttgggctcgcaatgaaatcaatatgattcgaatcattccaacgcaagcaattgagttagggacattcgagtgggtaaaacgtgcaatgacatcagctcaagtgaagttgaagaagattgaggacgcccagattgaaatccgtgattttagtttcagtccgtccatatcgggggtctctcctggtgctgtggctggtgcatctgctgggattgccagtacactcgtttgccatcctctcgaagtcctcaaggatagattgactgtgagccctgagatttatccaagcttaagccttgcaattccaagaatttttagagccgatggaatccgtggatttttacgctggcttaggaccaaccattggtcgggatgcttccttccagcacatgttattacttcatgtatgacaaaatgaagacctcatactgcaaatccaagaacaaaaaggctttaagccgtccagagatgcttgttcttggagctttagctggtctaacggcgagcaccataagcttccccttggaagtagcgcgcaagcggttgatggttggagctctgaagggagaatgcccaccaaacatggctgcagcaatagcagaagtagtgaagaaagaaggagtgatgggtctctacagaggatggggagcaagttgtttgaaagtcatgccatcttcaggcattacttgggtcttctatgaagcctggaaagatattttgcttgccgccaacaccaaaccactcatataatgacgaaattgtaacctaagttattattgtttctttaaagctaaagcctgtcatcacatttctaagttatgatttagggaatgtggtggcttggacatgagatgtttttttggcacctgggagtgttatgattcccatgagaagtagaagatgagttttttttaaaaaaaaaaaaaaaaagnnnnnnnnnnnnnnnnnnnnnnnnnnnnnnnnnnnnnnnnnnnnnnnnnnnnnnnnnnnnnnnnnnnnnnnnnnnn

SEQ ID NO: 96583 - DNA, 518 bp, Arabidopsis thaliana columbia
  unsure (1)..(518): unsure at all n locations
atgatatgccnnnnnnnnnnnnnnnnnnnnnnnnnnnnnnnnnnnnnnnnnnnnnnnnnnnnnnnnnnnnnnnnnnnnnnccacgcgtccgcccacgcgtccgcggacgcgtgggcccacgcgtccgaaaaaaagaaaggaattttctctgaaacgtcacgaacgtgtgaattgggttaaaaaattcatctcattgatccaaacttgaaaccctaatttcgaatctctttgctgatttggtgagatctcaatttcggaaagaagatgacgaaggatttcgcagttccacctgtagttttcccctccggtggatcttcaggcggtgctaatgtccagcaacgaagattcccagcgacaccgtttcaaccgccgcgtccctcttcttccgcaatccctttcatgtcattcgacattggatccgcagccgcgtcttccgctacacctgccggaccattcggcgggacaatcgctttctcttcttcttttggtggagggtcaccttcgtttgaagatgaggg

SEQ ID NO: 96584 - DNA, 513 bp, Arabidopsis thaliana columbia
ttttaggtgacactatagaagagtcttgacgtcgcatgcacgcgtacgtaagctcggaattcggctcgagggaattttctctgaaacgtcacgaacgtgtgaattgggttaaaaaattcatctcattgatccaaacttgaaaccctaatttcgaatctctttgctgatttggtgagatctcaatttcggaaagaagatgacgaaggatttcgcagttccacctgtagttttcccctccggtggatcttcaggcggtgctaatgtccagcaacgaagattcccagcgacaccgtttcaaccgccgcgtccctcttcttccgcaatccctttcatgtcattcgacattggatccgcagccgcgtcttccgctacacctgccggaccattcggcgggacaatcgcttcctcttcttcttttggtggaggttcagcttcgtttgaagatgaagagccattacttgacgagctcggtattcatccagatcaaatctggaagaagactagatcgattct

SEQ ID NO: 96585 - DNA, 892 bp, Arabidopsis thaliana columbia
gagcgaaaatgaaaagaatcagaaatggttttttgtaactgaagaggatatcaagagttgccaggtttccagaaccagactctgatagccgtcaaagctcctcatggcacaactttggaagtgcctgatccagatgaagcggctgaccacccacaaaggagatacaggatcattcttagaagtacaatgggacctattgacgtatacctcgtcagcgaatttgaagggaaattcgaagacacaaatgggagtggtgcagcaccaccagcatgcttgcctattgcttctagctcaggatctacagggcaccatgacatcgaagccttaactgttgacaacccagaaactgctattggggctcatgatcatcctcatcctcaacccggcgatacctctgatcttaattatttgcaagagcaagtaggaggaatgcttaagattactccctctgatgttgaaaatgatgagtcggactactggcttctctcaaatgctgagattagcatgacggatatttggaaaactgactctggtatcgattgggattatggaatagccgacgtgagtactccaccaccaggaatgggcgaaatagcaccaacagctgttgactcaaccccgagatgatcgaataccaagcacacttctcaacttctgatcccaaatgtgttacctcacaacactccctaaaatcatatacaaggagggagcaactacagaacgtgtatgaaccaatggcaggtgcgttccatacaatgtaccattagattatgattcatttatcgcctagagtgatgttgtagaggagcaccgaggaactaatgtaagtttaacagagaatgtacttcatcggctgcattggtacacatatttgattataatatttttgacc

SEQ ID NO: 96586 - DNA, 477 bp, Arabidopsis thaliana columbia
  unsure (1)..(477): unsure at all n locations
cagctannnnnnnnnnnnnnnnnnnnnnnnnnnnnnnnnnnnnnnnnnnnnnnnnnnnnnnnnnnnnnnnnnnccacgcgtccgaaaccttctttagcttcttccgtagctgacgtctctctctatctgtctcttaggtgcctctttcttttcttcaacgatttctctccccctcttgctttagctgatcgatttcgaaaaattgagcttgccaagtcaagcaaccagattttgttgggtgtatttactataggatccaaatacaatggatgaaaaccataggaatccatttgcaaatgcaagtacaagtgctagagcaagcggcagtacaagtgcgagctcaaactcgagttttagtagcagtgtggcggatacagatgatgatcacacccttgcccgtatattacctgaagatgagagcttgagaagagaaggcacgctggggaaagattatctcatttggattctatcccccac

SEQ ID NO: 96587 - DNA, 548 bp, Arabidopsis thaliana columbia
  unsure (1)..(548): unsure at all n locations
attctccggttgagtatagatgtaaagcatgtttagtgacgcttatctgttaccgtgttcttatgttcaacagctatagtggcaatcatatttttgagagagttgcggttgctactgtctcagaaatcgacgttcctaggtttttttaccacccttacaagtggtggtgtgctagggttttacttgtacaagatggtggtcaagagagaaaagggaccaaccttagaagatggcggagaagatgaatcaagcgatgggtttgtaagaagtgaaggataaagaaaaatggggtaagaggaagaagtgttgtcgtcaacatcagcatcatatatgccaaactcttttgatatctctttttaagttgtgtacaatttttgcgatcaatccttctaatttccgttgtatttggattagtgagtcgtttattaatatcaacaaaccaataaaaacgagaaaaaaaaaaaaccaaaaaaggnnnnnnnnnnnnnnnnnnnnnnnnnnnnnnnnnnnnnnnnnnnnnnnnnnnnnnnnnnnnnnnnnnnnnnnnn

SEQ ID NO: 96588 - DNA, 674 bp, Arabidopsis thaliana columbia
  unsure (1)..(674): unsure at all n locations
nnnnnnnnnnnnnnnnnnnnnnnnnnnnnnnnnnnnnnnnnnnnnnnnnnnnnnnnnnnnnnnnnnnnnnnnnnnnnnncggaccacgcgtccgaaacactattagatcatcacttctcagatttcgatattcccaataaataataaatactctcagttcttctcttctccaagaacaaaaaaaaaaaaatgaattcagaatcgctagaaaatcttcaccgtccattaatcgaatcatcgaagtcgttcgtcgattatcgtctcgagactgtgttaacagatcgagagttaccgtattttcgccggatttatctagcgatgatgattgagatgaagtttctctttcatctggcggctccggcgatctttgtttacgtcatcaacaacggcatgtcaattcttacacgtatcttcgctggacacgtaggaagcttcgaactcgccgccgcttcacttggaaacagtggtttcaacatgttcacctatggacttctgcttggaatgggaagtgcagtggaaacattatgtggtcaagcacatggagctcatagatacgaaatgcttggagtttaactccaaagatcaacagttgttctaatcctaacatgtctaccaatgtcatttctcttcctcttctcaaatccgatcctcacagcacttggagagccagagca

SEQ ID NO: 96589 - DNA, 584 bp, Arabidopsis thaliana columbia
  unsure (1)..(584): unsure at all n locations
cgtatgagggtcttaagaagcgcgaggtcgaacccatcaaggatttcgtcgaggagatgaacgataccgttgaccgtttgaccaaatctgttcaagaactgaagttgtgtgggagtgccaaagatcaagaccagtttgcgtaccacatgagtaatgctcagacttggactagtgcggctttgactgacgagaacacttgctccgatgggttctcgggtcgggttatggatgggaggatcaagaactcggttcgggctagaatcatgaacgtgggacatgaaaccagcaacgctttgtccttgattaatgcctttgctaaaacttactaatttaaaactatattttgtcctgtaaaatatatatatagataaatgtaatgtcttgctaagagtttgatgtgatatatttttttcgattttggtagtttctttttgttttgtaacgtggtttataatagtataatgtgtattttgagctataaagttgtttttaagaaaaaaaaaaaaaaagnnnnnnnnnnnnnnnnnnnnnnnnnnnnnnnnnnnnnnnnnnnnnnnnnnnnnnnnnnnnnnnnnnnnnnnnnn

SEQ ID NO: 96590 - DNA, 1093 bp, Arabidopsis thaliana columbia
  unsure (1)..(1093): unsure at all n locations
ctctcgtctctctctctgttaacaatggcgacgactagtttagtgaccggactaaaagtggtattaccggttatgttctgtctgatgctagcgactcttgtctacaccatcatcaccgatggccttcctttacctgatcgtcaagatgtcttcacaccatggttcgttacgacaattttggatttctacattaatcttgtacctatagcggtttggattgtgtataaggagtctacatggtctggttcaatactttggaccattttgctcatcatttttggcagcctcacgacatgtgtgtatctgtttctgcaacttctcaagctgacaaatcaagaagcttcagaagatcctatgtactatttgttacttcgagattcaatcaaggatggagttggtctgagagacaagaattcacttgttgtcacngcaagatttgtgtttggtgccttaggatgtgtgatgctaggagctttggtttacacttgcttcacttatggttctcctttccacatggagcttctatacccgtggatggtggttttattggttaacttctacattgatgttgctgtcttatcagtttgggttgtctataaagaaatctagtttgatcattcggaaattcctatggggttgctctcattgaataggtcttggcagcgcttggcacggagcgcagtcattgtcgtgcagctattccgtctgtctcctctcgacccgctctacctcgttctagtgaacaacagcaatcgggctggagatatgtacgagcgcactcattctgcggctttgcgcataatgtgaagctttgtcatttcatttttaacattttancacaaaagttcaaaaacatatttttatctacattttaagtttgnatggttcaaaagttttcctccggaaaaaactttcccctatgngacgncaattacttaanggaccttaaacttttttggggcacgccttggaaaaccncatatggggttgagactttttngngggcggggaatcctgaagcccggggggccccaaggncaaacnggcgcaccgggngnggcccancttggcccctaagggggggaatccgggc

SEQ ID NO: 96591 - DNA, 567 bp, Arabidopsis thaliana columbia
agaagaagttctaagatgcaaatgcatatagtataccatttattgactttatttcccctatgcgggagaaataacattaatgaaccagcagatattggaaaaacaacaattattgttaaccaaggaaaatcattcgtggtaaagacaagatacaccaggttccaaagaacgcgtactcaaaaaaaaatatataatttttatttttttaccttttttgagtacgcgtcctggccaataaaaaaaataaaaggtattcccaaatttatccaaatgaggttttcggtaacgtaccaataagctagacccatacttcgagttgtttcatgccataaataaactcgaacgccccaaaaaatccgttggacaggcggattcacatctcttacaaccaacacagtcctcggttcttggagcagaagctatttgcttagctttacatccatcccaaggtatcatttctaatacgtctgtagggcatgctcggacacattgagttcatcctatacaagtatcataaatttttactgaatgtgacataagatccatagttttttgaatgtcataaat

SEQ ID NO: 96592 - DNA, 521 bp, Arabidopsis thaliana columbia
  unsure (1)..(521): unsure at all n locations
nnnnnnnnnnnnnnnnnnnnnnnnnnnnnnnnnnnnnnngggcggccgccccgganctagaactagtccgactcgtggcccaaatttattccaaatgaggttttccggtaccgtatcaataagctagacccatacttcgagttgttgcatgccataaataaactcgaacgctcaaaaaatccgttggacaggcggattcacatctcttacaaccaacacagtcctcggttcttggagcagaagctatttgcttagctttacatccatcccaaggtatcatttctaatacgtctgtagggcatgctcggacacattgagtacatcctatacaagtatcataaatttttactgaatgtgacataggatcgatagttttttgaatgtcataaattttcaatctagtaaacttctaactgaatggtatattaaaatactagatgaagcaatgatttcctttaatagaatttttgtaatgaattttggctcaattcataaaaaatggggctaaaatactttgattt

SEQ ID NO: 96593 - DNA, 578 bp, Arabidopsis thaliana columbia
ccactcccttttgggaaggctggaccccctccaggtcccggcccggatttcccggtccgccccacccttcctgccggttgcaagaggccaccagagggggttatttcgaacccttcaagattttcttctctctatctctctgtttctctctgtttctgagatgggtttgtttggaacgaagaagatcgggaagtatgagataggaagaacaatcggagaagggaatttcgcaaaagtgaaacttggttacgacacgaccaatggtacttacgtagctgtcaaaatcatagacaaggctttggttattcaaaagggtcttgagtctcaagtcaagagagagatacgaacgatgaagcttcttaaccatcccaacatcgtccaaatacacgaggtgattggaaccaagacaaagatctgtatagttatggaatacgtttcaggtggtcagctttcagacagacttggaagacagaaaatgaaagaatcagatgctagaaaacttttccaacaattgattgatgctgttgattattgtcataacagaggagtttatcatagagatcttaagccacaaaact

SEQ ID NO: 96594 - DNA, 469 bp, Arabidopsis thaliana columbia
atgacattgttgagaaaaccggaaccagtgagcgtagttgcagaagaggaagacaagcctctttctgatgatttaactatggaggaaggagaacaggaaggtggaacatattcacagtatactcttttggagaagccagaagcgaggctccagcctgtcaatgtagaagaggaagttggagatagcggaggagtggaatcatctgagatagtaaacaactcaattcagaagccagaagcaaggccagagcttgagaacatagaaaagggaagttgcagatagcggagttttggaatcatcggagatagaaaataattcaattccaactgaaatgcagctcaatagcgagatgtcctctgaggagaaaactattaacagtgatccactcgagagaattccttcgaaaccaatttctcaaaccatcgtcgaagcttctttacaagggaaaccacaaagattagacccgtct

SEQ ID NO: 96595 - DNA, 430 bp, Arabidopsis thaliana columbia
cccacgcgtccgcccacgcgtccgccataaccgaaaccgagagaaaatatagaaaaagatgattgagacggttaaacacctgatcggctccggtggtcccagcggattcgggtcaagatccaccgccgatcatgtcacttgtaattctgatctccgttctctaactgccatcatcactggcgcgacgtcggggataggagctgagacggcgcgtgttcttgctaagcgtggcgcaagacttgtgcttccggctagaagcgtcaaaaccgccgaggaaacaaaggctcgtatactgtcggagtttcctgatgcggagatcatcgttatgcatcttgatctcagctcacttacctctgttcgtcgattcgtggacgatttcgaatctctcaatcctccactcaacatcctcataaacaatgctgggaaatat

SEQ ID NO: 96596 - DNA, 488 bp, Arabidopsis thaliana columbia
gcgtccgcgagtctcttgtttgttcttttgagattatttaacctgccccagcttcaagcagtcatcctctcaagaaggtaccgaagatggggaagtcttgaatatctagtcctctctatgtcaatatcacggttccacagctcaagctaggctcaagattctgagtgtcattacaactgtgtctgtgtctccaattatgggttgaatgcaatgaagaacccaaagggtacttacttagtcatcaaacaacttctgtaaaaaaacaaaaaaagtgagaaaacaaaaacacactttgttttctttgtatagatgcagaaaatgatctgtcttctgcttctggagattttatctccttattagtctctcttttctttcttcttttagcccttttagtttaatatagtaccacttagatttttttttctcggttatttttttccttgttgtacaaacccttttgcatatcgtcaagattccacattttcttc

SEQ ID NO: 96597 - DNA, 623 bp, Arabidopsis thaliana columbia
  unsure (1)..(623): unsure at all n locations
nnnnnnnnnnnnnnnnnnnnnnnnnnnnnnnnnnnnnnnnnnnnnnnnnnnnnnnnnnnnnnnnnnnnnnnccgggcgtgcgcccacgcgtgcgcccacgcgtccgcacatttccatttttctctcttccataaaacccaaaagaaactaggaagaggagtaaataatatttgttttaaagaaatgattctccacaaaatggcgttcttggccgttattctcttcttcttgataagcagcagcagcgtttgcgttcatagccgtgaaacgtttgcttgcgatacaaaggacgcagcaacagctacactgagattctgccagctttcagttcctataccggagagagtcagagatttgatcggacggttgacattggccgagaaagtgagcttgttagggaacactgcggcggcgataccacgtctaggaatcaaagggtacgagtggtggtcggaggctttacacggcgtttcaaatgtgggacccggtactaagttcggtggggtttaccctgcagccaccagtttccctcaagtcatcaccccggtgcttttttaatggccccttggggagaacctcggcgggttggtcaaagagggccgggcctgtccaacggggagttg

SEQ ID NO: 96598 - DNA, 566 bp, Arabidopsis thaliana columbia
atatcattgaagacattgtttctaattgccgtgacatctttaaaggatctgttaactacgcttggaccagtgttccaacttacccgagtggagtcattggattcatgctttgttcatctgaaggaccacaagtcgatttcaagaagccagtgagtctaatcgatactgatgaaagctctatcaaatcacactgtcccttgaagtattacaacgctgagattcactcagctgctttctgcttgccctcttttgctaagaaggtgattgattcgaaagccaactagaaaagagaagagaaatcatttgctttagagaaacttcatgtggaagtgataatatgatgatacaatgatcctttggaaaaaaataaagaagttttaatttttagaatgtaatgttctttcacctgcaatgttatgtgactgcactgagctatcaatctctttttaataagcattacacatataaacgatgcgtatcataagctttctttcgctgatggtgaaaaggagaatcttgataagagaaaaaagcttctttgtgggggcggccgttttagaggatcc

SEQ ID NO: 96599 - DNA, 827 bp, Arabidopsis thaliana columbia
cttttagcttcaaagctgtatttgaaagggtatatatctcacacacaaaacagatcagaagctaaaaggtaataatataatggcggatttgagggacgaaaaaggtaatccgatccatctaactgacacacagggaaacccaattgtcgacctgactgatgagcacggtaaccccatgtacctaaccggtgttgttagctccactcctcagcataaggagagtactaccagcgacattgcagagcaccctactagcaccgttggagaaacacatccggcagctgctccagctggtgctggtgctgccaccgctgccactgcgacaggagtctctgctggtactggagcaaccaccacagggcagcaacaccatgggtcgcttgaagagcatcttcgtcggtctggaagttcatctagctctagctcggaggatgatgggcaaggagggaggaggaagaagagcataaaggagaaaattaaagagaagttcggtagcggcaaacacaaggacgaacaaacaccagcgaccgccacaacaacaggacctgccactaccgaccaacctcacgagaagaagggcattctcgagaagatcaaggacaagcttccaggccaccataaccacaaccacccatgaacaccaatcatatgacgtctttgttacatgaataaatcgtttgcacgaatttcattagggcttatgaagaatcaatatatatgtctagtgaagtttactaaattttagttgtgtttgcttgcagtttgtgaatgtgaccatcgtgttatcatgttcttgtttatttataaagaaggaactgtattttgct

SEQ ID NO: 96600 - DNA, 490 bp, Arabidopsis thaliana columbia
ctgtggttgagaaattgaatggcaataccgttgaagggcgtgagataaaggttaacattacagagaaacctatagcatcatcacctgatttatcagttcttcagtctgaggattcagcatttgtagatagcccttacaaagtgtatgttgggaatctagcaaagactgttacaaaagagatgcttgagaatttgttttctgagaaagggaaagtagtaagtgctaaggtttcaagagtacctggaacttccaaatcccccgggtttggattcggtacgttttcttctgaagaagatgtggaagcacccattgttgctcttaacaattcgttgctggaaggacagaagattcgggtgaataaggcttagcctattggatcataaagaatgtgaaaaggatcgctttgaagagtttttgtaatgcaaatcattagagcttaggggatcatcttggattcattttaagttgaaaatgaaaccatatcttttcc

SEQ ID NO: 96601 - DNA, 508 bp, Arabidopsis thaliana columbia
ctcactgcacctgagatctaccatgactacaggtcaatcacaacgaagaacttcttagtatctgttagagagcatcttgagaagtgcggggatacatcagctcctatcatgagtggtgtgattgcttgcacgaagaaccatacactaaaggaactgatcttgatgttagacgcggagaagatccataggatatatgttgtggatgattttggtaaccttgaaggactcatcactcttagagacatcattgcaagacttgtccatgagccatccggctattttggagatttctttgatggtgttatgcctcttcccgaaaactaccgagtctgagagaaaaatggtatctttcttctgtaaattgtcttttgtttggtgataatgcttctgtctgtttgtgcttaagttctcgaaattgtgttattaacgtttaacagaaataagaaaagaagaaagagcctgtctttgagtgaatatgtctgaaatacaataactcttaagattaaaa

SEQ ID NO: 96602 - DNA, 607 bp, Arabidopsis thaliana columbia
agtagcaagagcaggagtgtgtcacctgctagatccattccccgcgttcacggccccttagtcgttctcgctcgctatacagctctgtctcaagatctggctcactgctacgagctggggattggatctagatgggtcatctacaggccgtccgggactggatttacaaagctggattagcatgaactcgaacttctgcttttacggtctggtctggtctggtactccgcgcgtatcagctgtaggatctgatcgcaaagttttggactatgattactctgattcctcaatatatctatctctttgacaataggggattctgtgttgagctcttttctaggacagcatttaagctcccgggactagatgggagatggtcagcaaatttctttgttatgccacacttacatggggtttttggtctcgctgcaggtcccaatcaagatcaaaatcaagatcaagatcaagatcgaattctccagtttcacctgtgatatctggttgaaaatgaaaactggccactggctgtacccgaatcgtctcaagcttctcaggctccactgctaatagaatttgattccgatttgggattattatactggtcttc

SEQ ID NO: 96603 - DNA, 402 bp, Arabidopsis thaliana columbia
agcgtatcaaatacccaatcacgcgatcttttctccgcctcttctccactccaaaattcttctccgtctttctcccgtcaccgtcgaataaagcctgagatctccgaattctgatcagcaactatgcattcaagtcatctccttctcgaggaaccgatcaggatgacttcaatcctcgaaccttctaaatcaagtttcttcccggctttgactaagattgttgggactctaggtccgaaatctcgatccgtcgaggtgattgctggttgtctcaaagctggaatgtccgtggctcgattcgatttctcttggtgcgatgctgattatcaccaggagacgctggagaatctgaagatagctgtgaagagcactaagaagctttgtgctgttatgctagacact

SEQ ID NO: 96604 - DNA, 2038 bp, Arabidopsis thaliana columbia
  unsure (1)..(2038): unsure at all n locations
agctctctacgactcactattgggaaagctggcacgcctgcaggtaccggtccggaattcccgggtcgacccacgcgtgcgcgtctttctcccgtcaccgtcgaataaagcctgagatctccgaattctgatcagcaactatgcattcaagtcatctccttctcgaggaaccgatcaggatgacttcaatcctcgaaccttctaaatcaagtttcttcccggctttgactaagattgttgggactctaggtccgaaatctcgatccgtcgaggtgattgctggttgtctcaaagctggaatgtccgtggctcgattcgatttctcttggtgcgatgctgattatcaccaggagacgctggagaatctgaagatagctgtgaagagcactaagaagctttgtgctgttatgctagacactgtaggacctgagttgcaagttattaacaagactgagaaagctatttctcttaaagctgatggccttgtaactttgactccgagtcaagatcaagaagcctcctctgaagtccttcccattaattttgatgggttagcgaaggcggttaagaaaggagacactatctttgttggacaatacctcttcactggtagtgaaacaacttcagtttggcttgaggttgaagaagttaaaggagatgatgtcatttgtatttcaaggaatgctgctactctgggtggtccgttattcacattgcacgtctctcaagttcacattgatatgccaaccctaactgagaaggataaggaggttataagtacatggggagttcagaataagatcgactttctctcattatcttattgtcgtcatgctgaggatgttcgccaggcccgtgagttgcttaacaagttgtggcgacctctctcaaacacaaatatttgcgaagattgagaatgaagagggactaacccactttgacgaaattctacaagaagcagatggcattattctttctcgtgggaatttgggtatcgatctacccccggaaaaggtgtttttgttccaaaaggctgctctttacaagtgtaacatggctggaaagcctgccgttcttactcgtgttgtagacagtatgacagacaatctgcggccaactcgtgcagaggcaactgatgttgctaatgctgttttagatggaagtgatgcaattctccttggtgctgagactcttcgtggattgtaccctgttgaaaccatatcaactgttggtaggatctgttgtgaggcagagaaagttttcaaccaagatttgttctttaagaagtctgtcaagtatgttggagaaccaatgactcacttggaatctattgcttcttctgctgtacgggcagcaatcaaggttaaggcatccgtaattatatgcttcacctcgtctggcagagcagcaaggttgattgccaaataccgtccaactatgcccgttctctctgttgtcattccccgacttacgacaaatcagctgaagtggagctttagcggagcctttgaggcaaggcagtcacttattgtcagaggtcttttccccatgcttgctgatcctcgtcaccctgcggaatcaacaagtgcaacaaatgagtcggttcttaaagtggctctagaccatgggaagcaagccggagtgatcaagtcacatgacagagttgtggtctgtcagaaagtgggagatgcgtccgtggtcaaaatcatcgagctagaggattagaagaagcagagtgagtcgttgtctcggtcttttttgttctgttactaatcaattttatttccttcactaaaactcttggtgccgtccaagaaaaatccttgcaatcattgtttctcgccggctatatgctagataccggagtgaaaatatatctcctgggcttttgttttcgtatttaggagattgatgtttccaagttatgatataaaccactttccactttaaaaaaaaaaacaaaaaacaggccgctctagaggatccaagcttacgtacgcgtggatgcgacgtnnnnnnnnnnnnnnnnnnnnnnnnn

SEQ ID NO: 96605 - DNA, 1079 bp, Arabidopsis thaliana columbia
  unsure (1)..(1079): unsure at all n locations
nnnnnnnnnnnnnnnnnnnnnnnnnnnnnnnnnnnnnnnnnnnnnnnnnnnnnnnnnnnnnnnnccacgcgtccgcccacgcgtccgtcatcactcaccaaacaactctcatcaatataaagagaagagagtggtagagttatatattacacacataaacttagatatagtagtgttatattcttgattaagtaataaagatgaaaggtggaagcatggagaaaattaagccgatattggcgataatttcactgcaatttgggtatgcaggcatgtacatcatcaccatggtctcgttcaaacatggcatggaccattgggttcttgctacataccgtcatgtcgtagccacggttgtcatggctccctttgctctcatgttcgagaggaaaattaggcccaagatgacactagcaatattctggaggcttcttgctcttggaatattagagcccctcatggaccagaatttgtactacataggattgaaaaacacatcagcatcgtacacttctgcctttaccaatgcacttcccgccgtcaccttcattctcgccctcattttcaggcttgagacggtgaactttagaaaggtccacagtgttgcaaaagtggtaggaacggtaataacggttggaggagcaatgatcatgactttgtacaaaggtccggccattgagattgtgaaggccgcacataattctttccacggtggttcgagcagcacacccaccggccaacattgggtccttggaaccatagccattatgggcagtatctctacatgggctgctttcttcattttacagtcatacacattaaaagtctatccagctgagctatcactagtaacgttgatatgtgggatagggacgatcctaaacgctattgcttcgctaataatggttcgtgacccgagtgcatggaaaatcggcatggattcagggacactcgccgcggtttactctggagtggtttgttcgggaatagcttattacatacaaagcattgtgattaagcaacgtggaccggtttttacgacgtcgtttagtcctatgtgtatgatcatcactgccttc

SEQ ID NO: 96606 - DNA, 566 bp, Arabidopsis thaliana columbia
  unsure (1)..(566): unsure at all n locations
nnnnnnnnnnnnnnnnnnnnnnnnnnnnnnnnnnnnnnnnnnnnnnnnnnnnnnnnnnnnnnnnnnnnnnnnnnnnnnnnnnnccacgcgtccggagaaagtaaatgggaaacgacgactgagactcttcttctccttctccttcttcttctacttatttcatcgtttcatttcttaggtttctgatttcatcacaacctctggatttgatttttgattcggaggtatataaaaaaatgtttagtggggtttgcgattcgatgaactagggtttgtaatttcactatcttcttcttctcttcgatcgtttactcatcgggtgagaaggaagcgtctttcatgtgttcttccgtgtaatcgactgttttattgggcttagtagctctagtttggtcaaagaattcgtaacaagtgaatcttagattgggaagatgctagaaggagcaaagttcaacgtgcttgctgttgggaatcatcacaacaacgacaacaattactatgcttttacgcaagagttttatcaaaaacttaatgaaggttcaaacatgtccatggagagtatgcag

SEQ ID NO: 96607 - DNA, 400 bp, Arabidopsis thaliana columbia
gctttctgcttcttccttcttcgtcctttgttttaattctctcatatcacttacgaaaagaagaaagaaaaaaaacaccaaaactaaagagaaatttcgttatcactctcttgccaaaactcacatacatataatcatatatcatcgcaaaatgtcttgcctagagatttataacaaagacacgatgaagaagaaagaaggagaagaagaaacaagagatgggacagtggattactatggtcgtccctctattcgttctaactcaggccaatgggttgctggcatcgtcattcttctgaaccaggggctggctacactagccttctttggagttggagtgaacttggtgctcttcctaactcgcgttttgcagcagaacaacgcagacgcagctaacaac

SEQ ID NO: 96608 - DNA, 664 bp, Arabidopsis thaliana columbia
ggtctcgcattagtgcaacttcagctgctgaagttgcaaagagaaatataatgggagttgagagcaacgtccaacctcttacttctccactgagcaaaatggtgttgccaccaactgcaaagggtaatgatggaactgcctctgatagcaaccctggtgatgttgcggctagtattggtagagctttttcaccatctattgtatctggttcgcagtggaggcctggtagtccctttcagagtcagaatgaaacggttcgtgggagaactgaaatagcaccagaccaaagagagaaattcttacagagattacagcaagtacagcaaggccatggtaacctcttaggcataccttctttatctggaggaaacgagaagcagttttcttcacaacagcaaaatcctcttttacagcagagctcttccatctctcctcatggaagcttgggaatcggagttcaggcaccaggttttaatgtcatgagttccccctccttacagcagcaatcaaatgccatgagtcaacaattgggtcagcaaccttctgttgcagatgtagaccatgtcagaaatgatgatcaatcccagcaaaacttacctgatgattcagcttccatagcagcttcaaaagctattcaaagtgaggatgacctctaaggtctatt

SEQ ID NO: 96609 - DNA, 463 bp, Arabidopsis thaliana columbia
cggacgcgtgggcggacgcgtgggcacaatatggttaagcttgctcatctcctcgtcgcagcgggcggggctctcctcggccgtgacggctgtctcgcaaggcagtcgctaggggttcctcctcaaatagggaacgcgtgtaacctcgataacttagacgttctccagcctaccgaaactatcaagagcgaggctggtcgggtcgagtactgggatcacaacaatcctcagatccgatgtgctggtgtctctgtttctcgccttataatcgaacaaggcggtctctaccttcctaccttcttcagctcccccaaaatttcctacgttgttcaaggaatgggtatcagcggaagagtggtccctggatgcgcggaaaccttcatggactcgcagcctatgcaaggacaacaacagggacagcagggacaacagggacaacagggtcaacagggtcaacaaggac

SEQ ID NO: 96610 - DNA, 497 bp, Arabidopsis thaliana columbia
  unsure (1)..(497): unsure at all n locations
cggacgcgtgggcaaaaagaaaatggttaagctcagcaatctcctcgttgcaaccttcggggttctcctcgttcttaacggctgccttgcgaggcagtcacttggggttcctcctcagctacagaacgagtgttacctcgacaacctagatgtttttctagccaccgaaacaaccagcagggaggctttggcggttcacagcaacaacaagaacagaaaaacttgtggagcgggttcgacgcacaggtcatagctcaagcattgaaaattgacgttcagttggctcagcagcttcagaaccaacaagacagcagaggaaacatcgttcgtgttaagggacctttccaggtcgtgaggccacctctaagacagccctacgagagcgaggagtggagacacccacgtagcccacagggcaacggccttgaggagactatctgcagcatgaggtcccacgagaacatngacgaccctgctcgtgctgacgtgtacaagcc

SEQ ID NO: 96611 - DNA, 277 bp, Arabidopsis thaliana columbia
ccgaattaccgatgcgaccacacatacaaatagaaaatgtgtaagctcagcaatctcctcgttgcaaccttcgttgttctcctcgtccttaacggctgccttgcgaggcagtcacttggggttcctcctcaactacagaactagcaccacctcgtgtcttcgtttccttctggaaatcattactttggataacatcgatcttcttctccgattattggatgcaatttattgattgaatttcagattttgaaggaggtgaagcatcgttatgtaattg

SEQ ID NO: 96612 - DNA, 886 bp, Arabidopsis thaliana columbia
cctgtttggctcaagtatgttcctggaatcagcttcagaacagataatgagccttttaagagagctgtgaaaggattcacagagagaatagttgagctgatgaagagtgagaacttgttcgagtcccagggtggtcccattatcctttctcagattgagaatgagtatggaagacaagggcagttattgggcgctgaaggtcacaactacatgacatgggcagctaaaatggctatagcaactgagactggtgtcccgtgggtcatgtgcaaagaagacgatgcccctgaccctgtgataaacacatgtaacggtttctactgtgattcatttgctccgaacaagccatacaagcctttgatatggacagaggcatggagcggctggttcactgagttcggtgggccaatgcaccatagaccagttcaggatctggcgtttggtgttgcacgtttcatacaaaaaggaggatcttttgttaactactacatgtatcatggaggaactaactttggaagaacagccggaggtccatttgtcaccaccagctatgattatgatgctccgatcgacgaatatggtttaatcagacaacctaaatatggtcacctaaaggaactccacagagctatcaagatgtgtgagaaggctctggtgtcagctgatcccgttgttacatcaataggaaacaagcaacaagctcatgtatactctgcagaatcaggagattgttcggctttcctagctaactatgatacagaatcggcagcaagagttttgtttaacaacgttcattataacttacctccttggtcaatcagtattcttccagactgtagaaatgcagtcttcaatactgcaaaggttggagttcaaacatcccaga

SEQ ID NO: 96613 - DNA, 913 bp, Arabidopsis thaliana columbia
ggtcaacaaggtcaacagggacaacatgtttaacagggtcagcagggtcaacagggacagcggggtcagcagcagcaagggttccgtgacatgcaccagaaggtcgaacatgttcgacatggagacatcattgccattactgcaggctcttcccattggatctacaacaccggtgaccagctcacttgtcattatctgccttctcgacattgccaactgccaaaaccaactcgaccgcggcccaagaacgttccgtctggccggaaacaacccacagggcggttcccagcagcagcaacaacaacaacagaacatgttgagcgggttcgaccctcaggtcctagcccaggcattgaaaatcgacgttaggttggctcaggagcttcagaaccaacaagacagcagaggaaacatcgttcgtgttaagggacctttccaggttgtgaggccgcctcttagacagccatacgagagtgagcagtggagacacccacgtggcccaccacaaagcccacaagacaacggcttggaggagactatctgcagcatgaggacccacgagaacattgatgacccagcccgtgctgacgtgtataagcccaacctcggccgtgtgaccagcgtcaacagctacaccttacccatcttgcagtatatcagactcagcgccacccgtggcattctccagggtaatgcgatggtgcttccgaaatacaacatgaacgcgaacgagatcttgtactgcactcaaggacaagcaaggattcaagtggtgaacgacaacggacagaacgtgctggaccagcatgtgcagaagggacagctcgtggtcatcccacaaggattcgcctatgttgtccagtcccaccaaaacaacttcgaatggatttctttcaagacaaacgctaacgcg

SEQ ID NO: 96614 - DNA, 380 bp, Arabidopsis thaliana columbia
cgggggcgtcccacgcgtccgaaactgtcccataggtttatgttacgaccggtacatttagggaagaagtgttcttttctcgacctcggggacgcgaagagacattgtctatcgctgaattaagttgtcctattttctcattcagtgtctctcttgttttctctaaaccttcatcgtagtaacgttggctgtttcgggtttctcaaaatcgtactcgagtggttcatttggatgccgatgctgtttttatagtcctacaaggtaaaggagtgatcgagtttgtgacggataaaacaaaagaatcgttccacataactaaaggtgatgtggtaagaatcccttctggtgtcaccaactttatcaccaacactaaccagacg

SEQ ID NO: 96615 - DNA, 1683 bp, Arabidopsis thaliana columbia
cacatcaacaaaacaacaagaaaaaatggcaatataccaacaaattaatcataacactgggttctccttatctggcgatagctgtcgtccactagggcttatccttccgtagtggagtatcgacgaagttcgagccaccacagcaatggagaacaatgaaggtcccccgtcgcccgtcctggtggtaggctctggcgaagggatgggaggatagagtcgacgaatcatccatatccacttcaggaagcggagtttcagtgatttggttccagtcaaaggaagggttttgtgagagtgctgcctaagttcacaaaacatgcaccggcttctcttccgaggaatcgtgtaactacagattctcgttggtggagatggagccaacaactttctttgtgcctcaccatttggatgccgatgctgtttttatagtcctacaaggtaaaggagtgatcgagtttgtgacggataaaacaattgaatcgttccacataactaaaggtgatgtggtaagaatcccttctggtgtcacgcggctttatcaccaacactaaccatacagttcctgttctgcctttcccagatcaccggtcctgtcaacaattcaggcaactacaaggattactttcctgctgtattccaatttcaacaattctactttaatgggtttaccaaagaagtcctctctaccagtttcaacgtgccggaagaattgctagggagattggttacgagatcaaaagaaattggtcaagggattatccggggaatttgtccagacgcaaggcaaggaacttgctgagcacgctacatctccttcaaacaaacacaaagccaaaaaagaaaaggaggaagacaaagacctaagaacgttgtggactcctttcaatctctttgcaatagatccaatctactccaacgactttggtcatttccacgaggcacatcctaagaattataatcaactgcaagaccttcacatagccgccgcttgggctaacatgacacagggatccttgttccttcctcattttaactctaagaccacatttgtaacgtttgtggagaatggttgtgcccgcttcgagatggctactccttataaattccaaagagggcaacaacaatggccaggacaaggacaagaaggaggaggaagatatgagttgaaaacgttacacaaagttgtgtcacgagtgtgtaaaggcgaagtttttatcgttccggcaggtcatccattcactatactctcgcaagatcaagactttatcgcggtagggtttggtatttatgcgaccaacagcaaaagaacgttccttgcaggggaagagaatttgctgagcaacctcaacccggcggcaactagggtaacctttggtgttggaagtaaagtcgcggagaaactgttcacgagccaaaactattcctactttgcacctacgagtcgtagccaacaacaaattccagagaaacacaagccatcgtttcaatcaatcttagactttgctggtttttgaaaatgcttttttacagtcctaagaaaggaaagagtttaagagtttaatataatctttgtgaagatatgcaataaaatatggtaacgctctgcatgtaacttctatgtactggtttcttgagttgtaaatttttatgtgacagttttaataaaaccaacggtttagttat

SEQ ID NO: 96616 - DNA, 2170 bp, Arabidopsis thaliana columbia
ggacatctcggtaatatcattgtaacatgtatagaccgacacccctaggctctcgaagaatccatgtcagcccacgcatgacacgcccattcttctcggccactcagcaatttttgtccgagaactgctgaaaaaactcggacacttttataccgccgccaccctaacgcctcgaagaactagcaaaaagaaaataggttaagcctcagcaattctcctcgtttgcataccttcgggggttctcactcgtggcttgagacgggctgccgtgtgcggagggcaggtcacattgagaggttcactcctcagctaccacgaacgagttgtaacctcgacccaacctagatgtttctccaagcccaccgaatactatcaagagtgaaagcccggtcagaatcgagtacctgggaaccaccaaccaccctcagcttccgatgtgttcggtgttatccgtcgccccggaatggaaattgaaacaaggggggtcttttacttttgcccacggttctttcacttccctcaaaaattttcctacgtcgtttcaaggaactgggtattcagcggaatgagtggtcccctggaatgtgcccgagacctttaatggacttcgcattcgatgcaatggacaacaactaaggctcaacccatgggcaagggacgacaggggacaacaaggcccaacgcatggggaaggacaggggacaacaggtgacaacaagggaagacaagtgccaaccatgggaaggggacagggaccaactagggaccaacatagtgtacgacagggaccaacaataggccaactcatgtggaagggaccagggaccacgcagtggacaaacaaagggttctcgtgacaatggcaccagaagggtggaacaatgttgagaacgcggagaccgtctttgccaacaaactccaggtctctgcccactggatctacaactcatgagaactttccactggtcatcaatcgctcttctcgacattggccaactaccaaaaccaacttgaacccgcaacccctagaggtgtttcatttggcccggaaacaaccagcaggggaggcttttggcggttcacaggcaccaacaggaacagaaaaaacttggtggagcgggttcgacgcacaagtcattagttaaagcattgaaaattgtacgttcagttggcttaagcagcttcagaacccaacaatgacacgcagagggaaacaactcgttcgtgttaacgggaccctttccacggtcgttgaggcccacctctaagacacgccctacgaggagcgaggagtggagacactccacattagcccacagggcaacgggccttgagggagaactatctgcagcatgaggtccccacgagaacattttctacctttgtttgtgcttgccgtgatcaagcccagcgcggggtctcgtgaccagcgtcaaccagctataccttgccccatctttggagtatggtcaggcttcagtgcccacttgtgggcgttctccagggtaatggcgatggtgcgttgctaaatacaacatgattgtttggcgagatctgggactgaactggacagacaaggaaggattccaagtgggtcaaccgacaaacggacagaacgggtttgacacaacaggtgcagaataggacagctcgtggtcatctccacatgggttcggaatacgttgtccagtcccacggtggcaatttagagtggtgtctgtttcaaaactaaatgaaaacgcaatgatcagcactttggcgggtagagacctcgctcttgagggcattgccaattggaggtcatatcaaatggtttccagaatctctcccgaggaagcttggtagattcaagttcaacacactcgagaccactctgacccacgctgtcttttggcaacaacaacagtttgatcgagggagattgtcggggctttaaatcaaaacgtttttctttttcttaaataaagtatggtcagtttgtaatcacgtccctttacctttaacgtacgtgtaaaatatgtgtctgccccccctcacttgtaataacactttcttctcaaaaatgagagggaagtttcgagttacaaactaaaaaaaaaaaaaaagggcggccgctctagaggatccaagcttacgtacgcgtgcatgcgacgtcatagctcggccatag

SEQ ID NO: 96617 - DNA, 1650 bp, Arabidopsis thaliana columbia
  unsure (1)..(1650): unsure at all n locations
atgatgatgctccagctctctacgactcactattgggaaagctggcacgcctgcaggtaccggtccggaattcccgggtcgacccacgcgtccgcttttgtcggaatctgacgtcagcatacctgctaccacttccagagttcaatcgatcttcgcctcgttgaaacgttttccctcttcgattatcaacagtgtctccactcgtatcatcaccgcctccaactaattttgccatctctctcgttgttccaatttgattctactagtgagctccgatttaatttagggttttgaaagatgtcagctttgaaaaattacggcttgatctccattgattctgccctccattttcctcgatcaaatcaattgcagagctataagagaaggaatgcaaaatgggtctctccaatagcagctgttgtacctaacttccatcttcctatgcgcagtctcgaggataaaaacaggacaaacacagacgacataaggtcccttagagtgatcacagccattaagacaccgtatttacctgatggaagattcgacctccaagcatacgatgacttagtcaacacgcagatagaaaacggtgctgaaggtgtgattgttggtggtacaactggtgaaggccaattgatgagctgggatgagcacataatgcttatcggccatactgtaaattgttttgggggaaggatcaaagtcattggaaacactggaagtaactcgactagggaagctattcatgccactgagcaaggattcgccatgggaatgcacggggcactgcacattaacccttactatggaaaaacatccattgaaggcatgaatgcgcattttcaaaccgttcttcatatgggaccgactattatatacaacgtgccaggtcgaacgtgccaggatatacctccccaggttatctttaaactctctcagaaccctaatatggctggggttaaggaatgcgttggtaataaccgagttgaagagtatactgagaagggaattgtcgtttggagtggaaatgatgatcagtgccatgattctagatgggatcacggtgccactggagtgatatcggttactagcaatttagttccgggtttgatgaggaagttgatgtttgaaggtagaaactcagcgttgaacgcaaagcttcttcctttaatggattggctattccaagaaccgaatcccattggtgtaaacactgctttggctcagttaggagttgcgaggccggtttttcggttaccttatgtgccattgcctctgtccaaaaggattgagttcgttaaactggtgaaggaaatcggaagggagcattttgtaggagacagagatgttcaggtacttgatgatgatgacttcatcttaatcggtcgatattagagtctcttccctgaagattggttgtgtttatactttcttcgttcagttgttagttatttagctgatgagaaactcacagatggatcaagacttctacttgttgtaatgtttggtctgttacttttggtgatgaatctaatggcttttgcttaaaaaaaaaaaaactaaaaaaaaaaaaaaagggcggccgctctagaggatccaagcttacgtacgcgtgcatgcgacgtcaaagctcttctattnnnnnnnnnn

SEQ ID NO: 96618 - DNA, 649 bp, Arabidopsis thaliana columbia
  unsure (1)..(649): unsure at all n locations
ttgnccnttgggggncangggccntttgnnaaannnagtttggggtggccccccattctttgggggaatttagccctgggttgttccaaagggntcnncanngttccttaaaccttnagaagtggtggttcaaattctctgtgggagnnttcctttgngggngnttgnatatnaaaggttcagcctttggccctaccttatgaggccaaagatggtgattggatnctcattggtgatgttccatgggagatgttcatatgtacgtgcaagagactaaggatcatgaagggatcagaagccaaaggtttaggctgtggtgtatgagatatatcttcaagaaatctaacagagacacaaaagaacttgaagaaaaatagagtttcttttggttcagagaaatctctgtctgtgcttgggttgtcgggtttctcgggcaagatctatgttcattggattgaatccaattcatagcctttatttacctcatcggtaaaattcaaatgtaaacatgcttaatggtcttaagcatatgaaactggaacctaattacattttgtttcagaaacagggcaaaaggttgtccttaaatctttggttatgtgtattacattaattaaagtgttatgatgattgaagtgtttttttttaa

SEQ ID NO: 96619 - DNA, 451 bp, Arabidopsis thaliana columbia
cgcaggtttttgtctgctcaccaaatcaaaccaatttctcctgatagccaaagtttttgtccccaacaagaaactcatgcaacattcttcacccactagctaactaacgacttccattcttattaatctctctcaattcttcatttctgagattcatcgctctctcttctctttgtcacaatgaatttcaattcttcttacaatctcactttcaatgacgttttcttctcttcttcttcctccggtgaccctatggtttcacggaggctgtttctcttgagagatgttcagattcttgagctccttattgccattttcgtctttgtcgcaatacatgccttgcgtcagaagaaataccaaggtcttcccgtgtggccgtttcttgggatgcttccttctctagcttttggcctcagaggaaacatatacgagtggctatccgatgttctct

SEQ ID NO: 96620 - DNA, 586 bp, Arabidopsis thaliana columbia
gtcatctctaacaggtcggacgagagatagagagagagagagaggaagaggaaggatagatttaccgcatcggcgttccaaaaggcagacgaactcggagagacagatagcgatagcgagacatggtttctcattgatttttgtttgacaatcctttcttttcttttttttttgtcctttcgaaaaacgaaaattttcgttggttccctccgatttggcctgctggtgaagatatggccggagctaaagattcgggttgcgatgatgatctccgaattgctggtggatgtgaccctggaaaacgcgggaacccggaggattcctcgtctcctgtcgaagtctcgtgctcgatttgcctcgaatcggtgctcgatgatggtaccagatccaaggctaagctccaatgtggtcaccagttccatttggattgcattggatcagcatttaacatgaaaggagccatgcaatgccctaactgtcgcaatgtcgaaaagggtcagtggttgtatgcaaacggttctactcgcccctttccagagttttccatgggaggttggatccctgaagaagctttacggttaaggtt

SEQ ID NO: 96621 - DNA, 483 bp, Arabidopsis thaliana columbia
ggttttttcgtttttgttaacttcgccgtgtagttgtggtggtgagattgtgagagatatggaggcggagaaaatggaattgaagctctacaacacgatgacgcaacagaaagaagttttgattccaatcactcctggcaaaatcggattatacgtctgtggtatcaccgcttacgatttcagccatatcggccatgctcgcgccgccgtttccttcgatgttctttacagatacttgaagcatttggattatgatgttacttttgtccgcaatttcactgatgttgatgacaagattattgatcgtgctaataagaatggagaagacccgttagatttgagtaatcggttttgcgatgaatatttggtagatatgggtgctctgcagtgcctccctcccacccaccagcctcgtgtcagcgaacatatggacaacatcattaagatgatagaaaagatcattgagaaagattgtgggtatgt

SEQ ID NO: 96622 - DNA, 841 bp, Arabidopsis thaliana columbia
atcctatggatgttgaatataagaagaatacaagtgtttccatctgctcttctgctaaaagcagccaagaatgcgcattgctccagaccatggaagtccagagggttgctgaaagtaccgaattcaagctgagtggagagaggagagatgatgtggcagcatcaatggctctgcggatcgcgggctcatctggtcaagcgagaaaagttgattttgacttcaatctgaagacagacacagcaagagcagttacaggggagatggttgaagagcttgatctgtcaagccatgaggttactgtgatagctgagatgatagatgaactgataatgaagctgaaggctaatcgaagcctgcctaatgcaaacagtgtatatcagtccaaggatgaagaagctggagaatcaatgaagtcagagatatcagcggactactaccatcgggtctcctcaaacgaggggtcacggctcggctgctgctgcgaggcagtagagtcattgttgtcctccgttcctggattcatgctcaatggtgtcaaacaagcagtcggaggatctgaagacggagctgaatgtgatagagtcacaatataaccaatcgtgtcaacgactgcttagaatgaaagaggaagctatagagaaggcgaaacggaagtggatgaagctgagttgatgattccttcatttcatttaacgtagccacagttttgggatttactcaactttttgttttgtttctttgccttttatttcatttctcgtagcttttggttacatgtaaaaatatgcattgcatcaggaatcacagattgaaagaatgaaatgtatttgacgctaattca

SEQ ID NO: 96623 - DNA, 556 bp, Arabidopsis thaliana columbia
  unsure (1)..(556): unsure at all n locations
tccgngctcgttaatgcccattcncatcagctnntntcagcactgccggtatctgncctgtatctggcgattgaagtcccacngngtttcaggcactgtgctggtgcatcaccagnggaagggtttaatcgttgggaaccgatcaagagggtgatgattcagtaatcactgctaatgtgcctttgaacaacatgtttggctactccacttctctccggtccatgacacaaggcaaaggagaattcacgatggaatacaaagaacattctgctgtgtccaatgaagtccaggctcagctcgtcaatgcttacagcgccagcaaagctactgaataagcaagcccttcaatccaatatattatggtttgttttctcataatgttcacttacaacatttatttatacggttcacacaaccatcaaaatcactcaacataaacatgcctgatgggctatgtcagaaaatcacttatgtttactgggccattagggtcgctaataaaaatagtggaacgattagctgtaaaaaaaaaaaaaaaaaaagggcggccgctcta

SEQ ID NO: 96624 - DNA, 880 bp, Arabidopsis thaliana columbia
ccgagctggtcaattcggtagagttacagggtacgtggaaccttttccaccaggctctaaagagaaatttgagtttgaaaacatgattgttggacaagcaattccgtcgggttttattccagcaattgagaaaggtttcaaagaagctgcaaactcgggctcactaattggtcaccctgtagaaaatctcagaatagtattgacagatggagcttcacacgctgtagattccagtgaacttgcgtttaaaatggctgcaatatacgcattcagactgtgttacacagcagctagaccggtgattctagaacctgttatgctggtcgagttgaaagtaccaacagagtttcagggcactgttgctggtgacatcaacaagaggaaaggtataatcgttggaaacgatcaagagggtgatgattcagtaatcactgctaatgtgcctttgaacaacatgtttggctactccacttctctccggtccatgacacaaggaaaaggagaattcacgatggaatacaaagaacattctgctgtgtccaatgaagtccaggctcagctcgtcaatgcttatagcgccagcaaagctactgaataagcaaacccttcaatccaatatattatggtttgttttctcataatgttgacataatttatttatacggttcacacaaccatcaaaatcactcaacataaactgcctaatgggctatgtcagaaaatcacttatgtttattgggccattaggtaggtcacattttttggtatccaccagtcccaatcattgtgataaaaaaaaaaaaaaaaaaaaaagggcggccgctctagaggatccaagcttacgtacgcgtgcatgcgacgtcatagctctactgagtgt

SEQ ID NO: 96625 - DNA, 528 bp, Arabidopsis thaliana columbia
  unsure (1)..(528): unsure at all n locations
cagctcagagacagaagaggatgatcaagaaccgtgaatccgctgctaggtctcgagagaggaaacaggcttatcaggttgagttagagactttggctgccaagttagaggaggagaatgagcagcttttgaaggagattgaagagagcactaaagagagatacaagaagctcatggaggttctgattccggtcgatgagaaaccaaggccaccgtcgaggcccttaagcaggagccattccttggaatggtgaagtgtggtaaaaaaaacttttgtatgtaaaaaaaataaaaacatatgggcttgattactatattataatctatatagtaaagtgatggtgatatggttagtacttagttacctgtaatgtatctaagggatgtaatggataatacatagctttttgctgatttataagatatctatggacctaannaaaaaaaaaaaaaaaaaaaaaaanacccccnnnnnnnnnnnnnnnnnnnnnnnnnnnnnnnnnnnnnnnnnnnnnnnnnnnnnnnnnn

SEQ ID NO: 96626 - DNA, 801 bp, Arabidopsis thaliana columbia
  unsure (1)..(801): unsure at all n locations
aatgannnnnnnnnnnnnnnnnnnnnnnnnnnnnnnnnnnnnnnnnnnnnnccaatttttaaacctttagctcacaaaaaaaccacgcgtccgcaaattataatccttgaatactttggctatggcggtgtttatgtttaatgatcaaaaagctctgttttttatgcaagcgtgggtataaaatccagttccttttccgattttttgttcttccttcttcttcacttcctttttttcttctccatttctcaaaaaggccactcctttgcttatctttctctctctctgcagctgaagaacagagaaaaagggttttttattgtctgacccaaaggacccagtttcaattcagctcttgttgttagaaattgaggtaaaagattcaaaatttgttcagaaaagtggcacagattctgaaaaattaatatctttcttctcactcttttagctcgattctaagcttaaatctggtttagggtttttggagtttgtactgataaagcatgatcctttttgtcttccgttgactgattctgttccttttctcaatatattgatttgggcttctctttgtcttcatcgaatcattggtcttcaaggtgaatgtgtttgtgtagtggcaagtcttgttggtttgtagtggttttgatcttggagattttctgattagtgagtggtgttcatcaagtattagaagaagatggatttaagtgcgaaagatgagttttcagcagagaagaggaatcctgataactatgattctgttaataatccgtctggagattggcgagttgattcata

SEQ ID NO: 96627 - DNA, 499 bp, Arabidopsis thaliana columbia
  unsure (1)..(499): unsure at all n locations
atgannnnnnnnnnnnnnnnnnnnnnnnnnnnnnnnnnnnnnnnnnnnnnnnnnnnnnnnnnnnnnnnnnnnnnnnnnnnnccacgcgtccgaacacatctcatttctccgctgtttcgtcggcaaattttcccatttttgattccgaagataatagatattatcaacagaggataaggataaaacccagaacaatcattataatttagtggtgaagttgaccaaatttataaactgatccaattttaaaatctaagagatatggagaacatggacgatttctcaccggagaatgttttagcaccaccaccaccacctcctccaatgaagaagtcaacgcatctgtttatgcaaagaagcaatagctttgtttctaaagctacgagagattcatgggatcgtatgttcgacgaagctcatggagctgatgttttgattcatactgatgattatggggttgatttacccacattctaatggcatcggaatggcttcagat

SEQ ID NO: 96628 - DNA, 453 bp, Arabidopsis thaliana columbia
ctctctttctttctctctctctctccatctccctctctttctcttgcttttgttgtcactcatctttgttctctattataggtgccattcaagaaaatcgaatataaaccctactacttcgatcgatgttcatatctgtctttatttcaaccaaccaacgaagataggataaaaacatatccacaaaggctagaaaccatgcgaaataaccattcccttcgtctccaattgtggttccgtacactatttactgttggtgtagtcactcttcttatgatccgtgcgtttgtattacaaaacaacaaggaggacgacaaaacaaaagagattactacagctgtgaacatgaacaactccgatgccaaggaaatacaacaagagcttgaagatggttcaaggaacgacgatcttagctacgtagcaagcaaaagaaaagtgcctcgtggacctgat

SEQ ID NO: 96629 - DNA, 744 bp, Arabidopsis thaliana columbia
taaagatttcagccaagaaagttttctttatttttggtcggaccaaccaacttccctttttggtaggatggcttattttccctacagttcccaaaaggcccaatcttttcgacttggaggcgggggtttcaccgcgaaaattcctaccttcagccattcttaacgccggtgtggaggggtcttaggggatcaagtgcaaaatggaaaattgtggtggccccccatgctataaagagcgctcccattcatgggaattccaaagggcttgaatctctcctcttacccatcccttgaggcgaattaaagttgatctccatatgaacggtcatgatcattgcttgcaacatctaagcacatcacaaagcccaattcagtttctaacgagtggtggtgggtcaaaggcatggagaggctattacaattggacaacaccagaggatatgaaatttttctacgatggacaaggtttcatgtcagttaagatcactagatcagaattgagtgtcgttttttatgatgtctccggcaatagtttgcataagtgggacacatcgaaaatgttagactcggatttttatttcccattgtaattcacatgaaaatcagttaaagcacataaattctacatataaataaatatgattactatgagtggctaacaaaaaaaaaaaaaaaagggcggccgctctagaggatccaagcttacgtacgcgtgcatgcgacgtcaagcttgtctatagtgta

SEQ ID NO: 96630 - DNA, 830 bp, Arabidopsis thaliana columbia
aagaaccttcacttttctctcccactctttcttttactactctcacacatatctctgtctatatatcactttacataaacgactattccacacacaaacacacatagccatggcctcttctttctcttcacaagccttcttcttgctcacattgtctatggttttaattcctttctctttagctcaagctcccatgatggctccttctggctcaatgtccatgccgcctatgtctagcggcggtggaagctcggttcctcctccagtgatgtctccgatgccaatgatgactccaccacctatgcctatgactccaccacccatgcccatgactccaccacctatgcctatggctccaccaccaatgcccatggcttcaccaccaatgatgccaatgactccatctacaagcccaagcccattaacagttccggatatgccttcgccgccgatgccatccggaatggaatcttcaccttctccaggacccatgccaccggcaatggcggcttcgccggattcaggagctttcaatgttagaaacaacgtcgtaacactttcatgcgttgttggagttgttgcagcccattttctcctcgtttgaaatgattattgaattggtcagcctcgatcgttttcttgtaatttaccttcatttttttccctcaaattattagtggtcatcattttataatatttgagtttgtgtttgatgtacgattcagacatttgtttgcattatgtgcttaataagtttatcgttgactctacttgaagagagactttgtatgtgatgtaaatttcttctatctatggaacattgcattcgt

SEQ ID NO: 96631 - DNA, 629 bp, Arabidopsis thaliana columbia
  unsure (1)..(629): unsure at all n locations
gggngggggggtcttggagttggtgccttccgtagatctanggaggaagcaagaggaacggaagccgtcctcctcatttctgcaagagcagtggtggtgttgctcgtcacattcttcagcaactccagaccatgaacattgttgacctcgacaccaagggtggaaggaagatcacatcaagtggtcagagagatctcgaccaagtcgctggaaggatcgcagctgctgtctaaatcatagcgactgatggtcaactccaagtttaaggtttatgtttgagatttagtaatggaatgaagttgcatttgatgaaaaccagtagtagaattccctctcatttttgttttgatggagttttcgtttacaaattgcctctcctttttattctcagcgacttaatggccttatatatttgagttttcatcttttgacctcctttcccttccagaatcagctacataagaacataacggggacgaacatactaactgaaatcaagtctaagaaaagaaaacctacaaaaataaaaaaggggggggcgcttttaggggtcccaaatttacgatcccttccttgcccggtggtggtttttttatatggtgccctaaattaaattatttggcctgggt

SEQ ID NO: 96632 - DNA, 2450 bp, Arabidopsis thaliana columbia
  unsure (1)..(2450): unsure at all n locations
nnnnnnnnnnnnnnnnnnnnnnnnnnnnnnnnnnnaggacgcgtgggaaaatcaaaagtgttacgattcggtatcatcgtctctacccgtccggattttgtcaaaccctgctctcttttctccaagtgctctcatggtgcttccgctcttccggcgcgctgcgatcgcccggacttcctcgcttctcagagctcgtcttttcgctcctgcctccgaattccattctcgcttttctaatggactataccacttggacgacaaaattagtagcagtaatggtgtgaggtctgcctctatagacttgattacaagaatggatgatagttctccaaagcccattctgcgatttggcgtgcaaaacttttcatctacaggacccatatcacagacggttcttgcaatgccagccttgtctcctactatgagtcatggaaatgttgtaaaatggatgaagaaagaaggtgacaaggtagaggtgggtgatgtactatgtgagatagagacagacaaagccactgtagaatttgagagtcaagaggaaggatttctggccaagattttagtcactgaaggatcaaaggatatccctgttaatgaaccgattgcaataatggttgaggaggaagacgacattaaaaacgttcctgctaccatagagggtggacgagatggtaaagaggaaacatcagctcatcaagtgatgaaacctgacgaaagcacacaacaaaaaagttccattcagcccgatgcatcagatcttcccccacatgtcgtcttagaaatgccagcactttctcctacaatgaaccaaggtaatattgccaaatggtggaaaaaagagggtgacaagattgaagtgggtgatgtcataggtgagatcgagactgacaaagccactctggaatttgaaagccttgaagaggggtacttagctaagattctaattcctgaaggttccaaggatgtggcggtgggaaagccgattgccctaatagttgaagatgctgaaagtattgaagccatcaagtcttcttccgcaggtagttctgaggttgatacagttaaagaagtccctgacagtgttgtagataaacctacagagaggaaagcaggcttcacaaagatcagtcctgctgcaaagctattgattttagaacatggattggaggcatcatcaattgaggcatcgggtccctatggtacattattgaaatcagacgttgtggccgcaattgcttctggaaaagcttctaaatcatctgcgtctacgaagaagaagcaaccatcaaaggagaccccgtctaaatcctcctccacatcgaagccttctgtgacacagtcagataataattatgaagattttccaaatagtcaaattcgcaagattatagcaaaacgtttattggaatcaaaacagaagataccccatttgtatttacaatcagatgttgtattggatcctcttcttgcatttagaaaagaacttcaagaaaaccatggcgttaaagtgtctgtcaatgacatagttattaaagcagtggcagtcgcactgaggaatgtacgacaagctaatgctttctgggatgctgagaaaggagatatcgttatgtgtgacagtgttgacatatcaattgcagttgcaactgagaagggcttaatgactccaattatcaagaatgcagaccagaaatctatttctgctatttccttagaggttaaggagctggcacaaaaggctcgatctggaaagcttgctcctcatgagtttcaaggagggacattcagcatatcaaatctaggaatgtatcctgtggataatttctgcgcaatcattaacccccctcaggctgggattctagcagttggtagaggaaacaaagaggttgagccagttattggactagatggaattgagaagccttgtgttgtgacaaaaatgaatgtaacgttatccgctgatcatcggatctttgatggacaagttggagcttcgtttatgtctgaattgcgttcaaactttgaggatgttcgaagacttcttctgtgagaaagatccaactgtttaccaaatgaatcttggattactacataataaacctcggaccaacccacgtgcacatccagaaccagaactgctggtctacattgttaactctgatcacatgtttcatttttttccatttggttcatatacttaccaaaatttgttttggtctttaacaattcgtcttatagattggtaacttcctgaggtattttttgtctggtctgtcctctgcaaaataaataatttcagctgtcaatccgcaactggtgaaataatttaaaaagtattttaccctcaaaaaaaaaaaaaaaaacccgaattcctgcagcccgggggatccacgccgctctagaggatccaagcttacgtacgcgtgcatgcgacgtcaagactcttctatagt

SEQ ID NO: 96633 - DNA, 695 bp, Arabidopsis thaliana columbia
  unsure (1)..(695): unsure at all n locations
ttaggtcacactatagaagagctatgacgtcgcatgcacgcgtacgtaagctcggaattcggctcgaggtttgtctattagagatggaatcaaagacgttctggatcgttactcttcttctctgtggaacaattcaattagcgatttgcagatcagaagagaaaagcacagagaagacgatgatgctaggaggcgttcatgatctccgaggaaatcagaacagtggagagatcgagagtctcgctcgatttgccattcaagaacataacaaacaacagaacaaaattcttgagttcaagaagattgtcaaagcaagggagcaggtagttgcaggaacgatgtaccacttaaccctagaagcaaaagaaggtgatcagactaagaattttgaagccaaagtgtgggtgaagccatggatgaacttcaaacagttgcaggagttcaaggaatcatcttcttgaatttcacttgttcaagttaatgattacaaatgctctgagagtaattaattatatgtgtgtaaaatactttgctatatgcgaaacctaaaaagttaatgtaatcaagaaacttgttcttatgtccaaaaaaaaaaggtgtatgtttgtttcctgtttattcttatgtttcaagttnnnnnnnnnnnnnnnnnnnnnnnnnnnnnnnnnnnnnnnnnnnnnnnnnnnnnnnnnnng

SEQ ID NO: 96634 - DNA, 510 bp, Arabidopsis thaliana columbia
  unsure (1)..(510): unsure at all n locations
accaagtcctttaccatacacaacagcaacttccagtcatcacctcggttactgcattagccgctatttatcatactatcaagagtactcactcactcttgacccttttaaaacctttaccaaagctctttcgatgaagccgccaaagtctccagtaagagtttctttgagatgattaataaggagacaagaaaacatttgttaaactctgtcttgaaaaggtaaagatttagcacctgtttctttggattcgaggcttttttgggggtatgtttgttgcttttctttgttctcagaccttttttgaatgatgtaataaatgtttaccaaagttctgttgctacgttactctttttgctacaagttttcttcatgaaatttgtcaccttccatttcaggaaaagatgagttaaaatattgttttnnnnnnnnnnnnnnnnnnnnnnnnnnnnnnnnnnnnnnnnnnnnnnnnnnnnnnnnnnnnnnnnnnnnnnnnnnnnnnnnnnnnnn

SEQ ID NO: 96635 - DNA, 567 bp, Arabidopsis thaliana columbia
agttggcgactcacgcgctggtgactccgattccaaagttgactgctttcgtactctctctatctactactccatcaagattgtctggttctgttccgggtttgattgatttctaccgtcgccggagattttgtcgtgtaatcacctccatggctgaagcgggatcggtttacgtcgatgtagctggggaatcgaagtcggagcatgttactgggaagtggttttcggtgccggagctccgactgcgtgaccaccggttcatagttcctcttgattattccaaaagttctcccaaaattaccgtctttgctcgagagatcgttgcggttgggaaagaggagcaagcaatgccgtatttattgtatttgcaaggtggtccaggatttgaaggtccaaggcctagtgaagctagtggatggattcaaagagcttgtgaagagtttcgagtggtcttactcgatcaacgaggaacaggcttgtccactcctttaacatgttcctctatgcttcaattcaaatcagcaaaggaattagctgattatttggttcactttcgagctgataata

SEQ ID NO: 96636 - DNA, 528 bp, Arabidopsis thaliana columbia
  unsure (1)..(528): unsure at all n locations
nnnnnnnnnnnnnnnnnnnnnnnnnnnnnnnnnnnnnnnnnnnnnnnnnnnnnnnnnnnnnnnnnnnnnnnnnnnnnnnnnnnccacgcgtccgcgagttttactcctcttaacactcctcgaaacaaaaagaagatgttcttcttcttcttcttctttcttctcctctcttcttagttcatctttcttctctttacttcacaatctcttacttttaaaattaatcttactcgccggaacttttctctctcacaaccgcttcaaacaaaatttctaagtttatccgaatatgaataaactagttgtagaaatcgttgacgctagcgatttgatgccaaaagacggacaaggctcagcgagtcctttcgtagaagttgaattcgacgaacagcgtcagagaacgcaaacgcggtttaaagatctaaaccctcagtggaacgagaagttggtttttaccgtcggtgacttgaagcgtttgaataacaagactgtcgacgtcactgtttacgatgaccgncgtgataatca

SEQ ID NO: 96637 - DNA, 582 bp, Arabidopsis thaliana columbia
ccggcactatccgactcatttagggaaagccggtacgcctgcaggtaccggtccggaattcccgggtcgacccacgcgtccggtcgtcatcttcaatttggacttccaacgccgacaccgtttaactccgatggttcccccgccgtctaatccgcagcaggttcagcagttcctctcctctgccctctcccagcgcggcccatcttcagtcccctacgaagagtccaacaagtggttgatccggcaacatctacttaacctaatctcttcttacccttccttagagcccaaaacggcatcgtttatgcacaacgatggtcgctccgtcaacctccttcaagcagatggtacgattccgatgccttttcatggagtcacctataacatacctgtgattatctggctcctcgagtcatatcctcgtcatcctccttgcgtctatgtgaatcccaccgctgatatgatcatcaagcgacctcacgcacatgtcactccttctggtctcgtttctcttccgtaccttcagaattgggtctaccctagctccagtctcgtagatctcgtctccgatctcagcgctgc

SEQ ID NO: 96638 - DNA, 512 bp, Arabidopsis thaliana columbia
gatagagtcaaagacaatgtgtgcggtggtgactcgcgcctcatcattagaataccgaaacagtttctctctgatcacaacaagatgatcaacaagaagaagaagaagaaggccaagattacttcttcctcttcttcgtccgggattgatcttgaagtcaatggaaacaacgtcgattcgtattcttcagagcaatatccgcttaggaaatgtatgcactgtgaggtcaccaagactccacagtggaggcttggtccaatgggtccaaagacactttgcaatgcgtgcggtgtacgttacaaatcagggaggcttttcccggagtaccgtccagctgctagtccaacatttactccagctcttcactcaaactcacacaagaaagtggctgaaatgagaaacaagagatgcagtgatggtagctacataaccgaagagaatgatctgcaagggctgattccgaacaatgcctacattggcgtagactaaaacatagagaagatgattcgatt

SEQ ID NO: 96639 - DNA, 841 bp, Arabidopsis thaliana columbia
  unsure (1)..(841): unsure at all n locations
anaggccancccntnggattttccctggggcccaancccccagngggcttgccnatggncaaggcnnttcaatgcnccggttccgttccantcngggngctttccccggattccgtccagctgtngtccacctttactccagttcttcactcaacctcncnccangaaagtgcctgggcttcgggaacaagagatgcagtgatggtagctacataaccgaagagaatgatctgcaagggctgattccgaacaatgcctacattggcgtagactaaaacatagagaagatgattcgatttccatgcgttgaagtgattagatatgccaggagtaggaaagagtcagtgagaagaaaagtttttagctttagaagagatgaaggaagagagcaatcaattggagggattaaaagttagatgagaattgattgtgtttgtattattttgtatttgtagtgtgaatgggcaaaaaactcttgaaacagaggaaaagtaagttgaggaagagcagaagattttgaagacattagagaatcattaggtgttgagtattacattaaatcttcctcttcttcttttgttctttcaattctttgtatttttattgcgaggattctccttttttttcttttttttttgtagttgatttgtttagctaaaggattctttttttttgtttttgttaaaatccaatgttataaattgttaattattaaatggttttcttaccaaaaaaaaaaaaaaaaaaaaaggnnnnnnnnnnnnnnnnnnnnnnnnnnnnnnnnnnnnnnnnnnnnnnnnnnnnnnnnnnnnnnnnnnnnnnnnnnnnnnnnnnnnnnnnn

SEQ ID NO: 96640 - DNA, 402 bp, Arabidopsis thaliana columbia
cgtcatctgatttcatactgtggaatttaacagctgggacaaaggttacacaaatctcatgtggtggctggcgccgaccccattccttttatctcggggaaatccctgagtggcaaaactgttttgcatatgtgaaggatgatgtcattcatattcatagacactgggttggaggacagaagaccaaagtctttcctctaaatttgcatacacagtttcatggcagagaattgcattccttatgcttcatctctacagatacaaaagcgggattcgattctgaagaaagtaaaatatctgatcggtctagttggattgcaacagggtgtgaagatggatctgtgagattgagtaggtatgcatttgagtttggaaattggtcaacatcagagcttttaggag

SEQ ID NO: 96641 - DNA, 485 bp, Arabidopsis thaliana columbia
  unsure (1)..(485): unsure at all n locations
nnnnnnnnnnnnnnnnnnnnnnnnnnnnnnnnnnnnnnnnnnnnnnnnnnnnnnnnnnnnnnnnnnnnnnnnnnnnnnnnnccacgcgtccgcccacgcgtccgggaactgtgagagaatccaaataacgaagcctactattactccacctacgccttttgtgttcttctctccaagaccggtcaccgagcttgatgcagctgcaactacgttacagaaggtgtacaagagttacagaacaagaaggaacttagcggattgcgcggttgttgttgaggagctctggtggaagactctggatgctgcagctttaaatttgagctcagtcgccttctttgaagaagagaaacatgaaaccgcggtttcgaagtgggcacgagctaggacacgagctgctaagggttggaaaaggattgtcaaaagatgaaaaagctcaaaagttagctcttcagcattggcttgaagctattgacccacgccatcgt

SEQ ID NO: 96642 - DNA, 724 bp, Arabidopsis thaliana columbia
cccacgcgtccggcttgacatcaagaaccaacagtttcaagagagacgatactaataggcaccagaattctcctaagagtactatggagcggtcgttgagtttcaacagctgggaggttcctaaagagaccaagactgattcagattttgaggtcttggagacaaagaagtcaacgcctaacactttgaatggaagaaactgtgagagaatccaaatcaagaaacctacagttactccaccagagccatttgtgttcttctctcctagacctgtcaccgagcttgatgcagctgcaactacgttacaaaaggtgtacaagagttacaggaccagaaggaacttagcagattgtgcggtcgttgttgaggagctctggtggaggactttggaaggtgcagctttggatttgagctctgtgtctttctttggagaagaaaaacatgagaccgctgtttcgaaatgggcacgagctagaaaacgagctgctaaggttgggaaaggcttatctaaagatgaaaaggctcagaaattagctcttcagcattggcttgaagctattgacccacgtcatcgttacggccacaacttgcacttctattatgatgtctggtcagcgagcaagagcacacaaccattcttttactggttggatataggagacggcaaagatgtaaatcttgagaaacaccttagaagtgttctgcaaaaacaatgcatcagata

SEQ ID NO: 96643 - DNA, 290 bp, Arabidopsis thaliana columbia
gtttttgttaacaatcattttgttcaagtcctgtaataaactaaggagcatgacataatcagaacaaatcaacaaggtaataataacgtatctttcatttcattccttaattagagtgaccaaacttgacactgttctatacagctttaatctgtttggttacccttgcggaatagatcaacgagtatgttccagattttgatcctcaaagcggaagcttcttccggtttaaaccacttcttgtgaatcattttcaaatcctgcaatgtcagcctttgaggagcctcttc

SEQ ID NO: 96644 - DNA, 660 bp, Arabidopsis thaliana columbia
  unsure (1)..(660): unsure at all n locations
ctgcaacttaaataaactcccatggtgaagcgttatgtgtgctacgatatcaactcctgtcgtcatttatctcacctacacgatcacagagttctcctgcgccacgccaaaccaaaaacgtatccgaggataaacagatagagcgcaagagacaagtgttcatctcaccggtctcgttaaaagatcgggaagagaggaggcacaaatcagagtttgttcagaggctcttgtcatcagccattttcgatgaagtctaatgcacatacaaagattgagaacatggaggaactaattcgaatcagacttgagagaatctggtatatatgaagctctgttagttgtgtaaaagaacctacacagacacattttcatcggaatcttgattcaactgtgtgtaggtttcgagaaaaacaatggttgggatgagaagaagacggagaagagcgagatgcagctatgttatcaatatctatatctatctatgtattgtgtctgtttggtgctactaaatacattgcgtagaaatgtgttttcctaaggttattaagccaattgaaaaggtaagntntngggagnaggataaggccncctggcctggagcataaccccattgggggcctggnggtgngggcctatgaatggaaaaggnccccctgaagc

SEQ ID NO: 96645 - DNA, 1134 bp, Arabidopsis thaliana columbia
atacgactttcttagggaaacctggtacgcctgcaggtaccggtccggaattcccgtcctcactcctgcgcccaagaaatcatcgtcttcttcttcatctattcaggatcgatccggcttgagatttattacaaattcgtccttctatttgctccaaaagttcgacaatttcgtaggggcaaagatggacgctgattccaagagatttctagctacgcttcgatcccgatctgaaatgttaatgggctttgaagaaatagatggagatgatgatttccaggaggagtttgcttgcccgttctgtgcagaatcgtatgatatcatcgggttgtgctgtcacatagatgatgaacatactttagagtcgaagaacgcggtatgccctgtttgttctcttaaagtgggagttgatatcgtagcacacataacgcttcaccatgggagtttatttaagttgcagcgaaagagaaagtcacgaaaaagcggtaccaattcgacactttcacttcttcggaaagaactaagagaaggagatctacaaaggttgttaggatttacttctcgtaatggttctgttgcgtcaagtgtaactcctgatcctctcctgtcgtcatttatctcacctacacgatcacagagttctcctgcgccacgccaaaccaaaaacgtatccgaggataaacagatagagcgcaagagacaagtgttcatctcaccggtctcgttaaaagatcgggaagagaggaggcacaaatcagagtttgttcagaggctcttgtcatcagccattttcgatgaagtctaatgcacatacaaagattgagaacatggaggaactaattcgaatcagacttgagagaatctggtttcgagaaaaacaatggttgggatgagaagaagacggagaagagcgagatgcagctatgttatcaatatctatatctatctatgtattgtgtctgtttggtgctactaaatacattgcgtagaaatgtgttttcttaagtttattaagcaattgaaaagtaagatataggaagaagaataagtcctcttgtctgtagcataaaccctattggtgttcttgtgttgtgtgtcttatgaaatgaaaaatgttcactcttgtaagctaaa

SEQ ID NO: 96646 - DNA, 900 bp, Arabidopsis thaliana columbia
agaatcatcttccctcctccttcttctctctctctcgtttctcaactaccgtctctctgcttcttctgttcccaaaaccggaaactttacttcgtggaattttcccttgtttctgaaatggaagacacaacatttaccaaagtgttcgttggaggattagcttgggaaacacacaaagtctctctcaggaattactttgaacagtttggtgacattgttgaagctgtcgttatcactgataaatctagtggtagatctaaaggctatggctttgttactttttgtgatccggaagcagctcagaaagcttgtgtagatccagctcctgttattgatggaagaagagctaattgtaatcttgctgcttttggtgttcagagatccaaaccttcttctcctattcatggacatgtaggaggaagaggcatgaaggtgactagccctttcaagacacactttgggaccgcggctactgctattccttccccacttccattctcccactacacacttccttacactaatccttttgggttctcttcatactcaatggattacaattaccccacgcagagctattacaatgtttatggaggggcaactgctcagcatccaatgtatggaagcggaccaatgactggtgtagcagcagcaccagcagcagggttctacccatatctccagtttgctgaaggaaatggacctgtcactggttatgctcccctccactaccccaaccacatgtttcactattctgctcccgggggaaactacccgcatcacaatggttcaccagtgtctcttgcaccttcaccagtcataccatcagtttgctttgcagttccacaggctagaccatgaaagctcgaggttcataggtccatgatgctatgtagggga

SEQ ID NO: 96647 - DNA, 559 bp, Arabidopsis thaliana columbia
gcctgcagtaccgatctcgcagtttccggctagaccgcacccggaagatgacatggcaaaatatacagcgaagacgcttaatgatccccgaacgttgaataaaactgtgtatgttagacctaccgacaacattctcacacaaatggaactagttcagatatgggagaaactaaccgaaaaagagttggagaagacctatgtttcaggaaacgactttcttgctgacattgaagataaggagatatcacaccaagcgggactaggacacttttatcacatatactacgaaggttgtctcacagatcatgaagttggagacgacgaagaagctactaaactctatccggatgtgaagtacaaacgcatggatgaatatttgaaaattttcgtataatgttacatatatgtgaaacacatcgccatttccttatttttatgttttaccatggccttttgttttgtttgcttgaagatgttttccgaatttattttaaaatttaaatgtttcagttatggatatgtctggttatatatagatatacatataatctcaagggtc

SEQ ID NO: 96648 - DNA, 541 bp, Arabidopsis thaliana columbia
gaaagaagcagaagtgtgacaagacgattctggattctggatacagctggaagagaattaaaagaaaaagaaaaacacttccaacgaagaagatcgatttgcttcgagtctctgaaagaagaagaaaaaataatggggcgtatggattatctagcgatgaagaccgacgacgtcgatacggtggcgttagtcaattccgatatggaagagctcaaggtcgctgcgaagaaactgtttagcgatgtttcgaagcttggtggattaggcttcggtgtttcttttctcaaattcctcgcttctttcgctgccatttacttgttaattttggatcgtaccaattggaaaaccaagatgcttacatcactcctaataccatacatcttccttagccttcctagtgtcattttcaacttttctcagtggagatgttgggaaatggattgctttccgttgcggttgttcttagacttttttttcccttagtattttcccaaatttggctttgagatgtccagtttttcttgatccttgctacttgtta

SEQ ID NO: 96649 - DNA, 506 bp, Arabidopsis thaliana columbia
gtcttagcccatgaactaggccatctgaagtgtgatcacggcgtgtggctcacatttgcaaatattcttactcttggggcttatacagttcctgcttttgggcaaatgatagctcgaaccttggaagaacagttacttcgttggctacgttcagcagagctgacttgtgatcgcgcagcactactcgttcgcccaagatccaaaggttgttgtatctggtctgatgaaattagccggaggatgtccatcaatcgctgatcagctaaatgttgacgcatttctagaacaagcccgttcatatgacaaagcttcttcaagccccttgggatggtacataagaaatgctcagactagtcaactttcgcatccattgccggttcttcgtgcacgtgagattgatgagtggtccaggagtctcgagtacaaaagtctcctgaaacgggcaaatcgaaaaagcacattacagatggtttagtgacgttgttaaagatttaaaaggttggaag

SEQ ID NO: 96650 - DNA, 569 bp, Arabidopsis thaliana columbia
  unsure (1)..(569): unsure at all n locations
cttcttcttccttctctcaagaacagattttttttaaacgagcttgatcaataaattctctcaagatctatggcggaagagcatcgatgtcagacaccagaaagcaaccgtctctgtgttaacaactgtggcttcctcggcagctccgccaccatgaatctctgttctaattgttacggcgatctttgtctcaaacaacaacaacaatcctcctccatcaaatccaccgttgaatcttccctctctgtatctcctccgtcgtcatcatcatcggagatctcttctccgatcatccctcctctccttaaaaatccatcaagtcaagcttagaggtaccggaggaaaaggcggtgattttcgctgccgacggcgggagcaggatcagcaacagaggccgaatcgggtgcacgncgggttaggggaacgggtcggggtaaccggcttnagggcccggtggggtacgntggttttccgggggtaataggtcccgggggtccttggttaaggtcgggtttaaattgcccgccgtaggggtcggaaagatcccttgtgaagagcancttaaagna

SEQ ID NO: 96651 - DNA, 1064 bp, Arabidopsis thaliana columbia
  unsure (1)..(1064): unsure at all n locations
cccgtccgacttattcttcttcttctttctctttctaatatcttttttctcttcccaattttctcatcgatcactgaatcttcttcttcttcttcttccttctctcaagaacagattttttttaaacgagcttgatcaataaattctctcaagatctatggcggaagagcatcgatgtcagacaccagaaagcaaccgtctctgtgttaacaactgtggcttcctcggcagctccgccaccatgaatctctgttctaattgttacggcgatctttgtctcaaacaacaacaacaatcctcctccatcaaatccaccgttgaatcttccctctctgtatctcctccgtcgtcatcatcatcggagatctcttctccgatcatccctcctctccttaaaaatccatcagtcaagctagaggtaccggagaaaaaggcggtgatttcgctgccgacgacggagcagaatcagcaacagaggccgaatcggtgcacgacgtgtaggaaacgggtcgggttaaccggattcaagtgccggtgcggtacgatgttttgcggggttcataggtacccggagatccatggatgcagctacgatttcaaatcggccggacgtgaagagatcgcgaaagcgaatccgttggtgaaagcagcgaagcttcagaagatatgatcagagccgttcgatgcgttgacttttcctctcgtaagtcttcatttctacgcgtatgtgtgtcctccgtcccccgagaaatacggatggtgtcgatttgattgatctcagccgttggatcaaaaatggtttattattgtaaaagattgattatgtatttatcaaagggacacgtgtcacgtggttttaggatggagacgctttcgctttttctccttcattttattttctttttcctttcagaaagaaataagattattcgcgttggctttttctttttattaaattccggcttattattnnnnnnnnnnnnnnnnnnnnnnnnnnnnnnnnnnnnnnnnnnnnnnnnnnnnnnnnnnnnnnnnnnnnnnnnnnnnnnnnnnnnnnnnnnnnn

SEQ ID NO: 96652 - DNA, 474 bp, Arabidopsis thaliana columbia
agtcttctgggtttttcctattcctctttctctctctctccttcaagttgctgcaatcccttgaaaacccaataaacccccaattttccatttctcataaagttcacatttttccttcttcttcttctgccaattctctgattccctcgtttcaatctccgttttgctttgcctatcagataaatttcttcttgctttcctttctatctcataacgataagttgaattaatctttgcgtcttagttcatcagtagagagagtagggttttttccgcttatttttagggaatttcattttgttggaggtgagaatctctattcgagtccccaagattctctttatatccctagtttagttgtatggttgggttttgattggaatatcaaggggtagtttttagctaggttcactgatacttggaagatctgagttctttgggattctgttaagtttgtggagatctaaaagacac

SEQ ID NO: 96653 - DNA, 502 bp, Arabidopsis thaliana columbia
gcgtccgatttcatctctttctctctctgcgtccttctgaggctggaagcgatgaccatgacagcatttctcgcgagacggcttatcggtaacggatcgagccagattctcgggacttcgagttctagctccggtccgttcatttccgtttctagggctttcttctcctcctccactccgatcaaagctactctctttcccggtgatgggatcggtcccgaaatcgctgaatctgtcaagcaggtgtttactgccgctgatgtggttattgattgggacgaacagtttgttggtactgaagtagatcctagaaccaatagtttcttgacatgggataatcttcaatctgtgcttaaaaacaaggttggtttgaaaggaccaatggctactccaattggaaagggtcaccgttccttgaaccttactcttaggaaagagctgaatttgtatgccaatgttaggccttgttacagtcttcctggttacaaaacccgttatgatt

SEQ ID NO: 96654 - DNA, 776 bp, Arabidopsis thaliana columbia
  unsure (1)..(776): unsure at all n locations
ttaggtcaactatagaagagttatgacgtcgcacgcacgcgtacgtaagctcggaattcggctcgagcgatgtatgtatgggaggacgagttgcagaggagctcatctttggcttggaccatattaccactggagcgagtaccgatctggcacaggccactgatcttgcacaatacatggtatcgagctgtgggatgagtgaggcactaggaccagtccatataatagtttgaccaagctctgatatgcaatcacgcattgatgccgaggttgtgaagcttcttagagaagcatatgagagagtgaaatctctcttgaaacggcatgagaagcagctacacacgttagcaaacgcacttctagagtatgaaacgctaaccgcagaggacataaagcgtattctccttccaaagcaggaaggcgagaaatttgaagagcaacaacaagaagaaggagacttggtattggcctaatcacatcattcattaccataaacacacttctttgggtgaaaaagggagattcaaagctttgtacagagtaaatctcccatagcttctacaacaacaaccaaaagaaaaacatatgaaattattgatctcatgttacaaaattattgtagtttttatttcattagctcattagttttcgcttcgaccaaaaaaaaaaaaaaaaaggnnnnnnnnnnnnnnnnnnnnnnnnnnnnnnnnnnnnnnnnnnnnnnnnnnnnnnnnnnnnnnnnnnnnnnnnnnnnnnnnnnnnnnnnnnnnnnnnnn

SEQ ID NO: 96655 - DNA, 815 bp, Arabidopsis thaliana columbia
  unsure (1)..(815): unsure at all n locations
acttcaaccgataaacatagtagcaaaggcagtatagcttgtctcatgtagtatggaggaagagtgcagaggagctcatcttggctggcccatataccctggaagcagtagcgatcttcacaggccactgaactgcacaatacatggtatcgagttgtgggatgagtgaggcaataggcccagttcatataaaagaaagaccaagctctgatatgcaatcacgcattgatgccgaggttgtgaagcttcttagagaagcatatgagagagtgaaatctctcttgaaacggcatgagaagcagctacacacgttagcaaacgcacttctagagtatgaaacgctaaccgcagaggacataaagcgtattctccttccaaagcaggaaggcgagaaatttgaagagcaacaacaagaagaaggagacttggtattggcctaatcacatcattcattaccataaacacacttctttgggtgaaaaagggagattcaaagctttgtacagagtaaatctcccatagcttctacaacaacaaccaaaagaaaaacatatgaaattattgatctcatgttacaaaattattgtagtttttatttcattagctcattagttttcgcttcgaccttgaaccttttgccctttttgacattctgttcaattctatgaagaaaaatgtaaaacaacattgaaaagaaagtaataattgttgtctttattcaaaaaaaaaaaaaaaaaaggctctagaggatccaagcttacgtacgcgtgcatgcgaggtcatagttcaaatataggtcnnnnnnnngtacctaa

SEQ ID NO: 96656 - DNA, 437 bp, Arabidopsis thaliana columbia
  unsure (1)..(437): unsure at all n locations
aatcatttcaccaagatcttcttcttctcccatttctccattgacgacaacggagaaacgtcccatcgtgcgtcagagagccacaccaatcctcctttttcttcttcttcttcctcctgcatttttggttttggtggcgttgagacatcatcatgtctagcgcagaggatgtgaaagagcaaggaaacctcaccaacgaggcagagaagtcaatgccatcatcacagcaggaggaggctgttgtaaagaagaagtatggagggctcatgccaaagaaaccacctctcatttccaaggatcatgagcgagcatactttgactcagcctgattggggctcttggaaagcaaaggtttttgcgaagccaanagggacccctgggaaggcccttttgtnccaaggttaaagccaaacgggagcannagncnacggttnaag

SEQ ID NO: 96657 - DNA, 534 bp, Arabidopsis thaliana columbia
  unsure (1)..(534): unsure at all n locations
atgatttnnnnnnnnnnnnnnnnnnnnnnnnnnnnnnnnnnnnnnnnnnnnnnnnnnnnnnnnnnnnnnnnnnnnnnnnnnccacgcgtccgcccacgcgtccgcggaccgatggcgaagaaacgtcccaacgagctcagagagccacaccaatcctcctttttcttcttcttcttcctcctgcatttttggttttggtggcgttgagacatcatcatgtctagcgcagaggatgtgaaagagcaaggaaacctcaccaacgaggcagagaagtcaatgccatcatcacagcaggaggaggctgttgtaaagaagaagtatggagggctcatgccaaagaaaccacctctcatttccaaggatcatgagcgagcatactttgactcagctgattgggctcttggaaagcaaggtgttgcgaagccaaagggacccctggaagcccttcgtcccaagttacagccaacgcagcagcagacacgttacaggaagtctccatgtgctccatctgagggtggtgaagatggaggagct

SEQ ID NO: 96658 - DNA, 589 bp, Arabidopsis thaliana columbia
  unsure (1)..(589): unsure at all n locations
cnacagcattggaaacgtcccaacgagctcagagagccacaccaatcctcctttttcttcttcttcttcctcctgcatttttggttttggtggcgttgagacatcatcatgtctagcgcagaggatgtgaaagagcaaggaaacctcaccaacgaggcagagaagtcaatgccatcatcacagcaggaggtttccttttaattctcacactagatgttgatcaaataccgtaatgaatacaatatcgtgacctaactctttctttaattgcattgtgtaggaggctgttgtaaagaagaagtatggagggctcatgccaaagaaaccacctctcatttccaaggatcatgagcgagcatactttgactcagctgattgggctcttggaaagcaaggtgttgcgaagccaaagggacccctggaagccctttggccccaggtcagcccccggagcagcaggcacggttcaggaggntccatgtgctccatctnagggtggtnaagttgnggnntttttaggccngggnggttangaactttggggtgggggcnnngggtttttaaacctttttaaaggnttttnnggntt

SEQ ID NO: 96659 - DNA, 625 bp, Arabidopsis thaliana columbia
  unsure (1)..(625): unsure at all n locations
atccccccttggttttgtcattccttatnatcaatttcgggccctnccttttctttattgcttgttcatcatcacagcaggaggaggctgttgtaaagaagaagtatggagggctcatgccaaagaaaccacctctcatttccaaggatcatgagcgagcatactttgactcagctgattgggctcttggaaagcaaggtgttgcgaagccaaagggacccctggaagcccttcgtcccaagttacagccaacgcagcagcagacacgttacaggaagtctccatgtgctccatctgagggtggtgaagatggaggagctgctcaggccgagggaggttcaggcaactgaggcgtagagagacagagagatgtatgaaaactcttgtgtaagaagtctgttataatcggatattttctgtccatttgaaacatcagatatggctttcaattaaaatcttaacttgatcgagaaattatagtttaccctttggtcccggaaaaaaacaaaaacacaanaaagggggggggcccggtaccccnattccncccctaatagtgaattcccttattnacaattcnccttggcccgtcccntttttacaaccttcccttgaacttgggaaa

SEQ ID NO: 96660 - DNA, 803 bp, Arabidopsis thaliana columbia
accactcacatttatggaaagctgctacgcctgcaggtaccggtccggaattcccgggtcgacccacgcgtccgggatgtcgcttctgctcggagcatctcttcacatccttcatattatggaaaaccgatttgttcatcacaatcatcgttgattcggatttcgagggataaagtttgttgctttggtcgcatttctaatggcatgacgagctttactacttcccttcatgctgtcccgagtgaaaaatttatgggcgaaacaagacgtactggcattcaatggtctaaccgctctttaagacatgatccttacagatttcttgataagaaatcacctagatcaagtcaattggcaagagatatcactgtgagagcagatctttcaggagctgcaacccctgactcttcttttcctgaaccagagattaagttgagctcaagactcagagggatattcttttgtgttgttgctggcatttcggctacttttctcattgtcctgatgattattgggcatccgttcgtccttctcttcgatccctataggagaaaattccaccacttcattgctaaactttgggcttccataagcatttatccgttttacaaaatcaacatcgagggtttggagaatctgccatcatcagacactcctgctgtatatgtttcaaaccaccaaagttttctggatatctacacacttcttagtcttggaaaaagctttaagttcatcagcaagacagggatattcgtaattcccatcatcggttgggccatgtccatgatgggtgtcgttccctt

SEQ ID NO: 96661 - DNA, 501 bp, Arabidopsis thaliana columbia
gtttcgattcctagacactctcactacggttttacaactatggcaaccactcgaatggttagggtttcgcaagatggttcgggagattactgctctgttcaagacgcaattgattcggtgcctttaggtaacacttgcagaactgtgattcgtctctcacctgggatttatcggcaacctgtgtatgtacccaagaggaagaatttcattaccttcgccggaatctcaccggagatcacggttttgacttgggacaatacagcttccaggattgagcatcaccaggcgtctagagtcattgggactggtacgtttggttgtggtagtgttattgttgaaggtgaagattttattgcagagaacattacttttgagaactctgctcctgagggatcagggcaagctgtggcgatacgagtcactgcagaccgttgcgccttttataattgtcgatttctcggttggcaggatacattgtatttacatcatgggaaacaatat

SEQ ID NO: 96662 - DNA, 650 bp, Arabidopsis thaliana columbia
accacgcgtccgcccacgcgtccgcccacgcgtccgtaagtagtaaccacatttttctcgctttgccgtcttctccggcgattttcagacactaattttctctccggttgttgcaatcatattttctgtcggaagatattgaaatcagaaaccgggaaaaatgacttcgtttcttagtttctccgccatttcagctcatccacctactttttccggcgcttcatttcgtcctcgctctttctctccccgattgttcaagtcttgtgttaagtgcacttatgctgaagctggattaagcagcgcttcatggtcagcccctattgacattgtggcagatgtcaaatccgaaagggttgtagttcttggtgggaatggtttcgttggctcagctatctgcaaagcagcaatctccaatggtattgaggttgtgagtgttagcaggtcaggtcgtcctaacttcgaagattcatggttggatcaggttacatgggttactggtgatgttttctatttgaattgggatgaagtacttcttggtgctactgctgtagtttcaaccattggtggttttggaaatgaagaacagatgaaaagaatcaatggtgaagctaacgttactgctgtgaatgctgctaaggattttggggttc

SEQ ID NO: 96663 - DNA, 890 bp, Arabidopsis thaliana columbia
  unsure (1)..(890): unsure at all n locations
ccgnnnnnnnnnnnnnnnnnnnnnnnnnnnnnnnnnnnnnnnnnnnnnnntggaaacaaatccctgcgaatatcaccggggaatctgacggcggcttagtaccggcggctactgcaaaaaggattgtgttcttcttaggcttgatacttgccttgggaagaatataacaatcatttttgcggtagctaaaacgctaagctctatcgtcatatctttatcattgatacttatttgatatctaaatatcataaaaatggccgctcgttcactctccggtgccgttaaatctctttgctccgccgcatccggaagtctgtcttgttccattgtcttaaggaggagttacgttgctacatcgcagaatgtaacagcagcaggattgagtaagggaggttccaccagagttatggtggggaagatggaacagagaggtttagatcaagaggcagagtctgcttggggaccagatccagttactggatactacagaccttccaatcgtgcggctgagattgatccagctgagctcagagagttgcttttgaaaaacaaagcaaagtctttctgagaattttgattggttggttgacttggttccagtggaaggttgtcgtaggcgactattctgattatgtgtgtttatgtttgtcttgtatcaactattaagtaaaaataaagatcacattaactaaataaaaatataatgtctgtttggatcgactaacacaacatctttagtataacagtgtcttaaatgttttaagagataaatggggatatacgaaaaatagaaaacgttgctaattaaaaaaaaaaaaaaaaaagggcggccgctctagaggatccaagcttacgtacgcgtgcatgcgacgtcatagtaatnctatagt

SEQ ID NO: 96664 - DNA, 681 bp, Arabidopsis thaliana columbia
aaagaaagtgagataataatccaaaaaaaaaatccatatttttgccaacgtttttagacgatcaaatggcttacactaaccaaatttcagcggttggttgtttttctagcggttgcgattgctccgctattagctgagccacagtcaacgatgtttccagagatgactcctgaatgtgccacggttatgcctgacctgctcgaaaagtgttttgcaaccggtagtgtgacgccaacagaagattgctgcaccgatctaaaatccgcaacctcaacgcaagtgacttgtctttgtgataactacatagcaaaccccgccgtttcaaacatcaccggaccttactccaaagcaatcacaactaaatgtggcgttttcgacaaatacccttggtgacggtactagtaaaggaggagaagaaaagaaaggaggaagcagcagtagcaatggtaaagacaatggcaagagtgagggaaatggaggaagagcgaactcggttgctgcatcaatggctatgtttggtttgcttgcaagtctcgtcttcgtaatgttttaatttagttatttgtattcataccaaattttatgtaatttttttcttcttcttcctttttccttgaaagaaaatccgtcaacccaaaacaattacgtacgtttttgaaaaaaaaacattttatctgcatt

SEQ ID NO: 96665 - DNA, 513 bp, Arabidopsis thaliana columbia
taatcgttttgagttgaaataaatatagggtaaaactggtattttatatgggccgatacgtgtggccctgtatcttagcccacaaagttagttgacctgcttttctgatcatcttcctcccactctctttcatctttttgtaatcgatttgcaatttcaatttcgcaaagttggatcatgggcaatgtcataagcggtggaagccgcccggaaaatcatcgggaccgtacttcgccgccgtatccaaaccctaatgctcagtaccaaggcaattatccgtcgccgtaccaagattgtgctaggtatccgtatggagagatggcgtctccagtgccacacgtagagcatcaggaacgcagtgactataaggaacgacatcaatctgaagaaaagaaactttgagacttgagcctgatgaacagaaccctgggaagttttttgctctccttcacttttgacggctctgttcctggaagcatcactggaatgttctttggttaagaagggaaagac

SEQ ID NO: 96666 - DNA, 463 bp, Arabidopsis thaliana columbia
cgtccgtgctgaacacaaagatgatctgatctcgttcgtgtggaatactcgtttaaccattagcttggacctcaataagaagaccacaattcttcaggaagaaaacgatgggcatgtgattgtagtccaagttttcagggctttgcatgctgtgtatgtcagtgtgagctgtattgcacctttgacaccgggagtgggtaggttatcatgccgtcttgcgaagatacccgttgagagcttactggagcaccgaggtatggtgaagaacatacaaaaagtgacgaatgaacattctgaagatggtttcatgttgatttcttcctatttgatctctggcaatggacaacttgtatcttctgatttggaacgttcattgccggatctttgctattcatgattatgttaagaatataggttaattaaattttgtcatgtactacttttttgatattgaatgtgcttc

SEQ ID NO: 96667 - DNA, 657 bp, Arabidopsis thaliana columbia
  unsure (1)..(657): unsure at all n locations
acaagagtcaacccctttctccgtcgaaattcgcatgcttaaactctgagagaagaagatgactatgacggaggagaaaccaacttccgacggcaaaggaggttggggtttcttcaagattccatttcgtaactcaagcggtcacagaaacgccgcttcaagtgctgctacttctccgtttccatctggagcttcttcttcttctacttcttctcatctacataaccatcatcaacatcatcatcaacatcaccatcagcaccatcatcagcttggttataacggtcctcacggtgatggatcgggtcaaaatcaacatccgactccttctccttcagtttcatctgttgctaagtcttttcttcctactaaacgaagattgaagcttgatccttctgagaaactctattttccttatgagcctgggaagcaagttaggagtgctattaagattaaaaatacaagcaaatcacatgtagccttcaagtttcaaacaactgcgccgaagagttgctttatgcgtccacctggtgctattcttgctcctggngagactattattgctactgtgtttaaatttgttgagcctcctgcgaataatgacgacgccaatggattcaaaggngcagagtgaagttttaaaaactcatgaggcct

SEQ ID NO: 96668 - DNA, 589 bp, Arabidopsis thaliana columbia
  unsure (1)..(589): unsure at all n locations
cgtccgngcgaaatcaaccaatttaatccacctgtcttttatcatctcacgacccacctctgggggcgcagctctcatcacgagtcaacccctttctccgtcgaaattcgcatgcttaaactctgagagaagaagatgactatgacggaggagaaaccaacttccgacggcaaacgacgttggggtctcttcaagattccatttcgcaactcaagccgtcacagaaacgccgcttcaagtgctgctacttctccgcttccatctggagcttcttctatcttctacttcttctcatctacataaccaccatcgacatcatcatcaacatcaccatcagcaccatcatcagcttggctataacggtcctcacggcgatgcatcgggtcaaaatcaacatccggactcctttcctcctttaaggtttaaactggtgcctaaggctttntttttcccacttaaacnggagggttnnaagntttttattccnttcttngggaaactcttatttttcccttnntnagccctnggggaggnaagttttnggggggnctttttaaggnttnaaanttnccccggaaatctcaattgt

SEQ ID NO: 96669 - DNA, 543 bp, Arabidopsis thaliana columbia
  unsure (1)..(543): unsure at all n locations
acttacaatggctgcatcgttagcctctctttcctccttagctataagccggagcaccacggtcactgttcaaccgccatggcagccaccgccttcctcctccacaaatcatacctcttgcttcctctatcaagaaacatatcacgacgagcttctataggagaggaagttctctgaagaacatttatgccctcgagacctctgacggcgccattaacgtggaggtcgatgatgatgaggaagaagaagcgtgtgagcttgttaacggaacagaagtgtccgttgacggtgttgaaggttttcttttcaacggcggtgtagaacaataacgggaacttggattgcttctactctctgatgnctttggctttcaagattcaantacacgggatttcgtttancgtgtgnnttcaatgggtataacgtnttntcccggacttgtttcgtggggtccatggttggaaaaccgnccaaagnccggatncgnggattggganggggcatnnccntacccgtttaancaagnaatnntncttccaaaag

SEQ ID NO: 96670 - DNA, 611 bp, Arabidopsis thaliana columbia
  unsure (1)..(611): unsure at all n locations
acnctttnntttccagggncngggccttggctgaggaccatggcggctttgcaccattttcttgcatctgttggctgcttcctgggtcagatacctcctccaggagcagctgtatgtgtactagcttcccagattgccaatcttggagagagcataataggtgcttcttttcaagacaaagaaggattcaaatggctaaacaatgatgtagtcaacgtgatcaacataagcttgggaagcattgtggcgattttgatgcaacagtttatactccagaactgggtcaagtaaaacctgccacgaaggtcatgtattctcagtgaggttagattctttttttatattgttaaacacagccttacgtattcagtggtgttataaattatactctgttgtgtacaactagtagtccaacatcaatgaggggaaaaaacttctgggaccattgtctagcaattattggatgatatttatgtgaattaaaaaaaaaaaggcnnnnnnnnnnnnnnnnnnnnnnnnnnnnnnnnnnnnnnnnnnnnnnnnnnnnnnnnnnnnnnnnnnnnnnnnnnnnnnnnnnnnnnnnnnnnnnnnnnnnnnnnnnnnnnnnnnnn

SEQ ID NO: 96671 - DNA, 1065 bp, Arabidopsis thaliana columbia
  unsure (1)..(1065): unsure at all n locations
atgatctnnnnnnnnnnnnnnnnnnnnnnnnnnnnnnnnnnnnnnnnnnnnnnnnnnnnnnnnnnnnnnnnnnnnnnnnnnnnccacgcgtccgcccacgcgtccgcggacgcgtgggcaagcacaaggttctccggggattggtggcttgggtccttcttctccttctttgacgactcctggaagtttaaacatgaagagattccagcagaaaccgccgatgcgacctcctggtgctcctgcgagtaacaacactatctccccaatgagaacaatggagttaactcctgctgctcggaaaaagaaacaaaagcttccagaaaagtcattgcaggagcgggtggctgcaatcttgccagagtctgccttatacacacaacttctggagtttgagtctcgggttgatgctgcgttaactagaaagaaagttgacatccaggaagcccttaaaaaccctccctgcatacagaagactcttaggatctacgttttcaactcgtttgctaaccaaaacaacacgatccctgggaatcctaatgctgacccgccaacatggactcttaaaattattggtaggatactggaagatggggtggatcccgaccagccagggtttgttcagaaagcaaacccattgcatcccaaattctcgtctttcttcaaaagggttacagtttccctggatcagaggctgtatcctgagaacccattgatcatatgggagaatgctcgatcacctgctcctcaggaaggctttgagatgaagaaggaagggaatcaggagtttgctgctagtatactgatggagatgaactacggccgtgaaaaaggcaagcttcctactgccttgatggatgttcttcggaatggagggtgaaacccccgcccaagaatcaattcgtggaaatgtggggggtttcgtttaaaggcgaaggaaaacttggcaaaaccccaaaaggacacccctttttttctttaaacgtggggatgggcttggtaccttttataaaaaaaggttttatttgtggggaaaaagaaaacaggttggaaaaaatttccaattta

SEQ ID NO: 96672 - DNA, 336 bp, Arabidopsis thaliana columbia
ctcatatcccttatgatctcttacctgaatcagttgtgaaatctggttgcaagattgtttacatatggagagacccaaaggacacgtttgtgtcgatgtggacttttgctcacaaggagagatcacaacaaggaccagtggttagcattgaggaagcttttgataagtactgtcaaggtttatcagcttacggtccttatcttgatcatgttttagggtattggaaagcttaccaagcaaacccggatcagattttgtttctcaagtatgagacaatgagagctgatccattgccttatgtgaagagattagctgagtttatgggttatgggttca

SEQ ID NO: 96673 - DNA, 302 bp, Arabidopsis thaliana columbia
atttggaaagaattgttcatgagaatggtgggattcgggagaaggaacctttctttctatcaggaaccaattacaatgaggcattgtcaaggagttttcttgatgttggagatccgccagaaactgcacttcttagtgcaccaacctaagagcaatgaagatgattccatattttgatgatagagtttcttagcatatcttacttatctactatgtattatgtggcaaaacaaatgttataaaataaacatttatatttatatgccattagaaaatctttgaaacagatgacaaaaaaaaaa

SEQ ID NO: 96674 - DNA, 372 bp, Arabidopsis thaliana columbia
cgcagtgccggaacttcgagtcgatcatcagtttcggcgattcgattgccgacactggaaacttgctaggtctctcagatcataacaatcttcctatgagcgcgtttccaccgtacggagaaactttcttccaccacccaaccggtcgtttctctgacggtcgcctcatcattgacttcatcggtacttctctttatttatgtgtaaattgactgttttggcgcagttttgttaggttaaatttacataaaagcattctaattttgtgtgttctgttcactgaattcttaggtttcttatgtcaaatctttctctgtttttctattttcttgaacagcaagttaacattgtgaaacctcaagtgatgctcca

SEQ ID NO: 96675 - DNA, 767 bp, Arabidopsis thaliana columbia
ttttgattttccgggttgggttttttccaattccaaggaggaaaaggaaattaattgcgggataaagagaaccaagagcccaaaggcttgggggtaacaattttggttcgaagcactttgtatctccagatattcgcccctacggggttaggctacttagtgcaagggatatggctcaaataacagtcataggaaaggatcggatcgtgtacagtacagatagagatatgatggaacaaaactatgagacagacgaatgggacaggagattcaaagagttagaaaaatcggattgaaatgtgaaatctgggacttgtgaccttttgctgttatatgctaagttacgtagcagctcacacatcatccgcaacacagaattttcccaacaacgtaaaaacattcatggacgctggagttaaagcggatgacacaagccatggcacatactgtttagacattcttcctctctctgagacagaaaataactggtttatagaggtctcttaagctctagtggtaatagaccattttgtgatgctccgtaacacaacaagcttggtcttgtttaaatcatccaggagatccaagtattgcttgttcctgagagttactacaaatgcaacaatagattatgtacattaatttgtatatacgaaagtccaaattcttgctcataagaatgaataatcaatgtatctatccgcggccgcgcggccgcggattcgcgatcatgcaagactttatgcgataaccgttcgtaccttcgt

SEQ ID NO: 96676 - DNA, 525 bp, Arabidopsis thaliana columbia
  unsure (1)..(525): unsure at all n locations
cgagaacaaaaacaatggcgaaattattcatcaagcaagcagagcaatatgcagcagcccgacccagttaccccaccaaactcttcgaatatatcgcatcgaaaacaccgtgccacgaccttgcctgggacgttggcgccggaagcggccaagcctcacgatcgctagccggaatctacaagaacgtgattgctacagacacgagctcaaagcaacttgaatttgctgcaaagcttcccaacgtccgttacgagatcactccaccgacgatgtcttcatcggagatcgagaagcttagtagcacctgtatcattcaggttggttttagtcacccgttggcttcaaggccccttcatttggttcgaccctttaacgnanttttttacaagcaaacggtggaananggtgcttcaaagaaancccaaccggggtnaatntgccgccccttggnngnttaaacccattncccgggannttnacggacgnccnttggccaaaggttttttnaangggttttttcgggtt

SEQ ID NO: 96677 - DNA, 576 bp, Arabidopsis thaliana columbia
  unsure (1)..(576): unsure at all n locations
ggccgttaggatcatcaagaaatggcaatatgctgcagataaggttcctgatgatcttttcattaggacaacattggagagatcaaacaagaacgcagtacacgcttggttcactggactatatattggtccggtgaacaatctattggcgttgatggaagaaaagtttccggaactaggtcttgagaaagaaggttgtgaagagatgagttggattgagtctgtactctggtttgctgatttccctaaaggagaatctcttggtgttctcacgaatcgtgagcgtacatctctatctttcaaaggcaaagatgattttgtccaagaaccgatacccgaggctgcaattcaagagatatggaggcgattagaagcccccgaggctcggcttggaaagatcatattaactccatttggtgggaaaatgagtgaaatggcagagtacgaaccaccattcccacatccgagggaggggaacccctatgaggttcagtatgtggcttcctggagagaaggggggggccagaaccggaccgggacagttaaacatgtaatgggcctaacccgtnccggatt

SEQ ID NO: 96678 - DNA, 827 bp, Arabidopsis thaliana columbia
  unsure (1)..(827): unsure at all n locations
gagaggtgcaaaaaagaactgcaagctgttggaaagcaatacccatttgaacctttgaagtttctaccaaaaacattgaggttaacgtttgaagaaggggttcaaatgcttaaggaagctggtgtggaggttgatccncttggcgatctaaacactgaatctgagagaaaactaggccagcttgtattggaaaagtacaacactgagttctatattctgcatcggtatcctaaggcagttaggcctttctacacaatgacttgtgccgataatcctctttacagcaactcttttgatgtcttcatcagaggtgaggagatcatatcaggagctcaacgtgtccatatcccagaagtcttggagcaacgtgcaggagaatgtggcattgatgtcaagacaatatccacatacattgattcattcaggtacggtgcgcctctacacggtggatttggagtggggctggagcgagtggtcatgcttttctgtgcactgaacaacattcggaaaacatccctcttccctcgtgaccctcaaaggctttcaccctaatatcttttcaactgaaagctatttagtgaataattgtccaactccacaaatttttctcatgaagcttttagagatttttacttcttgttgtctaactctcctccttttttataagtgaatcttggtttttgttttgtgatgtttatgtttcattcacactaatttgagtcttttaattgcttaaaaaaaaaaaaacacaagnnnnnnnnnnnnnnnnnnnnnnnnnnnnnnnnnnnnnnnnnnnnnnnnnnnnnnnnnnnnnnnnnnnnnnnnnn

SEQ ID NO: 96679 - DNA, 775 bp, Arabidopsis thaliana columbia
  unsure (1)..(775): unsure at all n locations
ggccgacaacgattatccttacaaagctctcaatggagtctgcggcgcccgcctcaaggaaaacagcaagaatgttatgattgatgggtatgagaatttgcctgcgaacgatgaatccgctcttatgaaagcggttgctctccggcctgtgactgccgttgtcgattccagcagccgagagtttcagctttatgaatcgggagtgtttgatggaacttgcggaacaaacctaaaccatggtgttgttgtggtcgggtatggaaccgagaatggtcgtgactactggattgtgaaaaactcgaggggcgacacatggggggaggctggctacatgaagatggctcgcaacattgccaatccaagaggcctatgtggcatcgcaatgcgagcttcataccctctcaagaactcgttttctacggataaagtttcggttgcctaataatatgaactaaatgtatgccatggaacggatcggttaagccattatcgttattcgactttgaaggaaactaaaaagtaatgtggtcgattggtttggttttgttatatattatgcatttgtatgggggtcagtcaatgtttgaactttgtataatatttctttgggtctagtgataaatattttcccctttgaaaaaaaggtacttgtgtgagacgagattgatgagtgaaaaaaaaaaaaaaaaaaagnnnnnnnnnnnnnnnnnnnnnnnnnnnnnnnnnnnnnnnnnnnnnnnnnnnnnnnnnnnnnnnnnnnnnnnnnnnngaatcg

SEQ ID NO: 96680 - DNA, 630 bp, Arabidopsis thaliana columbia
  unsure (1)..(630): unsure at all n locations
cgcttacgtgacgttactacactcatcggaggtatacgtatgcggagcaatagccttagcacaaagcataaggcaatctggatcaaccaaggacatgattctcctccacgatgactctataaccaacatctctctcattggcctaagccttgctggctggaaactacggcgagtggagagaattcgtagtcctttttccaagaagcgttcttacaatgagtggaactacagtaagttacgtgtgtggcaagtgacagattacgacaaactagtgtttatagacgcagacttcatcatcgtcaagaatattgattaccttttctcctatcctcaactttctgccgctggcaataacaaagtcttgttcaactcaggagtcatggttctggagccatcagcttgtttattcgaggntttnatgcttaaatcattcaagntcgggtcatacaacgggggngcccaaggatttttgaacggatatttcgtgtggtggcatagggtatcnaaacggttaaatacggtgaatccttgggggtgaaanaggcntgttaagcnggaaatnttccggaaatttgggggntncctncttgggcctaaacntggggttttngggctcggttancgggggtc

SEQ ID NO: 96681 - DNA, 497 bp, Arabidopsis thaliana columbia
actcactatagggaaagctggcacgcctgcaggtaccggtccggaattcccgggtcgacccacgcgtccgaaaggcacaccaccattgaattgaacttccctcacacgcaagtaccacaccttctctctctctctctctatcatctcttttctttttctctcatcgccttgaagctctgagaagtagagagaagctccgatctgataggaactgtgagtttccttgagtctccggagaaagaagtcgccgatttgctcctgataatcttagtctcgaaatcaaaacgatgttttgcgattgcttctactggaataaaggtttctccgagttggaatcggaatcgtccgagtcaaagcccttctcgcttccatctcctcttcctcaatggccacaaggcagaggttttgctactggaaggataagtcttggagaaatccaagtggtgaaagtcaccgagttcgatagagtttggaaatgtggcacctcgcgtggtaaa

SEQ ID NO: 96682 - DNA, 445 bp, Arabidopsis thaliana columbia
  unsure (1)..(445): unsure at all n locations
atacaatgagggtgctaggtttacacttagcgctanaggagcaagattattgggtttcatggatttgctgacaagtatctcaactctcttggagcatattttatcaagattccttcaatccaatcagcaatcgaaggtgctaaaaccacaggaaaaggttttgatgatggtggtgactacgacggcataagaaaagtgtacgttacaactgatggctctgcaattaggcatgtaaggttcgactatgacaaagccggtcaagtgggaactcgtgagccccggggcgaagaccggaacacaacatgagtttacggtcaatcatccctatgaatatatcacaccctgtggagggaacctccgctcatacccaaccctttccaattgtgttggttcttacatcgttaactttcaaaacattaaaaggaagagcctctccagcgattgg

SEQ ID NO: 96683 - DNA, 427 bp, Arabidopsis thaliana columbia
atttgggtcaaatgtttgagcttttcgttgagcttagcaatcgccttcgcgtcaatctgatggcgtatgattacatcggcggacggtcagtctactggacaggctagcgagtgtaatacatatgctgatatagaggcatcatataaatgcctcaaggaaaagtacggtgtaaaagacgatcaactgatagtatatggtcaatctgttggtagtggacctacggttgatctagcttcacgcacacctaacttaagaggcgtggttttacagtgtcctatcctgtctgggatgagggttttgtatcctgtgaaatgtacatattggtttgacatttacaagaatattgacaagatcggctcagttacctgtcctgtattagtaatccatggtactgcggatgaagtagttgattggtctcacggaaaac

SEQ ID NO: 96684 - DNA, 415 bp, Arabidopsis thaliana columbia
attcgatgtagtgggtcctgtttgtgaatctgctgatttcttgggcaaagacagagagcttcccactcctccacagggagctggtctggtggttcatgacgctggtgcatactgtatgagtatggcttccacttacaatctcaagatgcgtcccccggaatactgggttgaagaagatgggtcgatcactaagatcaggcatgctgagacattcgatgaccatttacgtttctttgaaggactatgaactccgagatttactcatcattgttgctattttagatgaattgtatgattacgtttctataatgctattgctgtcttggatttttccacattctgtgctatgatttaaagtcctcaataaagtgatcatatgaataagaaacaggtcacaagtcaagaccgaaaaaaa

SEQ ID NO: 96685 - DNA, 544 bp, Arabidopsis thaliana columbia
acgaatggaactaaaaacttaatagtcatggatggaggtttggctggagcttatccgtcccagtctttatgatgcttatcagcacattgagttggtctctcctccaccggctgaagcagaggttaccaaattcgacgtagtgggtcctgtctgtgaatctgctgatttcctgggcaaagacagaggagcttcccactcctccacagggagctggtctggtggttcatgacgctggtgcatactgtatgagcatggcttccacttacaatctcaagatgcgtcctccggaatactgggttgaagaagatgggtcgatcactaagataaggcatgctgagacattcgatgaccatttgcgtttctttgaaggtctatgaactcttagatttactcatcattgttgcttttttgattgaattgtatgattattcggaatcaggaccataatgatattgctgttttagattttcacattaaaaaaaaaaaaacaaagggcggccgctctagaggatccaagcttacgtacgcgtgcatgctacgtcat

SEQ ID NO: 96686 - DNA, 1758 bp, Arabidopsis thaliana columbia
  unsure (1)..(1758): unsure at all n locations
aaagccaatgagaagctgacgaaaaaccgcgttggttaaattacatataaatgggttttgtgaattcaaataaagacgaagacaaaaagtttgagactttatctctactttgacccgaccagcgaaagtgtaaattgaaagatagatagaaagaaagagccaactttaaaagcttagcggttgatttcgaaatctcgtcgccggcgcgtggagtcttttcgtcggacaacaacaagagaaaagagatttgtggtgttcttctgcttagaattgttgttttccatctccggcagtgagatttggtggagaattttgatttgtaatcgatggttaaggaaacagagtactacgatgtgctcggagttagcccaactgctacagaatctgagattaagaaagcttactacataaaggcacgccaagttcatcctgataagaaccctaatgatcctcaagctgcacacaatttccaggtcttgggagaggcctatcaagtactaagtgattcaggacaacgccaagcttttgatgcatgtggcaagtcaggaatctcaactgatgcaatcatcgatcctgctacaatttttacaatgctatttggcagcgaactttttgtagggtacataggacagcttgctatggcatctatggcttcacttgatatcttcacggaaggggatcagtttgatacaaaaaagatacaagaaaaattggggattgttcagaaagaaagagaagacaagcttactcagattctgaaagaccgactcaacgaatatgtaataaacaaagacgaatttatcagtaatgctgaagctgaagtagcaagactctcaaatggcagcttatggtgtggatatgttgaatacattgggtatatatatgtaagacaagcagcaaaagagctagggaagaaagctatttatctcggagtcccattcattgctgaatggtttaggaacaaaggtcacttcatcaaatctcaattaacagctgcaacaggcgcatatgcgttgttccagttgcaggaggaaatgaaaaggcagctaaatactgaaggaaattatactgaggaggaacttgaggaataccttcaggcccataaaagagtgatgattgattcactgtggaagctcaatgtcgctgatatcgaagccactctttgtcgtgtttgtcagctggttcttcaagatccagaagccaaaagagaggagcttcgtacaagagcaagaggtttaaaagctctggggaggatctttcagagagccaaaacagctagtgagagtgatcctttagaaaatagtgaacctcaaaagttaaacggaaatggaaagaaccacgatgaggatacttctacatcaccaaaatccagtgaaggatctcactccacctctggtcctcaggaaccacaaaacccctacgtgaaagaattcaaacttggagatgaacaatttaactattacttcccacgaccagcgccacctcctggccagggaaatactcttcctctggctatgattgattcaggtgagatcggggcatatatatatatatatatatatatatatcagtctagatatttctatgcagttgtgtaccatatgtaaattattccttttttcttttggtttggcttgttagaagaaaatgattgatgttgaaagcacatataaaagctctttcgtgataatgtatccatgtaaattaattatgaagggataatgacttagagtatnnnnnnnnnnnnnnnnnnnnnnn

SEQ ID NO: 96687 - DNA, 503 bp, Arabidopsis thaliana columbia
actccttaccgctaccaaacgcttctcctttaatcatcatcatcatcattttatctccgtcccttcatgttccgttaccgttaacggctgtttttttttaatctccggtgaccgttctttttctgattccaggtgttgccagctgtttttttttttgggagatattttttttaattccttttaaagttagttataagtcagttttgtctgcttggattttcatttataaaacaaggtggaattaggtttcttccgatagagaaaggggcttgattttggacaaaggcacgtgtcttagtcttttattcaagctccgatctataagttatgatttgggtttggttttgagttctccaattttagtctcatctctgtggttgttgtaactgggtttgtgatggaagctagaattgaaggtgaagtagaaggtcacagtttagaatacgggtttagtggtaaaaggagtgtagagtgggatttgaatgattgggaatggaatggtg

SEQ ID NO: 96688 - DNA, 405 bp, Arabidopsis thaliana columbia
  unsure (1)..(405): unsure at all n locations
gaccacgcgtccacccacgcgtccgagacaataatggaaactatatacctaattctctctctcttcttcttcttcatcttcctatctctcaaactcttgttcggaccacggccgcgtaaactaaacctaccgccgagtccgagtcgaccatttccgatcatcggacacctccaccttctaaagctaccactccaccgtagatttctctctctctcagaatctttaaacaacgccaagattttctctctcagcctcggctctcgtctagtttttgttgtttcttctcacgccgtcgcggaagaatgtttcactaagaacgacgtcgtgttagctaaccggccggagtttctcgtcgggaaacatatagggtacaactctangaccatggttggtgcggctttatgg

SEQ ID NO: 96689 - DNA, 722 bp, Arabidopsis thaliana columbia
gatctaacggtcgttcgtacgcgatgatatcttcgtctccaccgcgtaaaaggctggtcaaggatttcaatattgagattgctcctgaagatgatttttctcaacgggcctggatgctcaagtatccttcagcgattacctcgtttgcgcatattgcacgctcagcaaagaacaagaagatagctgtgtttctagattatgatggaacactttctccaatagtcgatgaccctgatcgcgccatcatgtctgatgcgatgcgtgctgctgtgaaagatgtcgccaagtacttcccaacagcaataattagtggtagaagccgtgacaaggtctaccaattggtaggactaaccgaactctattacgcgggtagtcacgggatggatataatgactcctgtaaatccaaatgggtctcctgaagaccctaattgtataaaaaccactggaccaacagggtgaggaggtaaacctctttcaagcctgctaaagggttcatacccgtcatttgaaggggttttttatatccccgttgagataactaaatgtatcaaaggtgcaaaagtagagaaccataagttttgtacttctgtacattaccgtaatgttgacgagaaggactggccccttgttgctcaacgcgttcatgaccacctgaaacaataccctcgtttgcgtataactcacggtagaaaggttttagaggtgcgtcctgtgatcgag

SEQ ID NO: 96690 - DNA, 501 bp, Arabidopsis thaliana columbia
  unsure (1)..(501): unsure at all n locations
cnnnnnnnnnnnnnnnnnnnnnnnnnnnnnnnnnnnnnnnnnnnnnnnnnnnnnnnnnnnnnnnnnnnnnnccacgcgtccgcccacgcgtccgcccacgcgtccgcccacgcgtccgcacttccccaatctctagatgacaatctaacgatacagttccttttagatcgattaccaaatacaaaggatcaatttttcttacatgaacactctgttgtaatggcagaggagaatctagaactgagtcttttatgtacagagagcaacgttgatgatgagggcatgattgttgacgaaactccgattgaaatttcgattcctcagatgggtttttctcaatcggagagtgaggagattatcatggagatggtggagaaggagaagcagcatttgccaagtgatgattacatcaagagacttagaagtggagatttggatttgaatgttggaagaagagatgcccctcatttggatttggaaggcttgtgaagtacaccagtt

SEQ ID NO: 96691 - DNA, 543 bp, Arabidopsis thaliana columbia
  unsure (1)..(543): unsure at all n locations
aagcttttcttcgtttatcatcaccatcaccatcatcatcatcatcatcatcgtcatcatcatcatcatcatcatgacgtatgagaacaatagtgtaccaagaattgtaatcaagaaagttctagcaaagcttcgagaaggaaggtgaaggagctgtcgttagaaatggcatcacaaagattgaccagaagttattggacccgttcgtgttgctagttgaattttccttttcactctcagctggattcccagatcattcctcacagaggttttgaaagtgttacatacatgctacagggaggtatcattcacaaagatcctaaaggtcataaaggtacanttcaagccggngatgttcagtggatgacagcaggangnggantcattcattccgaatttccggaaggnggaggtaaccaatggtttcaggtttggtcaattcccttcccctgaaaattgctgacccaaattaggncctntcgggttagcatcctggcngagnacgggtnggcaagnttgccgggtcatggtnaacccgctttt

SEQ ID NO: 96692 - DNA, 519 bp, Arabidopsis thaliana columbia
  unsure (1)..(519): unsure at all n locations
nnnnnnnnnnnnnnnnnnnnnnnnnnnnnnnnnnnnnnnnnnnnnnnnnnnnnnnnnnnnnnnnnccacgcgtccgggaaatagagatttgaatctcgagtattatggagattaatgttgatgaagaagctgggatcatcaaagaagaaacagttccactcctggatgatcaaaatcgaaatcgggacttacctgacatagaaaggaacactatgatgcaaaaggcaataggtaagacttttcagacaacagctaatctagctaatcttttacctacggggacagttcttgcattccagattttatcgccaatttgcacaaacgttggacgctgcgatctaactagcagattcatgactgcgttgctagtttccatctgcggattctcttgtttcatacttagcttcacagattcttacaaggatttgaatggtagtgtctgctatggatttgcaacaatccatggtttctggatcattgatggctcagctactcttccctcagaactttccaaaagct

SEQ ID NO: 96693 - DNA, 373 bp, Arabidopsis thaliana columbia
aacaagcgtgaattcaccgcgccaccgccaccaccagctccggtaaaggaagagaaagttgaggagaagaaaacagaggaaacagaggaaaagaaggaagaagttaaaacagaggaaaaatctcttgaggctgaaaccaaagaagaggagaaatctgctgctccggccaccgtagagaccaagaaagaagaggtcctggccgctccggctccgatcgtcgcagagaccaagaaggaagagacaccagttgctcctgctccggtagagactaaaccggctgttccggtcgttgccgagacgacgagggaagatatgttaccagctgctccggtcaccacagagaccatggtggaagagaaagtcgttccagtag

SEQ ID NO: 96694 - DNA, 700 bp, Arabidopsis thaliana columbia
  unsure (1)..(700): unsure at all n locations
caagaaaggtcaccgggcgccacaagtaatgatcgcgatgagacgccagagactgtggttagagaagtccacgcgctaactccagcgccggaggataattcccggacgatgacggcgacgctacctccaccgcctgctttccgaggctatttttctcctccaaggtcagcgacgacgatgagcgaaggagagaacttcacaactataagcagagagttcaacgctctagtcatcgccggatcctccatggagaacaacgaactaatgactcgtgacgtcacgcattgttaagatgagagacaagtctagttgatgagaatccacgaggacacggatcatgaagaggaaacgaatcctttagcaatcgtgccggaccagtatcctggttcgggtttggatcctggaagtgataatgggccgggtcagagtcgggttgggtcgacggtgcaaagagttaagagggaagaggtggaagcgaagataacggcgtggcagacggcaaaactggctaagattaataacaggtttaagagggaagacgccgttattaaccggttgggttttaatgaccaagtttacaaaggccacnttttggttgaaggaaaatttntgnggnaagctttnaggnggnanaacccaaacccgtttggggaaaaccgcaaacaatttttgnngnaaccccatgnggnaannccnggga

SEQ ID NO: 96695 - DNA, 522 bp, Arabidopsis thaliana columbia
  unsure (1)..(522): unsure at all n locations
cccaaggtttaatccgctcccctaaaagaaaaatgggaggcctgcaaggcccggtccggcattacgcggtggaccccacgcgtcccggctgcgtcatccaagatggttcgggtggtgcgggtgctggtgggttctcgtacgagtatggggctcgtgattcagggtttggagtagttggggctcagatgagacatgttcaggcccatgggccgagaccatcggttaatgggttttcaagagaagtaggaactacttttgatgatggtttagggttggatttgcatctcagtcttgcacctgctggtcattgacgtgttttttaaagctcttgtatatttatcaacattttaattaatttatttatttttagtgattttttttttctctatcagtatttttaattaatgactttaaattccagtgaaaaaaaaaaaaaaaaaagggcgaccgctctagaggatccaagcttacgtacgcgtgcatgcgacgtcataatcttctatagtggacctnnnnnnnnnn

SEQ ID NO: 96696 - DNA, 640 bp, Arabidopsis thaliana columbia
  unsure (1)..(640): unsure at all n locations
agaagctagatcttgagaagtgtcctgggattgacggtgggcttgtncacctgcgagctttaaccaagctagagtccttgaacataaagtggtgtaactgcataactgatgcagacatggagcctctttcagtacttacaaatctgaggagcttacagatttgctgcagtaagattaccgatatcggtattagctaccttaaagggctaaacaagcttaatttattgaacttggaggggtgccgtcatgttactgctgcatgcttggacacactcacagctcttgcagggttgattgtatttgaacctcaatagatgtaatttttcagacagcgggtgtgtatagtttttctgatttaattaatttgaaggtactaaacttggggcatgnaccaacattncaaattcatgcttgggccncctgaaaggttttgacaaaagttnggaagcttgaattttnggttcttgtagnatttggtgccgggggcctggaccattttcagggatgntttngttgaaccnctnggggtgcctganccnaggtnggagaattggcttcccattttttgncttaaaccttgggggtacctgcattcctttngcccannggtagaaatntggtanactncgcctnncnggnc

SEQ ID NO: 96697 - DNA, 795 bp, Arabidopsis thaliana columbia
cttgctgaagaattgcttccatctgcaatattcaagcgagctcctgatcagagctttgagttgacaaatgcagcaatcgatttcctgaaaggaatgtatatgttgtttgatgacgaccaggataacaatctgagacctcaagagatcgaggatcttttttcaactgcacctgaaagtccatggaaggaagctccttatgaagatgctgcggaaaaaactgcccttggaggactatcatttgacgctttcctgtcaatgtggtcactgatgacactattagaaccggctcggagtgtggaggaattttgatttacattggattcccgggtgatcccatcgactgccattcgtgttactaggagaagacgtttagatcgcaaaaagcagcaatgtgaacgaaaagttttccagtgctttgtttttggacctaataatgctggaaaatctgcattgctgaattgctttcttggaaggtcatatactgataaccaggaatcaactactgatgagcgttatgcagtaaatatggtcgatgaatcgggtgctaagaaaactcttatcatgagggaaattccagaagatggagttcaagggctattttcatccaaggaatccttagctgcatgtgacatagctgtcttcgtgtatgacagttctgatgagtcgtcatggaagagagcgacccagttgcttgtagaagttgcaaattatggtgaggccactgtgtatgaggtcccttgcctcatggtttcagcaaaagacgatcttgattcatctcctattttcatacaagaa

SEQ ID NO: 96698 - DNA, 2653 bp, Arabidopsis thaliana columbia
  unsure (1)..(2653): unsure at all n locations
cttgcaacaacaacacctttctaaaaccctaatttcaaaatcgactgatgttagcgattcgatcgtcgaattacctccgatgcataccttctctctgtactaaaacccaaatctctcaattctcctccgtgttaatctcttttagccgccaaatttcccacttgcgtcttagctcgtgccatagagccatgtcttcttcccgcccttctgcatttgatgctctcatgtccaatgctcgtgcagccgccaagaagaagactccccagacaactaatttgtctcgctcgccgaacaaaaggaaaattggagaaacccaagatgctaatttgggcaaaactattgtttccgaaggtacacttccaaaaacggaggatctgctggagcctgtttctgattctgcaaatcccagatcggatacatcgtcaattgcggaggattcaaagacgggagcgaaaaaggctaagactttgagcaagacggacgaaatgaagagcaaaattggattgctgaagaagaagccgaatgatttcgatcctgaaaaaatgtcttgctgggagaaaggggagagagttccgtttctgtttgtcgcattggcttttgatctgatctcaaatgaaagtggccggattgtgattactgatattctgtgtaacatgttgagaactgttattgccactactcctgaggatttggtcgctactgtttatctttcggcgaatgagattgccccggctcatgaaggtgtagaattgggaattggtgagagtacaattatcaaggctatctctgaggcttttggtagaactgaggatcatgttaagaagcagaatacggaactgggagacttgggacttgtagcaaaaggaagccgttcgactcagactatgatgttcaagcccgaaccattgactgttgtcaaggttttcgatacgtttcgacaaattgctaaggaaagtggaaaagatagtaatgaaaagaagaagaatcgaatgaaggcacttcttgtggcgacaacagactgtgaacctctttacttaacacgattacttcaggcaaaattgcggttagggttctcaggtcagactgtcttagccgcattgggacaagccgctgtatataatgaagagcactcaaagccacccccaaataccaagtctcctttagaagaggctgcaaagattgttaaacaagtattcactgtacttcctgtctatgacattattgttcctgctcttctaagtggcggtgtgtggaatcttccaaaaacttgtaactttacattgggtgttccaattggacccatgcttgcaaaaccaaccaaaggtgtagctgagatactgaataaattccaggacatcgttttcacatgtgaatacaaatatgatggggaacgtgcacagatacattttatggaggatggtacatttgagatatacagtcgaaatgctgaaagaaacactgggaagtacccggatgttgctcttgcgttatcaagattaaagaagccttctgtgaaatcttttattctggattgtgaagttgttgctttcgacagggagaaaaagaaaattcttccgttccagattttgagcactcgagcccgtaaaaatgtgaatgtcaatgatatcaaggttggcgtatgcatctttgcttttgacatgttatatctaaatggccaacaacttatccaggagaatcttaaaattcgccgagagaagctatacgaatcatttgaggaagatcctgggtatttccagtttgcaactgctgtaacatctaacgatatcgatgaaatacaaaagtttcttgacgcttctgttgatgttggctgcgaaggtttaatcattaaaacattggactcagatgctacctatgagcctgcaaagcgatcaaataattggctaaaactgaagaaagactatatggacagcattggggactctgtggatcttgtaccaattcctgctttccatggacgtggaaaacgcacaggtgtctatggtgcatttttactcgcttgctatgatgttgataaggaagagttccagagcatttgtaaaattggtactggattttctgatgccatgcttgacgagcggtcgtccagtcttcgctctcaagtgattgctactccaaaacaatactaccgagttggagacagcctcaatccagatgtttggtttgagcccactgaggtctgggaagtgaaagcagctgacttaacaattagccctgtgcaccgtgcagctactggcatagtggatcctgataaggggatttctcttcgttttcctcgtctacttcgtgtacgggaagacaagaagcccgaggaagcaacatcatctgagcagattgctgatttgtaccaagctcagaaacacaatcatccaagtaatgaagtcaaaggtgacgatgattgaacaacagtaatctggcctcagagcacatttcctcgtatgtacgacattgctcgtaacttgctaatgatgcacattgcgtgtttgagttttcaactgtaactgcttatgtaaaactgcttttaggaaaagtgaatgaaaggttctggaaaaaaattggtacactcatcaactgactctggaatgaataaaaacacagccctgattgacatcnnnnnnnnnnnnnnnnnnnnnnn

SEQ ID NO: 96699 - DNA, 536 bp, Arabidopsis thaliana columbia
gagaggtggtaaagttgggtttggtcctgacggtggagatctgtcttctttctttgttaaatctattgaagaagttccgtataacatctccattattcagatcagtagagttttaccgtcggagactgcggcggctccgactcctgctccggcggagatgaatcttaccggaataatgtcggctcatggatgcaaagtgtttgctgagactcttctcactaaccctggagcttcaaaaacctatcaggagagtttagaaggaggcatgacagtgttctgtccaggagatgatgcaatgaaaggtttcttgcccaaatacaagaacttgacagctccaaagaaagaagcatttctcgatttcctcgctgtcccgacatattactcaatggcgatgccaaatccaacaatggtccgatgaacacacttgcgacagatggagctaacaagtttgagcttactgtacagaacgatggggagaaggttaccctcaagacaaggatcaacactgtcaagatcgttgatactcttattgatga

SEQ ID NO: 96700 - DNA, 620 bp, Arabidopsis thaliana columbia
  unsure (1)..(620): unsure at all n locations
tgcaggtcccggttcggatttcccgggtcgacccacgcgtccgatttgtctgaatcttcctctcctgatgatcactccaagtaacttcaaagaaacgctcagattcgacagttctatatatcaacaaacatcatctcaagctcttacctgatatctctgttttgatggatcaaagtcgggttttgcggtttataggccaagtggaaacctgtagagttgttcttctcatggttctggttgttgccttcgtttcaggccttcagtattttgagctctctccagtactactatctattgtttcacctggaaacagcactatttctgaattcagaaaatccaatgatacggctaaaagtgctgaaaatgaaacgtttcttgcatctcaagaagcatccaccgggcttaaaccgtataacaggactacagagggtattgaaggggttctgggcacaagtttctggatgattctcacaaaatagaagcttcttgggcaacggtggaggagcaatgaaccggaaggtctctggatccnnttnaaccaaggttccttaatccgaaggaaantnccccttngggggttnaaagccccttaattgnanttnattagggggtngccatnt

SEQ ID NO: 96701 - DNA, 370 bp, Arabidopsis thaliana columbia
acggacgcgtgggtttctctatctttaactcccttcacacctctccctctctcttcttcatatctctctctgtcacaatagtgtgatgatgcaatgagaatggagttgatttcagtgattttcttcttcttttgctctgttttgagttcctctgctttaaactctgatgggttggttttgatgaagtttaaatcctctgttcttgttgatcctctgtctttattacagacatggaattacaaacacgaaagtccatgttcttgcagaggaatctcttgtaataacgattctaaagtcttaactttgtctcttcccaattctcagcttcttggttcgattccttctgatttgggttctctcttaacacttc

SEQ ID NO: 96702 - DNA, 548 bp, Arabidopsis thaliana columbia
  unsure (1)..(548): unsure at all n locations
cnnnnnnnnnnnnnnnnnnnnnnnnnnnnnnnnnnnnnnnnnnnnnnnnnnnnnnnnnnnnnnnnnnnnnnnccacgcgtgcgcccacgcgtccgatcgtttcaatttctaaaattctcctctctcaacgcaatcaccaaatccaaatttagggtttcttttctctttctgcgatcgatctctgaaaactcataactgttgtttaatcgtgaagatggcatcaaacggatctttctctgctcagagaaacgcaaacgctagaacaacgatgaagagaagaagcgacaatcgcggttacggtggcggaatcggaggttatcaagaggagacgaaccgttacgcgccgccgcaaaaacgtttcagatcacaagcgcaacagcaattccgatctggtcataatcctctgtatcatcatcatggtagtaataataataacgtgtctagggtttcttctcaatcatataacaattgcggtgttgatgtgattgcttctaattcaagttttgcattacgtaacaatgattctaacaccaacaattatcagaaac

SEQ ID NO: 96703 - DNA, 542 bp, Arabidopsis thaliana columbia
  unsure (1)..(542): unsure at all n locations
aatntngcactttcgnggggctgtgntgccactttgcnccatggtaatccccccatggcatttaggttccgntntagttntnagnccggggggtnttatggtganctggaanctgnggcttatcgggtgccctttanggaactccctgctatataatgtcaagtgaattggtcaggaggcaggtcactcactgcacaatttgtctgcaggacatcaaaacaggggaaatccacacgaagcttaccgaaatgtgatcatacgtttcatctggtatgtgttgataaatggctcatcagacacgggtcatgccccatttgcagacaggcagttaaagattaaaacacgactgttgccgagctgtgtacatagcaaaaacacattatccttatatgttgttgtaacttgtaagtctaaaacccctttcttctgtatttttcctcatttcatttagagcgatctcagcttgagccataggtttcgacttttccctgcctattgttgtagacatgaataagaatacctacagatgtattgaaaagaat

SEQ ID NO: 96704 - DNA, 657 bp, Arabidopsis thaliana columbia
  unsure (1)..(657): unsure at all n locations
aaangttgccttcantngcggaatgaacccntcctgattgcttccccngggccagggcccggtggaagccaantaggccncttncccaaagggnccagaggctntcgggannncctgacccaacgcaaggaagatgatgatgatgatgagtcatacgaagtgacccttgacgaagactttctcactgccttggaatacggaatgcctccggcttcgggaatggggcttggaattgacaggctggtgatgctgttgacgaactccgcgagtataagagacgtcattgcttttcctgttctgaaacttcagcagtaacactgaaacatgcaagtggtaatgcatgttgtagcttttatagcattcttgtgtatctttattggtgatttctccagcaggaagttggaggaagaatgtgtaacagacgtcattagatagcaaaacaagaagttattttattcttgatgagtgcctaaaacagaacacacaaaaacttggatcattccattttatcccatttggcatgtggtaaacagtaagaaacaaataaagttttgatttaatctcttaaaaaaaaaaaaagccaaaannnnnnnnnnnnnnnnnnnnnnnnnnnnnnnnnnnnnnnnnnnnnnnnnnnnnnnnnnnnnnnnnnnnnnn

SEQ ID NO: 96705 - DNA, 585 bp, Arabidopsis thaliana columbia
  unsure (1)..(585): unsure at all n locations
ctggcgtgtgctataaaagagcgcaaagcagtagagcaactagtatctcattgcccgaagaagtgatacaagggtgtggaaacggttgacttacgtataatagacgaatatttctgttacaaaatgcgttgtgaccgccctgtacaccctaccgcgtccgcccccaaccactctctctccgtctttctccccgccttgcaatacggaatgcctccggcttcgggaatggggcttggaattgacaggctggtgatcctgttgacgaactccgcgagtataagagacgtcattgcttttcctgttctgaaacttcagcagtaacactgaaacatgcaagtggtaatgcatgttgtagcttttatagcattcttgtgtatctttattggtgatttctccagcaggaagttggaggaagaatgtgtaacagacgtcattagatagcaaaacaagaagttattttattcttgatgagtgcctaaaacagaacacacaaaaaaaaaaaaaaaaagggcggccgctctagaggatccaagctacgtacgcgtgcagtgcgacgtcatagatctnctatagtgtcgtcctaaa

SEQ ID NO: 96706 - DNA, 1345 bp, Arabidopsis thaliana columbia
  unsure (1)..(1345): unsure at all n locations
tacaaagaagcagacgacaacaccaaactccgatcatcatcatcaacaacaacaacaacaacaacgatgctgcttcgaatttctggtaacaatctgagacctttgagaccacaatttctcgctcttcgaagctcttggttatcaacttcgccggagcaatctactcaaccacaaatgcctccgagagtaccaaatcttattggaggttcttttgttgagtctcaatcatcttcgtttatcgatgttataaaccctgctacacaagaggttgtatctaaagttccattgactactaatgaagagtttaaagctgcggtatccgctgcgaagcaagcgtttccgttgtggagaaacacgccgattactacccggcagcgtgttatgctaaagtttcaagagcttatacgcaagaatatggataaacttgctatgaacatcacaaccgagcatgggaagactttaaaggattcacatggtgatatcttccgtgggttagaggttgtggagcatgcgtgtggaatggcaaccttacagatggtgacatgtggtaatacctttattctgaagccatcagagaaggatcccggtgcttctgtaatacttgccgagttggcaatggaagctggtttacctgatggggttctcaatatcgttcacggaaccaatgatactgcgaatgctatctgtgatgatgaagatataagggctgtttcttttgttggctccaacacggctggaatgcatatatacgcaagagcagcagcaaaaggaaaacgtattcagtcaaatatgggggcgaaaaatcatggacttgtcttncctgatgccaacatcgatgcaactttaaatgcgctacttgctgctgggtttggtgccgctggacagagatgcatggcactgagtacagtggtttttnttggcgatgcaaaatcatgggaggataaactcgttgagcgagctaaggcccttaaagtcacatgtgggtcagaaccagatgcagacctgggtcctntgattagtaaacaggcgaaagaacggatatgccggttgattcagtctggtgtagatgatggtgctaaatttctgcttnacgggaagagatattgtgggttccaggatatgtgaaagggaatttttatccggtcctacccattctatctgggagttaccccagacatggngtgttacaaaggnggaaatatttggccctgttcttgtgtgcatgcaggcaaacagtttttgttgagcccatatctataataaataaaaacaagnatgggaacggtgctgnnattttnaaggttgtcccggggcagcagcaatgaaaggttccacattgggccat

SEQ ID NO: 96707 - DNA, 870 bp, Arabidopsis thaliana columbia
  unsure (1)..(870): unsure at all n locations
atgattcttccnnnnnnnnnnnnnnnnnnnnnnnnnnnnnnnnnnnnnnnnnnnatggccgtttgcagtaccgctccggaattcccgggtcgacccacgcgtccgaatggcaaccttacagatgggtgaatatgttcccaatgtgtcaaatggagttgatacatatagtattagagagccattaggtgtttgtgctggcatttgtccttttaactttccagccatgattcctttatggatgtttcctgttgcagtgacatgtggtaatacctttattctaaagccatcggagaaggatcctggtgcttctgtaatacttgcggagttggcaatggaagctgggttacctgatggggttctcaatatcgttcacggaaccaatgatacggtgaatgctatctgtgatgatgaagatataagggctgtttcttttgttggctccaacactgccggaatgcatatatatgcaagagcagcagcaaaaggaaaacgtattcagtcaaatatgggggcgaaaaatcatggacttgtcttacctgatgccaacgtcgatgcaactttaaatgcactacttgctgctggctttggtgccgctggacagagatgcatggcactgagtacagtggtttttgttggggatgcaaaatcatgggaggataaactacttgagcgagcgaaggcccttaaagtcacatgtgggtcagaaccagatgcagaacctgggtcctggcattagtaaacaggcgaaagaaaggatttgcccgttggattaaatctggggtaaaacgatgggtgccaaaattactggtttgatgggaaagaaaatattggtgggtttccagggattccgaaggaaaggggaaattttta

SEQ ID NO: 96708 - DNA, 635 bp, Arabidopsis thaliana columbia
  unsure (1)..(635): unsure at all n locations
aactttncggcggttacccggttgattgggatttgtaatcagggccgtggnttnggcatctcggcggtgggtgaaaccaatgctcttctcgagagaaacaagattttgaatcgggaaactgctgttgccacggcagccatatatgactccatgtttgccacagaggacggcactatacccgctacttttcaggtgatttacatgacaggatggagagaacattcgtctcacccgcaggccaaacgaagaggttcagccaccgtatccttcacggatctccaaaagcaatttggcggacaatcttgatggaatgattgaagaagagaaacattcaataagcagagactttacaaatgacacttgagagagaaatcagtgacttaagctataaggtacttggaggaactcttgtagatttgtcggagtctttcactgggcgaaagcatcacaattaggacgcctgctttcgcccatgtatttcgtatcgaataatagctgatcagaaacatatttgtattttacaaaaatattacgaatacttaaaaaaaaaaaaaaaagatctcgnnnnnnnnnnnnnnnnnnnnnnnnnnnnnnnnnnnnnnnnnnnnnnnnnnnnnnnnnnnnnnnnnnnnnna

SEQ ID NO: 96709 - DNA, 484 bp, Arabidopsis thaliana columbia
cagtcactcaaatcattctctcatggcagcttcttcctcaattccgccgtcaaccgccgtaacctccgtcgttcgcaaatctctcctcctctcaaccaccttctccttccccgcttcttcattgtctccctccacgaaactaccacaaagacacattcaaagattgctcctagcttcctcctccgcatccgcatccaccgttccttccgattccaaaccggcgaagaaagaaacagtctacttcgacggcggagctcattacggagatctattagccaatctcattctaggtctaaccatcctttggctcccactaaccttagctgcagtgtctcgagcttttaaccttcgttacaggttcactaacctccgcgtgacggttatttcgggactcaccggagatgatcggagcgatttctcgtacaaagtgataaaagacgttcaagttgtgccgaggttcatcggagaatggggagatatcatc

SEQ ID NO: 96710 - DNA, 481 bp, Arabidopsis thaliana columbia
  unsure (1)..(481): unsure at all n locations
catcaagcaaagtaacaaattccataaacacaattagctaaaagaaagaaacaatcatgaaggccaccatatccatcactaccatctttctcgtggtcgctttggccgcaccctccctagctcgtcctgacaaccatgtcgaggactctgtaggccgtctacttcgtcctggtcaaacgtaccacatcgtacctgcgaatcccgagacaggaggaggtattttctcgaacagtgaaggaatctgtcctcttgacatcttncagtcaaacaattccgctttgactttggggctacccatcaaatttaaggcccgagttcatgggttttttaggggattgattggtttcaaccatcggggttttaggggtcccgaacctgggtttttgtggtcccaaaaggattccaaggggggggggggtttttttccccttggggggttaaaagaggttttttaaaagggcccgggggtttttaaccccaa

SEQ ID NO: 96711 - DNA, 1011 bp, Arabidopsis thaliana columbia
  unsure (1)..(1011): unsure at all n locations
aaaacaaatatactctgtgactaattacatccaacgcatcaagcaaagtaacaaattccataaacacaattagctaaaagaaagaaacaatcatgaaggccaccatatccatcactaccatctttctcgtggtcgctttggccgcaccctccctagctcgtcctgacaaccatgtcgaggactctgtaggccgtctacttcgtcctggtcaaacgtaccacatcgtacctgcgaatcccgagacaggaggaggtattttctcgaacagtgaagaaatctgtcctcttgacatcttccagtcaaacaatccgcttgacttgggcctacccatcaaatttaagtccgagttatggtttgttaaggaaatgaatagtatcaccatcgagtttgaggctccgaactggtttttgtgtcctaaagaatccaaggggtggagagttgtgtactctgaagaattcaaaaagagtcttataataagcactggtggttcatcaaacccaagtggcttccagatccatcgagtcgacggaggtgcttacaagattgtatattgtacaaacatctcgactactacgtgcatgaacgttggcatattcaccgatatctctggtgcacgacgcttagccttgaccagcgatgaggctctcctagttaagttccagaaggcagcaactccaaaagctgatttgaagactaagctgaggatgttccctttctactgattcacaactcttgtaccaagaaaaagtgtcaaaaatatggcctcttgaataatggttgagacaataccaaccacttgtgattagtttgtgtgttttttctggtatgatcagtgtgtcactgtcatgtgttttttgctttgtttaaggattatgcttgtgtataaatgaattatataaaacccgctttgtgttaaaaaaaaaaaaaaaaaaaagnnnnnnnnnnnnnnnnnnnnnnnnnnnnnnnnnnnnnnnnnnnnnnnnnnnnnnnnnnnnnnnnnnnnnnnnnnnn

SEQ ID NO: 96712 - DNA, 1024 bp, Arabidopsis thaliana columbia
catgcacgcgtacgtaagctcggaattctgctcgagggagagactgatcactccggtcgaagaaggacccactcctcgtagtttccactcaatggcagccgatgaggaaaacgtttacgttttcggtggagtgagtgctacggcacgactcaatacactagactcttacaacatcgttgataagaagtggtttcattgttcgactccaggagattcccttaccgcaagaggaggagcagggctcgaagtggtgcaagggaaggtatgggttgtgtatgggtttaacggatgtgaagtagatgatgttcattactacgatcctgttcaagacaagtggacacaagtggaaacattcggtgtgaggccttccgaaagaagtgtattcgctagtgcggctattgggaaacacattgtgatttttggaggtgaaattgcgatggacccgctagctcacgtgggtccaggtcaattgaccgatggaacttttgcattggacacagagacgttgcaatgggagaggctggataagtttggtggagaggaagagactccgagtagcagaggatggaccgcgtccacgactgctaccattgatggtaagaaaggacttgtgatgcatggtggtaaagctccaaccaatgaccggtttgatgatctcttcttttacgggattgactctgcctaattaaggcagatttggtgatcatgaacgtttgtgaatgtgtgtgtgtgtgtgtgggtctgtgtttgtgtgtgtaataagggaggggtataccaccatatgatccttccccagcttgaccattgttttttttttaatatgtttttctttctacatgtttgtttcacgtttcatgttgtatccaataaattgtgtactttcctagtagtaatcgccagaaaaaaaaaaaaaaaaagggcggccgctctagaggatccaagcttacgtacgcgtgcatgcgacgtcaagatcttctataggtgtcctatatatttccctcgccgcgggggggggatttttatg

SEQ ID NO: 96713 - DNA, 829 bp, Arabidopsis thaliana columbia
ctcactatagggaaagctggtacgcctgcaggtaccggtccggaattcccgggtcgacccacgcgtccggtgaaattgcgatggacccgctagctacgtgggtccaggtcaattgaccgatggacttttgattggacacagagacgttgcaatgggagaggctggataagtttggtggagaggaagagactccgagtagcagaggatggaccgcgtccacgactgctaccattgatggtaagaaaggacttgtgatgcatggtggtaaagctccaaccaatgaccggtttgatgatctcttcttttacgggattgactctgcctaattaaggcagatttggtgatcatgaacgtttgtgaatgtgtgtgtgtgtgtgtgggtctgtgtttgtgtgtgtaataagggaggggtataccaccatatgatccttccccagcttgaccattgttttttttttaatatgtttttctttctacatgtttgtttcacgtttcatgttgtatccaataaattgtggctttcctacctgcagaccggtatgagcagatcaatatgctctcgatagatgttcagcccccgacatccgggtctctaaattttctcaaacctggggcgccccttaataccacccgacctgcgggttcgccttcctttttgcattgtaaccaagcttttccggcgcggtttaccccggtatggtacccccggcttcccataattggatggggcatgccgtgccgcggggtatgagagggcctgctcagcctgctccttccgctttagggttacccgcgctccgtatatagccattccggggaagcgtgacgc

SEQ ID NO: 96714 - DNA, 733 bp, Arabidopsis thaliana columbia
  unsure (1)..(733): unsure at all n locations
cgggagaaggtccaggcgctaagatgcctcactatggctatagcacacaagtaggcaacaaggatttaactcctttggctggcgagttcacagccagagccagcccatcgacaaacacctttacgtctttgacctcgagacccggacttggtccatttctccagccaccggagacgttccacacctctcttgtttaggtgtccggatggtgtcagtaggatcgaccctctatgtctttggaggccgagacgcttcacgccaatacaacggtttctactcgtttgacacgaccactaacgagtggaaactgctaactccggtcgaagaaggacccactcctcgtagtttccactcaatggcagccgatgaggaaaacgtttacgttttcggtggagtgagtgctacggcacgactcaatacactagactcttacaacatcgttgataagaagtggtttcattgttcgactccaggagattcccttaccgcaagaggaggagcagggctcgaagtggtgcaagggaaggtatgggttgtgtatgggtttaacggatgtaaagtagatgatgttcattactacggtccttttcaagccaagtgggcacaagtggggaccattcgggttttaggcctttccgaaaaaggtgttttccccagtgcggtttttggaagaattttgtttttggggnaattcgntgnccctagttngnggccggaattccctgnctttttc

SEQ ID NO: 96715 - DNA, 580 bp, Arabidopsis thaliana columbia
  unsure (1)..(580): unsure at all n locations
nnnnnnnnnnnnnnnnnnnnnnnnnnnnnnnnnnnnnnnnnnnnnnnnnaaaaaaanaccggtccggaattcccgggtcgacccacgcgtccgctcagagcaacaaaaccctagctacatttctcgatatcggagaaaagatccggcgaagatgtcaggtggcttagatatgtcacttgatgatatcatcaaatctaatcgaaaacctactggatctcgcggccgaggaggcattggaggtggcaataacaccggtggtcgcggtggttccggttctaattccggtccgtctcgtcggtttgctaaccgcgtaggagccagaacggcgccgtattcaaggccgattcaacaacaacaagctcatgatgcgatgtggcaaaacgacgtcttcgcgactgatgcgtctgtggcggcggcttttgggcatcatcagactgctgttgttggtggtggctcgtctatcgagactggaactaagctttacatttcaaacttagactatgggtgtctccaacgaagatatcaaggagcttttctctgaggttgggtgatcttaagcgatatgggattcactatgata

SEQ ID NO: 96716 - DNA, 476 bp, Arabidopsis thaliana columbia
ggccttagatcagagctcaaaaacagtagccggaagagtagccatggtgcatccagttctcacaaacctggatcctccacagctcgtaaagcaccagcattgcagaaacggtccaaggagagacgcagccgtcttccacctgtgggacaacaaactatctccagctgcttacgagaattatcacgttgctactggtgatagattgtctagtctgagaactgagctctccatgcgaagaagtcgaagtgaaggaactctcggacctatctgatctctctctctccctctttcattgcctgcgatttccttagcgaggtaacgatgaagatgtgatagatacacactttcttccctttattcatcttcttcatctttgtgttttggtggtgtgcattacatacatcagaagctttgattcttatagcttctcaataatgtctgaaattggaaaccatggtatacattcttttcagcac

SEQ ID NO: 96717 - DNA, 496 bp, Arabidopsis thaliana columbia
  unsure (1)..(496): unsure at all n locations
gcttcaaaagactatagaaagtagaaattgaaacaccaatcaagagttttgctttgtctctctttaatttttattctttgcatatatgaagtaatagacggtacctttctttctgttctcagggcatttgatgtacgtcacaaaccaatcaagcatctccttgtgagcttcttctgctgctttaaccgcctctggttcatcgatgttgtatctaactgtccatccgtgtgacactttcggctgtatcttcacggtaactattcacctcggggttggaagatagaatctcctcaaattgcntcaagagtgctggtggggggacatttgatcaatttcgagctccnaanantagcaattggagccttcccaccttnggaaancancaccattgccaaagaggggtgaagcacacagctggctgaaangnnctcctangcagtncnccanaactttgnccccaaaaaacccgggggcccaaggggggtngnctgggntt

SEQ ID NO: 96718 - DNA, 476 bp, Arabidopsis thaliana columbia
gtcgaagcggctcgagctcgtcgatcttggctgatcagatggctggacaatggtatgcgagagcttgtggactgaagccgatggcgaaagaagaatggataaagaaagcgttggagacggtctacgacttcaatgtgatgagagtgagagatggaacacgtggtgctgtgaacgggatgttacctgatggacgagtagacacaagcacgatggtgtcgagggaggtttgggctgggacaacatactcggtcgcggcttgtatgattcaagacgggctggccgataaaggttttaggacagcaagtggaatctatgaggccgcttggtccgaccgtggtctaggctgcgcatttcagacaccagaggcatggaccaccaacgatgaatataggtcactttgctacatgaggcctttagctatttggggtatacaatgggcacacacaatgccaaaacctaacagagaacaagaagtt

SEQ ID NO: 96719 - DNA, 426 bp, Arabidopsis thaliana columbia
attcacaactttgcagggttttagattcttgcactcttggaggttgagcttagttcgacatgaaggtctttatctaatctccactcgctggcaatgaagatgagagtggaaaccgcacttgcgatccttttggttctcatatcaattcaacaatgttatggaggtgtaagcaactatacatgtacgtgtttctcttcgggcaatcgaagtgatatcctggaatctaactgttccacatcatgtaattgcagaccagcagacagagatcaatgggtatgtttgtgtcctgcaaatggatttccggttatagccattggtggttcaaattcgtcatgcttcacttcatgcaactgctctgctggtgctacaaaatcttcaaagaagcaatatttatcgaggaaactcgttatagttatactactcttc

SEQ ID NO: 96720 - DNA, 471 bp, Arabidopsis thaliana columbia
cgagaatctttcttctgaattttcagacaatagccatggatatatattcttccataactcaagctgcagatctaaacaacaacaacagtaaccttcattttcaaacatttcatccttcctctacttctctcgaatcgctcttccttcatcatcagcaacaacaattacttcactttcccggaaactctccagacagtagtaacaatttctcttcaacttcaagtttcctccatagtgatcacaacatcgtcgatgagaccaagaagagaaaagctttgttacctactttgtcttcatcagagactagcgggcgtctccgataatacggaatgttattgccactgaaacagggttctttgaggaggagggtaaggagggttgaggaggaggaaggaagaagaagacgagaaagagagagaagttgttcatgtgagagccagaataggccaagccactgtttgccacagcttt

SEQ ID NO: 96721 - DNA, 590 bp, Arabidopsis thaliana columbia
  unsure (1)..(590): unsure at all n locations
aacatttcttttaaaaatgagaaagttgttggcatcgccgtttagttcattactcgccgtcgttttcatttccgtcatctccgtcgtcagatgctgctctcctaaagatcagacggctctcaatgctttcaagtcgtcactgagcgaaccaaacctcggtatcttcaacacttggtctgaaaacactgattgttgcaaggaatggtacggtatcagctgcgatcctgattcgggtcgggtcactgatatttctctccggggagaatctgaagacgccattttccaaaaggcaggccggtccggttatatgtccggtttcgattgatccagcagtttgtgacttaacccgcactcactttccctcgttctcgccgacctggaaaggaatcaccggagaggattcctccgtgcattaccttccctaggtttcgttccgnatccttgntctgggccgggaaaaaagattaaccgggggggattcccggggaaatcgggaaactttggaaactgggtgtttaaccctggccgggttaaaaatttccggggggttccgnggnntngggnaattaccgggttaaggnnttnatttc

SEQ ID NO: 96722 - DNA, 1477 bp, Arabidopsis thaliana columbia
  unsure (1)..(1477): unsure at all n locations
aacatttcttttaaaaatgagaaagttgttggcatcgccgtttagttcattactcgccgtcgttttcatttccgtcatctccgtcgtcagatgctgctctcctaaagatcagacggctctcaatgctttcaagtcgtcactgagcgaaccaaacctcggtatcttcaacacttggtctgaaaacactgattgttgcaaggaatggtacggtatcagctgcgatcctgattcgggtcgggtcactgatatttctctccggggagaatctgaagacgccattttccaaaaggcaggccggtccggttatatgtccggttcgattgatccagcagtttgtgacttaaccgcactcacttccctcgttctcgccgactggaaaggaatcaccggagagattcctccgtgcattacttccctagcttcggttccgtatcctcgatctcgccggcaacaagatcaccggggagattcccgcggaaatcggcaaactctcgaaactcgctgttttaaacctcgccgagaatcaaatgtccggcgagattccggcgtctactgacgtcactcatcgagttgaagcatcttgaattgtacggaaaatggaatcaccggcgtgatcccggccgatttcggtatcgttgaagatgttgagcagagttttactgggccgtaacgaactaaccgggtcaattccagagtcgatctcgggtatggaacggttagcggatctggatctatccaaaaaacatatcgaaggtccgatacccgaatggatgggtaacatgaaggtactctcacttttgaatctcgattgcaattcgttaaccggtccaatccccggttcgcttcttagcaattccggtttagatgttgccaatttgagccgaaatgcgttggaaggaactatacccgacgttttcgggtcaaaaacgtatttagtttcgcttgatctgtcacacaatagtctatcgggtcggatcccggattcgttgtcgtcagctaagtttgtgggacatttggatattagccataacaagctttgtgggcgtattccaacgggttttccttttgatcaccttgaagctacgtcgtttagtgacaaccaatgtctctgcggtggccctttgacgacgtcatgttaataacaaggatatggtttctggttttactgaaccgggttattctttttgctgttgctcttgttcgttgtatcaaacttgtgatattttgcttttcatttcttcgtctttcagattttagtttctaaagctaagatatgttactggcaacggacaggtacaccgatccaatatggtttgcggtctatgtacaataaatccggatgtaaatcaaaagcaatgttatagaatttaatttcaagaaaaaaaaaaaaaaagnnnnnnnnnnnnnnnnnnnnnnnnnnnnnnnnnnnnnnnnnnnnnnnnnnnnnnnnnnnnnnnnnnnnnnnnnnnnnnnnncg

SEQ ID NO: 96723 - DNA, 545 bp, Arabidopsis thaliana columbia
agctctctacgactcactatttggaaagctgatccgcctgcaggtaccggtccggaattcccgggtcgtcccacgcgtggggcaaagggaagacccagagagagcagagttgcttcttcttctccggagaaacagattgtgttcttagacgaaaagggttttgaggtgtcatggattccgggacgcagccagaagggttgcaggcagcacagccagcagggttgcaggcagcagggttgcaggcagcacagccagcagggttgcaggcagcacagccagcagggttgcaggcagcagggaagcggaagccgcctacgacgaccgaggatccaaatgatccacagcatataatccacgatttcctcacaatagtgaacaaattggagaaggaagtggatcttccaggcgctataaccagggctagaacctatgatgctgaggttgatggactgataactgctgaccaaccacagacgaatctgggaagagcagaaagtgcccctattcctaatgcttagccagaaggcccagatgatcatcatatt

SEQ ID NO: 96724 - DNA, 756 bp, Arabidopsis thaliana columbia
  unsure (1)..(756): unsure at all n locations
cttccacgtaatcaaaaattacaaagagagagagagagagatctttgaaagcaagaaattctaatccatggaatcatctccttcgttccttgacaatctcttcttcttcttcctcatacgtccgcttctggcgatctcattcgtcatctgcttcatcgctctttggtggtttctagcatggaagcttgtattaagccatgttccnctagtacaagagatctttggcttnaggnagnaaaccctttataccaaaaccctgaaatctcgtgggcggatcggcaaaattctttcaaaagnatcagttctnaggatccctgttnccccaatggaattgncaagttccgagggtttataaggaggtttcggatggatccgaaaaaccgaacgggttaaggggggtttttcaatgtcaccaaatccaggaagattcaaggttcaagttttaggcactaaaagagttctgttatgttgttgactcttttatggtgggggatgtgtgcaatgtagtgtaacaacttgtgtagtgtgaagtatttcaagcccaaatcttgaatcactgtttccttgttgttgtgtgagagatgctttgattcatgaatctggtgataaaaaaatgatgttttcaccatcacatactacaagaaagaacatgaaccaaagtcatataaatcgtaaaacatgaatcataaactctccagccaaagaactttctcaccagccattgttgcaattttggtatcacattaataggtgaat

SEQ ID NO: 96725 - DNA, 819 bp, Arabidopsis thaliana columbia
  unsure (1)..(819): unsure at all n locations
ccggcactaatacgactcctatagggaaagctggtacgcctgcaggtaccggtccggaattcccgtgtcgacccacgcgtccgcacggctgcgagaagacgacagaaggggagttctttgaggctgagaaagaggagaagaaggagatcccacagggaagaaattctaatccatggaatcatctccttcgttccttgacaatctcttcttcttcttcctcatacgtccgcttctggcgatctcattcgtcatctgcttcatcgctctttggtggtttctagcatggaagcttgtattaagccatgttcctctagtacaagagatctttggcttgaggaagaaaacctttataccaaaacctgaatctcgtggtcgaatcgccaaattctacaaaagtatcagttctcagaatcctgttccccaatgaaatcgcaagctccgaggtttatagaagcttcgatgatccgaaaaccgaacgagtaagaggatattcaatgtcacaatccagaaagattcaagttacagttttagtcactaaaagagttctgttatgttgttgactcttttatggtgggggatgtgtgcaatgtagtgtaacaacttgtgtagtgtgaagtatttcaagcccaaatcttgaatcactgtttccttgttgttgtgtgagagatgctttgattcatgaatctggtgataaaaaaatgatgttttccccctccaaaaaaaaaaaaaaaaagaaaaaaananannnnnnnnnnnnnnnnnnnnnnnnnnnnnnnnnnnnnnnnnnnnnnnnnnnnnnnnnnnnnnnnncgtcctaaa

SEQ ID NO: 96726 - DNA, 1010 bp, Arabidopsis thaliana columbia
  unsure (1)..(1010): unsure at all n locations
catgttactcctcctctcaattcgtctcctccgccatgcgaactcaaactcaaagctctctctaactttttgcttttcttcgaatctgtgatagatcgagacttggatttatcagcttctccgtgctcctttagcttctgctcggttttgttttttttagtctgacgatgagtaacaactggaaatccgttcgattaaggcttcaaaatcgtactctcgtgtttcttctggtgattttgagcttcggttcttgctattcgttgaaatctcaaggtgatggttttctggaatccgtgacgaaagatctatggtcagatatagatgctgaggatttgagagcagttggttttcacaggaaattacttggccgttttcgtaacccgtacacccatttgaatgcgttcagggaccgccctgtggcaagagctacacctccgtcatcttcggtttctacgagacctgatgccaaaagatcctctacattgcctccgccacaaaaaagtcctcctgcgcaacatgtttctgctccacctccttttgtgcaccatgtgactttacctagtctaacaagcagctccaaaacttcttcaaacagcacaattcctatagtggctggctgcatagcgggtgctgtgtttatcctccttttagctactggtgttttcttttttaaaagtaaggctgggaaatctgtgaatccctggcgtacaggtcttagtggacaacttcagaaagtgttcataactggtgtccccaaactcaaaagatctgagattgaagctgcttgtgaagattttagtaatgtcattgggtctttncccattggtaccattgttcaaaagggggcgntatcaagtggggtngagataagctgtggcttctttttctactgcgncttgccaaaagaattggccaaatnacataggaattnagtcagnaaagangntcgaaatgttancnanggaaacccacangnattttttctacccncnttggtnnntttnaagagg

SEQ ID NO: 96727 - DNA, 1073 bp, Arabidopsis thaliana columbia
  unsure (1)..(1073): unsure at all n locations
cccacgcgtccgagatcttcttcaattttaagattttgatgattactgttaaagctgactatcactgcggggaattcaaagatgatgctagtatacaaaaagagaagcatggtttcaaattgcagaatcaggcccatatataagtgggcttgattatttgggcttttggaagagtgtggcccaacatagagatatagagctgttatcgtctgtctttcatggcggagcagaggtgatcgtttcactattcaatttcactcgtcgatcattaccaacctctgcgggcaaagatggaattcgagaagatcaacgtgatcaatcccgttgttgaaatggatggagacgagatgactcgagttatctggaaattcatcaaagacaagcttattttccctttcctggagctggatatcaaatactttgatcttggactgcctaaccgcgatttcactgatgataaggttactatagagactgctgaagctactttaaagtataatgtggctattaagtgtgcgacgattactccggatgaagctcgtgttagggagttcggcttaaagaaaatgtggaggagtcctaatggaactataaggaacattttaaacggcacagttttcagggaacctatcatttgcagaaacatccctcgtcttgttccaggatggacgaagccaatctgtattggaaggcatgcttttggtgatcagtatagagccactgatctcattgtcaatgaaccaggaaaactgaaactagtttttgagccaagtggatcttctcagaaaacagaattcgaagtcttcaatttcaccggtggaggtgttgctttagccatgtataacactgatgagtctattcgtgcatttgctgagtcctcgatgtacacagcttaccagaaaaagtggccactttacctctccacaaaaaacaccatcctcaaaatatatgatggaagattcaaggatatattcccagaagtttatgaagctaacttgagatccaagtatgaagcagcanggatatggtatgagcatcgtttgatagatgattatggtgcatatgccatgaaa

SEQ ID NO: 96728 - DNA, 517 bp, Arabidopsis thaliana columbia
ggtacttgcactaatgtttctgtctttgaaactttcaattttgatcttccccatcatgggatgacggttgaaaacgttatgggcattgtatgttccgcatctgagcttgggaatacttggtgagactagccaactgtttggccgtgccctacacatgatcgatgtgaggagactatggataaaactgagactcaccaaaacaaggaacttccaagaaagagcaaagaacgcacttgcatcagtctcactaggaaaatcttcatcacaatcagcctaaaagggtgatttagaaatccttcactgtcaatgagcttagtttagattactttactttactgtctgtgagagatcctttgactgacatgtttctatacctttggagttccactgtctctgtatgtaaatcctgttttgcttcttttgtgaatattttttcttcttcttttgaatattcatgttcttggtccacttcgttgtgcttacgttttgtctatattgattatggatggtttggttt

SEQ ID NO: 96729 - DNA, 586 bp, Arabidopsis thaliana columbia
  unsure (1)..(586): unsure at all n locations
acggacgcgtgggttcttatcatgttctttgtggccggcacaagagcttgtatagtatttacagcaagatgttaaagaaaaagctaacagtggatgaaattcatgacattcatgggttacgtttgattgttgacaacgaaggagattgttacaaggccttaggagtagttcatagtttatggtctgaagttcctggaaagctgaaggattacataactcatcccaaattcaacgggtatcaatctttgcacacggtagtgattggacaatggaacagttccacttgaagtccaaatacgtacacaggagatgcatttgcaagcagaatttgggtttgcagctcattggagatacaaggaaggtggctgcaaatactcttcgtttgtncttcagatggttgaatggggctcggtgggtcgtaacctggcatttcgnacatnnaggcaaaagaccgntctttccataagtncttcaggttccatcaaaacccccttgcaagntttccgtctcanctctgnggcttnccagntttttncaagcnttacanganccgggtggcccnntttttgcattnnattngaattgt

SEQ ID NO: 96730 - DNA, 537 bp, Arabidopsis thaliana columbia
acgcaacaatatttgttggcggcattgaccctgatgttattgatgaagacctcagacaacctttttcccagtttggagaggttgtttcagtgaagatcccagtagggaaaggatgtggatttgtccaatttgctgacaggaagagtgctgaagatgctatcgagagtttgaacgggacagtcatcggcaagaacactgtcagactctcctggggacgaagcccaaacaagcagtggagaggagactcagggcagcagtggaatggaggatactcacgaggacatggttacaacaatggaggaggatatgctaaccaccacgactccaacaactatcatggggagaattgaagagactcatcaagtgatcatcttcatcatggtttcacatatcaaagctaaaacctgtagtcgaaagaagaattttgttagatggatttgattttgatagacttgttgtttggaggagatttaaaaattttggttactggtttgtctcagactaatataaatggttgcaacttgttggatcaaaaaa

SEQ ID NO: 96731 - DNA, 528 bp, Arabidopsis thaliana columbia
caattcttaacttcgatctctaacctgcaaaaacattcattacactcttcagatcctccttccctttagccgccaaagcaaaaccgtcatcgatctctcttcttttatacagtcaaaaattagattcagattcttcaagaactctgtttttctagtagcatggtgtgtttggtctcccgtacgggtcgtcaatcccaaagatacaacaagggacggcgtcaagtcgtcgggtgtattccatacagactcaagatttcgagtgatggcacaattagcgacgaatttgaggttcttgttatttcatcacaaaagggtcacgctctgatgttcccaaagggtggttgggagcttgatgaatctgtagaagaagctgcgtcaagagaatctctagaagaagctggagttgttggaaacgttgagagacaacttggaaaatgggatttcttaagcaaaagcaaaggaacattctatgaaggattcatgttcccaatgcttgtgaaagaagagcttgagctttgacctgaacaa

SEQ ID NO: 96732 - DNA, 417 bp, Arabidopsis thaliana columbia
attcatcatcaccttcatctctctcttcctctcatcagacttcaccgtgcttctttctctcttctgcagcttcagacgaaacctcctttacttcccccttcaaggttttatatttcccaaatcctacacctgctcacatctcaagctcaagttttgttttcccgggaaaagtgacacaaacaagaacttaacaagggagaagaaaaagcttatattcatatcaacggttgacgttggaaagctattaagatttggttttctacaaatttgttcttcctgaaacgtcacgagacagagcttacaagaagagaaaacagaggaaatttcgttgcattttttttacatattgattcgattaatggattcaaataatcatctctacgacccgaatcccaccgggtcgggtcttcttcgttt

SEQ ID NO: 96733 - DNA, 391 bp, Arabidopsis thaliana columbia
attctcttctcttttgttctctgtatcgcgctctctctctctctcttcattgattgagtcatcatcttcttggacaagaagtggtccgaaccaaaaccaagccagagaatgaatctctcaggggatcgaacaactctaaagcgtcactcgtcgctttcaacacttgtggctcatttctttggcatcttagctgttgttctgatgctaatttggcttctccactaccgtgaaggcatcgagtatggctccgacaacccccttaaggttttaaatgtgcacccatttctcatgtactgtggatttctcttcctcgtgggccaagcaatgatgacttacaaaacggcgtacgcgtcgcaccaagttcagaaaatggttcacggtgggcttcact

SEQ ID NO: 96734 - DNA, 785 bp, Arabidopsis thaliana columbia
  unsure (1)..(785): unsure at all n locations
aggtgacactctagaagagctatgacgtcgcatcgccgcgtacgtaagctcggaattcggctcgagcggctcgagcgggtcgagcggctcgagctcgagccgctctcaaaccctaagagaagaaaaatttgctttgtttttgccaaattcaatcgatatatcaaagatgaagatgggaggttcaaagagaagagtatcgagcaaaggacttggagctgttcttaaagaacaaagagctaagctatacatcattcgaagatgtgtcgtcatgcttctttgttggcacgattgatcctcaatctgtcttcagatttcatcctcatcaatctttatgtataaaaggctttcgtgtgttggagggagaagagtcgtgatgtttggagcttaaccggcctggcggatcgggtttgattctacgcgagattgtggatgaatcggttaagagtttgacttgtttttgattagacctctctatatcgtttagcagattcttgttctttggagcaaatatggaaaattcaatgatttagtggaggagagggcaatattgtaaatatatttgacggtataatagagagagttgacaaaattttgtaatagcttttggctttgttctatgacatttgaaatattaaatgatttacaacagttaaatgcataaaaaaaaaaaaaaaaaaggnnnnnnnnnnnnnnnnnnnnnnnnnnnnnnnnnnnnnnnnnnnnnnnnnnnnnnnnnnnnnnnnnnnnnnnnnnnnnnnnnnnnnnnnnnngtagctggagatcat

SEQ ID NO: 96735 - DNA, 749 bp, Arabidopsis thaliana columbia
agacagacagtgaggtcttaaagaagatcaatgtctcaccatctacggataaggtgtcatctggcatgatggagatgatgttgcgacccccgcgtccggtgaaatctgtagccatatcaattgaatatgataagggttttctgcatatagatgaatatcctcctgatgctaatcaaggattcgacattccatcggctttgataagcttccccgatcatcatgctagtttagatttccaagaagagctcagcaactcgcccttattatcaagtttaaaggaaaaatccttaggacgctcttacacagaagtattgctcgtacctttgacaacccctgattttagcatgccttacaacgtaatcacgatcacatgcaccatcttcgcattgtattttggatcattgctaaatgttctacgtagacgaattggtgaagaagaaaggtttctcaaaagccaagcaggaaagaaaacaggtgggcttaagcagttattatcgagaatcacagccaagattagagggagaccaattgaagcaccatcatcatcagaagctgaatcttcggtcttgtctagtaaacttatcttaaaaatcatattagttgcaggagctgctgcagcgtggcaatatttttccacggacgagtaggcttaaaacttttgaagaaataccagttgtaccatatgtatcaacaaggtaatttttttgggaccgtgtaagatttgctcttatatagtttcaaaattttgc

SEQ ID NO: 96736 - DNA, 595 bp, Arabidopsis thaliana columbia
ctacgacacactttagggagaagctggcacgcctgcaggtaccggtccggaattcccggctccgcccacgcgtccgagacagacttcgccggaaagatagagaagttgtcggaggagctactggatctgctgtgcgagaatctcggtttagagaagggttatttaaaaaaggtgttttacgggtcgaaaagaccgactttcggaaccaaagtcagcaattaccctctcttggcctggtccggacctagtcaaggctgctgcgagcccacaccgacgccggcggcatcatcctcctcttccaagacgacaaagtcagtggacttcaccttctcaaagacggcgagtgggtcgatggtccctccggctaagcattcaatcgtcggtaatctcggccacccaccttgaggtgactaccaatgggaagtacacgagcgggggacatacgaccgctatcccacacagacggacacggaagagtgccgaccgcctcattcctccatccgggaagcgcctctggtatttcaccggcgccggagctgatccgaaaacaagcctagaccgagaagacagcacaccctccagagccgcgctcaca

SEQ ID NO: 96737 - DNA, 1397 bp, Arabidopsis thaliana columbia
  unsure (1)..(1397): unsure at all n locations
nnnnnnnnnnnnnnnnnnnnnnnnnnnnnnnnnnnnnnnnnnnnnnnnnnnnnnnnnnnnnnnnnnnnnnnnnnnnnnnnnnnccacgcgtccgcccgttgctgtcgaagttaggccaagaaacccatttaaaaaaaaagagagagagatggagagtttcccgatcatcaatctcgagaagcttaatggagaagagagagcaatcactatggagaagatcaaagacgcttgtgaaaactggggcttctttgagtgtgtgaaccatgggatttcactcgagcttttggacaaagtggagaagatgaccaaggaacattacaagaagtgcatggaagagagattcaaggaatcgattaagaacagaggtcttgactctcttcgctctgaagtcaacgacgttgactgggaatccactttctacctcaagcaccttcccgtctctaatatctccgatgtccctgatctcgacgacgattacagaacgttaatgaaagacttcgccggaaagatagagaagttgtcggaggagctactggatctgctgtgcgagaatctcggtttagagaagggttatttaaaaaaggtgttttacgggtcgaaaagaccgacttttggaaccaaagtcagcaattatccaccttgtcctaatccggacctagtcaagggtctccgagcccacaccgacgccggcggcatcatcctcctcttccaagacgacaaagtcagtggacttcagcttcttaaagacggcgagtgggtcgatgttcctccggttaagcattcaatcgtcgttaatctcggcgatcaacttgaggtgataaccaatgggaagtacaagagtgtggaacatagagtgctatctcagacagacggagaaggaagaatgtcgatcgcatcattctataatccgggaagcgactctgttatttttccggcgccggagctgatcggaaaagaagcagagaaggagaagaaagagaactatccgagatttgtgtttgaagattacatgaaactctactctgctgtcaagtttcaggccaaggaaccaaggtttgaagccatgaaagctatggagacaactgtggccaacaatgttggaccattggccactgcgtgaatgatatgtaactggttaataaatatatatatatatatatatatagtctttatataatgtcttagaaacttgattattcactatacgaataattttgttcatgttgttgtatgtttaagtggtgaatgtgttttatatatgggaattaatgttttctgttcgaaaaaaaaaaaaaaaaaaaaaaaaagaaaaaaaaaaaagggcggccgctctagaggctcccaacatgagtccgggttcaggaagcgtgcatgcgacgtcatgctgataggatagt

SEQ ID NO: 96738 - DNA, 660 bp, Arabidopsis thaliana columbia
  unsure (1)..(660): unsure at all n locations
tccacctgcgctagctcccggactttctttcattggtttacctgcaatgggtctacaattctatatgtttgaagtccaaagcaaatgggttgctgcagtcttgtctggacgagttacacttccttcggtagatgaaatgatggacgatcttaagttgtcgtatgaaacacaagaagcgttaggtattcccaaaagatatacacataagttgggtaaatctcagtgtgagtacctcgattggttcgcagacctgtgtggattcccacatgttgaacattggagagatcaagaagtaactcgcggttaccagagacttggtaatcaaccagaaactttccgtgatgaatgggatgatgatgatctcatggaagaagcatacgaagattttcctagactaaatctgatcaattttcatccttctcgttttctcgaatccggaagatgaagtttgactacgattgtaattgtgtctacttgtttggatttaaagtacattgcattataaaaattaatgtgtgagtaaataggtttataaggggtggtgaagggccttctttgggctaggggttccaatgttgttccggtcccccgggaattagnctccatggggggnctaggaaccttttcgcttttttagggcccacnntgttaagggttnaa

SEQ ID NO: 96739 - DNA, 487 bp, Arabidopsis thaliana columbia
gaaaaagagagaaaatgggattccgtgggaagtacttcttcccaattctcatgactctatcgttatttctaataatcagatacaactacatagtctccgatgatcctcctctccggcaagaactccccggtcgccgatcagcttcttccggagatgacatcacatataccgtcaagactccgtcaaagaagacaaagagactgtttcacacggcggtgacagccacggattccgtgtacagcacgtggcagtgtcgggtcatgtattattggtacaacaggttcagggacgaacccgggtcggatatgggcgggtatacccggatcttgcattcgggtcgacccgatggactcatggatgagatccctactttcgttgctgaccctcttccctccggggttgacaagggatatgttgttctaaataggccttgggcctttgttcaatggcttcaacaagcacatatagaggaagattacattctcat

SEQ ID NO: 96740 - DNA, 823 bp, Arabidopsis thaliana columbia
  unsure (1)..(823): unsure at all n locations
atgatacttcnnnnnnnnnnnnnnnnnnnnnnnnnnnnnnnnnnnnnnnnnnnnnnnnnnnnnnnnnnnnnnnnnnnnnnnccacgcgtccgcccacgcgtccgggcggaggatgaaggaaactatctacaagatgcttgggagcatatactgacttgtgtttcacggtttgagcatcttcatctcttgggggaaggagcgcctcctgatgccactttctttgcatttcctcaaacggagtcaggaaactctccactggctaagccaaattccgtacctgcaattaaagaaagagcacctggaaaacttcagtatgctgcatctgctatgataaggggttcctacgatggttctggtgttgctggaaaggcttctaatacagtgacatctgaacagatgaacaacttgatatctaatctaaacttgctagaacaagttggtgacatgagtcggatatttactcgtagtcaaagattgaatagtgaagccataattgactttgttaaagccctctgcaaagtttccatggatgagttacgatctccatctgatccacgggtcttcagcctaacaaagattgtgggaatagcgcactataacatgagccgcataagacttgtctggtcgagcatctggcatgtgctctctgatttcgttgtgactattggctgttctgataacctctccagtgcaacttttgcaatggattcgttgcgccagctgtctatgtagttcttagagcgggaagagttggcgaattataacttccaaaatgaatttatgaagccttttgttgttgtcatgcgcaaaagtggtgctgttg

SEQ ID NO: 96741 - DNA, 601 bp, Arabidopsis thaliana columbia
ctatatttgatcttcttgaactctttctctcttctcacaaatggcgtctacgcaatatggttgtgaacatcaaggcggcatggagattatcaacgatgagcttatcttgtcgtttttggaagaagaatcgcccgtcgaaaatcatagtagcatcaacaaagaggaagaagagaaactaaaccgtgtgattaggtcgctagaagtggagatcaacatgagttctccaaccatagaagctaggaaaatgaatatgcaacagacgatatccggtcttgaagatgattttgggtggcttaacgactttgatattggtatgatttcgttgcaaaatgatgatgagatgatgaattggtgtacggaactttcttacatggatggtgtggtagatagtggtgttcttgagattgaaggtggtgattattattctcatattaactatgcactcacatttgaggaaccaactctttctctatggcaagagaataatgatgtagttatgtattgattgatttcgtgaagtcataatataacaaaggctgtttcgtaatccgttaacccccaaaaaaagaaggaataagaggctgtttcattaatctttaac

SEQ ID NO: 96742 - DNA, 446 bp, Arabidopsis thaliana columbia
ccttcccgtcgtcggaattacttcgccggcgctcatcacccacaaaaatcacgccaatccaaagatacagagacataatcaatctacctccgagaccactgtttcatggacttctcgcatcaatctcctcacgcgcaatggtcgattagcggaggcagcgaaggaattctccgatatgacactcgccggcgtagagcctaaccacatcactttcatagctctactctccgggtgtggtgattttacctccggaagtgaagccttgggcgatttgcttcatgggtatgcttgtaaacttggtcttgatagaaaccatgtcatggttggcaccgcaattatcggcatgtactccaaacgcggccgttttaagaaggctagattggtttttgactacatggaagataaaaattcggttacttggaatacaatgatcgatgggtacatga

SEQ ID NO: 96743 - DNA, 412 bp, Arabidopsis thaliana columbia
ccttgtatagctgccattggattcagtggtacacaagtttggagaaccgaaggatttatcactgctgaagaccttgcatccagggtagagaaagcgtggttaggacttcatatccaggaaacaactgcaagtatcttttcagcagcacttgcatcacagaactcagagacacctgtttctagtgcttcgagtgttgtcttgcctcccggaagtgttcctttagatgcagcgggtgcatcttcatcgacggcttctagtgttcaaccctcagagacaaagtcaaacggtaacatctgcatctacaacagaaaacaatgatggcacagctgcactttagggcaaagaatctgttgtacccactattttgtgtgatactactaaaaaccattccgttccctctgtttttggatct

SEQ ID NO: 96744 - DNA, 658 bp, Arabidopsis thaliana columbia
acgaactaaatcgattgcagaacagttggttctcaagagtaatggtcgaccttttaagaatggaggcaaacggatgtatacatgtgcgattcgtccagcggctatatatggacctggcgaagataggcatcttcctaggattgttactctaacaaagttgggtttggctctcttcaagatcggtgaaccgagtgtcaaatcagactggatttatgtcgaaaaccttgtcctagcaatcatcttggcaagtatgggactcttggatgacattcctggcagagaaggacaacctgttgctgctggtcaaccatattttgtctctgacggttacccggtgaatacctttgagtttctgcgtcctttactaaaaagtttagactatgacctgcccaagtgtacaatctctgtaccttttgcgctgtccttgggtaagatcttccaaggtttctacactgtgctatatcccatggctattcaaagagctggttaccacccccttgttcttcctgctgaaggtctacaaggtcggtggtaacccattatttcctcaatatcttcaaagccaaggaggagcttggatatgttccattcaagagctccaaggaaggtatggctgcaactatctcatactggcaggaaaggaagcggagatctttag

SEQ ID NO: 96745 - DNA, 822 bp, Arabidopsis thaliana columbia
  unsure (1)..(822): unsure at all n locations
cttccaaggtttctacactgtgctatatccatggctatcaaagagctggttaccacagccccttgttcttcctgctgaagtctacaaggtaacagtttttttcccaactcatattccagctgagatcataaaccaacttgtatgaaacttttgatgtggtgcaggtcggtgttacccattatttctcatatcttaaagccaaggaggagcttggatatgttccattcaagagctccaaggaaggtatggctgcaactatctcatactggcaggaaaggaagcggagatctttagacggtccaaccatgttcacttggatagctgttacaataggaatgtctgctctttttgctgccggatggttacccgacataggacctgtgcctttcttaagagccatacacctcttctttttccggacaatcacgattgtaaaggctgtcttcattgtagcagtggtactacatgttgcagaaggaatctatgcgtggtttctggctaaacgagtcgacccaggaaatgcaatggggtggttcttgcaaaccagcgctctcgggtttttctcaatgcggtttttattgaagagagcgaaagagcaccagatttaaacccagccttgttttgatgttgtaatcaaaaaaagttttacatgacttgaatgttttcaagattgaaaaacacaaaataaaagatctacattaatcaggatattccaatttttgaacaaaaaaaaaaaaaaaaagnnnnnnnnnnnnnnnnnnnnnnnnnnnnnnnnnnnnnnnnnnnnnnnnnnnnnnnnnnnnnnnnnnnnnnnnnnnnnnn

SEQ ID NO: 96746 - DNA, 1244 bp, Arabidopsis thaliana columbia
cccccaattaacatatccgccattgtttccggcaacgaaaactaccaaaaaaaataatggaggtcgaaagagtccaagacatttcatcttcttctctactaacagaagcaatcccgttggagttcatcagatcagagaaagaacaaccagcgatcacaacattccgaggtccaacgccggcgattcccgtcgtcgatctaagcgatcccgacgaagaaagcgtgaggcgcgcggtggtgaaagcgagtgaagaatgggggctattccaagtggttaaccacgggattccgacggagctgatacgacgtttacaagacgtcggaagaaaattcttcgagcttccttcgtcggagaaagaatccgtcgctaaaccggaagattcgaaagacattgaaggatacggaacaaagcttcagaaagatccagaaggtaaaaaagcttgggtcgatcatctcttccatcgaatctggccaccgtcatgcgtcaattacagattctggcctaagaatccacctgaatacagggaggtgaatgaagagtatgcagtgcatgtgaagaagctatcggagacgttattagggattctctcggatggattagggttaaagcgtgatgcgttgaaagaaggtctcggcggagagatggcggagtatatgatgaagattaactattatccgccgtgtcctcggccggatttagctttaggtgtaccggctcatacagatctcagtggaatcactcttcttgttcctaacgaagttcctggacttcaagttttcaaagatgatcactggttcgatgcagagtatattccctccgccgtcattgttcacatcggcgatcagattctgaggttgagtaatgggaggtataaaaatgtgttgcataggacgacggtggataaagagaagacgaggatgtcgtggccggttttcttggagcctccccgtgaaaagattgttggacctttaccggaactaaccggagatgataatcctccaaagtttaaaccgtttgctttcaaggattacagttaccgcaagctcaataaacttcctctggattgagaaaaatcaatacgagaagaataatttgtggttgtggaataggaagtggttcgttattgagttgttgttttcccgcggttgtgtctcttgcttattgttattttatgtttaaaataaagattaaaacatctacctacattgtgtgtgatgttgacatgttaaaaaaaaaaaaaaaaa

SEQ ID NO: 96747 - DNA, 396 bp, Arabidopsis thaliana columbia
ggcagacacaggcaaaggaagtgcaagcgctagctgcaacgatcgttgtggctgcccttctccatgtcccggtggcgaatcttgcaggtgcaagatgatgagcgaagcatctggtggggatcaagagcacaacacgtgtccatgtggggagcactgtggctgtaacccttgcaactgccccaagactcaaactcaaacctctgctaagggttgcacttgtggtgagggctgcacctgtgccacttgcgctgcttagacatccttaactatggttataccatacttgtataataggtactactagctagtcgatctgaaataaagctgcacaacaaaatatatgtatcgtatgctctgcttcttgtgtttcctttttatgaatcaccgagagtttgt

SEQ ID NO: 96748 - DNA, 509 bp, Arabidopsis thaliana columbia
  unsure (1)..(509): unsure at all n locations
atgatactgccnnnnnnnnnnnnnnnnnnnnnnnnnnnnnnnnnnnnnnnnnnnnnnnnnnnnnnnnnnnnnnnnnnnnnncccacgcgtccgctttttttccctttccgagcagatctgagccgaaggttaactacatgaccggcgctgagaacggcgtgagaatgacgtcaccagaggcgtcttcaacatcctccctcgccaccacaagtgtccacgtaagcgctctcgacggactcgtgaacgtgaactctctcttcaccatcgccgtcttcgttggtctttccttagcgactccaggacaacacagcctcgaacaacgatccagctgcgacgcaagtgctgacgtcgccaagaagctactggtcttcgaagtcgtctccttcagcttcttcctcttctcctctcgtgtagctcagggtcttaagcttgccttaaaccttcttaatagcaaagacgtcaacgagattttcagagctcacatcaatatcaaggttttgagatgggga

SEQ ID NO: 96749 - DNA, 578 bp, Arabidopsis thaliana columbia
cggggttgttccacgcgtgcgctgaagatgcagcctgatttttttaaaaagtcatcaattgagggaggggggtttacggaattttgtgagggaaccacatacagaatagaggaagtgattggtaaaggaagttatggagttgtctgttctgcttacgatacacataccggagagaaagttgcgattaagaaaatcaatgatatctttgagcatgtttcggatgcaactcgcattcttcgtgagatcaaacttcttagactcttacgccatcctgacattgttgagatcaaacacatcttgttgccgccttcaagaagagagtttcgagacatttacgtggttttcgagcttatggaatctgatttgcatcaggttattaaggcaaatgatgatttgactcctgagcattatcagtttttcctctatcagcttcttcgtggcctcaagtatatacacacagctaatgtctttcatcgggatcttaaacccaaaaacatattggcaaatgctgattgcaaactcaagatctgtgattttggacttgcaagagtcgcattcaatgatacaccgactgcgat

SEQ ID NO: 96750 - DNA, 428 bp, Arabidopsis thaliana columbia
atcgaaacagacacagatatcatcagaacgaagaacttcagccaaaatctgatttttctctgtttcacgacaagaaatcgaattaacgaaatctaatgaaaccttcaaaatcgcatcacaaggagaaaaccgctcgtcggagagaggagaaactagaggaatccgataatccaaaatacagagatcgtgctaaagaaagaagagagaatcaaaatcctgattatgatccatcagagcttagttctttccatgccgttgctcctcccggagctgtcgatatccgtgctgctgatgcacttaagatatctattgagaaccagcaaatatcttgggggtgatgttgaacatacccatttagttaagggtttggattatgctttgttgaataaagtacgaagcgaaatcgttaagaaacctgatggtgaaaa

SEQ ID NO: 96751 - DNA, 696 bp, Arabidopsis thaliana columbia
gaagctaattgacaagtatgatctctacggtcaagttgcgtaccctaaacatcacaaacaatcagatgttccagacatatatcgcctagctgcaaagtcaaagggtgttttcatcaatccagctatcattgaaccatttggacttactctaattgaggctgcagctcatggtttacctatggttgctacaaaaaatggtggtcctgtagatattcaccgggtcctggataatggccttcttgtggatcctcatgatcagcagtctatttctgaagctcttcttaagcttgttgctgataagcacctatgggcaaagtgtcggcaaaacggggtttgaagaacattcaccaattctctttggccagagcactgcaaaacttatctatctcgcataaccagcttcaaaccaagacatccacagtggcaaagtgatgatggcggtgataattcagaacccgagtcacccagtgattctttgagggatatacaggatatatccttgaacttaaagttttcatttgatggaagtgggaatgataattacatgaaccaagaagggagctccatggataggaagagcaaaatcgaagctgctgtccaaaattggtctaaaggcaaagatagccgcaaaatgggatcactggagaggtagagggtaactctggaaattcccagcagtgccgagaaggaagttta

SEQ ID NO: 96752 - DNA, 555 bp, Arabidopsis thaliana columbia
  unsure (1)..(555): unsure at all n locations
acggacgcgtgggcggtatgtggctatgaatggaatcacatcattcaaaagataccaaataacaaaggtgtacagaagggataatccatctaaagggagatacagagagttttatcagtgtgattttgatatcgctggtttgttcgaaccaattggacccgattttgaaattgtcaagatattaactgaactcctcgatgagttagaaatacgagattatgaggtgaaactgaatcaccgcaagttgcttgatggaatgctggagatatgtggagtaccacctgagaaattcagaaccatctgttcgagtatcgacaagctagacaagcaatcgtttgagcaagtgaagaaagaaatggtggaggagaagggcttgtnttcagagattncagacagaattggcaacttcgttaaggagaagggagctcctttggagctgttgtctaaactnagacaagaagggagtnagttcttagataaccngtcatcaagagaagcncttgatnngttgagtatcatgtttgnngctcttaaaaaagatcaaaagttgcaagt

SEQ ID NO: 96753 - DNA, 522 bp, Arabidopsis thaliana columbia
  unsure (1)..(522): unsure at all n locations
nnnnnnnnnnnnnnnnnnnnnnnnnnnnnnnnnnnnnnnnnnnnnnnnnnnnnnnnnnnnnnnnnnnnnnnnnnnnnnnnnnngccacgcgtccgaatagcttcacaatggcatcgtctggatcagccgacgaagatttccagtctcgcgttgcgaagatcttcggatctctacccttctctcgtccttcgtcttccaagttttccacgtcgtcttctgctccggcgtcgcggcagcaatcggggtcggtgtggactctctccgacacagaggtagagaagcgggagtggaagcgagattcgtacgatagagacgagattccttgtgcttcatcctttgacgagctcttaaaacagcagaagccttccgaggatgatctcaaagatattgattgcggcgaggattttgatggtgtgtggagtatcagagcctccatgggccttgatcgcactctcgatgacgaggcanaggaagatgagtatgattaagttgccctaggggaagagaatgacggtgaaggct

SEQ ID NO: 96754 - DNA, 549 bp, Arabidopsis thaliana columbia
  unsure (1)..(549): unsure at all n locations
ctataaacaagacaagacctcgcaaagctcaaaccttttccttctttttttctatcaagttcctcacttctcggatccgggtcctaaatctgggtcaaccctttttacgatcatcggaaatggaccctccactagtgaacgattcctccttctctgcagctaatccttcttcttacactctctccgagatttggcctttccctgtaaacgacgccgttcgctctggtctccgtttagctgttaactccggtcgagtctttactcgctctgaacattccggcaataaagacgtctccgcggctgaggaatctacagtcaccgatctaactgctggctggggaagtagaaagactagagatttgaactctgaggatgattcttcaaagatggtttcttccagcagcagtggtaatgaattgaaagaatcaggggataagaaaagcaaaactgtgtggatctgaagtggaaatgnagatgngntcgatgagnacctgaagggngaaacaagttcnaggtggtggtngtancaaagnaaacggtncagnngat

SEQ ID NO: 96755 - DNA, 375 bp, Arabidopsis thaliana columbia
acggacgcgtgggtaattattcatcatttcatctgttcgaatcgggcaattttcgtctggagaaatctggagataggattttgatcgatttctaagctctaatctcagttttttgggtagctccggtgatccttgagatggcgggtcagaatcctaacatggatcaattcgaggcctacttcaaaagagcagatttagacggagatggtcggatcagtggtgccgaagctgttggattttttcaaggatctggtttgtctaagcaggttctcgcccagatatggtcgctttctgatcggtcacacagtggtttccttgatcggcaaaacttttataattctctgagacttgtaacagttgcacagagcaagagag

SEQ ID NO: 96756 - DNA, 559 bp, Arabidopsis thaliana columbia
cctcagaatgtgtttggagtgaatagccaagaaggtgcctcgatcaatgaccaagggttaagtggttgtgattttgatcagctacaatgcatggctaatcagaacttaaatgaaaatggaaacggatcattcagcaacgtcaatacatctgtctcgaataagagaaaaggtgggcatcgtgcatcaagagcagtttgaagcatcgatcaagcttgtactatctatttccaccagcatagatattgtattccaaataagttgtagagttcagctgcaggatcagcttcgctcaggttcctttgtatcctcatttttgttttttgttttctgactctctttcccttccattgtatttccttgttgagcttgacaaactagaaggatgatatattgttaatacaacaaactcaaatgttctgtgtgttaaaaaaaaaaaaaaaatagaaattaaaatatttaaaaaaatatataatataataaataaaaatataaaaattaaaaaatttaattatataattaaaaattaaatttaaatttataataaggggggggccgtttt

SEQ ID NO: 96757 - DNA, 401 bp, Arabidopsis thaliana columbia
  unsure (1)..(401): unsure at all n locations
gagacgcgggaagctttttggaaaatggaggtggaggaagccaagatctcgctcggctttcctcctaattctcgtcccgatccttctcaggttaaagctgcttacaggaagaaagtatgggaatcacatcctgacttatttcctgatgatcagaagcttgttgccgagtctaagttcaaatcgatatctgaagcttattcttgcctagagtctgatttgactcctttggagctattgttgttggaattggaagtatgagaataaaatctagctcatttgggtttacaagtctgcagaatcaggacacgtntactctgtttttatatacttcgatacattccataaccattatctctagtacaatatcaagctttgtaatttccaacattggtctctgtttg

SEQ ID NO: 96758 - DNA, 788 bp, Arabidopsis thaliana columbia
cactatacgactctcttagggaaagctggtacgcctgcaggtaccggtccggaattcccgggtcgacccacgcgtccgtacggctgcgagaagacgacagaaggggagacgcgggaagctttttggaaaatggaggtggaggaagccaagatcttgctcggctttcctcctaattctcgtcccgatccttctcaggttaaagctgcttacaggaagaaagtatgggaatcacatcctgacttatttcctgatgatcagaagcttgttgccgagtctaagttcaaatcgatatctgaagcttattcttgcctagagcctggtgatgttaaaggtcaatggtattacagagcaggtgtgtattcgagggtcgtcaagactggggttcctcggccatattcatctgccaaaaagaggtaaccgttggttgatcggtgcacctttccttttgattgtcttaggaaccatcggacttggtggaatcaaagctaacagggcatataatttgcaaaaacagacgttcccatctcacaattctttccttccttgattcaaagtctctttcaacacaacactttgaatcattggatatgtaacctttgtattgtacgaatgaatctacttggacctttgttaagaaacttgtatctcaggatcgatagctttatttaaaatttagcgattatagaaaaaaaaaaaaaaacaaaaacccccaaagcggccgctctagaggatccaagcttacgtacgcgtgcaggcgacgtcaagctacttctatagtgcgtcctaaa

SEQ ID NO: 96759 - DNA, 549 bp, Arabidopsis thaliana columbia
gagtggttgtgagaggtacacgtatgattctgaagctaaaaatgagattaatatatgaaggaccgactctctgaagcgaaaccgtagacgcgggaggctttttggaaaatggaggtggaggaagccaagatcttgctcggctttcctcctaattctcgtcccgatccttctcacgttaaagctgcttacaggaagaaagtatgggaatcacatcctgacttatttcctgatgatcagaagcttgttgccgagtctaagttcaaatcgatatctgaagcttattcttgcctagagtctggtaattctctctcagattgaacccttttccttgtttgtcagagaatctttggtctgcacaaacccaaatgagctagtaggtgctacttgtgggtgaactttcctgatgaatgcatacggtgaaatttttaaccactgcatgaggaactaaatcccgatagctttgacgaacgttaaagtgtttatttttcctatcttttgcctgtcttcatttttgcacgagatgttctgaaactgaatgtaggccagtgc

SEQ ID NO: 96760 - DNA, 926 bp, Arabidopsis thaliana columbia
aacgcttcatttctatataaacatctcttatcttgttgaaaatctctcgcagcttttgaaaaacatgacctttctaaaaatgaaaagcctttctttcttcttcaccatcctcctctctctctcgaccctcttcaccatctccaacgcacggaagtttaatgtcggaggcagtggcgcgtgggttacaaacccacctgaaaactacgaatcttggtctggcaaaaaccgtttccttgttcacgacactctctattttagctacgctaagggagctgactcggtgctagaggtgaacaaggctgattacgacgcttgtaatacaaagaatccgatcaaaagagtggacgatggagattctgagatctctcttgatcgttatggtccgttttacttcatcagtggcaatgaagataactgtaagaagggtcaaaagcttaatgtcgttgtcatatctgctaggattccatcaacggctcagtctcctcacgccgctgcaccgggaagctctacgccgggatcaatgactccgccgggaggagcccactcgcctaaatcttcctcccctgtttctccgacgacttctcctccgggatcgactactccgcctggaggagctcactcgcctaaatcttcatcagctgtctctccggcgacttctcctccaggatcaatggcgcctaaatccggctcccctgtttctccgacgacttcaccaccggcaccacctaaatccacgtcccctgtttccccatcctctgctccgatgacttcaccgccggcaccaatggcacctaaatcatcttcaactattcctccgtcttctgctccgatgacttcaccacctggatcaatggcacctaaatcttcatcccctggttcaaactcacccaccgtttctccatcgttggctccggaggctctacttc

SEQ ID NO: 96761 - DNA, 534 bp, Arabidopsis thaliana columbia
  unsure (1)..(534): unsure at all n locations
aaattcttttgtctctctgtatcatccaaaattcccagatttattcacggagttagaagaagaagatgaggagagttttcggcgcgaaaaagaacacagagcctcctccgtccattcaggatgcctctgatcggataaataaaagaggagattcggtagaagataagataaagaagcttgatgttgagctctgcaaatacaaagaacagctcaaaaagaccagacctggtcctgctcaagaagctgtcaaagctcgtgctatgcgagttctcaagcagaagaaaatgtatgaaggacaacgcgacatgctctataatcagacattcaatctcgttcaagtttcattcgccgctgaaggactcaaaagatgctcaacaaacctatggcagcactaaaatcttgcggacaaaggaggttataagggattttggaaacccgtcaaggtncaaggtnttggttaattttccaanccggggttnttggcncttattgggtgttagtntcttaaatcnatgntccccttggtngggcnca

SEQ ID NO: 96762 - DNA, 354 bp, Arabidopsis thaliana columbia
agaagaaagaagcaatggagaagatagagcacacgacgatatctaccaatggttaccgcgcaatcgctccagatcttcgaggatacggcgattccgatgcgccgccgtctcgtgaatcttacaccatccttcatatcgtcggagacctcgtcggattactggattcgctcggtgttgatcgggttttcctcgtcggtcacgattggggagcaattgttgcgtggtggctttgtatgatcaggcctgatcgagtcaacgcgttggtcaacactagcgttgtgtttaatccgaggaatccttctgtgaaacctgttgatgcgtttagggctttgttcggcgatgattactacattt

SEQ ID NO: 96763 - DNA, 430 bp, Arabidopsis thaliana columbia
gtgagaaggagaagaaagaagcaatggagaagatagagcacacgacgatatctaccaatggtattaacatgcatgtggcttcgattggttcaggtccagtgatcctattcgtccatggctttcccgatctctggtactcatggcgtcaccagcttgtctctttcgctgccttaggttaccgcgcaatcgctccagatcttcgaggatacggcgattccgatgcgccgccgtctcgtgaatcttacaccatccttcatatcgtcggagacctcgtcggattactggattcgctcggtgttgatcgggttttcctcgtcggtcacgattggggagcaattgttgcgtggtggctttgtatgatcaggcctgatcgagtcaacgcgttggtcaacactagcgtttgtgtttaatccgaggaatccttctgtga

SEQ ID NO: 96764 - DNA, 549 bp, Arabidopsis thaliana columbia
gctcaaagtgcaagtcttggtatgaaagactcatggggacctcttaaggctttggcggttgctagtgcaataaacggtgttggtgatgtggtcttatgcacctttctaggatatggtatagcaggtgcagcttgggcaactatggtgtcacaagttgttgctgcttatatgatgatggacgcattgaacaagaaaggatacagcgcattctcattctgtgttccttctccaagtgaacttttgacgatttttggactcgctgcccctgtctttataactatgatgtcaaaggttttgttctatacgctccttgtgtactttgctacatcaatgggtacaaatatcatagctgctcatcaggttatgcttcagatatataccatgagtacggtttggggggagcctctttctcaaactgcacagtcctttatgcctgagcttttattcggaatcaaatcggaatttgccctaaagctagggggcttctgaagtcactagttatcatcggagctacgctaggaatagtagtcggaaccattggcacagcag

SEQ ID NO: 96765 - DNA, 444 bp, Arabidopsis thaliana columbia
  unsure (1)..(444): unsure at all n locations
cctacaaggggagganttagagaaaacagattggtcaaaagctcctttcaccgcttattacagaaactacaatgtcgagggatgtgtatgggttaatggaaaggcagggtgtcccgcaaattcccaatggttcactcaaaaactcgattcgaatggccagacaagaatgaaaggggtacagagtaaatacatggtttacaactattgctccgataaaaaaaggtttcctcgaggtgttcctccagagtgcagctaaatgattgattctttgattcataaataagttacttgacgttgtctttgtaactcaatggttcttcttatctataattttccaattcatttgctaccaaatatatgcgtgtttgtgtaagatcttttttacaatgaacaattaattcttccaatctattatatttatcattttttcttcttcttcttttc

SEQ ID NO: 96766 - DNA, 659 bp, Arabidopsis thaliana columbia
  unsure (1)..(659): unsure at all n locations
cgcgtccgacagacggcgcttatttttccgactagcgactttccgacggagttcgattggcgtgaacggggagctttcagacctgttacgaaccagggtatgtgtggttcatgctggtcatttagtgcgataggagctcttgaaggagcacattttctagccactaaagagcttgttagcctcagtgagcagcagctcgtagattgcgaccatgagtgtgatccagcacaagccagcgcccgggactctggttgcagtggaggactaattgaacaacgcttttgagtacgctcttaaagctggtggtctaatgaaggaagaggactatccttatacagcgacgtgaccattaccgcttgtaagttcgacaagagcaagattgttgcgagtgtgtctaacttcagcgttgtcttcttcggatgaagaccaaatcgctgctaatctagtccagcatgggccctctagctatttgctatcaaatgccgattgttggattgcaaaccattacatagggggagtntnggtgccccgtaatgtaatggtcaaaaggggccaagncccatnggggtgcnctttggttngntttttnggtcaaacgggggtnattgacccaattccggctttaaagggggaagnctntttttgggtttttaaaggac

SEQ ID NO: 96767 - DNA, 502 bp, Arabidopsis thaliana columbia
  unsure (1)..(502): unsure at all n locations
aagtctcctcttccttatctcttggaaaccaagaagcatggntcgtgtggtcttcttcttcctcatcgccgccacgttactagcaggttctctcggatccgccgtcatctccggcgaggttaccgacggtttcgttaacccgatcaggcaagtcgtcccggaggagaacgatgaacaactcctcaacgcagaacatcacttcactctattcaaatccaaagtacgagaagacttacgcggctcaggtagagcacggtcatcgggttccgtgtcttcaaagctaacctaaggacgggctaaggcgtaaaccagcttctagattccgtcttgccgtccacggggttcacggagttcttaagatcttaacttccggaaagaaatttccgccgcaaagtttcttagggccttcaaaacggccgaggggtttcggctttcccacctcttcacttaaaaaggggggccgcttttttccggctaaggggtttttccnnacggggtttcg

SEQ ID NO: 96768 - DNA, 718 bp, Arabidopsis thaliana columbia
  unsure (1)..(718): unsure at all n locations
agatgacttacgcgactcaggtagagcacgatcatcggttccgtgtcttcaaagctaacctaagacgagctaggcgtaaccagcttctagatccgtctgccgtccacggcgtcacgcagttctcagatcttactccgaaagaattccgccgcaagtttttaggactgaaacgccgagggtttcgtcttcctactgatactcagacggcgcctattcttccgactagcgatcttccgacggagttcgattggcgtgaacaaggagccgtcacacctgttaaaaaccagggtatgtgtggttcatgctggtcatttagtgcgataggagctcttgaaggagcacattttctagccactaaagagcttgttagcctcagtgagcagcagctcgtagattgtgaccatgagtgtgatccagcacaagccaattcatgtgattctggttgcagtggaggactaatgaacaacgcttttaagtacgctcttaaagctggtggtctaatgaaggaagaggactatccttatacaggacgtgaccataccgcttgtaagttcggcaagagcaagattgtttcgagtgtgtctaacttcagcgttgtctcttcggatgaggccaatcgctgctaatctagtcagcatgcctctgcttttctntaatcgtttggtnaacatcatgggggttgtcccatatttaaggcagcctgnncctgtggtgtanc

SEQ ID NO: 96769 - DNA, 749 bp, Arabidopsis thaliana columbia
  unsure (1)..(749): unsure at all n locations
acgcgtccgaccaagcgcaaagtctcctcttccttatctcttggaaaccaagaagcatggatcgtgtggtcttcttcttcctcatcgcagctacgttactagcaggttctctcggatctaccgtcatctccggcgaggttaccgacggtttcgttaacccgatcaggcaagtcgtcccggaggagaacgatgaacaactcctcaacgcagaacatcacttcactctattcaaatccaagtacgagaagacttacgcgactcaggtagagcacgatcatcggttccgtgtcttcaaagctaacctaagacgagctaggcgtaaccagcttctagatccgtctgccgtccacggcgtcacgcagttctcagatcttactccgaaagaattccgccgcaagtttttaggactgaaacgccgagggtttcgtcttcctactgatactcagaacggcgcctattcttccgactagcggatcttccgacggagttcgattggcgtgaacaaggagccgtcacacctgtttaaaaaccagggtatgtgtggttcatgctggtcatttagtgcgataggagctcttgaaggagcacattttcttgccactaaagagcttgttagcctcagtgagcaggcaaattcgnngggnttggtngaacaatnaattgtngaatcccagnaaaaagnccnattncaatgttnnttcttngttggagggggggggggctttattcgaacaacgnctttngggngt

SEQ ID NO: 96770 - DNA, 1101 bp, Arabidopsis thaliana columbia
  unsure (1)..(1101): unsure at all n locations
aaggatactcccagcctctattacaactcactttagggaaagctggtccgcctgcaggtaccggtccggaattcccgggtcgacccacgcgtccgcggacgcgtgggcgtgaacaaggagccgtcacacctgttaaaaaccagggtatgtgtggttcatgctggtcatttagtgcgataggagctcttgaaggagcacattttctagccactaaagagcttgttagcctcagtgagcagcagctcgtagattgtgaccatgagtgtgatccagcacaagccaattcatgtgattctggttgcagtggaggactaatgaacaacgcttttgagtacgctcttaaagctggtggtctaatgaaggaagaggactatccttatacaggacgtgaccataccgcttgtaagttcgacaagagcaagattgttgcgagtgtgtctaacttcagcgttgtctcttcggatgaagaccaaatcgctgctaatctagtccagcatggacctctagctattgctatcaatgcgatgtggatgcaaacatacataggaggagtctcgtgcccgtatgtatgttcaaagagccaagaccatggagtgctcttggttggatttggttcatcgggttatgcaccaatccgtcttaaggagaagccttattggattatcaagaactcgtggggagcgatgtggggagagcatggttactacaaaatctgcagagggcctcataatatgtgtggtatggatacaatggtatctactgttgctgctgttcatacctcacccaagtagaattattaggacactacctgtctatctttgtgtatatgtatgtatggttgcataaagatactacgaacttttatcgttagtattgtgtctctgtttcagcttttaatgtaaaatagcttgggggtattatctttgtagcattgaatgcttaagatgataatatgatatgattatcaaattattataagttggaacttggaataatagaaattttatatgttttaaaaaaaaaaaaaaaaggggcggccgctctagaggatccaagcttacgtacgcgtgcatgcggcgtcatagnncacgtcaatcnacc

SEQ ID NO: 96771 - DNA, 519 bp, Arabidopsis thaliana columbia
acttcgcaactaaaactcaaaacaatcaaagaaaaaccctaaaagaaaatctctatatcgaagatgggagttttgaagagaagagtatcgagcagcagaggacttggtggtgttcttagagagcaaagagctaagctttacatcatcaaacgatgtgttgttatgctcctatgttggcaagattgatcttggttgattcaagtgttgatactttgatgcttaaccggatcaaagcgatgattgcaacttgcaagaagatacgaaggcggaaaccggcttgggttttgcttgcaagaggatatgaaagaggaaactggtttgagttttgcaagaagatagacaatcgtaggaggatggaagttgaacactttcgatatggatatatgtttagtttttggaggatatatatgtaaatatacgaataaaagtttgggatgaattttgtaatggcttttgccttataagttccatagaattctctgtgtaaattcaactatatatctcacacataatctaacc

SEQ ID NO: 96772 - DNA, 912 bp, Arabidopsis thaliana columbia
cagagtaatttaggcagttcggagaaacaatggcggtagaagacactcccaaatctgttgtaacggaagaagctaagcctaattcaatagagaatccgattgatcgataccatgaggaaggtgatgatgccgaagaaggagagatcgccggaggagaaggagacggaaacgttgacgaatcgagcaaatccggtgttcctgaatcgcatcctctggaacattcatggactttctggttcgataatcctgctgtgaaatcgaaacaaacctcttggggaagttccttgcgacccgtgtttacgttttcaactgttgaggaattttggagtttgtacaacaacatgaagcatccgagcaagttagctcacggagctgacttctactgtttcaaacacatcattgaacctaagtgggaggatcctatttgtgctaatggaggaaaatggactatgactttccctaaggagaagtctgataagagctggctctacactttgcttgcattgattggagagcagtttgatcatggagatgaaatatgtggagcagttgtcaacattagaggaaagcaagaaaggatatctatttggactaaaaatgcttcaaacgaagctgctcaggtgagcattggaaaacaatggaaggagtttctcgattacaacaacagcataggtttcatcatccatgaggatgcgaagaagctcgacaggaatgcaaagaacgcttacaccgcttgaaacctctcaaatctttgcattggtttcaattacagtttggtatgtgagagatctctatttatctaaacatgacttggacagtctgtctttgctagtgtctgattgctcacgacgctctaacatttcatttagtaatacactagtatggttcctcataacaaaaaaaaaaaaaaaa

SEQ ID NO: 96773 - DNA, 739 bp, Arabidopsis thaliana columbia
tcttgctcctcaatagcgaaagcttacgtgtccgaagaaacgcgattatgtcaagactctgtttcggtacacgacgacggcgacgacggcgtcgggattctctcaatttgtgggatacttggtgagtcaatggcttgagaaaagcgggttttatgatgattctccagaaactcaacgagtttgaaacgagttcttgttcgtcttctcttcacttcccctgttcttttcgtactctttacgtggcccaatttattttccttaaaagtggtagaattgtttgattttgaccccaagaaaaaaaactttttttgtgtgctagacttggctctctttcaagttagttttggatcaaacacttgttgttgctgagaaggttccgtgaacaagaattctgtaacatgttctagtgccaaaaataaccagttcataaggttttatagtgcatgttaattaataaatgttgttaccttaaaaaaaaaaaaaaaaaaaaaaaaaaaaaaaaaaaaaaaaaaaaaaaaaaaaaaaaaaaaaaaaaaaaaaaaaaaaaaaaaaaaaaaaaaaaaaaaaaaaaaaaaaaaaaaaaaaataaaaaaaaaaaaggggggggccgttttaaaggatccaagtttacgtccccgtgcttgcaaggtattagttttttttttgggccccctaattcaaattcatgggccggggttttaaaacgtggggcctggaaaaaccctgggtttccccaatt

SEQ ID NO: 96774 - DNA, 586 bp, Arabidopsis thaliana columbia
  unsure (1)..(586): unsure at all n locations
agcacagttgaaagaaccaaaaatggagaaactaacttttctcagccttctcctgcatttcgtcgtcttcatcgcttcaacgataccgtcttcatcgttcctcttgaatgatcgcacctttgagagatcgaacttgccgtctacgcgcgcggagaagctgatccgtgagctaaaccttttcccgcagcaggatctgaatgtgatcgatgtcgctgatttgcctctcactgctgcggagggaccggggattgttgaacggaagttcgtattcccgaatatacttgccgatggtggccctactgtcgacgatttaggtcatcatgctggttattacaagctcccgaaatctcgtggcgcaagcatgttctacttcttcttcgagtcacggaacaagaaggatgctcctgttgtgatttggttgacgggagggcctgggatttaaggaagttaagttnggctgtgnttctaatnaanaatggccttttnaagatcanntagtnanaatggtntttncttggnattaagaatggttggaccaaggttccaaanttttgaatttgacaancttttgnanctgtttaactaa

SEQ ID NO: 96775 - DNA, 407 bp, Arabidopsis thaliana columbia
actctctctctctctataacaaaattggacagaattgggcaatcgagagagaaagatgcaagccatctccaaagtttcttctgcagcatcattctttagatgttctaggaagctagttagtcagccatgtgtgaggccttgcgtgagacagcttcacgtcagaaagggtcttgtctctggtgtcatgaagctgttctcttcacctcttaggactttgcgtgatgctggtaaatccgttcgcatttcaagattctgcagtgtctccaatgtctcttcctcattgcaaattgaactggtgccatgtcttacggacaactatgcttatatcttacatgatgaggataccggtacagttggtgtggttgacccttctgaagctgtacctgttatggatgccctccagaaga

SEQ ID NO: 96776 - DNA, 691 bp, Arabidopsis thaliana columbia
caattctcttcgaagatcgttttgatccaagagagaattctctgagagattgagaggggaagagaaattcttcgatccatagagagataattctctttgaacatcgatccatagagagatatgcaaaccatctcgaaagcttcttctgccacctccttttttcgatgttctaggaagctatcaagccagccatgtgtgagacagcttaacataagaaagagtcttgtgtgcagagtgatgaagctggtctcttcacctcttaggactttgcgtggtgctggtaaatctatccgagtttcaaagttctgcagtgtctccaatgtctcctcattgcaaattgaactggtgccttgccttaaggataactatgcttatatcttgcatgacgaggatactggtacagttggggtggttgacccttctgaagctgaacctattatcgattcgttgaagaggagtggtcgtaatctaacatatatattaaatacacatcatcattatgatcacactggtgggaatttggaattaaaagacaggtacggggcaaaggtgattggctcagctatggataaagaccggattcctggaattgatatggccttgaaggatggtgacaaatggatgtttgctggccatgaagtccatgttatggatactcctggccacacaaaaggccatatcagcttatact

SEQ ID NO: 96777 - DNA, 489 bp, Arabidopsis thaliana columbia
atgatactccagcgtctctacgactcactattgggaaagctggcacgcctgcaggtaccggtccggaattcccgggtcgacccacgcgtgcgcaattctcttcgaagatcgttttgatccaagagagaattctctgagagattgagaggggaagagaaattcttcgatccatagagagataattctctttgaacatcgatccatagcgagatatgcaaaccatctcgaaagcttcgtctgccaccgccgtttttcgatgttctaggaagctatcaagccagccatgtgtgtgacagcttaacataagaaagagtcttgtgtgcagagtgatgaagctggtctcttcacctcttacgactgtgcgtggcgctggcccacctatccctctccaaagctcctcaccgcctcccacgctatctacttcctcaccccacgccccccccgtttctggtacctgttttatccttcttcacctttagtgacacatca

SEQ ID NO: 96778 - DNA, 666 bp, Arabidopsis thaliana columbia
ccagctacatactgactcacattagggaaagctggcacgcctgcagtgtaccggtccggaatacacgggtcgacccacgcgtccgggagatggtggttttgttttattatttagagtaagcttcttcatttttttaaaaacttctattattttgaccttaagaagaaagtgacaaggagaggaagaagaagaaaaaaaaacataatttgaggaagaagaaaaaaaattcggatttgttttttcaataaattgactaattgagtactcgtttaaaggaagtgaagagcggttttttggtagtggtggtcgagaaaagagagagtttgtctctgtgactcagagtgaaatcaatagagcgggaaaagattgttgctttttttttgccatgggagttgatgagctgtctcacctcaaattctctcttctgctagaatcatcagccctgcatgatttgtccggttttaagtctctagttgaagaagagggtcttgagagcattgatggctctggtttgtggtatgggaggagattaggatcaaagaagatgggttttgaggagaggacgcctcttatgattgctgccttgtttggaagcaaagaggttgttgattacatcattagtactggtcttgttgacgtgaaccgctcttgtggctctgatggtgc

SEQ ID NO: 96779 - DNA, 1417 bp, Arabidopsis thaliana columbia
  unsure (1)..(1417): unsure at all n locations
gcactnnnnnnnnnnnnnnnnnnnnnnnnnnnnnnnnnnnnnnnnnnnnnnnnnnnnnnnnnnnnnnnnccacgcgtccgcggacgcgtgggctgcaattcatttgccggcgaaaattctcaggatcatttgctcagctaaaaaatggatcaagagtgtccctttgctgccgaaagcataatccagaaatgccctttcctgagaaacatcaacaagcctaccaatttgtccttctcctccttgagttttccaattccggtgcaaggaggtaaaggtcctatttttgaagatggtcctggatttgattcagcattcaagctcttccatgggaaagatggtattgtgccgctttctggtttcgctgatgattctgaagatgaggcgggtcgtcgtgctctgcaattcaatccacttgctggtaaggtagctacaataagcctatcagcttttggtcctggaggcccttttggttttggtcctttctcagagaaatggaagaaacaacagaagaaacctaaaccttccaaaaaccaacagtctggggactcttcgaaacatgaggcagttggagacgaatggttaaaaaccgggaattgtcctatcgccaagtcttttagagctgcaagcaaagtcatgcctcttatttctaaagcattaacgctaccacctggtatgaaatatagatgtccagctcctatagtagctgctagagctgcactttcgaagactgctttggtcaaaagtcttcgccctcagcctttacctgaaaagatgcttgcaatcgctctcatgggaatggctgcaaatgtgcctctaggtgtatggagagaacacacaaagaagttttcgcctgcatggtttttggctgtccatgctgctgtgccttttatagcaatgcttaggaaatctgttctgatgcccaaaacagccatggctttgaccattggagcttcgatcttgggacaggtgattgggtcaagagctgagcgttaccgtctcaaagcagtagctgagaaaatggttcctgtaaccgctatggtttctggatacaaccagagccctggcgactcaggcatttctgggggacattgtggtataggggagggagtgaagcaggtttattacaatgtaaatattggagagtctgctaaatcaactggactctgttattgagagaatgttcttattgatttcagaaactacaaattactatgtaaggattggatatttgtgtgtgagggaaggtttttgtaattcagtgaattgtgtaaaccataacaatggtgtcgttttatcccttcaaaatgggtctaaataaaaggttaattaaaaaaaaaaaaaaaaacaaagggcgcacgctctagaggatccaagcttacgtacgcgtgcatgcgacgtcatagatcttctatagtgt

SEQ ID NO: 96780 - DNA, 790 bp, Arabidopsis thaliana columbia
  unsure (1)..(790): unsure at all n locations
gcagctcggatatttctcaaaggtgcatgcctgatggccgtcagttgtgatctaataacaaaaccgattttcatggtgaaaaatgcgagtgcaatccaatgattggatccgtctatatttggaacttgcagttggtgtacgttatcagcagacttcagagagtgatctgtccaagttgcaggttctgaaagtggcaatagaaactaaggaagaagatgtgcagccaccgaataggagactcaagtccaaaagtctacatgtctacataacgtttaagggcttggccaaggctcctattggtgatgagattggtgagcatgttgaacgcaaagctatagttcgaagagtcattgatgagcgttcaggacacttgacgcttctcggtgggttttccaatgcgaaaaatgatttgaatcagtcctctgacgatgagcagccttttggaaagcgacgtcgcatatagctgagatgataaactaaagttatcgtgttaagtgcatttgtttctgtggggtgtttttgtaagtctactgtttctgaatacaatgaagttaatttatcttatgaatatactgtgactgtgtgcgcaaattaatagggagctatttttaacttcgcttagaacatcaagggacttgtatgtcactaaatccttttgactttttcatttttgctttgaagttcccttaattgaatcaaaaaaaaaaaaaaaagggcggccgctctagaggatccaagcttacgtacgcgtgcatgcgacgtcatagtntatctatagtgtcgtctcaat

SEQ ID NO: 96781 - DNA, 442 bp, Arabidopsis thaliana columbia
ctagggttttgttatcaaagttttcgtttttttttggggcgtagaaagggtttatggtgatgaaacgaatatttcgtggactagagtttcagatctgggctcttcacccagaatttgaagaaacaacccttggctgtctgagtaaatcctttttcgcccactataatgaaagtttttgttttggtgttccctttgaattgcctatgatgataaaaacaattatcttagcggatttcagtgaggtttttttaaaatcaatgatctgaattgttacacacactgaggctttattagtttgatttgtttttgtttattggggaaatttggtttgcgatgatgataaaatagcacgaaggtgcgtgaagggcagtggacaaagcaatgaaaatttgttttgccgtgagctctctttaataaacgacttctccttccactgagcatt

SEQ ID NO: 96782 - DNA, 878 bp, Arabidopsis thaliana columbia
atccactctgtccctctctcgtaaccaaaagccgtcgagtaatttagctcaactgcgaggaatatggcgaccgatgatgtgaacgagcctctcccggcggcggcggaattaccggcgacagaggcggagaaacaaccacacaagctcgaaagaaagtggagtttctggttcgataaccaatcaaagaaaggcgccgcctggggagcttctcttcgtaaagcctatactttcgacaccgtcgaagatttttggggattgcacgagactatatttcagactagcaaattgacagcgaatgctgaaattcacttgttcaaagctggtgttgagccaaagtgggaagatccagagtgtgctaatggaggaaagtggacttgggttgttactgctaataggaaggaagctttagacaaaggctggcttgaaactttgatggctttgattggagagcaatttgatgaagcagatgagatttgtggtgtggttgctagtgtccgtccacagtcgaagcaagacaagctctccttgtggactaggacgaagtctaatgaagctgttctgatgggtattgggaagaagtggaaggagatacttgatgtcaccgacaagataactttcaataaccatgatgattccagaagaagccggttcactgtctgaagaaacgagtgtgaagccagaggaagatgcaatatggctttttttgtgatactgtttggtcggtttactcaaatagctgagacatttagggacattcactttgaggtgtaaactctacaaagttttctgtttcattaaaatgattttttgttataaattaagttgagttatataaaaaaaaaaaaaaatcccagcttacggacgggggcctgccccgt

SEQ ID NO: 96783 - DNA, 589 bp, Arabidopsis thaliana columbia
tacgactcacttagggaaagctggtacgcctgcaggtaccggtccggaattcccgggtcgacccacgcgtccggtttcgccggaaaagaagaagaagcagagagaccaaaagacgccgagaatggtctaaacaaacttgctccaaattccacggcggcgctacaatccaagacaggtctaggaggagccgaagcaagtcaacgaaaaaatatgcctccggcgagtgtgatgacaaggctgatactgataatggtttggaggaaactcatcagaaacccaaacacttactctagtctcattggacttatttgggctctcgtcgctttccggtggcacgtggcaatgcccaaaatcattcaacaatctatctccattctatctgatgctggtcttggaatggcaatgtttagtttggggttgttcatggcgttgcaacccaaattaatcgcttgtgggaattcagtggcaacgtttgccatggcggttaggttccttatgggtccggccgtgatggcggttgctgctatagccatcggattacgtggtgatttactgcgtgtcgctatagttcaggccgattacctcaagg

SEQ ID NO: 96784 - DNA, 552 bp, Arabidopsis thaliana columbia
  unsure (1)..(552): unsure at all n locations
gttttgttcgtcaaatataatcaattttaaatttcttctcttctcttcaaacgaatcgcctttttcgataatctctttgcatcgatttcatcatggctactcaaacggatctcgctcagcccaagcttgatatgaccaaggaggagaaagagaggttgaagtatttgcaattcgtgcaagctgctgctgtggaagctctgcttcgctttgctcttatttacgctaaggcaaaggacaagtctggtcctttgaaacctggtgttgaatctgttgaaggagctgtcaagactgtccgttggtcctgtctacgagaaataccacggcgtccctgttgaggtccttaaatacatggaccagaaggttgatatgtctgtgactgagcttgaccgtcgtgtcccaccagtcgtcaagcaagtgtctgcccaagccatctccggtgctcagatagcacccattgtggcacgggcgtggcccctgagggctcgtcgggctgggtttttttaacccgttttggatggtnaancggntnctcaaggacggccttntntaagg

SEQ ID NO: 96785 - DNA, 438 bp, Arabidopsis thaliana columbia
gacgactggagcaaattccggacacaaagatctcaaattttgacgctttatcaaatttcttacttcacccataaaaatctgagtttttagacttcaacaggacagatctttctcctctttccagatcctaaaatcttcatctcctacagatctgcagaaatggcggttacgtactgattcagatacgggagaagaaaaagaagaaagctttctgctttaacttttcccattactgtaatggcggatcctctaaacggcaagtccttctttatctggttctcccttttattctccttcactctgcttttcatttcgccggtgtatgccaccgggtctccgggtatcggagatgtttctaccgatgttgctgtgtctgttagcgaaaccaatcgagaagctgttctattgcataatttagaggaactcgttaagaatctg

SEQ ID NO: 96786 - DNA, 506 bp, Arabidopsis thaliana columbia
  unsure (1)..(506): unsure at all n locations
nnnnnnnnnnnnnnnnnnnnnnnnnnnnnnnnnnnnnnnnnnnnnnnnnnnnnnnnnnnnnnnnnnnnnnnccacgcgtccgcttatcggagagatttattccggtgagaaaatgttactccttcgtcgttattccggcggaagtctttactcgatcctccctatcagagcctctattgaatctactattcgtcatttcaacagcctcgagcctttgcaaagctctgattcgactccaactaaaggcgattacttcgccgcgatcaaccacgttgtcaatatcgtccgccgcgagattcacccggagagatcattgaacagtctccgtctacctgtaacctccgaattcgtgttcagagtcctccgcgcaacttctcgttcctccaacgattctctccgattcttcaattgggctcgatcgaaccctagctacacaccaacctccatggaatatgaagagcttgctaagtccttagcttcacataaaaaatacgaatcgatgtgga

SEQ ID NO: 96787 - DNA, 919 bp, Arabidopsis thaliana columbia
  unsure (1)..(919): unsure at all n locations
gggaaagctggtacgcctgaggtaccggtccggaattccgggtcgacccacgcgtccgtacggctggagaaganacagaagggtacggctggagaagaaacagaagggtcggctggagaaacnacagaagggtacggctgngagaagacgacagaaggggtccggctgngagaagaagacagaagggtcaggctgcggcaagacgacgatttggagaacgaaattaggtaaacgatggaggagatatttgctctgatagtctcaatgattctcatagttgcggtgattcctttgttcttttggaaacgtcggagagatgctagatcacgggaggaagttgctgaaccaccacaggttcaacctcgtgaaaacgtggcacgtgctggtggtggacggaggatgcgtaggagacctgcagcttctggtgctagctcctctacatccaatgttcaagaaaacggcagtgggagtgaagatgaagatgaagatgaagctggtggaactcaagccagagcatcaaagaagaaagagaagaagcgacaagagcgggaagcacaaagacaagctgaggaagctacacgcgagtcaaggaatacaaaacaagattggtatgcagaaatgcggaggaagaaggatgaagaacgcgaggcagaagagctgaagttggaagaagaagaaaaagcgcgacaagccaaagaagaagaggcagctgcgttagagtttgacaaatggaaaggggaatcttccagttgatgctgaaggtactacaggggaagtgcaaggtggggatcaagatttgctttcagaattttttgattccttaaggaccagaaattttntcccctttaagtnctcntccagattttcatctccgnccncagggttcattaacaggtccccnttttnggggcntttgcgg

SEQ ID NO: 96788 - DNA, 558 bp, Arabidopsis thaliana columbia
  unsure (1)..(558): unsure at all n locations
nnnnnnnnnnnnnnnnnnnntacgactcactttagggaaagcccgtacgcctgcaggtaccggtccggaattcccgggtcgacccacgcgtccgcgttgtttcatttcttagagccgtcgtttcagatttcttcttccagagagagttaaaaagagtaacggtgaggtttggatctaatcgaatcaacgatggaggttgcttttccatcttcgccgccggtgaaatgcatcgccgatgaaagattaacagagatctccatggatttcaccaaattaggattcccagaagaagatgaagaaattaaaaaattggagagatcgtggagtaagctcgaagaatccgtcgaatttaacgaagacgatgaagaagaagaagaagagttttcgtttgcttgtgtaaacggagaaggatctccaattaccgctgatgaagcttttgaagatggtcagatccgtcctgtgtttcctctgtttaaccgtgatcttctcttcgagtacgaaaacgaagatgacaaaaacgacaacgtttcggtcaccgacgagaacagaccgcgtctt

SEQ ID NO: 96789 - DNA, 553 bp, Arabidopsis thaliana columbia
  unsure (1)..(553): unsure at all n locations
nnnnnnnnnnnnnnnnnnnnnnnnnnnnnnnnnnnnnnnnnnnnnnnnnnnnnnnnnnnnnnnnnnnnnnnnccacgcgtccgccagattatcacaaatcacaagcatgactcaaaacaacaacacttgacttcacaactggtttttccctcgcacgagaattgaagaaaataagaagaagaaacactaaacaaaaaagtatggtggaattggagattgtgtggttggttagaggcgcttggatcactgtttggatcgtctctatacttcctttggtgattgcttcgatacccacttcaaagctcaactcttttcgtgaactcgttttgagtttcgctggtagaggcaagattcttcacccttcttctcagaagtttacaattcctcagaaatgctttgcacacttttatgttattggagtggtgtggacaactctcctgcttgctgcaacttggatgtatgcttgcaaaatggcgcctttatcttctgaggagttccagttatccgacattgcaagccgtttagccggaggttcagatgttttctccgttca

SEQ ID NO: 96790 - DNA, 843 bp, Arabidopsis thaliana columbia
  unsure (1)..(843): unsure at all n locations
cgataggttaatcagatctggtgtccagaaagcagggagtccgaaccaatacgaaaaatctggcaacgaacagtttgtgactgaactaagcaaatgggtcttccacgaaaggggccatctgaaggctggtaatcttgtacaccatagggttggagaaacagatgagccagctatatataggataaaggatgacctggaattttctgtagagatatatgagtggtcaggaaagagctgggagccgtatgttgctaacgatgtgcaggttcagttttacatgatgagcccgtatgtgttgaaaaccctgtcaacagacaagaagggtctgtttcatacatctttcaaggttcctgatgtctacggtgtattccagtttaaggttgaatatgaaaagctaggctacactacattatctctttcgaagcagattccggtgcggccttacagacacaatgagtatgagagatttatcccaactgcgtatccttattatggagcctgctttacgacgatggctggtttcttcgtcttcagcttcgtctacctctaccataagtagaatcccttaaatggtggccaagtcccataaagtaagccaaacctccatatttagatgagaaaaaacaactttcgaactagagaccaatatttttgggcagcaaggttttcatatgtttctagttttagccaaacagttgcaaccttctttttgtttcccagatatttctatgttaacgtaactttacacccaaaaaaaaaaaaaagagnnnnnnnnnnnnnnnnnnnnnnnnnnnnnnnnnnnnnnnnnnnnnnnnnnnnnnnnnnnnnnnnnaaaacgaaagc

SEQ ID NO: 96791 - DNA, 406 bp, Arabidopsis thaliana columbia
ggccgggatttactgaaccaccggcgagtcttaatctccgagagccggtaaatcaatcctcttcctcaaatttctagggtttgctcttcgtcggttctttacgcagatttcttcacactggatggaagattggtgaaaccctagctccactgtgtgaggatcaaaacatttgtttaagatgttcatggaggaggcgacaagtaatggtaaaggtacagagcataatcagccaaatggtttggtggaaagggaagcattgaataattggagtgcaggatgtggtgctatggctaattctgcaaatgctagttccagagatagtaagaagatacaaacatatatgcggagaaaacttgggagatcttattctgctaataaatgttcggaaaatgatagaatttccatg

SEQ ID NO: 96792 - DNA, 642 bp, Arabidopsis thaliana columbia
  unsure (1)..(642): unsure at all n locations
ctttcctctcattattatctcttcgcttctcatctctcaatcccattcgcttattatttatccatatgggaaaggttcttgagaaggaggcgtttggattggctgcgaaagacgaatcgggaattctttcgcctttcagtttctctagaagggcgacgggtgaaaaggatgtgaggttcaaagtcttgttctgtggaatttgccacactgatctgagtatggccaaaaacgaatgggggttaactacttatcctcttgtccctgggcatgagattgtgggcgtggtgactgaagttggagccaaagtggaaaaattcaaccgctggagacaaagtcggagttggcttatatggccggctcgtgcaggtcaatgtgacagcttgcaatgattggcgccggggacttacttgtcccaaaggttgttctttaacggcccgagcccaaaaacttttgccggtacccattgccccatggtggcttcctccgcccaaatggtgtgtccttgngggtttnataacccggattccttgcnaatttcccctttagnggggtccnnanccattttttttncccnggggcnagggttnttccccnatnagggttcagggtttnaaaccccgtnttccaaangggttgtgggca

SEQ ID NO: 96793 - DNA, 1375 bp, Arabidopsis thaliana columbia
  unsure (1)..(1375): unsure at all n locations
aaagaataaaatcaaatacttacttttgaatccgtttttttcattgtttatccatatgggaaaggttcttgagaaggaggcgtttggattggctgcgaaagacgaatcgggaattctttcgcctttcagtttctctagaagggcgacgggtgaaaaggatgtgaggttcaaagtcttgttctgtggaatttgccacactgatctgagtatggccaaaaacgaatgggggttaactacttatcctcttgtccctgggcatgagattgtgggcgtggtgactgaagttggagccaaagtgaaaaaattcaacgctggagacaaagtcggagttggctatatggccggctcgtgcaggtcatgtgacagctgcaatgatggcgacgagaactactgtccaaagatgatcttaacgtccggagccaaaaactttgacgataccatgacccatggtggatactccgaccacatggtgtgtgctgaggatttcatcatccgtattcctgacaatctcccattagacggtgccgcaccactactctgcgccggggtcacggtctactcccccatgaagtatcacgggctcgacaagcccggtatgcacatcggtgtggtgggactaggcggtttgggccatgtagcagtgaaatttgctaaggctatgggtactaaagttacggttattagtacttcggagcgtaagagagacgaggccgttactcggcttggtgcggatgccttcttggtgagccgtgacccgaaacaaatgaaggatgcaatggggactatggatggtatcattgataccgtatctgcgacccatccacttcttccgctgcttggtttgcttaaaaataagggaaaacttgttatggttggtgcaccagcagaaccgctcgagcttcctgtttttcctctcatctttgggcggaagatggtggtgggtagtatggtaggaggtataaaggagacgcaagagatggtggatttggctggaaaacacaacatcacggcggatattgagctcatctctgcggattatgtcaacaccgccatggaacggcttgcaaaggctgacgttaagtaccgatttgtgattgatgttgccaacacgatgaagccaactccttaactagaaagcttaagaattgaatatccccaaagcttttttcatgtttttgcttgtttgtttgatgttgtttgctggcgactttgtgtgtagtattaccacactgcatgtactttatcagttgaataaacttgaatattgtatttaataagctatctacattagattttggggaagtttgattaaaatttattccgattgnnnnnnnnnnnnnnnnnnnnnnnnnnnnnnnnnnnnnnnnnnnnnnnn

SEQ ID NO: 96794 - DNA, 454 bp, Arabidopsis thaliana columbia
  unsure (1)..(454): unsure at all n locations
gccccnccccnnttnnggngaatagggccaacccatcaaggggggaacctccctctcagtgtctttccagccagctggggacccgattctgttcccaatttcttcagccctcaagtaaaaaaattagggatagccctccattaaaaaaaatcgccgggtttttgttgttgtcttatcccatttatctatcttatctgaaatttgaacccagaaagacagaggtaaccaatccaaagatctttctcaatctattatcttcatacaaatatagtgattttcatatattccaggggatatgtatatgtgtagaagaaagagaaaaaactcctgtggtcatagcaattcctttttttgtacattgtagaatcacactcttgtggtcgtaacaattatttccttcacaaattacaactacacttgtattaatggagatgccttttggcctggtatcaac

SEQ ID NO: 96795 - DNA, 542 bp, Arabidopsis thaliana columbia
  unsure (1)..(542): unsure at all n locations
caacaagtcgagttcttgtcgatgaaactctctgtcataaatccagaacttgagtgtcatatcgatgatttatccgcaaaacagtttcaggcttacttcacaggtcctccagaaggtgactcgaagcagtcaatcatggcggattttcggtcttttccattacatcagcaaggatctttagattactcagtcataaactcagaccacaccacatctctcggcgctaaagatcatacatcatcaagctgggaaactcactcacagtgtctttacaacagcttgagaaccgattctgtttccaatttcttcagcctcaagtaaaaaaattagggatagcctcattaaaaaaatcgcggttttttgttggtgtcttatccatttatctatcttatctgaaatttgaccccggaaagacagaggaaccaatcccaaagatctttctcaatcttttatnttnaatacaaatntnggggtttanaaattttnccgggggntatttttttntntnggngnagggggaaaaccctttggggnaaaggaat

SEQ ID NO: 96796 - DNA, 417 bp, Arabidopsis thaliana columbia
agactttacttccggcatcaccgttggtcattgaagctcataacatggagcttgtacccggttattctggttccaagagcctcagggttaagctagaatggagacagaaagaccttgaagattctgcattcccaaggtacaatgtgtatgcggagaatgtaaagtctactgatctaagaccgaggaaggttctagagaagccgagaagcgaaacagtgtttctcggagtcgctcacggaccatcctattacatagcagaacttggtggtagaactcagacggggaaaggagtccgctttgtgttcaagcctgtgctaaagatggttcatggggcaagctggatttttatttattttacaccatcataatcgtctcatttgatttatttttggtctggcgtcattcacattcataatt

SEQ ID NO: 96797 - DNA, 1222 bp, Arabidopsis thaliana columbia
  unsure (1)..(1222): unsure at all n locations
cagctctatacgactcatttagggaaagctcgtacgcctgcaggtaccggtccggaattcccgggtcgacccacgcgtgcgcccacgcgtgcgcccacgcgtncgtacggctgcgaaaagacgacagaaggggactgctctatttctcaatctctctcctaaatcaatcaatctttgtattttcatttagccagaacaaaaaaaatggtggagcaaaagagatacgctctgtttctagcgactttggactcagagttcgtgaagaaaacttacggaggataccacaacgtgttcgtgacgacgttcggagacgaaggagagcattgggactcctttagagtcgtcagcggagagtttcctgacgagaaagatctggagaaatacgatggcttcgttatcagcggaagctctcacgatgcctttgagaatgatgattggatccttaagctctgtgatattgtcaagaaaattgatgagatgaagaagaaaattcttggcatctgctttggtcatcagatcatagccagggtaaggggaggaacagtcggaagagcaaagaagggaccagaacttaaacttggagacataaccatcgtcaaggatgcgattacgcctggaagttacttcggaaacgagattcctgatagcatagcgatcatcaaatgtcaccagggcggagtgtttggtgctgcccgaaactcctaaagtgcttgcttatttcaagaaccaccgaggtggagatgtattcgattgagggaccatgttgtcctgtaccccaaggccatcctgagtatatccaaagagattccctcggaaattgttgaccgtgttcttgctctaggctacgtcaagcaagaatttgctgatgcggctaaggcaacgatggagaataggggagcagacaggaagctttgggagacgatttgcaagaacttcctcaaaggcagagttccaactaactagtttcactcccaaattatctatttggctcttgtcatattgaaacaatttgtggatttatgatcttgctttatttttattcaatgtataacgacatattaatctcggcgtgacttatttgtgttataccagttgataaatgaataagaagaacctaagctatttaaagccataaaaaaaaaaaaaaaaaaaaagggcggccgctctagaggatccaagcttacgtacgcgtgcatgcgacgtcatagctcgtctggtgtgt

SEQ ID NO: 96798 - DNA, 1045 bp, Arabidopsis thaliana columbia
aaaaaaaaacgaaagcgttagatattttttatcaatcgtgctccgtaatcattacctttcttcttcatcttcatcttcacgcagcgacttctttgattctctctttttattctcagctccaatttcaacctgcatttctctcttctcaattttgggtttctttttttgatatctcatttgatcagatcgacgaagagaggaagaaggtttgagctgagagatctttggaggtagaaagaagatctcaaaaacgatgtcgtttacaggaactcagcagaaatgcagggcgtgcgagaagacagtgtaccctgtggagcttctctcagctgatggaatctcttatcacaaggcttgcttcaaatgctctcactgcaaaagcagacttcaactgagcaattattcatcaatggaaggagtggtgtattgtaggcctcattttgagcagcttttcaaggagtctggtagtttcagcaagaactttcagtcacctgcaaagccattgactgataagccaaccccggagctgaataggacacctagtcgacttgctggtatgttctctggaacgcaagacaaatgcgctacttgcactaaaaccgtgtatcctatcgaaaaggtaactgtggaaagccagtgttaccataaatcttgcttcaagtgttctcatggaggctgtccgatatctccatcgaactatgcagctctagagggaatattgtactgcaagcaccatttcgctcagcttttcaaggagaaaggaagttacaatcatctcatcaaatctgcttccatcaaacgcgctactgctgctgctaccgcagctgctgcagctgtagcagccgttcccgaatcctgaattcaaattctcgttatttttgtgtatgtgctgtgttgtttacatgtattcgatatgattcatgttctttgtcttccataattgaaccaggcataaaattctcccagttttctatgaaaaaaaaaaaaaaaaagggcggccgctctagaggatccaagcttacgtacgcgtgcatgcgacgtcatagct

SEQ ID NO: 96799 - DNA, 549 bp, Arabidopsis thaliana columbia
  unsure (1)..(549): unsure at all n locations
attcgctgacaggaaacattgtggctttaaagaaagtgcggtgtgatgttaatgaacgggagagtttaaaatttatggctagagagattctgattttgaggagattggatcatcctaatgtcattaaattggaaggtttggttacttcgaggatgtcgagtagtttatacttggttttccgttatatggatcatgatttagctggtctcgccgctagcccggagataaaattcactgagcaacaggttaaatgctacatgaagcaactactttcagggctcgagcattgccataaccgaggagttctacaccgtgatattaaaggatcaaaccttcttatagatgacggtggagttcttagaataggtgatttcgggcttgcaacgttttttgatgcgagtaagaggcaagagatgacgaatcgggttgttactttatggtacagatcaccagagcttcttcatggtgttgttgagtacagtgtcggagttgatttgtggagtnctggttgcatttaagctgagttattngctgggtagagccgataat

SEQ ID NO: 96800 - DNA, 515 bp, Arabidopsis thaliana columbia
  unsure (1)..(515): unsure at all n locations
cagctannnnnnnnnnnnnnnnnnnnnnnnnnnnnnnnnnnnnnnnnnnnnnnnnnnnnnnnnnnnnnnnnnnccacgcgtccgcgagttcttctctataccatatccattgtttgctagctcagcatacgattgccgtgatgtctcttgcagtgaggctactacaattggtctgatcaaaacccgagacacttatccatttggtgtggatcctgtgtggcatggtacccgcagtgagctaccattcctaaattcgcttaagatgaaaatgtcaattcttattggagttgcacaaatgaacctcggaatcataatgagcttctttaatgcaaaattcttcaaaagtgctgtaaacatatggttccagttcgttccccagatgatattcttgaactgcttgtttggctatctttcggtcctcatcatcataaagtggtgcactggttctcaagcagatttatatcacgtaatgatctacatgtttctgagccctatggatgatttaggagagaatc

SEQ ID NO: 96801 - DNA, 852 bp, Arabidopsis thaliana columbia
  unsure (1)..(852): unsure at all n locations
taggtgccactatagaagagctatgacgtcgcatgcacgcgtacgtaagctcggaattcggctcgagtctcaaatgaacctcggaatcataatgagctactttaatgctagattcttcaaatcaagtgtaaatatatggttccagttcattccccaaatgatattcttgaacagcttgtttggctatctctcagtcctcatcatcataaagtggtgcactggttctcaagcagatttgtatcatgtaatgatatatatgttcctgagcccaatggacgagttaggagagaatcaactgttccctcaccagaaaacattacagcttgtgcttctctttctggctcttgtttctgttccgtgtatgttgcttccaaagccgttcatcttgaagaaacaacatgaagctaggcatcaaggccaggcgtacgcacctcttgacgagacagatgagagtcttcatgtagagacaaacggaggaggatcccatgggcatgaggagtttgaattcagcgagatatttgtgcatcagctgattcacaccatagagtttgtgcttggagctgtttccaacaccgcttcttacctgcgtctatgggctctcagtcttgcccactcggagctgtcatcagtcttctattgagaaggtcctccttctcgcttggggttacaacaatcccgttgatcctgatcgttggggtcttngtgttcatattcncaaccgtgggagtttttnctngtnnatgggggacaactaagcggggttccttcacggggttgggcnttcactggggtttnaggtttcagaccaaaatnctnncgnngnngattggtanaaagttcggtccctttnaa

SEQ ID NO: 96802 - DNA, 453 bp, Arabidopsis thaliana columbia
  unsure (1)..(453): unsure at all n locations
ccgttntttttnaagnccggggaccatccagccttngaaccnttgctgngccttggaaggttcgagggggttgtcacacaaaccgatctttctgggcccgagttcatcagaccctagattatatgttctcgttcgttaaaatggtcgaagatgatttggttggggaagtcatagcagaggagaataatgcgagttctaagaaacggaagagagaaaatcattctaaagggaccagagatagacgcaggtgtaaaccattgtccagacgaaaacagagaagcaatgtcaaacgaagaagataatatcaaggaaaatcaagaactcaaagcaaaatgataagatgataattggtccggattcttgaaaattgctttcactgtgactctagtttgtgtttggtcatcgttgatgcccttaatgaaccttggatagtattttgccaatttaaaggtt

SEQ ID NO: 96803 - DNA, 586 bp, Arabidopsis thaliana columbia
  unsure (1)..(586): unsure at all n locations
gaaagtgcagaaagaaggtgttccacacaattgtgttcatgatgcagaagctgcaatgaaacttgtacttgctatactagataatggagcagagacctccgttccactatctaaagagatgttggaagctgagaggtcaaagctctaccttcatagaatcccttgcaatgttccatatgaagagttaaatggagtcgtttccagggatatcccacatgaagttaagccgtcgaaaaaacaagaccgtcactactatagcgcgattgttgtttttaaaagtccagaagaagcaaatcaagcatttgaaaacattgctggagacttttggaaaggattcgagggggttgccaacaaaaacagatctttctagagcccgcgttcatcagaaccctcgattatatgtccccgttcgtaaaatcggccgccaggcatttgcctggggcctgtggccgccctagaggtcccaaggctttcggacggcgtgcatgggacggncaataangncttccantaggggcncccgaaaatncaaagccacnngggncggcnggttttncancngtggtgnccgggggaaacccctggg

SEQ ID NO: 96804 - DNA, 557 bp, Arabidopsis thaliana columbia
  unsure (1)..(557): unsure at all n locations
gaagtgcagaaagaaggtgttccacacaattgtgttcatgatgcagaagctgcaatgaaacttgtacttgctatactagataatggagcagagacctccgttccactatctaaagagatgttggaagctgagaagtcaaagctctaccttcatagaatcccttgcaatgttccatatgaagagttaaatggagtcgtttccagggatatcccacatgaagttaagccgtcgaaaaaacaagaccgtcactactatagcgcgattgttgtttttaaaagtccagaagaagcaaatcaagcatttgaaaacattgctggagactttggaaaggattcgagggggttgtcacaaaaacagatctttctaggggccgggttcatcaggaccctgggttatatggtgcccctgtgtaaaacgacggccagccatagctggtttccggagtgagncnccccttaggaattcccggtccncatcagnccaagtncggngtcngaaaaacaatcncgccctgggacgggtaaacgggaccctggaannggtccancgggcggggg

SEQ ID NO: 96805 - DNA, 422 bp, Arabidopsis thaliana columbia
ggaaaccgttccaaaagaatcattcattgaagctccagtttccatgcttgcttctggggaagacgaaccagtgactccacaagaaggcgattatgcagctaacacacaagaggaacgacatgtttctgcagaaacagaagagaaggtaggagaaacaaaaccaaaagaatcacaaaccaacagaaaagggaaataaccaatgaagttccaagcctggagaattcaaagattgaagaagaactacagaaaaaagatgaagaatctgagaacaccaaagatttgttttcagtagtaaaagaaactgaaccaacattgaaagaacctgcaaggaaatcactatctgaccacatccaaaaagagcctaaaacagaggaagatgagaatgatgatgaagatcatgaacataaagatgattaaacaag

SEQ ID NO: 96806 - DNA, 760 bp, Arabidopsis thaliana columbia
  unsure (1)..(760): unsure at all n locations
aagtttggagcaggttgctcttcctgaaccacgtgatcaaaaggggggtgatgaagactatgcaccaggaactcaaaagaatgtttctggggaagtgatcaggtggaataacgtatctggccctgagaaaattgatgcaaaaaagtatatcgagcttctggaagcagagatcgaagaactcaaccgtcaagtggggagaaaatcagcgaatcagcagaatgaaatcttggagtatctaaaatctctcgaacctcaaaatctcaaggagcttacaagcactgcaggcgaagatgttgccgtagccatgaatacatttgtcaagaggcttctagctgtgtcagaccctaaccaaatgaagacgaatgtgacagagacaagcgcagcggaccttgcaaaattgttgtattggttaatggtagttggatatagcattcgcaatatcgaggttcggtttgatatggaacgcgtgcttggtactcaaccgaagcttgcagagctgcctcctggtgaaattatttgagcactgtaatgaataaaagcgggggcttttttttacccgaagaactcagatttcatttgtcaagtaatttttattgtaaaattgatggaactcacttttaagagaagacggtattggctgtttgcaattagatcacagattttgattcagactaaaaaaaaaaaaaaaaagnnnnnnnnnnnnnnnnnnnnnnnnnnnnnnnnnnnnnnnnnnnnnnnnnnnnnnnnnnnnnnnnnnnnn

SEQ ID NO: 96807 - DNA, 906 bp, Arabidopsis thaliana columbia
  unsure (1)..(906): unsure at all n locations
atgannnnnnnnnnnnnnnnnnnnnnnnnnnnnnnnnnnnnnnnnnnnnnnnnnnnnnnnnnnnnnnnnnnnnnnnnnnnngacccacgcgtccgctttgtcttcagcagtcagtgcgcatccgtaggagaaaagtgtgagaatctgccaccatgggtcgtatgcacagtcgaggaaagggtatttcagcctctgcgttgccttacaagagatcgtctccgagctggctcaagaccacctctcaggatgttgatgaatcaatctgcaaatttgccaaaaagggattgaccccttcccagattggtgtgattctccgtgactctcacggtatccctcaggtcaagagtgttactggaagcaagatcttgaggatactcaaagctcatggccttgctcctgagatccctgaggatctgtaccatctaattaagaaggctgttgccatccgtaaacatctcgagaggaacaggaaggacaaggattccaagttcaggctcatcttggttgagagcaggattcaccgcctcgctcgctattacaagaagaccaagaagctccctcccgtctggaagtacgaatccactaccgcgagcacccttgtggcttaagctggagtctggaggaggattctactagtctgttgcttcccttttgttttgatgaattctcaactttagtcttaatgtgtcagcaggatttttgtgtttgcctctcttttttttccggaatcttatgctcccttgtttaagagaatcgtatgatcttgaatttactattgaatatgcttttgcatcctaaaaaaaaaaaaaaaaaaaaaaaaaaaaaacaaagggcggaagctctagaggatccaagcttacgtacgcgtgcatgcgacgtcatagatcttctatagtgcgtcctaaa

SEQ ID NO: 96808 - DNA, 484 bp, Arabidopsis thaliana columbia
  unsure (1)..(484): unsure at all n locations
ccaactgtatttggtcggcgaagtctatgctacttactatgcgatcaaccagatgcagcactacgcgacgcaatgcaagcgcagtgtgtgtatccggattggccaacagctttctacatgcagtctgtggcattagcgaagctgaacatgaacacagacgcagccgatatgttgaacgaagcagctcagctcgaagaaaagagacaacgaggcggcagaggatcttgattcttgagacacaaagtgttacatcttgttgtaaaatttgatgagcttcaagaattctttttaagaagaagagaaagaaaaaatacggttaaaaacttgttgctggattgtttgattggggatgtaatgtaaccatagggagagaaaacaattgaatgtttgtttgtatgcaatacatgttgtaagttttaatggtcaaatgtttcgaaaatccanaaaaaaaaaaaaaaattaaaatattataattaataaataa

SEQ ID NO: 96809 - DNA, 696 bp, Arabidopsis thaliana columbia
  unsure (1)..(696): unsure at all n locations
nnnnnnnnnnnnnnnnnnnnnnnnnnnnnnnnnnnnnnnnnnnnnnnnnnnnnnnnnnnnnnnnnnnnnnnnnnnnnnnnnnccacgcgtccgtacggctgcgagaagacaacagaagggggagagagagagagagagatggtgacgaaggagcaagtcgaagcttcattgacttcgaaacttaagccaattcatttcgaagtcattgacatatctggaggttgtggttcgagttttgaagtggaggttgtctctgaacaattcgaagggaagagattgctggagaggcatcgtatggtgaatgctgcgctagaagaagaaatgaaagagattcatgctctctctattaagaaagctcagactccacaacaatggaagccaccatcacaagactctgcaaccttaaccaaagatgcctgaatctctgttttttaaaagccttgtgacaaagaacagagcatttactatgttgatactttgtggttactgtactccgattactgcttttgatgaagtgtaaacacttttttaaaacatatgcaattggttgcaaaatataacaaaaattgggtttttctcaatttagatggagaaannnnnnnnnnnnnnnnnnnnnnnnnnnnnnnnnnnnnnnnnnnnnnnnnnnnnnnnnnnnnnnnnnnnnnnnnnnnnnnnnnnnnnnnnnnnnnnnnnnnn

SEQ ID NO: 96810 - DNA, 396 bp, Arabidopsis thaliana columbia
  unsure (1)..(396): unsure at all n locations
cacgcgtccgaccaaacatggtttcacatgaatcccaatttcattgcaaagcataactaaaaataaagaagaagactttttggagatcgaatctgttcatgttgatgggttttggctgagctttctagagatagagctagagagtactgggtctgtgtaaagttgataactttttttggtttagagagagaaaggacagagctttacagagatggagatgaagcagatgaagtttcttactcaccaagctttcttttcctctgttcgatcaggagatcttagtcaacttcaacagttagttgacaatttaaccggagatgagctaatcgatgagtcatcgccgtgttctgctgtggctgagcttatgttcttgacacaaaaacgccggacggtnna

SEQ ID NO: 96811 - DNA, 459 bp, Arabidopsis thaliana columbia
tcgaaaaaaactttagagcggtgatcagattcaccgatttttctcaaaatgctaatcaaatcccaaagattgactcttttctctcctctcttgtccaaaacaagacggatcccggttaactcccaccaaacactggtcgcagaatcggtgataactcggagaacactcggtgcgatcaccgcaactccgagttttcataaaaatccggtggtgattcgacggaggatcaaattagagagagttacgaggaactgcgtcagaattgatcgggaaatcgacgaagaagaagaagaagaggagaaggagagacgggatctggtgaaacagagcatatgggaacagatgaaagagatagtgaagttcacaggtccggcgatggggatgtggatttgtggaccgttgatgagtctcatcgacacggtcgtcatcggccaaggaagctccatcgaactcgctgct

SEQ ID NO: 96812 - DNA, 476 bp, Arabidopsis thaliana columbia
  unsure (1)..(476): unsure at all n locations
aaggatcggggtgcgtncgngcccctccaggaacttccgccgctctccncggaaaaggcctacctttggagagaacatggtggaaaggctatgtgcttattcacgagctgtttctcatttcccaactgctgttaaagaatttaaatggaggaatggttggttttattcactctcagagaaggcgattgcggaagggcaaccggatccgtgtcccctccataccgaatggctgaaagagcttaaagtgatatagagccagtctttctaaattgtgagtatctggattaagtatcattcttacatattttaagtagatgatctgaaactagtgtcaactgtgtacacgcctgagaagtgaaaaaaagatgtaattttttaataaagaaagagaatcagttcacgctttgtaaaatgtccagacttttatgtgtaaacttgtgcattttcaagaatcaaaacttttctgcttctagact

SEQ ID NO: 96813 - DNA, 934 bp, Arabidopsis thaliana columbia
  unsure (1)..(934): unsure at all n locations
acgactcactttagggaaagctggcacgcctgcaggtaccggtccggaattcccgggtcgacccacgcgtccgtacggctgcgagaagacgacagaagggtacggctgcgagaagacgacagaagggtacggctgcgagaagacgacagaagggtacggctgcgagaagacgacagaagggtacggctgcgagaagacgacagaagggagagatgaagtgtcgagactcatccaagaacttgcagcagctgctgcttatggaaaatgggcttcagagatagctgcaagattgcaatctggtggcctctcttgcaaggtacttgacaaagaagcttttcagaagcaaatgttggagaaactcatttggatttgtgcatttatgcttgttggagctcgtcatccaggtgcaagtgttggcacggtggagaaagaatacagagatgaagtgtcgagactcatccaagaacttgcagcagctgctgccgcggaaaaaggactaacctttgaagagaacatggtggaaagactatgtgcttattcacgagctgtttctcatttcccaactgctgttaaagaatttaaatggaggaatggttggttttattcactctcagagaaggcgattgcggaagggcaaccggatccgtgtcccctccataccgaatggctgaaagagcttaaagtgatatagagccagtctttctcaattgtgagtatctggattaagtatcattcttacatattttaagtagatgatctgaaactagtgccaactgtgtacacgcctgagaagtgaaaaaaagatgtaattttttaataaagaaagagaatcagttcgcgccataataaaaaaaaaaaaaaaaaaaaaagagcggccgctctagaggatccaagcttacgtacgcgtgcatgcgacctcataactctnctatag

SEQ ID NO: 96814 - DNA, 1194 bp, Arabidopsis thaliana columbia
  unsure (1)..(1194): unsure at all n locations
nnnnnnnnnnnnnnnnnnnnnnnnnnnnnnnnnnnnnnnnnnnnnnnnnnnnnnnnnnnnnnnnnnnnnnnccacgcgtccgaaaccgggccctgctgcgtgctagagctcagtctccagcagatgttgcaaaccatcctctcatgaaggaaccatatgatattacacgcgatagagagcgcaagcgggcattgtccatggtcctatcccagagtagacatcaggagaagaaagatgctgagatacttgctgaggctaaaagaatcacagagatgcgattggccgcacgtcgtgcagaagaacctgatgtgtctgcgaatgagaacgccggtcttgataaagctgatggggttgttccagggcgtagtgtatctccaacatccaattctcaacttcctgctactgctgtggctccatcaacactaactatggcagattatgcctctacccttgcttctctgcgcatgcttcatgtatacttgagaacctatggacttgaacaaatggtccaagctgcaagctctgctgttggtcttcgacacgatcaagcgggttgagcagactctgcaagatctcggggttaatttaaagccaaaggttcctaccaaaactgtatgcgatgagcatcttgagctaagcccagccccattgacactactgaatcttcagaagcagctgcaatataaggaatcagaaggttcatcacatcgtgaagggtcgtatgccgcaatgccagacactccaaaggatcgtgttttcgcaccggacccattcagttttgtagctgaaagcccaatcaagaaggaacaaaanagcaagggtcctggaagacaagcagatactccttcaccagctcataagcgtccgagaaagttgaaagcctctgatctctaaaatctctctactcggtgcacactgactcgcaatttcatgtgtatgtatttgcctttttccggccattcccgcaatgttttcagttcttaaattatttctgatctctaaaatctctctacttgtactcagacgccgcgctatcttgtcaagccaattagagaaattgagaaaatgttgcacattatatttatgactagtaagaattattacaaaaaaaaaaaaaacaaaaagggcagaccgctctagaggatccaagcttacgtacgcgtgcgtgcgacgtcaagctcttgtagatgtcac

SEQ ID NO: 96815 - DNA, 597 bp, Arabidopsis thaliana columbia
  unsure (1)..(597): unsure at all n locations
cttatttgcaaaaactgagaagaggcaaagttataatagtgaagagatcactgttgccttgctgctctggatccatttccgttcacagacggcatttcaggattttgtttggatcccgtaatcatttgtacaaaagcaagaggagttcatttgacagagtccaccctgacgaggtttctggtagaccaaggaaggaacttggcatttgagtttttcagatgcttcttttattctaccaaaggaacaattcacaatggcaacattataacaagctactttcccatctaattatccaagaaacatgtatggattatacagagcaaccaagatgtaacttctggtaccggaatttctatttctcgatcccgggacagtgacagatagtcccccagtatcagattctaaactgttctcattcaaaataagccatttagggtattacaaagaaaatatataataatattaccaagatttnggaggtataggagctttccnggagtggtgaaggntttccaaggtttaggngtggtgcctttttggaggaagaagnaaaggtccaatagggttgccgcctgcttncgngngnttctagcncgg

SEQ ID NO: 96816 - DNA, 598 bp, Arabidopsis thaliana columbia
  unsure (1)..(598): unsure at all n locations
gacgcgttggtcgacgcaacaccctatagggagtcgtattacgacagaagggggagagaatcgcattaacaaaaaaacaaacgaatcttttgagtttaaaaccctttttcacttaccggagaaatggagagatcgacgccggaacatgtctcctccgcacacaagcgcataagcgtgagcttcctcgtgtctctcatggtactttgtgctagacacgcaagcagagtttccaagaagcttaaacccaagaagactcggaagcaaactcatcttgaagactatctcgaaagccctaagtctaacggaaacggtagcgaagacggtagaggaggaggaaggtttggatggagtccggcaaggactttttctcctatgagggtgcgtcctaaggagctctacacgaccttgagcaacaaggcgatgactatggttggccggaaaaacaaagcttacggcgggtggtccgacggaagaagacggcggttgggatngttnttggaggagnttnaggaagagtccggcgttttgcanaggaggttttatttgggggaaaatttnacccgttgggttncttaggggnnnttttcttccnntttng

SEQ ID NO: 96817 - DNA, 798 bp, Arabidopsis thaliana columbia
gactcactatagggaaagctggtacgcctgaaggtaccggtccggaattcccgggtcgacccacgcgtccggtttgatcgtattggcttataacccactaggatggaagcgagtggacattgtccggcttcctgttgtgggcggagacgtttcggtacatgactctgagggacacgaagttgagtctcaacttgttccatttactgatgaatatgtggccttaaggaaatatcatgtagaggcatacttaggtcaaagccctacacaggtgccaaagtattggcttgtgttttcagtaactgtgcctcctcttggcttcactacttacactatctccactgctaagaaaacagatggatattctagcaaatcatacgtctccaatatcctaaaaggcgaacagtcaataattaacattggtcatgggcatctgaagcttagtttttccactgatcaagggacagcaatcaattatgttaacggcagaacctcgatgacagaaccagtcaaacagacatttagctactactctgcatacaatggatcaaatgacaaagaacctcttatacctcaaaactcgggtgcgtatgttttccgtccaaatggtacattccccatcaatccggaaggacaggttcctttgactgttatacatgggccgctagtggacgaagtacaccaacagattaatccatggatatctcagatcactagagtttataagggcaaggagcatgtggaagttgaatttattgttggtaatataccaattgatgatggaattggcaaagaagtagt

SEQ ID NO: 96818 - DNA, 514 bp, Arabidopsis thaliana columbia
  unsure (1)..(514): unsure at all n locations
tcaagctttagaattgaagcaagaagtgtcggtttaaattagaacaaaacccgcatcttcgttaggaggcaggcaacctcaagatgttggtcgtcggaagtcgctagtaggcaaagtgttgatccgatgatcttatatattcgacaaagtcgctctctgtcttgacagaccgcttctggtccgaagcttttgatacctgagactgaatctatccattgcaggtcaacatgattattgctaagaacacagcatactcatgtctgtattaatatattgcccataagatagtattaatttatgtagtagttttcatgtttctgtctttgtatcctcctccttcacttgtgtcccatatttgagaacaaacaaagctgtataatcaggtttttcgtatagatgtttttttccgcttgcaaaaaaataaaaaacaaaagaaaaaagggcggccgctctagaaggatccaagcttacgtacgcgtgcatgcgacgtcatagttcttctatagttcacntt

SEQ ID NO: 96819 - DNA, 534 bp, Arabidopsis thaliana columbia
  unsure (1)..(534): unsure at all n locations
ggaacggtatgggtggagaatcaatctatggtcagaagtttgctgatgagaacttcaagctgaagcacactggaccaggtgtactttcaatggcgaactcgggagaagacacaaatggttcgcagttttttatcacaacggtgacaacaagctggttagatggaaggcatgtggtgtttgggaaagtggtgcaaggaatggatgtagtttataagattgaagctgagggcaaacaaagcggaactcctaagagcaaagtcgtaattgcagacagtggagaacttcctctctaagaatagcattttaaagttactcttacgagttagttgtaatctaaacacgtcccaaatgctacaagaacagaatggtgtcactggactctgaaatttcgttttcttgcgtaacagacttttccatgaaaatagtactcggccgttcctgttaaaaaaaaaaaaaaaaaaaaaaaaaaaaaaaaaaagggcggcagctctagaggatccaagcttacgtacgcgtgcnnnnnnnnnnnngctg

SEQ ID NO: 96820 - DNA, 765 bp, Arabidopsis thaliana columbia
  unsure (1)..(765): unsure at all n locations
cnatttgagaaaaaaaaaaacgatcacgaagatggcgaaagcaagctttattctactcggaactctcttcctcttcggagccatagcttcaattcaggcaaaagaagatctcaaggaggttactcacaaggtttacttcgatgtagagatcgacggcaaatccgctggtcgcgttgttataggactatttggcaaggcagttcctaaaactgcagaaaacttcagagctttgtgcacaggggagaaaggtgtagggaagagtgggaaacctctacactacaagggaagcaagttccatcgaatcattcccagctttatgatccagggaggtgacttcacgcatgggaacggtatgggtggagaatcaatctatggtcagaagtttgctgatgagaacttcaagcttgaagcacactggcccagggggtcctttcaatggcgaactcgggggaagacacaaatggttcgcagttttttatcacaacggtgacaacaagctggttagatggaaggcatgtggtgttttgggaagtggttcaagggatggatgtagtttataagnttnaagcttnagggcaaacaaagcgggactccttaagggcaaagtcgtaatttcagacagttggggaccttcccccnctnagnatngccttttaaagttnccnttccgggttagttntnatctaaacacgnccccaatttttcaaggcccnattgggtccctggccntaaaattcgtttnttncggaacanctttcctnnatc

SEQ ID NO: 96821 - DNA, 576 bp, Arabidopsis thaliana columbia
gagagagaatcaaaacaatggccactgtgaaaatctctctttccttggcttcgctatcaccatcttcttcttcttcttcaattcaatctaagttatcaccatctttcattcccaatgcggcacctgcaaaggcggtgaggttgcgattcaatggaaagtccctgagagcaaaaccaatggtatacagatcatctcgctccgttggagtcacctgctctgcttcatcttctctgacgactcttccctctgctcttctcttcgattgcgatggcgttcttgttgataccgagaaggacggtcacaggatctccttcaacgacactttcaaagagagagatttgaatgttacgtgggatgttgatttatacggcgagttacttaaaatcggtggtggtaaagaaaggatgactgcgtattttaacaaggttggttggccagagaaagctcctaaagatgaagcagagaggaaagagttcatagctggacttcacaagcagaagactgagcttttcatggttcttatcgagaaaaagctgcttccgcttcgacccggtgttgcaaagttggttgattaag

SEQ ID NO: 96822 - DNA, 727 bp, Arabidopsis thaliana columbia
  unsure (1)..(727): unsure at all n locations
nnnnnnnnnnnnnnnnnnnnnnnnnnnnnnnnnnnnnnnnnnnnnnnnnnnnnnnnnnnnnnnnnnnccacgcgtccgtacggctggagaagacgacagaaggggataatggaaggagttcatagctggacttcacaagcagaagactgagcttttcatggttcttatcgagaaaaagctgcttccgcttcgacccggtgttgcaaagttggttgatcaagctttaacaaacggagtcaaagtagctgtgtgcagtacttcaaatgagaaggcggtttctgctatagtttcatgcttgcttggaccagaacgagcagagaaaatcaagatattcgcaggagacgtagtccccaaaagctgcgggaatgacttgtatagttacaaagagtggatacacggctgatgaagatttcgagaacgcagatgcggttttcgactgcattggagaccctccagaagagagatttgatttggcattctgtggaagtcttctccggaaacagttcgttagttaaaaactacaaaccgcattaagaaaattgtttctatatcaacattgttgtgtatagtcatttgaacagaacattcatgtaaaaccatatatataatataattcggttttcccnnnnnnnnnnnnnnnnnnnnnnnnnnnnnnnnnnnnnnnnnnnnnnnnnnnnnnnnnnnnnnnnnnnnnnnnnnnnnnnnnnnnnnnnnnnnnnnnnnnnnn

SEQ ID NO: 96823 - DNA, 497 bp, Arabidopsis thaliana columbia
gtccccaaaaagaaacctgatccagccatctacaacttagcagctgaaacccttggagttgatcccccaaaatgtgtagtggttgaagacagcgcgatcgggctagcagctgcaaaagctgcgggaatgacttgtatagttacaaagagtggatacacggctgatgaagatttcgagaacgcagatgcggttttcgactgcattggagaccctccagaagagagatttgatttggcattctgtggaagtcttctccggaacacagttcgttagttaaaaactacaaaccccattaagaaaattgtttctatatcaacattgttgtgtatagtcatttgaacagaacattcatgtaaaacccatatatataatataattcgattataaccttatgaaaaaaaaaaaaaaaaaaaaaaaaaaaaagcggccgctctagaggatccaagcttacgtacgcgtgcatgggacgtcatagcaattctatagtgcgtcctaaa

SEQ ID NO: 96824 - DNA, 1388 bp, Arabidopsis thaliana columbia
  unsure (1)..(1388): unsure at all n locations
acaatattctcaaaaaggggggaagtgaaaagctgagtgatgaagctatcgaagatacgcttgagaaggttgtcaaattgcttgcatacataagtgacaaggatcttttcgctgagttctacaggaagaagctggcccgtagctcttatttgatcgcagtgctaatgatgatcatgagagaagtatcctgacaaagctcaagcaacaatgtggtggacagtttacttctaagatggagggcatggtgacggatttgacactggcaagagaaaaccaaaacagtttcgaggattatctaggcagtaaccctgctgcaaacccagggattgacttgaccgtcactgttcttaccactggtttctggccaagttacaaatcatttgacataaatctacccagtgaaatgatcaagtgtgttgaagtcttcaaagggttttatgaaacgaaaacgaaacacaggaagcttacgtggatctattcactgggaacttgtcacataaacgggaagtttgatcaaaaggccatcgagttaatagtgtctacttaccaggctgctgtgcttctactctttaacacaactgacaagttaagttacactgagatcttggctcaactgaacctaagccatgaagatccttggtagggttccttcattccttgccaatgtgctaggtacaaggtactcctttaggggccaaacaccaagactgtctcccagattgatgcctttgagttcaactccaaatcccccgagggtcggcgcagaatcaagatccctcttcccccagttgatgaaaggaagaaagtcgttgaagatgtcgataaagacagaagatatgcaattgatgctgccattgccaggatcatgaagagcaggaaagtattgggacatcaacaacttgtttctgagtgtgttgagcaacttagccgaatgttcaagcctgatatcaaagcgatcaagaagcgtatggaggatttaataaccagagattatttggagagggacaaggagaatcctaacatgtttaggtacttggcttagggcaaaaaaacaacaactatggaagtggttggctcatgaaaggaatctgcttgtatatttagaagtccatatggagactgtcctaaaacaaatttatcgcttcattttcgctatttttctcttttaaaaaatattcggtctgtgctttttttttgggatgcaaatttgccttgtggatttttgtttcttaaatattgaatggagatggagaaatggcctttnnnnnnnnnnnnnnnnnnnnnnnnnnnnnnnnnnnnnnnnnnnnnnnnnnnnnnnnnnnnnnnnnnnnnnnnnnnnnnnnnnnnnnnnnnnnnnnnnnnnnnnnnnnnnnnnnnnnnnnnnnnnn

SEQ ID NO: 96825 - DNA, 555 bp, Arabidopsis thaliana columbia
tatccaaaggcatctcttgagtatgcacgacgccatttgcaaggacaaagtgaacgttacgggatactttgtgtggtctttgatggacaactttgagtggcaagatgggtccaaggcgaggttcggactttactacatcgatttccagaacaacttgacccgtcaccaaaaagtttcgggcaaatggtattccgaattcctcaaaccacagtttccaacctccaagctgagggaagaactctagatgatcgatcaagaatcctatcgggacaaaataattgagtacaagagtcttcgaagatgttgttgaggataatatcagtttgtgtgttctatggatcgttttcatctaccgggtccttcctatgttagaaggacttgtgagttgttcgagttttaataatatcaataaatgtcttcttttttaatatatgttgagttaataattaaatctgcttatcgaagaaaaaaaagaaaaaagggcggccgctatagaggatccaagcttacgtacgcgtgcatgggacgtcatagtaatactatagtgtgtcctaa

SEQ ID NO: 96826 - DNA, 708 bp, Arabidopsis thaliana columbia
aggataactatggcgacccagaagttatcattgccgagaatggttagagaaaatactcaaagctcatttcctaaatttcaatattattttatttttgatgaaaaacgaagtttgaatttttcttttggttttcaaggatacggagaagaccttggagagaagcacaatgacgtaaactttgggacacaagatcacaacagaaaatattatatccaaaggcatctcttgagtatgcacgacgccatttgcaaggacaaagtgaacgttacgggatactttgtgtggtctttgatggacaactttgagtggcaagatgggtacaaggcgaggttcggactttactacatcgatttccagaacaacttgacccgtcaccaaaaagtttcgggcaaatggtattccgaattcctcaaaccacagtttccaacctccaagctgagggaagaactctagatgatcaagaatcctatcgggacaaaataattgagtacaagagtcttgaagatgttgttgaggataatatcagtttgtgtgttctatggatcgttttcatctaccggtccttcctatgttagaaggacttgtgagttgttcgagttttaataatatcaataaatgtcttcttttttaaaaaaaaaacccaaagggcgaccgctctagaggatccaagcttacgtacgcgtgcgttcgacgtcatagtcttctata

SEQ ID NO: 96827 - DNA, 669 bp, Arabidopsis thaliana columbia
  unsure (1)..(669): unsure at all n locations
gttccgctccgcagttcccggatcgacccacgccgtccgcgaggagagatctctaaagagatttatcgtttcaaatttgttcacgttgagaagtttaatttagattaaacaacaaagagatgggttactggaattccaaagttgttccaaaattcaagaagttattcgagaaaaatagtgctaagaaggctgctgctgctgaagctaccaagacctttgatgaatctaaggaaacaatcaacaaggaaattgaggagaaaaagacagaactccaaccaaaggtcgtggaaaccctttgaagccacgtctgcagaagtcaaggtcgctatcatcttcttttttgctctccaagttacattaagtaattcaaatccatatttactgtaattaagactaaaattaaaacgagcaggctttggtgagagaccctaaggtggctggtttgaagaaaaactcagcggctgtgcagaagtacctcgaggagctagtcaaaattggtaaagattcaattacgctttgtcatgtgtctattttaaaatatcccgacaacaatatatgcttgtcttatatatttatcgntttttgtcttatatatcaaatatttgctggcaaaatttttggattcttatcatgtcctatattcttatacgcatgttatatctctagttt

SEQ ID NO: 96828 - DNA, 1234 bp, Arabidopsis thaliana columbia
  unsure (1)..(1234): unsure at all n locations
cccttctcaatggcttctaattaccgttttgccatcttcttttctctctttttcgccaccgctggtttctccgccgccgcgttggtcgaggagcagccgcttgttatgaaataccacaacggagttctgttgaaaggtaacatcacagtcaatctcgtatggtacgggaaattcacaccgatccaacggtccgtaatcgtcgatttcatccactcgctaaactccaaagacgttgcatcttccgccgcagttccttccgttgcttcgtggtggaagacgacggagaaatacaaaggtggctcttcaacactcgtcgtcgggaaacagcttctactcgagaactatcctctcggaaaatctctcaaaaatccttacctccgtgctttatccaccaaacttaacggcggtctccgttccataaccgtcgttctaacggcgaaagatgttaccgtcgaaagattctgtatgagccggtgcgggactcacggatcctccggttcgaatccccgtcgcgcagctaacggcgcggcttacgtatgggtcgggaactccgagacgcagtgccctggatattgcgcgtggccgtttcaccagccgatttacggaccacaaacgccgccgttagtagcgcctaacggtgacgttggagttgacggaatgattataaaccttgccacacttctagctaacaccgtgacgaatccgtttaataacggatattaccaaggcccaccaactgcaccgcttgaagctgtgtctgcttgtcctggtatattcgggtcaggttcttatccggggttacgcgggtcgggtacttgttgacaaaacaaccgggtcttagttacaaccgctcgtggactcgccggtaggaaatatctattgccggcgatgtgggatccgcagagttcgacgtgcaagactctggtttgatccaagggatgtgagtaagacacgtggcatagtagtgagagcgatgacgagatctagacggcatgtgtagtcaaaatcaagttgcacgcgagcgtgtgtataaaaaaatctttcgggtttgggtctcgggtttggattgtggatagggctctctctttgctttttgtcgttttgtaatgacgtgtaaaaactgtactcggaaatgtgaagaatgcatataaaataataaaaaatccttttgtttctactttatcaaatttaataatgcattcggnnnnnnnnnnnnnnnnnnnnnnnnnnnnnn

SEQ ID NO: 96829 - DNA, 622 bp, Arabidopsis thaliana columbia
  unsure (1)..(622): unsure at all n locations
agcaatggaaggaactgcggcggaagatgcaacgtctatggagtttagcgagtggatgaactcgacgattacgctatatctcttcaatctgatataactacccttctcaatggcttctaattaccgttttgccatcttcctcactctctttttcgccaccgctggtttctccgccgccgcgttggtcgaggagcagccgcttgttatgaaataccacaacggagttctgttgaaaggtaacatcacagtcaatctcgtatggtacgggaaattcacaccgatccaacggtccgtaatcgtcgatttcatccactcgctaaactccaaagacgttgcatcttccgccgcagttccttccgttgcttcgtggtggaagacgacggagaaatacaaaggtggctcttcaacactcgtcgtcgggaaacagcttctactcgagaactatcctctcggaaaatctctcaaaaatccttacctccgtgctttatccaccaaaacttaacggggggtttccgttccataaccgtngtttaacggnggaanatgtnnccgccggaanttttgnttagccggtnggggcntacggtccncggttgnatcccgtgggattaacggggggttt

SEQ ID NO: 96830 - DNA, 686 bp, Arabidopsis thaliana columbia
tttaaaggggggacccaacagaaacttgcccgcctggtttaagtaagccgccccataccggtatacggttttaagttaacccggaaaggatttattaaacccttcccacactttctggctaaacaccgtgtacgaatccgtttaattacggatattaccaaggcccacgcaaatgcaccgcttgaagctgtgtctgcttgtcctggtatattcgggtcaggttcttatccgggttacgcgggtcgggtacttgttgacaaaacaaccgggtctagttacaacgctcgtggactcgccggtaggaaatatctattgccggcgatgtgggatccgcagagttcgacgtgcaagactctggtttgatccaagggatgtgagtaagacacgtggcatagtagtgagagcgatgacgagatctagacggcatgtgtagtcaaaatcaagttgcacgcgagcgtgtgtataaaaaaatctttcgggtttgggtctcgggtttggattgtggatagggctctctctttgctttttgtcgttttgtaatgacgtgtaaaaactgtactcggaaatgtgaagaatgcatataaaataataaaaaatcattttgtttaaaaaaaaaaaaaaaaagggcggccgctctagaggatccaagcttacgtacgcgtgcgtgccacgtcatactcttctag

SEQ ID NO: 96831 - DNA, 1434 bp, Arabidopsis thaliana columbia
  unsure (1)..(1434): unsure at all n locations
nnnnnnnnnnncaactctatgcgactcactatagggatagctcgtacgcctgcaggtaccggtccggaattcccgggtcgacccacgcgtccgcggacccgtaatatctttagctagagagaaaaaaagagtgaggaaactagagagagagaccacccaataatggtgaggttcgagaaggttcatttagtgttagggttagctctggttctaactctggtcggagctccgaccaaagcccaaggacctgtttgcggtgcaggcctgcctgacaaatttagcagattaaacttccctgaaggcttcatttggggaaccgcaacagcagcatttcaggttgaaggagctgttaatgaaggttgcagaggtccaagcatgtgggatactttcactaagaagttcccacatagatgtgaaaatcataacgctgatgttgctgtggatttctatcatcgttacaaggaagatatccagttgatgaaagaccttaacactgatgcttttagactttctattgcgtggcccagaatattcccccatggaaggatgtctaagggaataagcaaagtgggagtccaattctaccacgacctcatcgatgagcttctcaaaaacaatataataccattagttacagtctttcattgggatactccccaagacttggaagatgaatatggtggtttcttaagtggtcgcatcgtgcaagattttaccgaatatgcgaatttcactttccacgaatatggacacaaagtgaaacattggatcacatttaacgagccatgggtgtttagtcgtgccggttacgacaacggaaagaaagctccgggacgttgttcgccgtacatccccggttatggacagcattgtcaggatgggcggtctggatacgaagcttatcaagtcagtcacaacttactcttgtcgcatgcttacgctgttgacgcattcagaaactgcaaacagtgtgctggaggtaaaattggaattgcacacagtccagcttggttcgaaccacaagaccttgagcatgttggaggttccattgaacgtgtgcttgatttcatcctaggatggcatttggctccaacaacttatggagattatccacaatcgatgaaggatcgtgtcggtcatagattgccaaaattcacagaagctgagaagaagttgctaaagggttctacagattacgtaggaatgaattactatacttcagtgtttgcaaaagaaattagccctgatcctaagagtccgagttggacgactgattctcttgttgattgggatagcaagagtgtggatggatacaaaattggtagcaagccgtttaatggtaaactggatgtgtattcaaaaggtttgagataccttttgaagtatattaaggataactatggcgacccagaagttatcattgccgagaatgga

SEQ ID NO: 96832 - DNA, 646 bp, Arabidopsis thaliana columbia
ccgaacggagggccggccacgcgtacggaaagaggagattgttgaagagacaaagaaaggcgtgacccctgatcaaaagcggtgagtgagggttgggctagcttcggagctggctatgtccgcaggacccggtcacgttcatattcgagaagggtatctgtttccctcccggaggaggtgaagactaaagaaataccggtggaggaagtgaaagctgaagaacctgccaaaactgaagaaccagccaaaaccgaacggacaagtggtgagaaagaggagattgttgaagagacaaagaaaggcgagacccctgaaaccgcggtcgtggaggagaagaaaccagacgtagaggagaagaaggaagaggctactccggctccggcagtggttgaaactccagttaaccaaccggagaacaacgacgacagcgccagtggctgaaccaccaaagccttgatttgttctcaagatggtatgattacttctcttgtatgaaaacatctttgtacgtaccaaaaaaatgaaaggaagaaacggaaaggtcctaaaaaaaaaaaaaaaaaaaaaaaaaaagcggccgctctagaggatccaagcttacgtacgcgtgcatgcgacgtcaagactcttctatagtggtacctaa

SEQ ID NO: 96833 - DNA, 1054 bp, Arabidopsis thaliana columbia
  unsure (1)..(1054): unsure at all n locations
tatacgacttactatagggaacagctggtacgcctgcaggtaccggtccggaattcccgggtcgacccgcgcgtgtgcttgatttcatcctaggatggcatttggctccaacaacttatggagattatccacaatcgatgaaggatcgtgtcggtcatagattgccaaaattcacagaagctgagaagaagttgctaaagggttctacagattacgtaggaatgaattactatacttcagtgtttgcaaaagaaattagccctgatcctaagagtccgagttggacgactgattctcttgttgattgggatagcaagagtgtggatggatacaaaattggtagcaagccgtttaatggtaaactggatgtgtattcaaaaggtttgagataccttttgaagtatattaaggataactatggcgacccagaagttatcattgccgagaatggatacggagaagaccttggagagaagcacaatgacgtaaactttgggacacaagatcacaacagaaaatattatatccaaaggcatctcttgagtatgcacgacgccatttgcaaggacaaagtgaacgttacgggatactttgtgtggtctttgatggacaactttgagtggcaagatgggtacaaggcgaggttcggactttactacatcgatttccagaacaacttgacccgtcaccaaaaagtttcgggcaaatggtattccgaattcctcaaaccacagtttccaacctccaagctgagggaagaactctagatgatcaagaatcctatcgggacaaaataattgagtacaagagtcttgaagatgttgttgaggataatatcagtttgtgtgttctatggatcgttttcatctaccggtccttcctatgttagaaggacttgtgagttgttcgagttttaataatatcaataaatgtcttcttttttaaaaaaaaaaaaaaaaaaagaaagctctggaggatccaagcttacgtacgcgtgcagttgacgtcataactcttctatagnnnnnnnnnnnnnnnnnnncnnnacaattcg

SEQ ID NO: 96834 - DNA, 751 bp, Arabidopsis thaliana columbia
  unsure (1)..(751): unsure at all n locations
ttttaaaaaagaaaaaactctcaagcgggtcttggtgccagaaagtacccctccgaggaaggctaggtcaaaaattttaatttccccgggatcaaaaaccggtgagtgaggctttcgtcaactttggaagcgggttatgtcccaggaccggtcacgttcatattcgagaaggtatctgttttcctcccggaggagttgaagactaaagaaataccggtgaaggaagtgaaagctgaagaacctgccaaaactgaagaaccagccaaacccgaaggaccaagtggtgagaaagaggagattgttgaagagacaaagaaaggcgagacccctgaaaccccggtcgtggaccagaagaaaccagaggtagaggagaagaaggaagaggctactccggctccggcagtgggtgaaactccagttaaggaaccggagacaacgacgacagcgccagtggctgaaccaccaaagccttgatttgttttcaagatggtatgattacttctcttgtatgaaaacatctttgtacgtaacaaaaaaatgaaaggaagaaacggaaaggaacaaaaaaaaaaaacttatttttcattcttttttttcaatttggtttgtctttgtgtggataaatctctctgttttttttttaattattgggaaagtctttgcgaaaaaaaaaaaagggcggccgctctagaggatccaagcttacgtacgcgtgcagctacgtcannnnnnnnnnnnnnaggtttagtta

SEQ ID NO: 96835 - DNA, 1353 bp, Arabidopsis thaliana columbia
  unsure (1)..(1353): unsure at all n locations
tgatttnnnnnnnnnnnnnnnnnnnnnnnnnnnnnnnnnnnnnnnnnnnnnnnnnnnnnnnnnnnnnnnnnnnnnnnnnnccacgcgtgcgtgcggctgcgagaagacgagagaagggtacggctgcgagaagacgacagaagggtacggctgcgagaagacgacagagggaactctagatgatcaagaatcctatcgggacaaaataattgagtacaagagtcttgaagatgttgttgagagacacgtaatcagtttcgtgtgtttggagaagaagaagaacagatcaaatacgaggagagatctctaaagagatttatcgtttcaaatttgttcacgttgagaagtttaatttagattaaacaacaaaaagatgggttactggaattccaaggttgttccaaaattcaagaagttattcgagaaaaatagtgctaagaaggctgctgctgctgaagctaccaagacctttgatgaatctaaggaaacaatcaacaaggaaattgaggagaaaaagacagaactccaaccaaaggtcgtggaaacctatgaagccacgtctgcagaagtcaaggctttggtgagagaccctaaggtggctggtttgaagaaaaactcagcggctgtgcagaagtacctcgaggagcttagtcaaaattgaattccccggattcaaaagcggttgagtgaggcttcgtctagcttcggagctggctatgtcgcaggaccggtcacgttcatattcgagaaggtatctgttttcctcccggaggaggtgaagactaaagaaataccggtggaggaagtgaaagctgaagaacctgccaaaactgaagaaccagccaaaaccgaaggaacaagtggtgagaaagaggagattgttgaagagacaaagaaaggcgagacccctgaaaccgcggtcgtggaggagaagaaaccagaggtagaggagaagaaggaagaggctactccggctccggcagtggttgaaactccagttaaggaaccggagacaacgacgacagcgccagtggctgaaccaccaaagccttgatttgttttcaagatggtatgattacttctcttgtatgaaaacatctttgtacgtaacaaaaaaatgaaaggaagaaacggaaaggaacaaaaaaaaaaaacttatttttcattcttttttttcaatttggtttgtctttgtgtggataaatctctctgttttttttttaattattgggaaagtctttaatgtgttatttatttatattcatgtgaatttgtaacaaaaatattttgtggatgttttctatagatttattgtttcaactttcaaccnnnnnnnnnnnnnnnnnnnnnnnn

SEQ ID NO: 96836 - DNA, 780 bp, Arabidopsis thaliana columbia
  unsure (1)..(780): unsure at all n locations
cggcaaaatcgttggatttcatggaagttcaagtgatttgatcctttcttttggagtttatataattccgtcgactacaccgctgactccgccggtatcaggtggtctgaccaaattggaagctcaaggtggtcgtggtggagatgtttgggacgacggtggtgcttatgacaatgtaaagaaagtttatgttggacaaggtgactctggtgttgtttatgtcaagtttgattacgagaaagatggtaagattgtatcacttgaacatgggaagcaaacactacttggaacagaggagtttgagattgatcctgaagactacatcacctatgtgaaagtttactacgagaaacttttcgggtcaccgatagagatcgtcacagctcttatattcaagacattcaaaggaaaaacttctcagccgtttggactaacctctggagaagaagctgagctaggaggcggcaaaatcgttggtttcatggaacttcaagggttttggatccattctgttggagtttatataattccgtcgactacaccgctgactccgccggtatcaggtggtctgaccaaattggaagctcaaggtggtcgtggtggagatgtttgggacgacggtggtgcttatgacaatgtaaagaaagttatgttggacaaggtgaccnggtgttgttangtcaagtttgattacgagaagatggnaagattggancnctgacatgggagcaacccacttggacaaggngtttanatgacccgancactccccatggaaat

SEQ ID NO: 96837 - DNA, 870 bp, Arabidopsis thaliana columbia
aaaaaagtggttagtattggatgaaaagagaatttaatgttcgtattcaaaaatgttttatatatactatatagtatatatacaaaatcccaagattaactcattcatattccatcttcatctccatttctcacactcaaaggttaagaagaaaagatggcgaaaaagttggaagctcaaggtggtcgtggaggagaagaatgggacgatggtggtgcttacgaaaacgtcaagaaagtgtatgttggtcaaggtgattctggtgttgtttacgtcaagtttgattacgagaaagatggaaaaatcgtatcacacgaacatgggaagcagacactacttggaacagaggagtttgtggttgatccagaagattacataacatcagtgaaaatttactacgagaagctctttggatcaccgatagagatcgtaacggctctaatctttaagacattcaaggggaaaacttctcagccttttggactaacctctggagaagaagctgagctaggaggtggcaaaatcgttggatttcatggaagttcaagtgatttgatccattctgttggagtttatataattccgtcgactacaccgctgactccgccggtatcaggtggtctgaccaaattggaagctcaaggtggtcgtggtggagatgtttgggacgacggtggtgcttatgacaatgtaaagaaagtttatgttggacaaggtgactctggtgttgtttatgtcaagtttgattaccagaaagatggtaagattgtatccctttgaaccatggggaaagccaaaacacttaccttggaaaccaaaaggagttttgaagaatatgatacccttgaaagaacctttcctttcaccctt

SEQ ID NO: 96838 - DNA, 606 bp, Arabidopsis thaliana columbia
  unsure (1)..(606): unsure at all n locations
tcccnggactgcccangctcactggcccnaacagcttncccggtntacccagcnggcgtcccaaggtccatgctgngatnagagatnggccatccnttnggnggancttcttggaggccccatagggttttgagaangaccccnccacgcancctaagccgtgcattatacncgtggaggccntgggttgatgcttggaaggattgcgagtttgcggatctttggcttaatgagatggaagagtaccaccaaagagaaccaagaaggaagctgataacgcaaagtagaaagaaagaagtaagaggtatgttgttacttacccaacacgagtagtgaacttcctttacatcgtgttggctttgtagagccagggatcattagtcttgtggagggctatggagttttttttaatttcattgaattcgttaaatcattcgcaaacactattagtacctatattgaggtcatatggtataataaccctattcgtttgtttatttgttgtgttttgtacctttgatggtattttatttgtataattgatatgtgaatttatgtagcatttctttttaattgatctataatgagcagtagctcaacatattt

SEQ ID NO: 96839 - DNA, 1039 bp, Arabidopsis thaliana columbia
cttcttcaaaagcacactcaatatttcgagatcctctcggcttgttcgttcttcgtgaacgatcccatctattgtttctcgctagtctcagattcgactaacttggatatctccgatactgaagaagcctccttcttctttttccgctcttcccgatgccgatcgataagatcttcaaagatgatgctagtgaagagaagggagaacgtgcgaggatggcatcatttgttggtgcaatggctatcagtgatctggttaagtctactttagggccaaagggcatggataaaatcttgcaatctactggtagaggtcatgcggtcactgttactaacgatggtgctactattctcaagtcacttcacatagacaaccctgcagctaaagttcttgttgacatctcgaaagttcaagatgatgaggttggtgatggaactacctctgttgttgtcttggccggcgagcttctgagggaagcagaaaagcttgtggcttctaagattcaccctatgaccatcatagcaggttacagaatggcttcggaatgtgctcgtaatgctttactgaaaagagtcattgataacaaggacaatgcagagaagtttaggtcagacttgttgaagattgcgatgactactttatgttccaaaattctctcacaggacaaggaacattttgcagaaatggccgtggatgctgttttcaggctaaagggaagcacaaacttggaagctattcagatcatcagaaaacctggagggtctctgaaggattcgtttttggatgaagggtttattcttgacaagaaaataggaattgggcagcctaagcgcatagagaatgcaaatatcttagtagctaatactgctatggataccgataaagtgaagatttacggtgcacgtggtccgtgtggattccatgaccaaggttgctgagattgaaggcgctgagaaggaaaaaatgaaagacaaggtgaagaagatcataggccacggaatcaactgctttgttaacaggcagttgatctacaattttc

SEQ ID NO: 96840 - DNA, 531 bp, Arabidopsis thaliana columbia
actcactattgggaaagctggcccgcctgcaggtaccggtccggaattcccgggatcctcatcatcgtcatcaaggggtcttataatggtgacggcctcttagtggtgcgttgatccccctcgagatatctttgtgggcgagtgttccggttacacccagcagccgcatttttgattgcttttctcggtgcgagaaagacagatattgggtgccatttagcttatgctctgaagataggtgtgatgtaagctcaggagtcctaaaacttctcagacgcggaatctaactaaagctcagatagattctgcggtagattctctctctgattggggttttgaatcttggaggctctggttctttatctggtctcgagcatccaaaggtgagagcttttttgccgcaggtgggttacccatcatttaaggggaaatttttgccaccggaagaatggttttgagtttgaaaatcgcggagcgaggctgattcagaatcccccacgcatgggctttcaaattgctttggagggaaga

SEQ ID NO: 96841 - DNA, 729 bp, Arabidopsis thaliana columbia
ggccagtggacgagcttttcagtgtaatcccggaagatgggaggagaaaagtgtacgcagatgcgatcgcaagggaaagagcagaggaagaagctaaagttgcagctgacaaagctcgagaggcagcagaagcagcgaaagagtttgagaagcaaatgcaaaagctctctgagaaagaagcagaagctgcaagcttagctgaggatgcgcagcagaaagcagatgccgtgggagtcacagtggacggtttatttaacaaggcgaaagatatcagctcaggtctctcctggaataaactcggctctcagttcgcaactgcgattcagaacgcttcagagacgcctaaagtacaggttgctacggtcagaggacaagcaaaagcgagtaacttgccacccaagaaagcagtggtgaagcagagaccatcatctccgtttgcatccaaaccgaaagaagaacgtccgaagaacccggagaaagaggtgaggaaagtgttcggaggattgtttaagcaagagcccatctccatcgacggtgattgaaaaggccatatgcgatgtccttttgaagttccgtacagtttccttttttctctttccttctgtttcaagttaaaattctgtaatcgtatgacaaaattatacataaaaaaccatcattctctccttaaatccaatgatatcccacagggcggccgctctagaggatccaagcttacgtacgcgtgca

SEQ ID NO: 96842 - DNA, 566 bp, Arabidopsis thaliana columbia
taggtaccactatagaagagtctatgacgtcgcatgcacgcgtacgtaagctcggaattcggctcgagtcggtcttcgtctcgtcgtttgattagttctctacatttgtttttgattagttcgcgattcatttctatcttgtctccggtcaatatttttcttcgatccgtcgatcggatattttgactggagatttaagaagtctgaaattgttagatcgcagctatgtcgtactctgactccgattcgtcgtctcatggtggcgagtacaagaatttccgacagattacgcgtgaacgactcttgtatgagatgcttagatctgcaaagacagggagctcaaaatccacctggaaggtactaatcatggacaaacttactgtcaagataatgtcgtacgcctgcaaaatggctgatatcacacaagaaggagtttcattggttgaagacatatttagacgaagacaaccacttccttcaatggatgcaatatacttcatccagccaactaaagagaatgtcatcatgttcttgtcagacatgtctgggaaatcacccttgtacaa

SEQ ID NO: 96843 - DNA, 458 bp, Arabidopsis thaliana columbia
  unsure (1)..(458): unsure at all n locations
ggcttctnctttgcttgcactcttctcctgtctcttcctctctctcttatctctctcctcctccctaaatctccgccgtccgatcttctctcaatccaacgacctcgatctcttctcttctctaaatctcgaccgtccatctctcgccgccgatgacatccacgatcttctcccacgctacggattcccgaaaggtcttcttcccaacaacgtcaaatcgtacactatctccgacgacggcgatttcaccgttgacctgatttccagttgctacgtcaagttctccgatcaactcgttttctacggcaagaatatcgccggaaaactcagttacggatctgttaaagacgtccgtgggatccaagcttaaagaagcctttccttttggctaccaatcaaccgccaatggaattcgggtcccaaggttttgccaacggnttggtttttttcggncggng

SEQ ID NO: 96844 - DNA, 634 bp, Arabidopsis thaliana columbia
  unsure (1)..(634): unsure at all n locations
acccgcggtttaacaggcggnttntttnancgcgcattnccncgtgaccagtttccccgtcggtccgaggntntccaaaacgnnaangtcctnnccggcgcgggnttcncggtgcctgttccgagtgctcgtcaagttctccgatcaactcgttttctacggcaagaatatcgccggaaaactcagttacggatctgttaaagacgtccgtggaatccaagctaaagaagctttcctttggctaccaatcaccgccatggaatcggatccaagctctgccacggttgtgttctccgtcggatttgtgtccaagactttacctgcttccatgttcgaaaatgttccttcttgctcaagaaacctaaatcttcaagactcttgaatccacctgaaacgatctcaagattcaacattccctccaccctttatagttttgtatttcagaagtattttgcttggtttcgtagatataggttcgcaattggaaaagatactatcttaattattcgaatcagatttatgttatactgcccaaagagaagaaagatttaagttttctaaatcaaaaaaaaaaaaaaaaaaagggcggccgctctagaggatccaagcttacgtacgcgtgcatgcgacgtca

SEQ ID NO: 96845 - DNA, 570 bp, Arabidopsis thaliana columbia
atttgttaactccaactccaaagtgatcaaagagagaaagagatagagaatcgccatggcaaagatgtcagcactttctatcttcgccatctttatcatcctcgttctggttatctttgaaatacctgagatagaagcacatgatagcgagtgtctgaaagaatatgggggtgatgttgggtttggcttctgtgcgcctaagatatttccgacgatttgttatagaaattgccaaaaggacaagggggctaatggtggaaaatgcctctggggagagggcggtaaagtgaaatgcttatgcgacttctgcagcaatgaatcttttaatcagtttataagtcttacttgaaacttgcatgtgtcgtcgtttgtgtaataagcaaggctaatgatccaagaaataatgtaacaatgaataagtaaaataaagaaccgctaggctttttaggctttctcctattattggaaaaaaaaaaaataaaaaaaaaaaaaaaaaaaagggcggccgctttaaaggatatccagcttacggaagggtgccagccacgttaaaggtcctttaaaagtgcc

SEQ ID NO: 96846 - DNA, 517 bp, Arabidopsis thaliana columbia
  unsure (1)..(517): unsure at all n locations
nnnnnnnnnnnnnnnnnnnnnnnnnnnnnnnnnnnnnnnnnnnnnnnnnnnnnnnnnnnnnnnnnnnnnnnnnnnnnnnnnnccacgccgtccggaaaaaaacataaaaaaatattcacaaaatggccgatggttttggtgaaccgggaagctcaatgcatggagtcaccggcagagaacaaagctatgcattctctgtcgagtctccggcagttccttccgactcatcagcaaaattttctctccccgtggacaccgaacacaaagccaaagtcttcaaactcttatcctttgaagctccacatatgagaactttccatcttgcttggatctcattcttcacttgcttcatttccactttcgctgctgctcctcttggccccatcattagagataacctcaaatctcacaagaccagatgtcggaaatgttggtgttgcttctgtctctggcagaatcttctctagggttgtatgggagcagtttggatctccttgggcccttatgggtgggcttt

SEQ ID NO: 96847 - DNA, 662 bp, Arabidopsis thaliana columbia
  unsure (1)..(662): unsure at all n locations
aaatangacccccacccttgccnatncatgattntcaagntaggaccngttttgngtcgnaggcaacttattttgctgtttggaggagggaagcttccaaattctgctcccttgtgcaccctcaaaggattatggaattcccctcggaaagatccgctgatctgctcgagccatatgttgatccaatagatgacacccaagcgcttgaccaaggtattggagacagccctgtgtcaaatctggaaatcggctttgatggactggtgtgggcataaaatattcgaaaaggcgtccgcagatggaaaccactgaaagctcatacagcttccccgaacatatgggaaagctttcagcttcatcctcattcataaggtcttgtgctgctcaaactcaaagtttagtgaattctttcttctttattcaaacctctatggattgagtttaatagaaagttggccatgagaatgctcggccattgtgttcagatgaatgtatactgctaaaagcattgccagaatctcgacaaaagtcaacaaattattcagtgtctgattttctatgagaaaatgaaatgcagcaatgtcttctgtgactgtnatatatatatatatatatatatatatatatatatcagtgaatcggtgcttcctttttttgaatcg

SEQ ID NO: 96848 - DNA, 492 bp, Arabidopsis thaliana columbia
  unsure (1)..(492): unsure at all n locations
cacttagcattgcgtcaccctctccttgttctattccattgtcggtcacaaaggtctcgcctttaaagagaaagagacctacccacttaaatatccctgacctcaatcctcaacaaccgatttcaactgattacttccgtttcagagagggtgacgcaaaggtctcgcctttaaagagaaagagacctgcccacctaaatatccctgacctcaatcctcaacaaccgattcgaactgattacttcagtttcacagactttgctcaccaaaacggcaccgtaagcttcggtggcaatggtttgggtgtcgtctccagaaacggtaagaagaagtttatggaagatactcacagaattgttccttggttgggtgggtaactccaaaaagagtttctttgggagtttatgatggtcatgggggtgctaaagntgnagaatttgggggtgagaatttgganaaatttttggtgggatgatgggattggggnngggg

SEQ ID NO: 96849 - DNA, 567 bp, Arabidopsis thaliana columbia
cttatctgaatgctttcattctaattaaagattttaatatatgaatattcgcacgtggatatttgtataagatatgcattaatctccgaggctatgtatagttcagaatttgaagtgaagtttaggagaggaagagagatggaggtatttagacttggagagctgagacacctactggtgacggttttcttgtcggggctcgccgaatacttgataaggccagtgatgactgacgtcaccgtagccgcggtttgctccggcctagacgattcatgttctttggccgtctatctcaccggagtacaacaagtgacggtaggaatggggacaatggtaatgatgccagtgatcggcaatctatcggacagatatggaatcaaagcaatgctcactcttcccatgtgcctctctgttcttcctccagcaatattagggtacagaagggataccaatttcttttacgcattttatgtaatcaagaccctattcgatatggtctgccaaggcaccattgactgtctcgctaacgcttatgtggcaaaaaatggtcatggcacaaaaagaata

SEQ ID NO: 96850 - DNA, 1109 bp, Arabidopsis thaliana columbia
gaggcattgaacgagcttcttgagtctgatgacaagtttggtttcattgttatggatggtaatgggacactgtttggaactttgagtgggaatactagagaggttcttcataagtttactgttgatctcccgaagaagcacggaagaggaggacagtctgcacttcgttttgcccgtcttaggatggagaagagacacaattatgttaggaaaaccgctgagcttgctacacagttttacatcaatccagctacgagtcagcctaatgtctctggtctgatccttgctggttcagctgatttcaaaactgagctcagtcaatcagagttgtttgatcctcgtcttcaagctaagatattgaatgttgttgatgtttcttacggaggtgaaaacggtttcaaccaagcgattgagctgtctgctgagattctatccaatgtgaagttcatacaggagaagaaactgattgggaagtactttgaggagataagtcaagataccgggaaatacgttttcggtgtggaggatactctaaaggctctagaaatgggtgctatcgaaacccttatcgtgtgggagaatctggacataaacaggtatgagctaaagaacagtacgacaggagaaatggtggtgaaacactttgggaaagatcaagagtctgatacaagcaacttccatgattcagagactaacgcggagctagaagtacaggagaagatgcctctactcgaatggtttgcaaatgagtacaaacgtttcggctgcactcttgagtttgtgactaacaaatcccaagaagggtcacagttttgcagaggttttggtgggattggtggtatgttacgttaccagcttgacatgaggacatttgatgagttatcagatactgaagtttacgaagattctgattaaagtgggaaaacttttggtgatggtttcagatcgatacagtgagggaaaatgtggcataaagatggtcttttatcaacaaagaagagagatttaagtttcttgttttctatagaacattaaaaagcttgactctttctttctgttagacaatttgtgttgtaatttttgaggattttaaacatctttttgttgtt

SEQ ID NO: 96851 - DNA, 1429 bp, Arabidopsis thaliana columbia
accacgctgatagagagtagagagacacacgcagattttgagctgcgtgctctgttttaagcttgaaggaggaaaaacatggcagaccaagaatcagataagaacattgagatttggaagattaagaagctaatcaaaggacttgaaaccgcaagaggtaatggaacaagtatgatctctcttataatgcctcctagagatcaagtagctcgtgtcactaagatgcttgctgatgaatacggaaccgcctcaaacatcaagagtcgagtgaatcgtcaatctgttttatctgccattacttctgctcaacaaagattgaagctttacaacaaagttcctccgaatggtcttgttctctatactggaaccattgttactgatgatggtaaagagaagaaagtgacgattgatttcgagccttttaaaccgattaatgcttcgttgtatttgtgtgacaataagttccacaccgagcctttgaatgagcttttggagtctgatgataagtttggtttcattgttatggatggaaatggaactttgtttggtactttgagtgggaatacaagagaggttcttcataagttcactgtcgatcttccgaaaaagcacggaagaggaggacaatctgcgttgcgatttgctcgtcttaggatggagaagagacataactatgtgaggaaaaccgcggagcttgccactcagttttacattaatccagctacgagtcagcctaatgtctctggtcttatacttgctggttcagcggattttaagaccgagctaagtcaatcagaactgtttgatcctcgtcttcaagctaagatattgaatgtggttgatgtttcttacggaggagagaatggtttcaaccaagcaattgagctgtctgctgagattctatctaatgtgaagttcatacaagaaaagaaattgattgggaagtactttgaggagattagtcaagacactgggaaatatgttttcggtgttgaagatactttaaaggctctggaaatgggtgctgttgagactcttatagtgtgggagaatctagatattaataggtatgagttaaagaacaacacgaccggagaaatcgtgattaagcatttgggaaaggatcaagagaacaaccaaagcaatttccatgatgcagagactaatgcagagttagaagttcaggagaagatgcctctgcttgaatggtttgctaacgaatataaacgttttggttgtacacttgagtttgtgactaacaagtcccaagaaggatcacaattttgcagaggctttggcggtattggtggattgttgcggtaccagcttgatatgaggacattcgatgaattatccgatggtgaagtttatgaagactcagattaagtaagagaaaatgtggtttaagatctgaagaaggatttgaagt

SEQ ID NO: 96852 - DNA, 612 bp, Arabidopsis thaliana columbia
  unsure (1)..(612): unsure at all n locations
ccncccncccctgggagaggccttgaatctggggttccnacagctntccnctntccacattggtgatccagnntgctggaagttgtgngnccttatccgnggtctcggtntgagcttccatacaactcaatcgaaggtgttngntcaaggattaaagagcttgcaccaaatcttagtccacacagatgagcgagagccagctgcttttgggccttcattgaagcctgagtgcaaggaggcaatgagcacaacaccgttccaaaccgtggttgagaacttttacatgacaaactcgatcacaagagcatcaaggatcatggcgcagtgcagtgccgtgctcttgaaaaagtgagagctttaacttgggttttcacatttcctcctcttttcgcaaaaattaaagatactgtttcttcgtttgctgtcctctttatagaccttttgtttaagcctgagtatcactgtatctcgggtttagcttgcggtgaaatctataagcaatttgcaataagcacattgttagattcaaaaaaaaaaaaaaaaaaaaagggaggccgctctagaggatccaagcttacgtacgcgtggatgcgacgtcaaactcttctatag

SEQ ID NO: 96853 - DNA, 656 bp, Arabidopsis thaliana columbia
gccgccccccccttgaaatgacattccatgtgccgtaccggtccggaattcccgggtcgacccacgcgtccgcgggactgggcctgatactctcaaggaaattgctgagggacggcttccattctgtacggctctcaagaacgccaaaaaccctgcaatcattgttggtgctgggctcttcaacagaactgataaaaatgctatcctctcttctgtggagtccattgcacaagccaacaatgttgtccgaccagactggaacggtctcaactttctccttcagtatgctgcccaagcggctgctcttgatcttggtctcattcaacagtccgccaaagccctcgagtctgcaaaattcgtctacttgatgggagcagacgatgtaaatgttgacaagattcctaaagacgcctttgtggtttaccaaggacaccatggagacaaagcggtttaccgtgcgaacgtaattctccctgcatcggccttcactgagaaagaaggaacctatgaaaatactgaaggatttacccaacagactgttccagctgttccaacagttggtgatgcaagagatgactggaagattgtgagagccttatccgaggtctcgggtgtgaagcttccatacaactcaatcgaaggtgttagatcaagaa

SEQ ID NO: 96854 - DNA, 1579 bp, Arabidopsis thaliana columbia
gtaatgcgtatcattccacgcctgaatgaggatataaacgaagtttggatatctgacaaaacccgattctgttatgacggcctgaaaagacaaaggctgagcgaccctatgatccgagattccgatggacgattcaaggcagtgagctggcgtgatgccttggctgttgtgggtgatatcattcatcaggtgaagccagatgagattgttggagtagcaggtcagctatctgatgcggaatccatgatggtactgaaggacttcgttaacagaatgggctcagacaatgtatggtgtgaaggaacagctgctggtgttgatgctgatcttagatacagttatctgatgaacactagcatcagtggacttgaaaacgccgatctcttccttctcatcggtacccagcctagggtggaagctgcaatggtgaatgctaggatctgcaagacagtccgtgcatcaaatgccaaggttggatatgttggtccacctgcagagttcaattacgactgcaaacacctcgggactgggcctgatactctcaaggaaattgctgagggacggcatccattctgtacggctctcaagaacgccaaaaaccctgcaatcattgttggtgctgggctcttcaacagaactgataaaaatgctatcctctcttctgtggagtccattgcacaagccaacaatgttgtccgaccagactggaacggtctcaactttctccttcagtatgctgcccaagcggctgctcttgatcttggtctcattcaacagtccgccaaagccctcgagtctgcaaaattcgtctacttgatgggagcagacgatgtaaatgttgacaagattcctaaagacgcctttgtggtttaccaaggacaccatggagacaaagcggtttaccgtgcaaacgtaattctccctgcatcggccttcactgagaaagaaggaacctatgaaaatactgaaggatttacccaacagactgttccagctgttccaacagttggtgatgcaagagatgactggaagattgtgagagccttatccgaggtctcgggtgtgaagcttccatacaactcaatcgaaggtgttagatcaagaataaagagcgttgcaccaaatctagtccacacagatgagcgagagccagctgcttttgggccttcattgaagcctgagtgcaaggaggcaatgagcacaacaccgttccaaaccgtggttgagaacttttacatgacaaactcgatcacaagagcatcaaagatcatggcgcagtgcagtgccgtgctcttgaaaaagtgagagctttaacttgggttttcacattttctctcttttcgcaaaaataaagatactgattcttcgtttgctgtcctctttatagaccttttgtttaagcctgagtatcactgtatctcgggtttagcttgcggtgaaatctataagcaatttgcaataagcacattgttagattcaaaactttgcagtgttaattggatgctttgtggcatcttgtattgttcttattaggactcccttttacatttgacatatatgaatttggaggcatggcgat

SEQ ID NO: 96855 - DNA, 644 bp, Arabidopsis thaliana columbia
  unsure (1)..(644): unsure at all n locations
gccattagactctnttccgagaatccaaccagaccacacagaccttctccttctccacggaacaaagtnttcgtnaagaagacgacgagagacaccacgtnacacctcgattactccaatctggttaagctggagaaggcgggatcgcactcgggttcgaatcccgctccggcttcgggttcggatcctattaaccgggttcccctcgctcaggtcgtcgaggattgcgtcagacgctggttccaggatacgctcaaggaagccaaatctggtgacgttggtatgcaggtcttggttggtcagatgtattgcagcggctatggaatccctaaagatgaaaacaagggtcgtgcttggattaacaaagcttcaagaactagatcatcaagcttggcaagtgagtgataagcctccagggtataatgcaagcgattcagattccaatgataagaaagattgatgatcatcttttgaatgtttgtattgccattgactttgatttgttagtttctctctcctttgtttaactctacttgatttattcaaatttgaagcttttgtatcatcccaatggtcaaaatgtgcccctcaagttatttattaccaggcagtgaagtaattcaactgtgagtctgttgtagctg

SEQ ID NO: 96856 - DNA, 515 bp, Arabidopsis thaliana columbia
  unsure (1)..(515): unsure at all n locations
actgtcaaaccaaaaaaaattgaaaaccctaaattggttgaatgggaaaatcgatggtcagattcgcagaattcgccattagactctcttccgagaatccaaccagaccacacagaccttctccttctccacggaacaaagtcttcgtcaagaagacgacgagagacaccacgtcacacctcgattactccaatctggttaagctggagaaggcgggatcgcactcgggttcgaatcccgctccggcttcgggttcggttcctattaaccgggttcccctcgctcaggtcgtcgaggattgcgtcagacgctggttccaggatacgctcaaggaagccaaatctggtgacgttggtatgcaggtttttggttgggcaagatgtattgccagcggcttatgggatcccttaaagttgaaaacaatgggtcggcttggttaaaaagctttaagactagtctcacttgnaannngtnaaaccncaggntatnaangtnagtccatnaaaaanttggtc

SEQ ID NO: 96857 - DNA, 786 bp, Arabidopsis thaliana columbia
  unsure (1)..(786): unsure at all n locations
cttctcttctctctatcacactactactactcacatcatggctttctccactagaggctccctcttattcttcttcactacacttgttcttctctccacccaaatccatgcaagagacagttacttctttggaaaattccacagagaatcccccaaagatcaaaaccctaacagtttcatccctcttgagactagcgagaaaaccacagtagaagaatccgtcctcaacaagaaagagcaagaacaagatcctacctttgtccccgagtccggaaacgggtatggcttgtatggtcacgagaccacatacaacaacaacaacgacaacaaagaagagttcaacaacaacaacaagaacgatgaaaaagtcaacagcaagactttttccactccaagcctgagcgagaccgaagagtctttcaacaactacgaggaaaattacccgaagaagacagagaactacggcactaaaggttataacaatgaggagttcaacaacaacaacaacaagtacgatgcaaacttcaaggaagagttcaacaacaacaagtacgatgaaaattacgccaaggaagagttcaacaacaacaacaacaacaacaactacaactacaagtacgatgaaaacgttaaggaagagtctttccccgagaacaatgtnggcancatgaaaaacgtctacaactctnaccgcttacgggtcagagttngaacgtgnaacaccgttncaaaggttncaggcnncaacttggtgagnccanggcatgngtnccacaaggttcatgg

SEQ ID NO: 96858 - DNA, 703 bp, Arabidopsis thaliana columbia
cggagttgcccaaaatgccggagttacctaagatgccggagattcagaaacccgagttgcccaagatgccggagattcagaagcctgagttgccgaaggtgccagaggttccaaagcccgaattgccaacggttccagaggttccaaagtctgaggctcctaagtttccagagattccaaagcctgaactgccgaagattccagaagttccaaaacctgaactgcccaaggttccagaaattacaaaacctgcagttccagagattccaaagccagagctaccgacgatgcctcaacttcccaagttgccggaattcccaaaagttcccggaactccttaagcgaagagaaggcccagctactttgaagcccatcccacaatcttaaagtaccgttttaccgttataccatttgtctatttgcagagatgcacttatgtctgtctacatcattgtttccttagtaaaaaccatgtcgtatggttggtctcatagtcatagttcttgtttttttttgggtaaagactatacacttatacttgtataattgtatcctgttatattttgtattgtttgtttccaaacagatttcgttgtatttgatatactttttaattgattatgttacttatttaaaaaaaaaaaaaaaagggcggccgctttaaaggattccaggttacgtacgcgtgcatgcgacgtcatag

SEQ ID NO: 96859 - DNA, 375 bp, Arabidopsis thaliana columbia
ctctctctctcgtttcggcgggtaagctgccataatctctcacccacctcaagcaacataacccacaaaaactcaatctttgtttcttatcttcaaaacccatctgatcattcctccggaatctttctcaagaacagagcaaatgccgcttgttaggctccaagttaggaatgtctacggtttagggcaaaaagagcttcacacaaaagtcgaccgtgaagaccctaaagcgattctcgacgacgtcgccgtttctggactcgtcgggatcttgcgtcaactcggtgatctcacagaattcgcagcagagatattccatggaatacaagaggaggtaatgataacagcatcaagaagcaacaaattgaagatgag

SEQ ID NO: 96860 - DNA, 547 bp, Arabidopsis thaliana columbia
tcttcatcttcatcttcctcctcgcggttccattttgaggagtctctttttgtttcttgaagatagactgggcgtcacggagcagctgagtatatgctacgagtgttgcattccggaggctgttctttcagatgattggcagtagctatattatgcttgaacggtgccataatgggcatctgtctaatgaagcgctgctgctcatggtttcttttgatctcgtttctctctgcactaacgaatgaaaatgaagcaattagtcctgatggtgaggcgcttttgagttttagaaatggagttttggcttctgatggtgttattggtctgtggagaccagaggatcctgatccatgtaactggaaaggagtgacctgtgatgcaaaaacaaaaagagttatagccttgagtcttacttatcacaaattaaggggacctttaccccctgagcttggaaagctggatcagttaaggcttttaatgcttcacaacaatgcgttatatcaatcaatacctgactcattgggaaattgcacggcattagagggaa

SEQ ID NO: 96861 - DNA, 603 bp, Arabidopsis thaliana columbia
tctcttccagctgctggtagattctcagcaacaacattttggccagatatgaagaagtataacgctacatggtatactgctgtgccgaccattcatcagatcatattggaccgccacgcgagccaccctgagacggaatatcctaaactccggttcatcaggagttgcagtgcttctttggctccggtgatattgtccaggcttgaggaagcgtttggagcaccggtgctcgaggcctatgcaatgacagaggcaacacatttgatgagctcaaaccccttaccagaggaaggtccacacaagcctgggtctgttgggaaaccggtaggtcaagaaatggcgatccttaatgagaaaggcgagatccaagagccaaataacaaaggagaggtttgtataagaggtccaaatgtgaccaagggttacaagaataacccagaagccaacaaggcaggtttcgagtttgggtggttccacactggtgatatcggttactttgataccgatgggtatttgcatctggtgggtcggatcaaagagcttattaaccgtggaggtgagaagatatctccaattgaagtggatgcagtactcttaacgcat

SEQ ID NO: 96862 - DNA, 385 bp, Arabidopsis thaliana columbia
cccacgcgtccgcaagaacatagcactattacattgcaacactttctacaaaaacaagatgaagattgcaacgttttctgttctactcttgcttttatttattttccccgtggcattagcgcagctgaaatttaagttttacagtgaatcgtgccctaatgcagagactatcgtagaaaacctggttcgccagcagtttgctcgtgacccttcaatcacggccgccttgactcgtatgcattttcacgactgttttgtccagggctgcgacgcttctctcctcatagacccaacgacgtctcaactatcggaaaaaaacgccggcccaaactttagcgtgagagggttcgagctgatcgacgagatcaagacggcactcgaagct

SEQ ID NO: 96863 - DNA, 398 bp, Arabidopsis thaliana columbia
cacggcaaaagaatcctggggatacaccatttaaatttctttttgacgagaactgtgcggactacaagtactatgtattcaggctggctgaagaggaaaaattaatttcacaaaccaaggattctggtgtacttcacagtggtgatgcaggctcgcgaacgtccacagcagcaatccctttgcaaaagccagcttatcaacaaacaggatatcagatccctgcctcagctctctatgatactcctgtggaacctggagcttcttctagatctgctcaggcatcaattacaagacccagcgacagtgactcctttagtgggccgaggggtgcagaccctctatcaatgatggagttttacatgaagaaggctgcccaagaagagaaaatgagacgtcct

SEQ ID NO: 96864 - DNA, 757 bp, Arabidopsis thaliana columbia
gacccacgcgatccacttccgactaaaaaaccatttccatcatcggtttcctccgatacatctcctcgtcgccgttcttcggattttcactcttctgctcgaaagggcagtgcttgagaatcattgaagaaggtgatcgctggtgctgttttgataactcaaagccgttttgctgaaagagggttaccaaagttagaagctcaagaacttggagctgtgtcttctttttgtatcatgccatattttattcagaggcttttcaatacttgcaagtcatctctctcacctaatggtcctgtgtctgaggaggccttagacaaggttcgcaatgtcttggagaaaatcaagccgtctgatgttggtctcgaacaggaagctcaattggtgcgtaattggcctggtcctgggaacgagcgtaatggaaaccatcattctctgccagcaataaaataccttcagttacatgagtgtgacagcttctcgattggaattttctgcatgccacctgggtctatcataccactttataatcatccaggcatgacagtgctaagcaagcttgtttatggttcaatgcacgttaagtcatatgattgggctgagcctgaccaatcagaggctagacgatccattacaagcaagacccgcgaagctggtcaaggatattgatatgacttcccctagcccagcaaccactctatatccaacaaccggtggcaacattcattgtttcaaagccattactcattgtgcaatc

SEQ ID NO: 96865 - DNA, 359 bp, Arabidopsis thaliana columbia
ataagaaattctattatcaattcctatcatttgttaagaaaaagagttagaagtattaataatcttacaatatttatagataagataacaacaatatgaagcattctcacgttttgcttcttctatttgttcaagtcattgtccttttgcctctcctttgtctatccgacgattttgttaactctagagctacttattatggcagccccgattgcaaagcaaatcctcggggacattgtgggtatggagaatttggaagagatatcaataacggtgaagtgagtggtgtttcatggcgactatggaacaatggaactggctgtggtgcttgttaccaggtgaggtgcaagataccacca

SEQ ID NO: 96866 - DNA, 962 bp, Arabidopsis thaliana columbia
  unsure (1)..(962): unsure at all n locations
cattagtttggccttctcaccaaccgctttcatttttttgaactatgaccttaaggtcccaaagtttgagttcatgtcacatgcaaaaccgtctttatttgagtacccaaaacccaccacggttcctacagccaataccgccgttaaacttccaaccgctgttctctcaacttcagttaaagccaaagctagggctaagaaagaagcagagcaaaaagctattgctgagaaaacatctggccctgaaaagcctgtcaatgaaagtggatctggaaaaggaaaagcatcaactgagaaggaaggagactctatgcaggtcgatagcccagcagcggtcgagaagaaagcacctgagcctgagccagcgtttgagattttagtgaacccagctcgagtagtcccagctcaagagaaatacataaagttacttgatgacagcagatatgtaccagtgaagctagcaccgtcaggtttcgttcttctcaaagacttgcgtgaacacgagccaaaggttctctctctgaccgacgcaccaacttcaacagcttctcctgcaactggtacagcagcggctgcacaaggaaccccggcctcagctatggccgtagatgatgagccacaacctccacaagcctttgaatacgcttcatgattttatttcatttaaaattagtgggaatttgttgttggttttattggtttctgttgaaagacaaaaggcagagagaaaaacagatctttgaactttgagataactgcttcttgtcatttgcaactggtttcatgttcaactacgatcttgtattaggtacttctctttttaagtattatctaaataattaagggtcatttaagggctaaaaaaaaaaaaaaaaaaaaggccgccgcttctagaggatccaagcttacgtacggcgtccatgcgacgtcaaagctctctatagnnnnnnnnnggaaatcat

SEQ ID NO: 96867 - DNA, 531 bp, Arabidopsis thaliana columbia
agctcaaagttatgacgatgatattatatgaggtcccttacggctactatcctccaatacctcagcctgagcagagccattcacaaagagatggagcttggagatctgacactaccaggcggcgttctgatcaatctacctatccttctagtccaacgcgacacggagctgtggggaaacgatgcaggagagttcaagccagagagattcaaagacggtctctcaaaggcaacaaagaaccaagcctccttctttccttttgcgtggggaccgaggatctgcattggccagaattttgcattgcttgaggcaaagatggcaatggcattgatactccagagattctcctttgagctttctccttcctatgttcacgcaccttacacagtcttcaccattcacccacagttcggtgctcctcttatcatgcacaagctctaatcgttcgtagcaacccattttgttggtatcaaatatactttccattcacagatgaaaccattccatatcagtctaccctataagctaggc

SEQ ID NO: 96868 - DNA, 869 bp, Arabidopsis thaliana columbia
  unsure (1)..(869): unsure at all n locations
taggtaccactatagaagagttatgacgtcgcatgcacgcgtacgtaagctcggaattcggctcgagaaaaaaaaaaaggaaaaaagaataaagaaatggctttgctctcggcgatgaagttgcagggacgtccaccaccgatctcgtccaatctcaacccaaattccaaacctgcaggttcggattccgtttccttaaacgcctccgaacctggctccgaacggaagcctcggaaattcagctcacagctaaaccgctggaacagagcacgaaccttaaggtctggcgcgaagctggacagtacgattactaatggatcaaacaatacgaccggtccgatgcgtccgatcgaaagttcgagtcgcactgatgtttcgacattggacagcgacgtgtcatcatcaagtaacggagttagcgaggcggatatgacggcggcgaagtcgatttacatagtctctgacggaactggatggacggcggaacacgccgttaacgctgctttgggacaattcgactattgcttggtcgaccgtggttgtcccgttaatacacatctcttctcagggattgaagatggggagaagttaatggagatcataaagcaagcggcaagagaaggagcaatggtaatctacactttagctgatccatcaatggcagaagcaaccattgagagcttgcaagcttatcggaaaatcccatcattagacattcttgggccattcacagagtaatttcctctacttagggactaanccttccggnttttacgnggatacaaactattttnacgnggttcttnaaagtcgggtttcnttcctttaaaaggggggnccttcccgnattttaaanttaatttnttttc

SEQ ID NO: 96869 - DNA, 629 bp, Arabidopsis thaliana columbia
  unsure (1)..(629): unsure at all n locations
tttttacntgncgccaccnntggtgctggncngacaangaacaangtggatccccctgggctgcaggaatttctggcacgaaaaaagattaatgaaatggctttgctctcggcgatgaagttgcagggacgtccaccaccgatctcgtccaatctcaacccaaattccaaacctgcaggttcggattccgtttccttaaacgcctccgaacctggctccgaacggaagcctcggaaattcagctcacagctaaaccgctggaacagagcacgaaccttaaggtctggcgcgaagctggacagtacgattactaatggatcaaacaatacgaccggtccgatgcgtccgatcgaaagttcgagtcgcactgatgtttcgacattggacagcgacgtgtcatcatcaagtaacggagttagccgaggcggatatgacggcggcgaagtcgatttacatagcccctgacggaactggattgacggggaaacgcgttaacggtgctttggnnaattgnnaattcttggnaaccgnggttcccggaaaaaaatcnttcaagggttaaatngggaantatngggctaaacaaacnggaaaaaggcatggactacctntnggcacatgggaaacat

SEQ ID NO: 96870 - DNA, 668 bp, Arabidopsis thaliana columbia
attataagaaaattggcgctaagctcaaggagttagttccttgtgtgcttctgtctttcgatgatgagcaaatactcatgtggagaggacgagaatggaagtcgcggtttgtagacaatcctctaattccaagcctttctgagaccaacacaacgaacgaacttgatccctcagacaaacctagtgaagaacaaactgtggctaatccaagtacaacgatctcaagccccaaaatgatctcgctctggcaacgagcgttggaatcgtcgaaggctgtgattcttgaagagcttgacctcggtccagacgatctattgaagaaggtggaagagttagaaggccacttcactggctgcagaacacacttacacagctatggtcttgtcaaatactgatggtgcagcagaggattacgtggatgaaaaggaccggtccgaagagtattatagtgacatagacgatgactttgatgacgagtgttccgatgatgagtcgctagatccggttggtccagtgggatctttacccgttgacaagatagttaggaagttgagggaaagactaaaatagagcaaaagtgttactgtattctcatcattgttttgtgtaaatgttgtaaacatacatactaaaaacccaagtgccataacgaagtacttctagagaaa

SEQ ID NO: 96871 - DNA, 434 bp, Arabidopsis thaliana columbia
  unsure (1)..(434): unsure at all n locations
nnnnnnnnnnnnnnnnnnnnnnnnnnnnnnnnnnnnnnnnnnnnnnnnnnnnnnnnnnnnnnnnnnnnnnnnnnnnnnnnnnnccacgcgtccgcggacgcgtgggaaagcttactcacatttacgatcgaagaactgggttttgagatcacggttgcactacggtgtggattttgtggcataccgtcaccatccatctcttgtccactcggaatactcggttttagttcagtctggtgacagtgatcgggtaagagtgtggtcagatatccattgtgctcgttaggttaagcggaacggttgcgaaaaacgttgttgactctctacgttaatggtaacttcataggagaggatgtgaatctacttgtatgtttggagaacttcacagtggaagaacaacgattagtagatgggagcccagaactcaggcggga

SEQ ID NO: 96872 - DNA, 461 bp, Arabidopsis thaliana columbia
ctcttgatcatggttcgggccgagatcgaaaccggagctctctttccgttctgttaaagaggctgttactcttttcggcgagagaattcttctcggagataattacatcagcaagtccgtagagagaagcagttgcaaaagcattcaagatgagctggttgaagcaaaggagaatctgaagaaagctgaggaagagaacaaggttttcgctcagcttatcgatagccttacacaagagcttgataccactaaagaaaagcctatccactcactcagaaatttcccagaacaccctcaagtcgaagatgacctcaagtttatagaggaatccacggttaacgaaccggacaacataaccgagatcaagatgaaccggtttgatcgaaatgaagtgtatggtgatcgtctagagaagaggcgttcggtgaagtttgctaacccaccattgttaacgaaggtca

SEQ ID NO: 96873 - DNA, 432 bp, Arabidopsis thaliana columbia
attattcttctccaagaaggtaccatatcgaaggagtaatcaacgaaggccggaattatcagaacgggacagtgacaacggtttccctgagctgacggaccctttcaattagtcatcctcgagagttccacactttcggcaacgtgaagtagcagcacgatttacattaagtccagagaggatgggagcagtagagcttatgagtgatccatcgagcttatgcacagtcgagaactatgtggacaacgttgatttatctgatacgcaattggtgcagaccgtgagaaaggctcttacatctgtcaaaactggggactcagacctttatagtgagatggttggagttatggcacgggacatcaaagaatttaaggatcctgatgtagtggcgcagcttgagacagtcttgaaagctctatcaggcgctgtggc

SEQ ID NO: 96874 - DNA, 546 bp, Arabidopsis thaliana columbia
atcgcttctacttcactctcactttcctcctattctctctctctttctatgtcaagttagcttagccggctcaccagaaagctaaccttacctcacaaacattgattgtgttacactaatctcttaaatagagagccgtaatttctacacactctgatcgctagatggaaacggagatatcaggaatggataatccagctatgaccttggacgaggtttccatggaacgcaacaagagcttcgttaaggcattgcaggagctcaagaacttgaggcctcaactttattcagctgctgattactgtgaaaagtcttatcttcatagcgagcaaaagcaaatggtattggacaatttgaaagactacactgtgaaggctctagttaatgctgttgatcaccttggaactgtagcttccaagcttactgatctttttgatcaccaaaattcagacatatcaactatggaaatgagagcttcttgtgttagccagcaactgcttacatgccggacatatatcgacaaagaaggtcttagacagcaacagc

SEQ ID NO: 96875 - DNA, 778 bp, Arabidopsis thaliana columbia
  unsure (1)..(778): unsure at all n locations
acagacacccaaaacaaaaggtaaatcatgtcaagtaaaaataaagcttcgtctctctctctctatccctcgtgcgccagtctgacagagacttagagatagattcagagattcagagctcttcaatggccgccggaggaggaggaggaggaggaggatcatcgtcgggacgtactccgacgtggaaagagagagagaacaataagaagagagaaagaagaagaagagccatcactgctaagatttactctggtcttagagctcaaggtaactataagcttcctaagcactgcgataacaacgaggttcttaaagctctctgtctcgaagctggttggttcgtcgaaggattggcaccacttatcgcaaggggtttaagccaccagcatcagatatttcaggaactcctacaaacttcagcacaaattcatcaatccaaccaagtccacaatcatcagcttttccaagtcctgcaccttcgtaccacggaagtccagtctcatcatccttcccgagtccatctcgctatgacggaaacccttcttcataccttcttcttccggttcctacacaacatcggttcttcgattcctgctaaccttccaccctctttagaatttcccaacagtgcgcctgtnactccccccgttgtnaatcttcctacttctccgtgggttcgaaagcgggaaaccttcacttttaagcagnaaatttaccaaaatggggggtctttaaacggtttgaggcattcgnttttgggtatcttttgtncaactag

SEQ ID NO: 96876 - DNA, 1056 bp, Arabidopsis thaliana columbia
  unsure (1)..(1056): unsure at all n locations
nnnnnnnnnnnnnnnnnnnnnnnnnnnnnnnnnnnnnacccacgcgtccgcccacgcgtccggtccacaatcatcagcttttccaagtcctgcaccttcgtaccacggaagtccagtctcatcatccttcccgagtccatctcgctatgacggaaacccttcttcataccttcttcttccgttcctacacaacatcgcttcttcgattcctgctaaccttccacctcttagaatatccaacagtgcgcctgtgactcctccgttgtcatctcctacttctcgtggttcgaagcggaaacttacttcagagcaattaccaaatggcgggtctttacacgttttgagacatccgcttttcgctatctctgctccatctagtcctactcgtcgtgctggtcaccaaacgccacctacaataccggaatgtgatgagtccgaggaggattcgatcgaggattcaggaaggtggatcaatttccaatctactgctcctacttcaccaacatttaaccttgttcagcaaacttctatggccattgatatgaaaaggtcagactggggaatgtccggaatgaatgggagaggggcagagtttgagtttgagaatggaacagttaagccgtgggaaggcgaaatgattcatgaagttggcgtagaagatctcgaactcactctcggtggcactaaagccagatgctgaaaaacgggtaaatcgaaacatgaaatcagtttgaaaatggtggtaaaagatcagatcagtctccttgtggaccataacagaggaaatcttcagcattgtacagtacattggagccgggctcgcatggccgaggaagggcgaaaagggccgacctttaaccattccgtacatcccccgtttatccttcatttatccctgggatggggtaaatggcctttggggttttaattcctaattgccccagggaaaaccggttttaaggggtaattcttccggtgggganttggaccccttgcttcaaaaaaaaagggggcccntnggccacttgaccggnggggganccccanggccaanat

SEQ ID NO: 96877 - DNA, 460 bp, Arabidopsis thaliana columbia
  unsure (1)..(460): unsure at all n locations
cacttnacaacgaatctatgtaatganatgaacaaatttaaaacaaaactacatttatgaatcttgaaggtgttttggttcatgttctttctaaaaacaatctcgngtgtcaagcccaaacccatcgatcttcctctatctcnacaaccttggatctcttaaacaatttcaccaaatggtttcacactaagcaaatcgttagccgagtacttatccgtcttcccagatatcganacgtgtaanacacacaaccctccgggctttaaagtccgttcgatctccccaacgaacttctccgggtaaagcgcgtgatcgaacacgtttgagaattcgaaatcgaatgtctcttcgtcgaacgntgcgcgtggaagtcacctttcaccacgagaggtggtcgcggaaccngatctattccgacgggangtgtgggctnccctggaantncagnccnggaccanna

SEQ ID NO: 96878 - DNA, 458 bp, Arabidopsis thaliana columbia
ggtaatggcattggaccaacatcaccttcttcttcctcttcatcaacagctgaagatttcttctttaattcaatcatctctttgaacttcttcaactcttcttcatcaagttctagctcagtgttcttcaccgtttcgtctacttgcatcttcgaatcttcctcagtaccatcgctgtcactccctgacttcgtcttctctcccttgcttcgttttgaactagaatccgaagatttctttcgcctcttgctcttttgcttggtatcttcttcctccccagacgaagaagcactcatctcagctttactatcttcatcgctgctctcatcagagtcactgtatttcgtctttctcctatgccttagcttttccctaccactacggttgcttctacccctactccctcttagcaaaactcttcctccttcactctctgttttcctttttcctatctcttt

SEQ ID NO: 96879 - DNA, 497 bp, Arabidopsis thaliana columbia
atctcccaaaaaaccctcttttcatccctttttctgaagctctaaaatttttcagttccccgatcgccggaattttcgccggtgatgtaattttcccgcgccttttttgggaggtgaatttttttttcttctaaaagctcgagaagagtgaaaaccccagaaatgaccttgcgattcgtatggctccggctgttttcgctaccttaaacgaaccgtcgtaccaggaacaatgcggcgccgtttttatgaggaaatttacaaaccaatccgtcaccgaaaacaccaataaccttccgctcttcaaccctaaccctaaccctaatttcgaaaggagcaattcgagcaagcagtgcgatgactcgtcggaatttggaagctatgctacttttaatctcgctgggtacacctcaagtcagctcagggagcttaagaagcgctttacctcagagctcaagcagattcggatcctgagagaacggatcgagtcagggacgttc

SEQ ID NO: 96880 - DNA, 590 bp, Arabidopsis thaliana columbia
ctctatcgatctagcagattctttcggggaccaaaatcaaaatcatggtggatcatcaatggaaggatttaatcggataaaagagaagagacggaatcacgacgggagaagagatcgggaaatcggaaaatcggagatgatggggatttctttcgccgccaaactccgtttccgatctcgatttcgaacttcttcaatcgattcttattgcttcgctcgtgaggctttctccgattgtatctcctccgtccatttcttcttcttataacctttttctttgtcagatatcgtccatggaagaggctgattttgccgagaaagatccttctggccgttacatcaggtatgatgatgttctggggagaggagctttcaagactgtatataaggcgtttgacgaagtagacgggattgaagttgcttggaacctagttagcattgaagatgtaatgcagatgcctggtcaacttgaaaggctatattctgaagttcatctactaaaggctctaaaacatgaaaacatcatcaaactcttttactcctgggttgacgaaaagaacaagactattaacatgatcactgagcttttc

SEQ ID NO: 96881 - DNA, 403 bp, Arabidopsis thaliana columbia
cggacgcgtgggcggacgcgtgggagacgaagtggagagagaaagctcccactctctcgcaccccaaagcttcttcttcttcttcctcttcttcctcttcctcttctctaatctgaatccaaagcctctctctttatgacacaagatcgctcagaaatgtctgaagatgacgatgaccaacaatctccaccgttggatctaccctctaccgccatagctgatccttgctcatcttcctcttcaccaaacaaatctcgtaactgtatctcaaattctcaaactttccctgaccatgttctcgaaaacgtacttgagaacgttcttcagttcctagattcaagatgtgaccgtaacgctgcttctctagtttgcaaatcttggtggcgtgttgaagctttgactc

SEQ ID NO: 96882 - DNA, 521 bp, Arabidopsis thaliana columbia
atacgactcactttagggaaagctgcgtacgcctgcaggtaccggtccggaattcccgggtcgacccacgcggccggccacgcgtccgcccacgcgtccggcttcttcttcttcttcctcttcttcctcttcctcttctctaatctgaatccaaagcctctctctttatgacacaagatcgctcagaaatgtctgaagatgacgatgaccaacaatctccaccgttggatctaccctctaccgccatagctgatccttgctcatcttcctcttcaccaaacaaatctcgtaactgtatctcaaattctcaaactttccctgaccatgttctcgaaaacgtacttgagaacgttcttcagttcctagattcaagatgtgaccgtaacgctgcttctctagtttgcaaatcttggtggcgtgttgaagctttgactcgatctgaggttgttattggtaactgtcacgctctttctccggcgaggttgactcagagattcaagcgtgttaggtctcttgtgctg

SEQ ID NO: 96883 - DNA, 668 bp, Arabidopsis thaliana columbia
  unsure (1)..(668): unsure at all n locations
tggnggtccncccgnccaagggnttaccaccccnnncaaaatttctttgggaanaaccaaccanncttttgtggccccccgggggaaaaggggtcccaaaatncgnggnatnncaagaaccagttnatnaggntccaaacaaacgncnttcttcccgaaaccagaaacccgatgtacttggtcnccaagcattttggaacgctgacgaattgggctacacgtggtggtctggagaagcctgcctggaaaaaagctccattcgtctcttcttacaaggacttcgccgtcgaaggctcccgttggaaggatccattccctgcatgcgtctctaccccaacagagaattggtgggatcagttcgacgcgtggcatttgtccaagacacagaagatggattatgcgtgggtgcagcgtaatctcgtcgtatacgattattgcaaagacagtgagaggttccctactcttccttgggagtgttccattagcccttgggcttaaaatcaattttgttttgagtgtattaaagtggaaatggtttatgtaataattttactctcttttttttggcatttcttattttaaaaaaaaaaaaaaaaaaaaagnnnnnnnnnnnnnnnnnnnnnnnnnnnnnnnnnnnnnnnnnnnnnnnnnnnnnnnnnnnnnnnnnn

SEQ ID NO: 96884 - DNA, 1240 bp, Arabidopsis thaliana columbia
  unsure (1)..(1240): unsure at all n locations
nnnnnnnnnnnnnnnnnnnnnnnnnnnnnnnnnnnnnnnnnnnnnnnnnnnnnnnnnnngtagattccacgacctctctctctctctctcttcgaaatattcgaagtagagacaaccaatggagacggaaaggaggatcataacgagctgttctgccatgacggctctgttcttgttcatgacggctctaatggcgtcgtcctctatcgcagcaacaccgacacaatcgtttgaagataatttcaacattatgtggtctgaaaatcacttcacgacttccgatgatggagagatctggaatctttccttagataacgacaccggatgtggatttcagacaaagcacatgtatagattcggatggtttagtatgaagctaaagctcgtcggaggcgactccgccggctgtcgtcaccgcttactacatgtgttcggagaatggggcaggaccggagagagacggggtagatttcgaatttctaggggaccgaaccggacagccttacatttttcagacccatgtgtataagaacggaaccgggaatcgggagatgcgacattccctctggttcgacccgaccaaggattatcacacctactcaattctttggaataaccaccagcttgtgttcttcgtggatagggtaccaattcgagtatacaagaacagtgataaggtaccaaacaacgacttcttcccgaaccagaagccgatgtacttgttctccagcatttggaacgctgacgattgggctacacgtggtggtctggagaagactgactggaaaaaagctccattcgtctcttcttacaaggacttcgccgtcgaaggctgccgttggaaggatccattccctgcatgcgtctctaccacaacagagaattggtgggatcagtacgacgcgtggcatttgtccaagacacagaagatggattatgcgtgggtgcagcgtaatctcgtcgtatacgattattgcaaagacagtgagaggttccctactcttccttgggagtgttccattagcccttgggcttaaaatcaattttgttttgagtgtattaaagtggaaatggtttatgtaataattttactctcttttttttggcatttcttattttgttatggactatatcctctgtttatttgcggccgtaattattaatttagtcggatatnnnnnnnnnnnnnnnnnnnnnnnnnnnnnnnnnnnnnnnnnnnnnnnnnnnnnnnnnnnnnnnn

SEQ ID NO: 96885 - DNA, 662 bp, Arabidopsis thaliana columbia
gataattgacaggaagaagaatatctttaaactctcacaaggagagtatgttgcggtggagaacatagaaaacatatacggtgaagtacaagctgttgattccgtgtgggtgtacggtaacagctttgagtccttcctaatagctatcgccaacccaaaccagcatatccttgaacgctgggctgcagaaaacggtgtgagtggtgactatgacgctctctgtcaaaatgaaaaggcaaaggaattcattctcggagaacttgttaaaatggccaaagagaaaaagatgaaagggttcgagatcatcaaggcgattcatcttgacccagtgccatttgacatggaacgagatcttcttacgccgaccttcaaaaagaaaaggcctcagttgctgaaatactaccagagtgtgatcgacgaaatgtacaagaccataaatgcaaaatttgcttccagagggtagattcctcctcactctcggtccttgggtctctcattttgcatgacgaaggactttgttaataggctcttctctcatctgtgtacaatatttgaatatttcatagcatcagatcagtccagagctgctacactgtttttcttttctatctttttttggaaatttacttttatgtactatacttgaatgctatctctttgcc

SEQ ID NO: 96886 - DNA, 404 bp, Arabidopsis thaliana columbia
atctctcactggtaaaaagcaaacaatgttgctccgtcgtgcaaaaacactacccaaaaccctacaaaacctccggttattctctccggcggcgaacgcagctctatccctagatcatatccaagaaacccaattaacttacctccctggattccctcgacccgatccaaaacacgcagagacgatcttagccgttccaaggtctgtctccggcaagagcatatcagcgaaagagcgtaaagcgggtcgggttccttcgatcatattcgaacaagaggatggacaacacggaggaaacaagaggcttatttcagttcagacgaatcagatcaggaagcttgcgaatcatttgggttactcttttttcctctctaggctctttgatgttgaggttcgagctgaga

SEQ ID NO: 96887 - DNA, 1017 bp, Arabidopsis thaliana columbia
atgcttgtagtggtggtgattggggttgtggagtgtaggagatttgagaaggagacgttaggaggtggtggtggtggtggacttggcggtggctttggtggtgggaaaggttttgggggaggaattggtgccgggggaggttttggtggtggtgcaggaggaggtgccggtggtggtttaggaggaggcgccggtggaggaggaggtattggtggtggtgcaggaggaggtgccggtggtggtttaggaggaggtgctggtggaggactcggaggaggtcatggtggaggtattggtggtggtgctggaggaggtgctggtggaggactaggaggaggccacggtgggggtattggtggtggtgccggaggaggttctggtggaggacttggaggaggtattggtggtggtgccggtggtggtgccggaggaggtggaggacttggaggaggtcatggtggaggtattggtggtggtgctggaggaggtgctggtggaggactgggaggaggccacggtgggggtattggtggtggtgccggaggaggttctggtggaggacttggaggaggtattggtggtggcgcaggaggaggtgccggtggaggtggaggtgctggtgggggcggtggtcttggaggaggacatggtggcggttttgggggtggtgccggtggtggattaggtggcggtgccggcggaggtaccggaggaggatttggtgggggtgctggcggtggtgctggtgggggtgccgggggaggattcggcggtggtgctggtggaggtgccgggggaggattcggcggtggtgcaggaggaggtgctggtggaggagctggcggaggatttggtggtggtgcaggcggaggtcacggtggaggtgttggtggtggatttggtggaggttctggaggaggatttggtggaggtgctggtggaggagccggcggaggtgctggtggaggatttggtggtggtggtggtgcaggtggtggatttggcggtggattttaa

SEQ ID NO: 96888 - DNA, 431 bp, Arabidopsis thaliana columbia
  unsure (1)..(431): unsure at all n locations
gggccgacccacgtcgtccagtaagagtaagaaaggagtagatagatgctctgtctttctatcgagaagacgagtatatcatgagcttgtaagcagatcgctggacttgttcaacgtgccggattctctaacctgaccggagttcaaggcgccgtttatattcagggagaggatcagtagaagcttgacgtcatctctaatgaggtgttccccaactgtttgagatcaagtggtagaacgggaatcatagcctcggaggaagaggacgtgccagttgcggtggaggagagttactccggcaactacgtcgtcgtgtttnaccctcttgatggttcctncaacattgacgntgccgtctctaantggntctaactttcggnanttntaagncccaattacgggattcaattttttggnggttnccncgggaa

SEQ ID NO: 96889 - DNA, 1527 bp, Arabidopsis thaliana columbia
  unsure (1)..(1527): unsure at all n locations
gctctctacgactcactattgggaaagctggcacgcctgcaggtaccggtccggaattcccgggtcgacccacgcgtaaaaaatggcagcaaccgccgcaacaacgacgtcgtctcaccttcttctctcaagctcacgtcacgtggcatcatcatcccagccttcaatcctttcaccgagatctctcttctccaacaacgggaaacgagcaccaactggagtgaggaaccatcagtatgcgagtggagtgaggtgtatggccgtagcggcggatgctgctgagacgaaaacggcggcgaggaagaagagtggatacgaacttcaaacgttgacgggctggttgctgagacaagagatgaaaggagagatagatgcagagctgacgatagtgatgtcgagtatatcattggcttgtaagcagatcgcttcacttgttcaacgtgccggaatctctaacctgaccggagttcaaggcgccgttaatattcagggagaggatcagaagaagcttgacgtcatctctaatgaggtgttttccaactgtttgagatcaagtggaagaacgggaatcatagcctcggaggaagaggacgtgccagttgcggtggaggagagttactccggcaactacgtcgtcgtgtttgaccctcttgatggttcctccaacattgacgctgccgtctctactggttctatcttcggtatctatagccccaatgacgaatgcattgtcgacgactccgacgatatctcagctcttgggtcagaagaacaaaggtgtatagtaaacgtgtgccagccagggaacaacttgttagcagccggctactgtatgtactcgagctcggtcatcttcgttcttactctaggcaaaggcgttttctccttcacgcttgatccaatgtacggtgagtttgtcctcacgcaagaaaacattgagatccccaaagccgggagaatctactctttcaacgaagggaattaccagatgtgggacgataaactaaagaagtacattgatgaccttaaggaccctggtccaactgggaagccttactcggcaaggtacattggaagtttggttggagattttcacaggactttgttgtacggtgggatttacgggtaccctcgtgacgcaaagagcaaaaatggaaagcttaggcttttgtatgagtgtgcaccaatgagtttcattgttgaacaagctggagggaaaggttctgatggacattcgagagtactagatatccaaccgactgagatacatcagagggttcctctatacattggaagcacagaggaagtagagaagttggagaagtacttggcttgactcatgtaccaaacataagccatttaatttctattgtaagccagtttctgactacatggtatatgcaaatagatgcataatggtgaaagtcctattttgctgtcaatatcaatatagagaagcaatcagctgttaagactaaaagaaaagaaaaaggannnnnnnnnnnnnnnnnnnnnnnnnnnnnnaaa

SEQ ID NO: 96890 - DNA, 570 bp, Arabidopsis thaliana columbia
  unsure (1)..(570): unsure at all n locations
acaaaanccattncctccgtcccttattttgttaacaccacacaaagtcgtctttggagagagagaagggccaacgaccacacatacacacacagaccaataaaccatgagcccttccaagcagcgacatcgtagctctaccggagaaaacaagtcaaagccggtcagatccggttcatcctccgccataccggaatggattaccgaatcaaccaacggcggatctctccgtcgcgtagatcccgatacaggtaccgacggctgggcttctcctcccggcgatgttttctctctccgctccgattcttacttgtccaaaaaacaaaaaactcccgccggtgattacctcctttctcccgccggcatggactggctcaaatcaagtaccaaactcgagaacgtgctcgctcgtcccgataaccgtgtagcttcacgggctttggaaaagttcaatcttggggggctaaattttttcaaggggttttatattttggcggtgaattttnccagttttcaggggnagggttnntaaaaaggggncgggttttnttttggggggggggngnaacc

SEQ ID NO: 96891 - DNA, 451 bp, Arabidopsis thaliana columbia
ctcacaagtcttctctatttataaacacaaaaaaacgaagatagccatcgttttggtgagagaagagagaagagagaagaagaaggccatggaaagataatactctgctttttttttagaaatatacagaggaaataaagagagagagaaggagatggcggattcaagcgattctgtctccattgatatggaggcattgtctcttggaggacaggaacaccttgtggagactacttatggcccggtttgtgttgccgtttgtggagatccagataaaccagctcttatcacttatcctgatatagctcttaattatatgttctgttttcaaggattattgttttgtccagaagctagttctttgttactccacaacttttgcatatatcacatcagtcctcttggccatgagttgggagctccaatgatcagtgttgatgctcctttgctc

SEQ ID NO: 96892 - DNA, 561 bp, Arabidopsis thaliana columbia
tttttcccccaagccctccgcgttgacactggagttgtggggaagccttttaagctctggttcagtccatggacggtttagctaatccaacaacaattggtctttgttcacaaagtctaacgggccccgtctcacatatgctttacattggctattctctgcttatggcaaatgcaatcatgctcgccactggaaccattggcttcctcccctccttttacttcgtccactaatctcttttcctctgtcacaatcgattgatcccttgacgacaaaatctcagcccgtgatctctgctttctcttaaagcaattccaggtgttgttatttttttgtcagtactagacttgtagagtccactatattttacatgtttttttttttttcctggacctatattctccttatatgttttttttcttacatctccgcctcattatgtttttgttttgaacttttgagtagaaaataaacaaatttgcctttctgcttaaaaaaaaaaaaaaagggcggccgctctagaggatccaagcttacgtacgcgtgcatgcggcgtcatag

SEQ ID NO: 96893 - DNA, 1019 bp, Arabidopsis thaliana columbia
gaccacgcgtccacggacgcgtgggcggacgcgtgggtggatagtgttgcaaatcaagtagtatcttctttagacattcttggctgagagatttacactaaaagcatagaataagaaacccctgtttggttagtatctacccgagtctcgtagtcctacacagatccggatcctagtttcgaagctagttcttgtttagctgaagctcagacccaaaatgctccaagaaccgtcggctgcattctccctccggcgtaactcattcagacgccgatctcccagatcaaatgtcgatgacagaggctggaatccgctccatatcaaagccagaaaaggcgatctgaaatctgtcaagcagcttctcgaccaaggaatggatgtgaatgctctagcatggggaccctaatcaaaaggagtgagtgctcttcaccttgcagcagagggaggtcacattgaagtcatggatttactcctagaacgtggggccaacattgatgctaaaacatggggctcatgcgggtggactcctctccacgctgcagccaaagagcggaagagagaagcagtgaagtttctggtggagaacggcgcattcttggcagatgatataactgataccaggtttaatccgccggtgcattactgtcacggccttgaatgggcgtacgaggaaatgaagaagcttaacagcgagtcttcttcttcatctggtggagacacatcttccagttctgacaactgaacttcttcttggttgtttctcggtgtgttttgttttgttttctagttgagactacttatcagaactattatggttggtgtttgatcttatgggctatgtgaaacattgaaactgcggatacattcatgtaatcttcagtgtgttattttgcaacaccagttccatatcctagccgaatttgatttgtttaaaaaaaaaaaaaaagggaggccgctctagaggatccaagcttacgtacgcgtgcatgcgacgtcaaagctcttctataagtcaccta

SEQ ID NO: 96894 - DNA, 588 bp, Arabidopsis thaliana columbia
  unsure (1)..(588): unsure at all n locations
ggnaatggaanctccccgtcctgngtacccttannggaattggncnaacccaccgaattggtcccaaagggaatccacccaccttcgaaatgctgagaccatcttctttctgggagcctccagggcccttcaggcaagcggattccgaaacccagccaggagccagtaaaaggaaaagaccggtgcctgagcagcagtatcgagatggtattgtcgatgggatttagctacgcacaggccatggaagcttatagcatttttggggatgacgttgactctatggtctgttatgtactggagacgagctgtggcggcaacaaccgacgcaaaggcaaagccacggaatagagaatgtaacatgaattgctctgtattaatagtatatgatataccaattcgtatccctatcaatggtgggcgattacccttatcagaataatgaaaaataaacttgtgcatccatgacatgatgtatgcaaatgtttgttgtttatgtacttagttgtaaaagttgaataataagagaggaaaaaaggcgcccgcgaattcgatatcaagcttatcgataccgtcgacatcgaggggggg

SEQ ID NO: 96895 - DNA, 580 bp, Arabidopsis thaliana columbia
cggacgcgtgggccaaaattcacttttttccaatttaggaactacaatcacagaacaagacggcacaagtaaaaaatggctgaagaacctactactaccactctcgttacaccggaaaagctaccttctccgagcctcacgccttctgaagtatctgaatctactcaagatgccctaccgacagagacagaaactctggagaaagtgactgagactaatccaccggaaactgcagataccaccaccaagccagaagaagaaaccgcggcagagcatcatccaccgacagtgacggaaacagaaactgcatcgacggagaaacaagaggttaaagacgaagcatcgcagaaagaagtagctgaagagaaaaagagtatgattccacagaatcttggttcattcaaagaagaaagcagcaaactttctgatctatctaattccgagaagaaatcactcgatgaactaaaacatctagttcgagaagctctagacaatcaccaattcaccaacacaccagaagaagtcaagatttgggggattccattacttgaagacgatagaatcgacgtcgctttgtttt

SEQ ID NO: 96896 - DNA, 544 bp, Arabidopsis thaliana columbia
  unsure (1)..(544): unsure at all n locations
gtttgtggcagagaggttacacatcgatggcaacatctttgcttctcagacattcctcagctgtcttcttctctcagtcttccttcttcaccaagaacaaatcttttcgctcctttacttccatcaaaatggaaaaaggtgaagcagagaatgcagtgaagacaaagaaggtgtttgtcgcaggagcaactggacaaaccgggaagaggattgtggagcagttgttgtcccgtggctttgccgtcaaagctggtgttcgtgatgtagagaaagcaaaaacatctttcaaagacgacccgtctcttcagatagttagagcagacgtgacagaaggtcctgataagctagctgaagttataggtgatgattctcaagctgtgatttgtgctactgggtttcgtcccggatttgatatattcactccttggaaagtcgataatttcgggccagtgaatcttgtggttgcttgcccgtaaacaaggagttggaaaagtttttcccttgaaagccccnntttgggnnaattgggntttccctngggnca

SEQ ID NO: 96897 - DNA, 548 bp, Arabidopsis thaliana columbia
  unsure (1)..(548): unsure at all n locations
cggtggtggcactaatgtccggcgagagagctcatgcagcagtggactgctcatcgttgatactaaacatggctgattgtttgtcgtttgtgactagtggtagtacagttgtcaagccggaaggaacatgttgttcagggcttaagactgtggttaggacaggaccagaatgtctatgtgaggctttcaagaacagtggttctcttggtttaactcttgatctttctaaagctgcttctcttccttctgtttgtaaagttgctgctcctccttctgctcgttgtggcctttctgtctctggagatcctcctgctactgcccctgggtttatcctcctacggccggagcaggagcacccgcgtttgtccagtggtgcaaatgcggcaacttccagtttcgtcccccgaggaggttccgatgcgtccttgctctctgtaatcttttggcatttgtcatcttcatggcactcaatttcttccttccaatgaggcttaaaattnaattgcctncttgttgagnaaattttggtttcaatnaagcnaaggggc

SEQ ID NO: 96898 - DNA, 588 bp, Arabidopsis thaliana columbia
  unsure (1)..(588): unsure at all n locations
gcaanaaggaccccnggctnaagatccccncccgcaaangcnatcaccagcggctcccaccgggtgccaaacatggctgattgttcgccggttgcgactagtggtaggacagctgccaagccgggaggaacatgttggtcagggcttaagactgtggttaggacaggcccagaatgtctatgtgaggctttcaagaacagcggttctcttggtttaactcttgatctttctaaaagctggcttctcttcccttctgtttgtaaagttgctgctcctccttctgctcgttgtggcctttctgtctctggagatcctcctgctactgcccctggtttatctcctacggccggagcaggagcacccgcgttgtccagtggtgcaaatgcggcaactccagtttcgtccccgaggagttccgatgcgtccttgctctctgtatcttttgcatttgtcatcttcatggcactcatttcttctttctattgagtcttaaaatttaattgcttcttgttgagttatttttgtttgctatgtagctgaagagtttggtgttactgatcatatttacctttcatgtgtcaattttaa

SEQ ID NO: 96899 - DNA, 579 bp, Arabidopsis thaliana columbia
ggaggaacaaatgcccaaaggctttgaccaaacgcaagccgtgcagaaagctccagaacgcacaccggctgctggtggaatgcttgtggtaatagtgcattcggctgaggatgttgacagaatgcaccataccagtccttacgtgcacatctatttcataggagaagcgagaacagcaaagcacgttacgaagatcagagacccaaggtggaatgaggagttcacctttatgctcgaggagcctccagtccgtgagaacctgcacgttgaagtgctgagcacctcttccaggatacgtctattgcatcccaaggaaacactggggtatgtggatattccagtggtggacgtggtgagcaacaaaaggatgaatcagaagtttcaccttattgattctaagaacggaaagatccaaatcgagctcgagtggcgaactgcctctcgatttctgagttgattcgagaacaaacaaagagataattggtttgatgttgttaaaaactatgtgttgttgtacaaaatgggctttaactcttaaaaaccaacattcagatttgcagagccttcttttatttggaa

SEQ ID NO: 96900 - DNA, 5305 bp, Arabidopsis thaliana columbia
  unsure (1)..(5305): unsure at all n locations
atggcgatgcaatctctttcccctgttcctaagcttctctccacaacaccaagctctgttctttcttctgacaagaacttcttcttcgtcgatttcgttggattatactgtaagtccaagaggaccagacgcagacttcgtggagactcttcctcttcctcacgctcttcttcttctctctctcgtctttcctctgttcgtgccgttatcgaccttgaacgtgttcatggcgtctctgaaaaggatctctcctctccttcagctttaagacctcaggttcgtttcttcactgatataaatttcacaaacacccaacgtgcaaagtttcatcctttatggggatcttttaagcaggttgctaatttggaggatatattgtctgaaagaggagcttgtggagttgggtttatagcaaacttagataacataccttcacatggagttgtcaaagatgctcttattgctcttgggtgtatggaacatcgtggaggttgtggagcagacaatgattctggtgatggctctggtcttatgtcttccattccttgggatttctttaacgtctgggccaaggaacaaagtcttgctccttttgataagttgcatactggtgttggcatgatctttcttccacaagatgatacctttatgcaagaagccaagcaagttattgaaaacatatttgagaaagaaggattacaagttcttgggtggagggaagttcctgttaatgttcctatagttggtaaaaatgctagggagacaatgcctaacattcaacaagtgtttgtgaaaatcgcaaaggaagatagtactgatgatattgaaagggaactttacatctgccggaaactaatcgaaagggccgtagctactgagagttggggaacagagctttacttctgttcactgtccaatcaaaccatagtgtacaagggcatgcttcgatctgaagctcttggattgttttatctagatcttcagaatgagctttatgagtctccttttgctatttatcatcgaaggtacagtacaaacactagtcctaggtggcctcttgctcaaccaatgaggtttcttggacataacggggagatcaataccattcaggggaacttaaattggatgcagtctcgagaagcttcattgaaggctgctgtttggaatggccgtgaaaatgaaattcgtccatttggtaatcccaggggttcagactctgctaatcttgattgtgctgcagaaatcatgattagaagtggaagaacaccagaggaagctctaatgattcttgtccctgaggcatacaagaatcatccaaccttatctgtcaaatatcctgaggttgtagatttctatgactactacaaaggacaaatggaggcttgggatggtcctgccttacttttgttcagtgatggaaaaacagttggggcttgtcttgaccgtaatggccttcgtcctgctcgatattggcggactagtgacaatttcgtctatgttgcatctgaggtcggagttgtaccagttgatgaggcaaaagtcacaatgaaaggccgtctaggacctggaatgatgattgctgttgaccttgtgaatggccaggtatatgagaatacagaggtcaagaagagaatatcttcatttaatccatatggaaaatggattaaagaaaactcccggttcttgaagcctgtgaatttcaaatcctcaactgtcatggaaaatgaagaaatcctaagaagccaacaagcatttggttattcaagtgaggatgtgcaaatggttattgagtctatggcatctcaaggaaaggaaccaaccttctgcatgggcgacgatattccgctggcaggattgtctcaaagaccgcatatgctttatgattatttcaaacaaagatttgcacaggttacaaaccctgccattgacccccttaggaaggtttggtttatgtctcttgaagtaaatattggaaaacgtggaaatatattggagcttggacctgagaatgcctcgcaggttattctgtctaaccctgtgttaaatgaaggagcgttagaggagttaatgaaggatcaatacttaaaaccaaaggttctgtccacatatttcgatataagaaaaggcgttgaaggttccttgcaaaaggctctatattatctttgtgaagcagctgatgatgctgtccgaagtggctctcagcttctcgttctttcagaccgatccgatagactggaaccaaccaggccttcaattccaataatgttagctgttggcactgtccatcaacatcttattcagaacggcttgcgtatgtcagcttctattgttgctgataccgcccaatgcttcagcacacatcattttgcttgtttggttggatatggtgcaagtgctgtatgcccatacttggcactggagacatgtaggcaatggcgcttaagtaacaaaactgtggccttcatgcgtaacgggaaaattcctactgtaaccattgagcaagctcagaagaactacactaaggcggttaatgcagggcttcttaaaattctttctaagatgggaatctcattgctttcaagttattgtggtgctcagatatttgagatatatggtttgggacaggatgttgttgatcttgcattcactggaagtgtgtcaaaaatcagtggactcacctttgatgagttggcaagagagacattgtctttctgggtgaaggccttttctgaggatacaactaagcgattagaaaattttgggtttattcaattcaggcctggaggtgagtatcattcaaacaacccagagatgtcaaagttgcttcacaaggctgtccgtgaaaagagtgaaactgcatatgcagtctatcaacagcatctctctaacagacctgttaatgtcctccgtgacctgcttgagttcaagagtgatcgtgcaccgatcccagtagggaaagtagaaccggccgttgctattgttcagagattttgtactggtggaatgtcacttggtgctatttcaagagagactcatgaagctattgctattgcaatgaataggattggtgggaaatcaaactctggagaaggtggagaggatcctatccgttggaagccacttacagatgtggttgatggatattcaccaacactaccacatctcaaaggtcttcaaaacggcgatattgcaacaagtgctatcaagcaggttgcttcagggcgttttggagtcacaccaacgttcttggtcaatgcagatcaattggaaatcaaagttgcacaaggtgccaagcctggggaaggtggtcagcttcctggaaagaaagttagtgcgtatatcgctaggctaagaagctctaaacctggtgttccgcttatatctccgcctcctcaccacgacatttactctattgaggatcttgctcagttgatctttgatctacatcagattaatccaaatgcaaaagtatcagtcaagctagttgcagaagctggaatcggaactgttgcttcaggagttgcaaagggtaacgctgatatcatccagatatcaggccatgatggtggaaccggggctagtccaataagctccataaaacatgctggtggaccatgggaacttggactaacagaaactcaccaaacacttatcgcaaatggactaagagaaagagtcattttaagagtcgatggaggcttaaagagtggtgttgatgttctaatggctgcagctatgggtgctgatgaatacggattcggttccttggcaatgattgctactggttgtgttatggctcgtatttgccacactaataattgcccagtgggtgtagcaagtcagagagaagaattacgtgcaagattccctggtgtacctggtgatcttgtcaactacttcttatacgtagcagaagaggtgagaggtatcttagcacagttgggatacaacagtttagatgacatcattggacgaacagagttactgagaccacgagacatttcgctagttaaaactcaacatctcgatctgagttatcttctttcgtctgttggaacaccttcattgagcagtactgaaatcagaaagcaggaagttcatacaaatggacctgttctcgacgacgatattcttgcagatccattggtgattgatgcaatagagaacgaaaaagtggttgagaaaaccgtcaaaatatgcaacgtagaccgtgcggcttgtggtcgtgttgctggtgttattgcaaagaagtatggagacactggttttgcaggacaagtgaacctaactttcttagggagcgcgggacagtcgtttgggtgctttttgattcccggtatgaacatccggctcataggagagtcaaatgactacgttggaaagggaatggctggtggtgaaatagtagtaactcctgtggaaaaaatcgggtttgtgcctgaggaagcaacgatagtcgggaacacttgcttgtatggtgcaacaggtggtcaggatatcgctagaggcaaagctggagagagatttgcagtgagaaactcactcgctgaagcagtagttgaaggcactggagaccattgctgtgagtacatgactggtggctgtgtagtcgtgcttggaaaggtgggaagaaacgttgctgctggtatgacaggagggttagcttaccttcttgatgaagacgacactcttcttcctaagattaacagagagatagtgaagatccaaagagtaactgcgcctgcaggggaattgcagctgaagagcttaattgaagcacatgtggaaaaaaccggaagcagcaaaggcgcaacgattctgaatgagtgggaaaagtatctacctctcttctggcaactggttccaccgagtgaggaagacactcctgaagcttctgctgcttacgtaagaacatccaccggggaagtcacatttcaatcggcttagagatcattcaagagcaggttgtggcagttgaaacacaaggattgatatacatcaatggtggaggactatggagagcagattaatggaaaatcattatcattcacatgtagatcaaatgtgtgggacaatattcttattgtcttgtgatctttacaacaataccatggttgctataactgtacagtaaattcagtaaaataactgctttcaactgtcaaaaaaaaaaaaaaaacccacccccaagnnnnnnnnnnnnnnnnnnnnnnnnnnnnnnnnnnnnnnnnnnnnnnnnnnnnnnnnnnnnnnnngtgtcccaattatttcccccccncaggggcctggggtccccacctaaatg

SEQ ID NO: 96901 - DNA, 5347 bp, Arabidopsis thaliana columbia
  unsure (1)..(5347): unsure at all n locations
aaacagagaaaaagaaagagagagagagagagaagaagaagctctcatcactcatctgttatcttcctcttcttcttcttcttcctcttcttttttccttccacatttatctttattttattttttagtgtacatttatcttattttacacacacgcctctcattttttttcatttcaatggcgatgcaatctctttcccctgttcctaagcttctctccacaacaccaagctctgttctttcttctgacaagaacttcttcttcgtcgatttcgttggattatactgtaagtccaagaggaccagacgcagacttcgtggagactcttcctcttcctcacgctcttcttcttctctctctcgtctttcctctgttcgtgccgttatcgaccttgaacgtgttcatggcgtctctgaaaaggatctctcctctccttcagctttaagacctcaggttgctaattgggaggatatattgtctgaaagaggagcttgtggagttgggtttatagcaaacttagataacataccttcacatggagttgtcaaagatgctcttattgctcttgggtgtatggaacatcgtggaggttgtggagcagacaatgattctggtgatggctctggacttatgtcttccattccttgggatttctttaacgtctgggccaaggaacaaagtcttgctccttttgataagttgcatactggtgttggcatgatctttcttccacaagatgatacctttatgcaagaagccaagcaagttattgaaaacatatttgagaaagaaggattacaagttcttaggtggagggaagttcctgttaatgttcctatagttggtaaaaatgctagggagacaatgcctaacattcaacaagtgtttgtgaaaatcgcaaaggaagatagtactgatgatattgaaagggaactttacatctgccggaaactaatcgaaagggccgtagctactgagagttggggaacagagctttacttctgttcactgtccaatcaaaccatagtgtacaagggcatgcttcgatctgaagctcttggattgttttatctagatcttcagaatgagctttatgagtctccttttgctatttatcatcgaaggtacagtacaaacactagtcctaggtggcctcttgctcaaccaatgaggtttcttggacataacggggagatcaataccattcaggggaacttaaattggatgcagtctcgagaagcttcattgaaggctgctgtttggaatggccgtgaaaatgaaattcgtccatttggtaatcccaggggttcagactctgctaatcttgatagtgctgcagaaatcatgattagaagtggaagaacaccagaggaagctctaatgattcttgtccctgaggcatacaagaatcatccaaccttatctgtcaaatatcctgaggttgtagatttctatgactactacaaaggacaaatggaggcttgggatggtcctgccttacttttgttcagtgatggaaaaacagttggggcttgtcttgaccgtaatggccttcgtcctgctcgatattggcggactagtgacaatttcgtctatgttgcatctgaggtcggagttgtaccagttgatgaggcaaaagtcacaatgaaaggccgtctaggacctggaatgatgattgctgttgaccttgtgaatggccaggtatatgagaatacagaggtcaagaagagaatatcttcatttaatccatatggaaaatggattaaagaaaactcccggttcttgaagcctgtgaatttcaaatcctcaactgtcatggaaaatgaagaaatcctaagaagccaacaagcatttggttattcaagtgaggatgtgcaaatggttattgagtctatggcttctcaaggaaaggaaccaaccttctgcatgggcgacgatattccgctggcaggattgtctcaaagaccgcatatgctttatgattatttcaaacaaagatttgcacaggttacaaaccctgccattgacccccttagggaaggtttggttatgtctcttgaagtaaatattggaaaacgtggaaatatattggagcttggacctgagaatgcctcgcaggttattctgtctaaccctgtgttaaatgaaggagcgttagaggagttaatgaaggatcaatacttaaaaccaaaggttctgtccacatatttcgatataagaaaaggcgttgaaggttccttgcaaaaggctctatattatctttgtgaagcagctgatgatgctgtccgaagtggctctcagcttctcgttctttcagaccgatccgatagactggaaccaaccaggccttcaattccaataatgttagctgttggcgctgtccatcaacatcttattcagaacggcttgcgtatgtcagcttctattgttgctgataccgcccaatgcttcagcacacatcattttgcttgtttggttggatatggtgcaagtgctgtatgcccatacttggcactggagacatgtaggcaatggcgcttaagtaacaaaactgtggccttcatgcgtaacgggaaaattcctactgtaaccattgagcaagctcagaagaactacactaaggcggttaatgcagggcttcttaaaattctttctaagatgggaatctcattgctttcaagttattgtggtgctcagatatttgagatatatggtttgggacaggatgttgttgatcttgcattcactggaagtgtgtcaaaaatcagtggactcacctttgatgagttggcaagagagacattgtctttctgggtgaaggccttttctgaggatacaactaagcgattagaaaattttgggtttattcaattcaggcctggaggtgagtatcattcaaacaacccagagatgtcaaagttgcttcacaaggctgtccgtgaaaagagtgaaactgcatatgcagtctatcaacagcatctctctaacagacctgttaatgtcctccgtgacctgcttgagttcaagagtgatcgtgcaccgatcccagtagggaaagtagaaccggccgttgctattgttcagagattttgtactggtggaatgtcacttggtgctatttcaagagagactcatgaagctattgctattgcaatgaataggattggtgggaaatcaaactctggagaaggtggagaggatcctatccgttggaagccacttacagatgtggttgatggatattcaccaacactaccacatctcaaaggtcttcaaaacggcgatattgcaacaagtgctatcaagcaggttgcttcagggcgttttggagtcacaccaacgttcttggtcaatgcagatcaattggaaatcaaagttgcacaaggtgccaagcctggggaaggtggtcagcttcctggaaagaaagttagtgcgtatatcgctaggctaagaagctctaaacctggtgttccgcttatatctccgcctcctcaccacgacatttactctattgaggatcttgctcagttgatctttgatctacatcagattaatccaaatgcaaaagtatcagtcaagctagttgcagaagctggaatcggaactgttgcttcaggagttgcaaagggtaacgctgatatcatccagatatcaggccatgatggtggaaccggggctagtccaataagctccataaaacatgctggtggaccatgggaacttggactaacagaaactcaccaaacacttatcgcaaatggactaagagaaagagtcattttaagagtcgatggaggcttaaagagtggtgttgatgttctaatggctgcagctatgggtgctgatgaatacggattcggttccttggcaatgattgctactggttgtgttatggctcgtatttgccacactaataattgcccagtgggtgtagcaagtcagagagaagaattacgtgcaagattccctggtgtacctggtgatcttgtcaactacttcttatacgtagcagaagaggtgagaggtatcttagcacagttgggatacaacagtttagatgacatcattggacgaacagagttactgagaccacgagacatttcgctagttaaaactcaacatctcgatctgagttatcttctttcgtctgttggaacaccttcattgagcagtactgaaatcagaaagcaggaagttcatacaaatggacctgttctcgacgacgatattcttgcagatccattggtgattgatgcaatagagaacgaaaaagtggttgagaaaaccgtcaaaatatgcaacgtagaccgtgcggcttgtggtcgtgttgctggtgttattgcaaagaagtatggagacactggttttgcaggacaagtgaacctaactttcttagggagcgcgggacagtcgtttgggtgctttttgattcccggtatgaacatccggctcataggagagtcaaatgactacgttggaaagggaatggctggtggtgaaatagtagtaactcctgtggaaaaaatcgggtttgtgcctgaggaagcaacgatagtcgggaacacttgcttgtatggtgcaacaggtggtcagatattcgctagaggcaaagctggagagagatttgcagtgagaaactcactcgctgaagcagtagttgaaggcactggagaccattgctgtgagtacatgactggtggctgtgtagtcgtgcttggaaaggtgggaagaaacgttgctgctggtatgacaggagggttagcttaccttcttgatgaagacgacactcttcttcctaagattaacagagagatagtgaagatccaaagagtaactgcgcctgcaggggaattgcagctgaagagcttaattgaagcacatgtggaaaaaaccggaagcagcaaaggcgcaacgattctgaatgagtgggaaaagtatctacctctcttctggcaactggttccaccgagtgaggaagacactcctgaagcttctgctgcttacgtaagaacatccaccggggaagtcacatttcaatcggcttagagatcattcaagagcaggttgtggcagttgaaacacaaggattgatatacatcaatggtggaggactatggagagcagattaatggaaaatcattatcattcacatgtagatcaaatgtgtgggacaatattcttattgtcttgtgatctttacaacaataccatggttgctataactgtacagtaaattcagtaaaataactgctttcaactgtcataatcatatctcataaaaaattgcaatttctctttattgnnnnnnnnnnnnnnnnnnnnnnnnnnnnnnnnnnnnnnnnnnnn

SEQ ID NO: 96902 - DNA, 438 bp, Arabidopsis thaliana columbia
acccacgcgtccgccgaaaccgaaactactaaccctaatctctcacatcacataaacaatcacttcacatagccgcaaaatttaatggcagacgtcaaggttcaatccgaatccgaatcctcggattctcatcccttggtcgactatcaatcacttccaccttatcctccgccgcatccaccggttgaagtagaggagaatcaaccaaaaacatctccgactccgccgccgccacactggatgcgttatccaccggtgttaatgcctcagatgatgtacgcgccgccgccaccgatgccgttctcaccttatcatcaatatccgaatcaccaccactttcaccatcaatctcgtggtaataagcatcaaaacgcttttaatggtgagaataaaactatttgggttggctgatttgcaaaactggatggatgaggctta

SEQ ID NO: 96903 - DNA, 752 bp, Arabidopsis thaliana columbia
aggacgcgtgggcgtatttgccagttaccacaataaccggattaaaacccctaatttcgacctaaactttgccattaataaatatctcaaacacaactctcaaaacttgccctgtttggtccgaaaccgaaactaaccctaatctcacatcacatcacatagcaatcacttcacatcacaaaacacctcatagccgcaaaatttaatggcagacgtcaagattcaatccgaatccgaatcctcggattctcatccagtggtcgacaatcaaccacctcctccgcctccgccgccgcaacagccggcgaaagaagaggagaatcaaccaaaaacatctccgactccgccgccacactggatgcggtatccaccaacggtgataatccctcatcagatgatgtacgcgccgccgccgttcccaccttatcatcagtatccgaatcaccaccaccttcaccatcaatctcgtggtaataagcatcaaaacgcttttaatggtgagaataaaaccatatgggttggtgatttgcatcactggatggatgaggcttatcttaattcttcttttgcttccggcgacgagagagagattgtttcggtgaaggtgattcgtaataagaacaatggtttatcagaaggatatggatttgtggagtttgagtcccatgatgtagctgataaggttttgcgggagtttaacggggcgcctatgccaaatactgaccaaccttttcgtttgaactgggctagtt

SEQ ID NO: 96904 - DNA, 378 bp, Arabidopsis thaliana columbia
agttctttgtcgtcctttgtttcgtctttcattcattctcctttgtgttttctctttttggagattttaacttcagtttttgtctaattagggttttaatttaaattggagggaaattttagatgcagtgacgtagtttttgggtaaattttcgtcggattctgaattgtctccggcgacatggcttctaatctccccatgagccctcaattggagcagatccatggcgaaatccgtgaccatttccgagccctcgcgaatggtttccagaggttggataagattaaggattcaactagacaaagcaaacaacttgaagaacttactgacaagatgagagagtgtaaaagattggtcaaagagttcgaccgtgaactc

SEQ ID NO: 96905 - DNA, 533 bp, Arabidopsis thaliana columbia
ctcacactgaacttcaattctctctttccttttttccgttcgatgagagcttaagctctgccgcgttttcgttctccgatctttttccatttttatcagtttcttctcttccaaattagggtttttcttttcagtctttgggaatgattttgatgcggtgaaaaagtttttttttttttgagggggaaggatttctgggtttgctcttagggttttgtcttttcaatcgccggagcctgaaataatccggcagatatggcgtctgaattgccgatgagccctcatttggagcagattcacggagaaatccgtgaccatttccgagccctcgcgaatggcttccagaggttggataagatcaaggattctagtagacaaagcatgcaactcgaagaacttgcttgagaagatgagagacttgtaaaaggttggttaaggagtttgatcgtgaactcaaaaactgggaagtctcgaaagtatcccttaagcaaataagcagtttaatgcagagaaacaatctatcgtttatggac

SEQ ID NO: 96906 - DNA, 614 bp, Arabidopsis thaliana columbia
aaaagctgaccttgtgtagcctctgctcagtttttacattgatgaaggtaaaggtgaggcattgaccaaggaactatcacaattgctggagaaacgtggcgttaagtgtttacttgttatctttttgtgggtcttttgtttcttgaagccaaattgtttgtgatgttggtaatgttcttttatcttttcagttggatgtcaagataatttacagttggggaaagaatgtcgatgttataccgcgtggtgcaggaaaaggagaagcgcttgagtatcttctcaagaagctgcaggctgaaggaatattcccggtcaatactcttgcgtgtggtgactctgaacatgatgctgaactatttagcattcctgatgttcacggtgttatggtgagcaattcccaagaagagctattgaagtggcgttctgaaaatgcgttgaacaaccttaaggttatacattcaaccgagaggtgtgctgatgggattattcaagccatcggacattttaatcttggtcccgatctatctccaagagatgtttcggaattcttggatcgtaagatggacaatgtgaattctggtcacgaggttgtgagattctacttgttctacgag

SEQ ID NO: 96907 - DNA, 550 bp, Arabidopsis thaliana columbia
  unsure (1)..(550): unsure at all n locations
accaaccannccntctcaagcncntgccaatctgcntcccatggngatgcctgnggtaaattgngnccctaccgcaaagtcttggtgncgacggctcagggttattgatggttcaccgtttgacgagtctccaggacccaaccccgcaagcttcctatgatgatgatgggaaggtaaatcaaaatcattaccaacataatgaattggcggttttctttttagttcaatatataaacagaggatttgtcaatctttgcagatacatgggagtcaagattcttcgggagagacttggaaacaaagctggtgtttagtttgcagattgagcttttatggtagacaaattcgtagcagataattctgttgtggaattgtgttggagaatatctctctctgtctccttctctgttatttgatattcgattcattaaagtataggatcatattgtctaatgaactgtgtaaccctctattgggcaatcggctctgttgcttattagcaagtgtgaaaagttgatcatataaaccaaaaaaaaaaaggaagggccgt

SEQ ID NO: 96908 - DNA, 1188 bp, Arabidopsis thaliana columbia
atctagtggagctattgggtcaccacagatgctgatgttaagtgggattggacctaagaaggagcttcagaggctgaagattcctgtggttttagagaatgagcatgtaggaaaaggaatggctgataatcccatgaacacgatcttggtgccttcaaaggcgcctatagagcagtcacttattcagactgttgggaattacaaagatgggtgtgtatgttgaagccagtactggcttttgggcaatctcctgagagtattcatactcactatgggattatgtcgaacaagaatgaattgttttccaccattcctgcatagcagagaagaccagatgcaacgcaagcttacatcacaagaaacagataccaacttcacgaagcattcaatggaagtttcatcttggagaaacttgcttacccgatctctagagggcatttgagcttggtcaacacaaatgttgatgacaacccttcagtcaccttcaattcctttaaacacccggtggatctccaacgctgtgttgaagccattcgtctggtttccaaagtggtgacgtctacccgtttcttaatctacacgcagtgtgacaagcaaaacgtacacatgatgcttagcttaagcgtcaaggcaaacatcaatctaaggccaaagcaactgaacgataccaaatcaatggctcagtctgcaaagacactgttgtcacaatctgccactaccatggtggatgtccttgtgggtaaagtggggacccctacccgcaaaagttcttggctgtcgacaggctccagagttattggatggttccaccgtttgacgagtctccaggaaccaaccccgcaagctactatgatgatgatgggaagatacatgggagtcaagattcttcgggagagacttggaaacaaagctggtgtttagtttgcagattgagcttttatggtagacaaattcgtagcagataattctgttgtggaattgtgttggagaatatctctctctgtctccttctctgttatttgatattcgattcattaaagtataggatcatattgtctaatgaactgtgtaaccctctattgggcaatcggctctgttgcttattagcttgtgtgaaaagcggccgcgaattcgatatcaagcttatcgataccgtcgacctcgagggggggcccggtaggcaattgc

SEQ ID NO: 96909 - DNA, 502 bp, Arabidopsis thaliana columbia
cggacgcgtgggctcagatcaaaaaaaaccttcgtgtgcgtctctcgtcctctaaattgtcgaaaatgctggctaggctcgctgcgaagcgtcttctcgagatccgtcaagttttccgtcaaccaacctctcaggtgactcgtagcttatcgacggccttaaactaccatctggattctcctgataacaaacccgatcttccatgggagttttcagaggctaaccaatctaaggttaaggagattctctcttactatccatccaattacaagcagtccgcagttattcctctcctagatcttgcacaacagcagaatggaggctggctccctgtttcagcaatgaatgcggttgctaaagttatagaagttgcccctatccgtgtttatgaggttgcaacattttactcaatgttcaacagagcaaaggttggaaagtatcaccttctagtttgtggcacaacaccttgcatgatccgtggttcacgagacatcgaatcagc

SEQ ID NO: 96910 - DNA, 755 bp, Arabidopsis thaliana columbia
  unsure (1)..(755): unsure at all n locations
atgattcttccnnnnnnnnnnnnnnnnnnnnnnnnnnnnnnnnnnnnnnnnnnnnnnnnnnnnnnnnnnnnnnnnnnnnnnnccacgcgtccggacactctcactactttctattgcatctgtgcacccagagttgggcaatgatgcgcgagggagaagcggagaagcagaagcagtatgttgcacttgtatggatttctcgtccacttgaagagaaagacttcaactcaatttcttgcctgaaagaattgaaaatcttgcagaagacaccagtaagagtgcttcaccgacgaagtccactggaccgtgaaaagattatacattggatgaaagttgaaaagataaaaggacactctcactactttctattgcatctgtgcacccagagtttgttcatggagatcttggtcgtaccactcccagcatgggatcaattttagggtgcagagcggagataatacaactagatgtgactgatgtgaaaatgggcggccctttaattgccaagtaaaaccccgatgttcttccttgtttaattttgtagccctcatttccgtttcatttttgtcaaaactttattagttttgtttttaaaaaatatatggattggtaataaatcctttttttttttnnnnnnnnnnnnnnnnnnnnnnnnnnnnnnnnnnnnnnnnnnnnnnnnnnnnnnnnnnnnnnnnnnnnnnnnnnnnnnnnnnnnnnnnnnnnnnnnnnnnnnnnnnnnnnnnnnnnnnnnnnnn

SEQ ID NO: 96911 - DNA, 517 bp, Arabidopsis thaliana columbia
  unsure (1)..(517): unsure at all n locations
gannnnnnnnnnnnnnnnnnnnnnnnnnnnnnnnnnnnnnnnnnnnnnnnnnnnnnnnnnnnnnnnnnnnnnnnnnnnnccacgcgtccgcggacgcgtggggagaaaccatacggaggaggctacggagctccaccaccgtctggatcttcagattacggaagttacggtgctggacctcgtccgtcgcagccgtctgggcacggtggaggatacggagctactccaccgcatggggtttctgactatggaagttacggtggtgctccacctcgtccagcgtcttctggtcacggtggcggatacggaggttatcctccgcaagcctcttatggaagtccttttgcttctctgattccgtcaggttttgctccggggacagatccgaatatagtggcttgctttcaggctgcagatcaagatggtagtggctttattgatgataaggagcttcaaggagctctctctttctatcaacagagattcagtatgagaactgttcattctttttatgatc

SEQ ID NO: 96912 - DNA, 1197 bp, Arabidopsis thaliana columbia
  unsure (1)..(1197): unsure at all n locations
nnnnnnnnnnnnnnnnnnnnnnnnnnnnncagctannnnnnnnnnnnnnnnnnnnnnnnnnnnntgaccggtcccggacgcgtccggggcgcttacaacaaatctcaggcggctcaacactatcctcttctacattttccaacgatggcctcaaacgcactctcgtctttcaccgccgctaatcccgctctgtctcctaagccactactccctcacggctctgcttctccgtcggtttctctcggcttctccaggaaagttggcggcggcagagcagtggtcgttgcagcggctacggtggacacaaacaacatgccgatgaccggagtcgtgttccagcctttcgaagaggtgaagaaagccgatctggccattccaatcacatctcatgcctctctcgctcgccagaggtttgccgacgctagcgaggcagtcattaatgagcaaatcaatgtggaatacaacgtctcctatgtgtaccattcaatgtacgcatactttgacagagacaacgttgctatgaagggactagccaaatttttcaaggaatcaagtgaggaagagagagggcatgctgagaagtttatggagtaccagaaccaaagaggaggaagagtgaaactccaccctatcgtctcacctatctcagaattcgaacatgctgaaaaaggagatgctttatatgcaatggagttggctctgtctctagagaaactcactaatgagaagcttctaaacgttcacaaagtggcctcagagaacaatgatccccagttagctgatttcgttgagagtgaatttctgggagagcagattgaagcaatcaagaagatctcagactacatcacccagctaaggatgatcggcaaaggccacggagtttggcatttcgaccagatgcttctgaactagacttggacctctataagttcactttcagatgaccaatgttggggttaaaacagaagaacccgaagattctgtaaaagctttagattgaacattatggactaataagattgtagtagtaagctttgtgttcaagatggtttttgtaataacttcgtaagcttaatcaatgaagtttttgttttagtataaaaaaaaaaaaaaagnnnnnnnnnnnnnnnnnnnnnnnnnnnnnnnnnnnnnnnnnnnnnnnnnnnnnnnnnnnnnnnnnnnnnnnnnntagaatcg

SEQ ID NO: 96913 - DNA, 582 bp, Arabidopsis thaliana columbia
  unsure (1)..(582): unsure at all n locations
gnacnnctgtttgngccccnaaatgcgggatgtcccnaacnccgagtgtccntnngcttnttnccaccaaccgcccgtcatccggaatntttgtgcagtagatatggcatgggtggcccccatcaaaagcaaaggtcgagaaattaaatgtcagaaaattgagcggtgggaccggctccctctttcaaaagtacctgaggagaagacggagttgtctaaaaacaatgcagaaacacctgcagtttctgaaaatgttgagagtcggattgaagcagccagagaacgctttcttgctcgtaaaggacagaaataaatttgatgtctcaaacataaatacaagattcaactagccctataaagaatagaaaagagaagctttctgtagaagatttgttattagagacaattttcaaattttgtatgttctgttttttttttttttttggctcaacttaaacttttctttattctcattccgacatgagttttaaatttttaacccaatttggtatgttncttnagcggcncggcgaattgcgatgatgcaagcttgatgcgatgactcgttcgtaccttcgtagg

SEQ ID NO: 96914 - DNA, 437 bp, Arabidopsis thaliana columbia
acgatcactttcaccagcttcctgttgccccccagtctcatcaccattccccatcgttttcactacccgctgctcatgtgggtgatggtgaagctgactcttcagcagcacgaggcctaccttatgcgcatccatttctttttagtcaccggtctaatcaaaggtcctcaccagcaattaacagttaccaaggaagcagcacccatatgcgtgaacagcatcatgcttataatcatcagaggcaacaacatcatgccaatggtcccactctcgcatcacctctcatctccatgacaagaaggggattaccgccggcgtcacctcccccaccaatgccagatcagaacgttggattcttcatttatccaggtggacaccatgaaccagaaaccgatcaaattcatgcatgggagagagaatgggttccaccatttcct

SEQ ID NO: 96915 - DNA, 451 bp, Arabidopsis thaliana columbia
ggggatatatctccacacactagttctgatgatgataatggggaccatgatagtcttgagaaaaaatctagtaggagtaagaatattgcttatggaaaatgtgatgtcaagccacccaggcttcagagtggcgttcttaggaccaattgcattgattgccttgaccgtacaaatgtagcacaatatgcatacggttgggctgctcttgggcagcagcttcatgtattagggattagagatgttcccgccatagaacttgatgatcccttggctatttcgttaatggggttgtatgagagaatgggtgacacactagctcatcagtatggcggatccgcagcccacaacaaggtattcagtgagagaagaggcctgtggagagcagcaactcagtcacaggagttcttgagaactctacaacgattttataaccacccatatatggatgcag

SEQ ID NO: 96916 - DNA, 658 bp, Arabidopsis thaliana columbia
  unsure (1)..(658): unsure at all n locations
cttttgatcccaaattcaacagatatctctgaatctatcgcttccaagggttttctctagcttaatctcagattcgaatcggtccatagtgatactatgccgaagaacaagggaaagcggaggaaaaatgccggctggacatggagttcgagcgagaacgagggatctgttcgcgaggcctttcaggaagaagggttacattcctctatcgacttacctgaggaccttcaaggtcggcgattacgtcgatgtgaaggtgaatggtgcgatccacaagggtatgcctcacaagttctaccacggtcgtactggtcgtatctggaacgtcaccaagacgcgccgtcggtgttgaagtcaacaaacagattgggcaacaggatcataaggaagaggattcatgtgcgtgtggagcatgttcagcaatcaagatgtgctgaggagttcaagctnaggaagaagaaggattgttgagctcaaggcttcagccaaagccaattggtgagaccattagcaccaggggccagcttaaaggccccaaccaggntnattggtcgaaggattnccttgggggctttaatncaatcccgncggttngtaacggtntaagggggtntttgtnttttcccctnttcaatttntccntttagttntncattta

SEQ ID NO: 96917 - DNA, 556 bp, Arabidopsis thaliana columbia
  unsure (1)..(556): unsure at all n locations
tgcggccgctctaaacttagggatccccngggctgcaggaaatcggcacgagacttaacgcgccgtcggtgttgaagtcaacaaacagattggcaacagggatcataaggaagaggattcatgtccgtgtggagcatgtgcagcaatccagatgtgctgaggagttcaagctgaggaagaagaagaatgatgagctcaaggctgcagccaaagccaatggtgagaccatcagcaccaagagacagcctaaaggacccaaaccaggatctcatggtcgaaggaatgaccttggagactgtcactccaatcccgtacgatgtcgtcaacgatctcaagggaggctattagttctatcctcccagtgttttgcaggtggtgcttccggatttgaggttctcttcatgtgtcttagccaccatttctgtagaatctcccagatattttatgaaaccgatccttttatctcggttataactatcataaaaggcggccgctttaaaagaatccaggctaaggaagggggccatgcgacgttcatagttcttctattagtgtc

SEQ ID NO: 96918 - DNA, 512 bp, Arabidopsis thaliana columbia
tccaaaacttttgatcccaaattcaacagatatctctgaatctatcgcttccaagggttttctctagcttaatctcagattcgaatcgttccatagtgatactatgccgaagaacaagggaaagggaggaaagaacaggaagagaggaaagaacgaagcagatgacgagaagagagagcttatattcaaagaagatggacaagaatacgcacaagtccttcgtatgcttggaaatggaagatgtgaagctatgtgtatcgatggaaccaagcgtctttgccatatccgtggtaagatgcataagaaggtttggattgcagcaggtgatattgtgcttgttggtttgagggattaccaagatgacaaagcggatgtgatccttaagtacatgtctgatgaggctaggcttcttaaggcttatggtgagcttccagagaatactcgtcttaatgaaggaattgttggtgatcttgaggatgatgatgataataatgatgatgactatgttgagt

SEQ ID NO: 96919 - DNA, 879 bp, Arabidopsis thaliana columbia
aaaaagtagaacaagcaacacaacgcagctaagaaacctccttaaagaacaaagaaaaaacttggtgaaatcgattctcttcaaagatcgtcttcctaatcactttcaacaactcgatcaatccttactgagacgatgccgaagaacaaaggaaagggaggaaagaacaggaagagaggaaagaacgaagctgatgacgaaaagcgagagcttatattcaaagaagatggacaagaatacgcacaagttcttcgtatgctcggtaacggtcgatgcgacgttatgtgcattgacggtgttaagcgtctttgccatatccgtggtaagatgcataagaaggtttggattgctgctggtgacatcatacttgttggtctaagagattaccaggatgataaagctgatgttatactcaagtatatgtctgatgaggctaggcttcttaaggcgtatggtgagcttccggagaatactcgtcttaacgaaggtattgttggtgatcttgatgatgatgatgatgttgttggtgaagattacattgagtttgaggatgaggatattgataggatctaagtttgtttttgttgttggctctctgttccagcttgtattatcaaatttgagatacatatcttcttagatacagaagattgtgatactatcattgttatgtatttctggggtttccagtttcttatcccttactattactggtttgatttgaatccctaaataattcacagaaagttgttatctgattcgaaagaacaaactttcgtgttttgaagaaaaaaaaaaaaaaaaagaacccatagagcggccgctctagaggatccaagcttacgtacgcgtgcaggcgacgtcataactcttctatag

SEQ ID NO: 96920 - DNA, 855 bp, Arabidopsis thaliana columbia
  unsure (1)..(855): unsure at all n locations
atgatctnnnnnnnnnnnnnnnnnnnnnnnnnnnnnnnnnnnnnnnnnnnnnnnnnnnnnnnnnnnnnnnnnnnnnnnnnnnccacgcgtccgtgcggctgcgagaagacgacagaaggggagagacgggggtgagagaggagggaaaatgccggcgggacacggagtgagggcgagaacaagagatctgttcgcgagaccattcaggaagaagggttatattccactctccacttacctcagaaccttcaaggtcggcgattacgtcgatgtcaaggttaatggagctatccacaagggtatgcctcataagttctaccatggtcgtactggtcgcatctggaatgtcactaaacgtgccgttggtgttgaagtcaacaaacagattgggaacagaatcataaggaagaggatacatgtgcgtgtggagcatgtgcaacagtcaaggtgtgctgaggagtttaaactcagaaagaaacagaacgatgtgcttaaggctgatgctaaagcccagaggtgagactatcagcaccaagagacagcctaaaggtcctaaaccgggtttcatggttgaaggtatgacattggagactgtcactcccattccttacgatgttgtcaacgatctcaagggtggttattgagttgtttccattttattatcattctctactcagaatttttgcacttgcttttttaattatgtttttgtatcaaacaagactgatttatatacgatatgagttcagattttgttaggaaaaaaaaaaaaaaaaaaaaaagaaaaaaagcggccgctctagaggatccaagcttacgtacgcgtgcatgcgacgtcatagtcttctataacga

SEQ ID NO: 96921 - DNA, 912 bp, Arabidopsis thaliana columbia
  unsure (1)..(912): unsure at all n locations
nnnnnnncagctcatctacgactcacttttatagggaaagctggtccgcctgcaggtaccggtccggaattcccgggtcgacccacgcgtccgagggttttagttgtcgcacgaggaggaaaaatgccagcgggtcatggagttcgggcgagaacgagggatctgttcgcgaggccattcaggaagaagggttacattccactctcgacttacctgagaaccttcaaggtcggcgattacgtcgatgtgaaggtgaatggtgcgatccacaagggtatgcctcacaagttctaccacggtcgtactggtcgtatctggaacgtcactaaacgcgccgtcggtgttgaagtcaacaaacagattggcaacaggatcataaggaagaggattcatgtgcgtgtggagcatgtgcagcaatcaagatgtgctgaggagttcaagctgaggaagaagaagaatgatgagctcaaggctgcagccaaagccaatggtgagaccatcagcaccaagagacagcctaaaggacccaaaccaggattcatggtcgaaggaatgaccttggagactgtcactccaatcccgtacgatgtcgtcaacgatctcaagggaggctattagttctatcttcccagtgttttgcagttgttgcttccgtatttgagtttctcttcatgtgtcttagctacaatttctgtagaatctccagatattttatgaaacagatctttttatctcgtttataactatcattttcattatctcttctgttacttacatttaacatctttatttagtgattagtcaaattctttggtgaacaaaaaaaaaaaaaaaaaagnnnaacggannnnnnnnnnnnnnnnnnnnnnnnnnnnnnnnnnnnnnnnnnnnnnnnnnnnnnnnnnnnnnnnn

SEQ ID NO: 96922 - DNA, 977 bp, Arabidopsis thaliana columbia
  unsure (1)..(977): unsure at all n locations
agctgtggccccccacccaggggtttttcccccgtcctggagaaaaagcggggtccagttgaggccgccaacgcccaatttaaatggtggagtttggcccccctccctttaggccaccaccagggcttttccccctnnnnnnnnnnnnnnnnnnnnnnnnnnnnnnnnnnnnnnnnnnnnnnnnnnnnnnnnnnnnnnnnnnnnnnnnnnnnnnnnnnnnnnnnnnnnnnnnnnnnnnnnnnnnnnnnnnnnnnnnnnnnnnnnnnnnnnnnnnnnnnnnnnnnnnnnnnnnnnnaaccccacgcgtccgtgaagtcaacaaccagattgggaacagggttcataaggaaaaggattcatgttcgtgtggagcatgtgcaccagtcaatatgtgccaaggagttcaacctgaggaagaagaaatccgatgagctcaagcctccagccaaagccaatggtgagaccctcagcaccaagagacagcctaaaggaccctaaccaggattcatggtcgaaggaatgcccttggagactgtcactccaatcccctacgatgtcgtcatcgatctcaaaggaggctattagttctctcttcttgtgctttagaactctttttcatatgttttgtagcagccttaaaactaagacctatgatttactatataacaggagtttgcaatccaaaaaaaaaaaaaaaaaaaattaagggcggccgctctagaggatccaagcttacgtacgcgtgcatgcgacgtcatagcgctctataccacnggaatccaccccacgggnggaggggagggtcggtgtgtgctcaactggtcctctgaggacggttgtgttcaatttgtccgatccacgccatatactgtacagagttgcgcgcattgagtgatcagaattaatgcaacagagcttcagcctgcctatcgctatctactgtagttgtttactgtcacagctccccgctccctctc

SEQ ID NO: 96923 - DNA, 771 bp, Arabidopsis thaliana columbia
  unsure (1)..(771): unsure at all n locations
nnnnnnnnnnnnnnnnnnnnnnnnnnnnnnnnnnnnnnnnnnnnnnnncccatctccacctcctctctcttattcaccccgcgtccggaaaattcgagctaagtgtttttataatatatacattctctgatatgggtttctctagagcaaaacgtgtcactgatccacttgcagaagaggttagggctcgtctcgttggatgcagctttagcagcggcagcgaacataccggcgacggaattgaagactacgaagacgacgactcgccttgtctctctgatctagtacaagggttcttggaagatgaagttgatacagttgatgatgagtcatgctggtgtgatcaagattctggttccgactcggattctgactcggaacttggcgagctccctgactttgccgacgatatcgccaagcttctgaggaactctctcagggaagattcatacggacgaacggtgctggtacatgtggcgagagcgatggaaatgttgtcgtctctcggatctcagcccgaacagcgtgccgttttccagcgtaaggtcatgtctcttcttagagaactcggccacaatgcggccatctgcaaaactaaatggaaatcctccggcggactcaccgccggtaaccatgagttcatcgacgtcgtgtatacaccttccgcctcgtctcagtccgtccgtttcatcgtcgatttagatttctcgtcgcgtttcaaatcgcgaggccaacttcacagtacgcgcgtgtgcttcaatcgctttcggc

SEQ ID NO: 96924 - DNA, 433 bp, Arabidopsis thaliana columbia
atatattctctgtctttttttgtggcaaaagtaaatggcgagaagacaactcttttaccatcgaatgttcttggttttagctcggctctatctcatgatctcatggaagcctctcctaatcactgcaagacctgagaaatcaacagactttgaaaccaagggacaggaattgaatcgtcagattagccatctgggacgtattgaaaatgatcctgagagaagaaaagggacaaggaggatgatgaccgttgaggatattaacgattatccaggatccggtgctaacaaccgccacactcctcactgttctgattgctaattccattttcctgtaatctagcttctataaaatggtaataatcaaatcacttttatatgatatgtatcaagatttaaaaatcatgggggagtcttaataattgaatcttattct

SEQ ID NO: 96925 - DNA, 744 bp, Arabidopsis thaliana columbia
  unsure (1)..(744): unsure at all n locations
cagcttttattccaactcactatagggaaagctggtccgcctgcaggtaccggtccggatttcccgggtcgacccacgcgtccgcccacgcgtccggatccatgccgatccgtaaagacgacgaggttcagatcgttcgtggtacttacaagggacgtgaaggcaaagttgttcaggtttaccgtcgcaaatgggtgattcacatcgagagaatcacgagggagaaggtgaatggaacaaccgtgaacgttgggattcagccgtcgaaagttgtgataacgaagcttcgtcttgataaagataggaaatcgcttttggagaggaaggctaagggacgtgctgctgctgataaggagaagggtactaagtttacgtctgaggatgttatgcagaacgttgattaagtaagaaggaagaagaaatcttcttgaaaggttttatcttttagagttatcttcaatcgctttttaattttcaagttttggatattttggaatgttgccagtggatctttaatggtgctagacatgagaacttatgtttgattttgagtatttgaagnttggttatggaagtttatctctttgtctcattcctttataatgatgtgtttcntgtattgtctgcatctgtcttgatgaacttgataatattntgtttgtaaagaagtttgcttctgataccatctttgaatgttatgagattaatgctagcttttctactgaacaaaacattncattaaaa

SEQ ID NO: 96926 - DNA, 586 bp, Arabidopsis thaliana columbia
  unsure (1)..(586): unsure at all n locations
atagaagagctttgacgtcgcatgcacgcgtacgtaagctcggaattcggctcgagatgagctctcctctctccaccgatcttcgtcagaagtacaatgtcagatccatgccgatccgtaaagacgacgaggttcagatcgttcgtggtacttacaagggacgtgaaggcaaagttgttcaggtttaccgtcgcaaatgggtgattcacatcgagagaatcacgagggagaaggtgaatggaacaaccgtgaacgttgggattcagccgtcgaaagttgtgataacgaagcttcgtcttgataaagataggaaatcgcttttggagaggaaggctaagggacgtgctgctgctgataaggagaagggtactaagtttacgtcttgagggtgttatgcagaaccgttgattaagtaagaaggagagaggaaatcttccttgaaaggttttcccttttggggttatcttcaatccctttttaatttcccagttttggatattttggaattgttctcggggcctcttgggcgaccataggaccnttttttttntttnaagantttaaggtttgttttggaaaaaaaaat

SEQ ID NO: 96927 - DNA, 494 bp, Arabidopsis thaliana columbia
cccacgcgtccgcggacgcgtgggtgcgggtgttagggcaaatgctcagcagcctaagctatttgttgggatgattcttatccttatctttgcggaagcgctcgctctatacggcctaattgtaggcatcattttatcttctcgagctggtcagtccagagcagaatgagagcacaaacaaatgttaaaatttccaggtacttccttatcgatcaacttataagtgcggtatgtagtatcgggagccgatattttgtggattcttggtttgggaagcagatgttgccacctcgctttccttggttggtggttacttgagtgtaggatgttatttggttggtacggtaataaaaaaaagagcttggcatttgttttgtattcttgtagtgtctgcatctgtcttgatgaacttgataatattttgtttgtaaagaagtttgcttctgataccatctttgaatgttatgagattaatgctagcttttctactgaac

SEQ ID NO: 96928 - DNA, 804 bp, Arabidopsis thaliana columbia
  unsure (1)..(804): unsure at all n locations
accacgcgtccgcggacgcgtgggctaagagtagagactctctcaatcccggcggcgaagatgaagtacaacccaagagtgacctcttctcgcagaaagaacaggaaggctcatttcacagcttcctccagcgagaggcgtgtgataatgagctctcctctctccaccgatcttcgtcagaagtacaatgtcagatccatgccgatccgtaaagacgacgaggttcagatcgttcgtggtacttacaagggacgtgaaggcaaagttgttcaggtttaccgtcgcaaatgggtgattcacatcgagagaatcacgagggagaaggtgaatggaacaaccgtgaacgttgggattcagccgtcgaaagttgtgataacgaagcttcgtcttgataaagataggaaatcgcttttggagaggaaggctaagggacgtgctgctgctgataaggagaagggtactaagtttacgtctgaggatgttatgcagaacgttgattaagtaagaaggaagaagaaatcttcttgaaaggttttatcttttagagttatcttcaatcgctttttaattttcaagttttggatattttggaatgttgtcagtggatctttatggtgctagacatgagaacttatgttttgattttgagtatttgaagtttggttatggaagtttatctctttgtctcaaagaaaaaaaaaaaaaaaggnnnnnnnnnnnnnnnnnnnnnnnnnnnnnnnnnnnnnnnnnnnnnnnnnnnnnnnnnnncnnnnnnnnnnnnnnnnnnnnnnnnnnnnngagacc

SEQ ID NO: 96929 - DNA, 442 bp, Arabidopsis thaliana columbia
  unsure (1)..(442): unsure at all n locations
agaaaatttagacgctcaaggttttgtttacatcttgtccggtggctcgaagcaaattcaacttctgcgtactgtgtctttgttgaatcatggatccagcgcccgaacccgttacttacgtctgcggagattgtggtcaagagaacactttgaagtctggggatgtgatccaatgcagagagtgtgggtaccgtattctctacaagaagcgtacccgtagagttgttcaatacgaagctcgctgagaactactactcctgaaggtggttcatagtcttgttaagatgggttgagactttttggcacttgtttgtgatatatatatcgncatggtgattgctacattgccagttcgatttgatttgggcacagtgtgactgtgtaatgacttanccgttttgatagntgaaatccttgggataactaaggtcacaattgcttt

SEQ ID NO: 96930 - DNA, 595 bp, Arabidopsis thaliana columbia
  unsure (1)..(595): unsure at all n locations
tcgtgctcaaaagccctaaaatcccaattgagaaaatttagacgctcaaggttttgtttacatcttgtccggtggctcgaagcaaattcaacttctgcgtactgtgtctctgttgaatcatggatccagcgcccgaacccgttacttacgtctgcggagatttggtcaagagaacactttgaagtctggggatgttacgtctgcggagattgtggtcaagagaacactttgaagtctggggatgtgatccaatgcagagagtgtgggtaccgtattccnctacaagaagcgtacccgtagagttgttcaatacgaagctcgctgagaactactactcctgaaggtggttcatagtctgttaagatgggttgagactttttggcactgtttgtgatatatatatcgacatggtgattgctacattgccagttcgatttgatttggtcacagtgtgactgtgtaatgactttaccgttttgatagatgtaattcttggaataactaagttcacattgctataatccttgattggctataatctctcgttgttttgctacctttgttctttagtgtactctgcatttagttaaaaaaa

SEQ ID NO: 96931 - DNA, 591 bp, Arabidopsis thaliana columbia
cgcctgcggtaccggtctcggattcccgggtcgacccacgcgtccggaaagcatcactctttttcgtcttctctcgaaaatggcggacaatggtaaagtcacgatcaatctctgctaaccttatttgatttccctgtttcctcattttctttcgggcgacattgatttgacgcagattctctagatcagtttttggctgccgccattgatgccgctaaaaaagctggacagatcattcgtaaagggttttacgagactaaacatgttgaacacaaaagccaggtggatttggtgacagagactgataaaggatgtgaagaacttgtgtttaatcatctcaagcagctctttcccaatcacaagttcataggagaagaaactacagctgcatttggtgtgacagaactaactgacgaaccaacttggattgttgatcctcttgatggaacaaccaatttcgttcacgggttccctttcgtgtgtgtttccattggacttacgattgggaaagtccctgttgttggagttgtttataatcctataatggatgagctatttaccgttgtacaagggaaagggagcttcttgaat

SEQ ID NO: 96932 - DNA, 385 bp, Arabidopsis thaliana columbia
aagaaaaccaggcagagtttcttcagttagtaaatgagccctatgagggttctgacggggagggggacatgttcgatcaacccgagcaagaaatgccacatgccattaacgttaccccagcagaacaagaagcgattcaacggctcgaggcaatgggatttgatagagccttagtaatagaagcgttcctcgcatgtgaccgaaatgaagaattggcagctaactatctattggagaactcaggtgactttgaagactgagttcacaaaacgttatctcttcttcgaaaaagttttggctcttttcttacgttgaattacatatcttccgtgaattaatgtgtgggatttgatctctctttctctgcgacttaatttgtcctttt

SEQ ID NO: 96933 - DNA, 527 bp, Arabidopsis thaliana columbia
acaactttatctcccaagcccgaaaactcctcttcaccaacttaaaccctattaactaatcccaacaatcagatgtttcgaattcaacaaccagctcaggccataagattcatcccggagaaacaagaacgatgacaacacataaacatagaagaacagagaaaaatctctgttttaagcaatactacaaatggatcctctgttttatcctcactctctatttttttgcttccttctttgtcgaccatgatcaagatcatagatcttctacttccatatcaaagcatcttcttactaaccataaacctaagcttttcgcttctcgtgccatgtttgaatctaaaatccatgatcacaaacttgggtttacctctcaacaacctaacatcaaaacagacgtattcaacaatttgaaaatctacgtctatgacttaccttcaaagttcaacaaagactggttagccaatgatagatgcaccaaccacctctttgccgcggaagtggctctccataaggcgtttctcagc

SEQ ID NO: 96934 - DNA, 642 bp, Arabidopsis thaliana columbia
  unsure (1)..(642): unsure at all n locations
nnnnnnnnnnnnnnnnnnnnnnnnnnnnnnnnnnnnnnnnnnnnnnnnnnnnnnnnnnnnnnnnnnnnnnnnnnnccacgcgtgcgaaacaaacaaaaaatctagtgttcggctctaacacgctcgacgaccatggcggtctcgtttaatacaacgcttcaccagccttctctgagtccgagctgtagcatcaagctttattctgggttaaagcctcaatctgcaagctttttggcaagtgggtatcagaatttgaacaaggagttctatggaagagtttataagagtctgcaatctgggactgggaaagcgagcaggtcacgggtaaagatgatgccaataggaacaccgagagtaccctacagaaaccgagaagaagggacttggcaatgggttgatatatggaatgccctttatcgagagcgtgtaatcttcattggacaaaacattgatgaagagtttagcaaccagatattagcaaccatgttgtaccttgatactcttgatgactcgaggaggatttatatgtacctaaatggtccgggtggtgatcttactccaagtctagccatctatgatacaatgaagagcttgaaaagtcccggttgggacacattgcgttgggcttgcatacaaccttgc

SEQ ID NO: 96935 - DNA, 1843 bp, Arabidopsis thaliana columbia
  unsure (1)..(1843): unsure at all n locations
ccctcgcgtccggctagctcctccaaatccaaatcgttgcgttaaggtttcttcaagtttcaatctttttgcaatgaattgcccagccatgactgcttctccttcttcttcctcttcttcttcctactcaacgtttcgtcctcctcctccactcttgccacaattgagtaacgattcacaaagatctgttgttatgcactgcacaagattaccctttgaagcatttgctgctacttcatcaaaccggcttcttgggaaacattcattgcctttgagagcagctttggttacttcgaaccctttaaacatttcatcttcctcagttatctctgatgccatttcatcttcctctgttatcactgatgatgccaaaattggtgtcttgttattaaaccttggaggtcctgagactttagatgatgtacaaccctttttgtttaacctcttcgccgacccggacattatacggttgccgccggtattccagtttcttcagaagccattagcacagtttatatcagtagcaagagcaccaaaagcaagaagatatgcatctattggtggaggttctcctcttcgccacataactgatgcacaggctgaagaattaagaaaatgcctttgggaaaaaaatgtaccagcaaaggtatatgttggtatgcggtattggcatccattcactgaggaagccattgaacagataaaaagagatggaattacaaaactagttgttctaccactttatcctcaattttctatatcaactagtggttcaagcctaagactcttggagagaatatttcgagaggacgagtatcttgttaacatgcaacatactgttataccatcgtggtatcagcgggagggatatataaaggcaatggcaaatctaatccaaagcgagttgggaaaatttggttctcctaatcaggttgtaatatttttcagtgcacatggcgtgcctcttgcatatgtcgaagaagccggtgatccttacaaggcagagatggaagaatgtgttgatctaatcatggaggaattagacaagagaaagataactaatgcttacactcttgcttatcagagcagagttggaccagttgaatggctgaaaccatacactgaagaagccattactgaacttggtaaaaaaggtgttgaaaatcttctggctgtacccataagttttgtgagcgagcacattgaaactctggaggagatagatgttgagtataaagagttggctttgaagtctggtatcaaaaactgggggcgagtacctgctctaggaacagaacctatgtttatatctgacttggcagatgctgttgtggaaagtcttccatacgttggtgctatggctgtctcaaaccttgaagctcgacagtcgttagttccgctcgggagtgtagaagaactattagcaacgtatgattcacagagaagggagttaccagcaccggtgacaatgtgggaatggggatggacaaaaagtgcagaaacatggaacggaagagcagcaatgttagcggtgctagcactcttggtgctcgaagtcaccaccggaaaagggtttctgcatcagtggggcatcttgccttcattataataaagataacgtatagtctttttctctatgaaaacccaatccaagaatccaaatgtgagctttcacatgtggaataaggccagctatgttattatgctctcttcttctctgtgtagaaatgtgacatttaaatacttcatactgtatcttcataaaacattaaatgttgacattttaatcggcatgctttttcgcnnnnnnnnnnnnnnnnnnnnnnnnnnnnnnnnnnnnnnn

SEQ ID NO: 96936 - DNA, 654 bp, Arabidopsis thaliana columbia
  unsure (1)..(654): unsure at all n locations
gatgaagtacagatgaatgctccataaaccctactcttcttcttttacctccagcttcgattataccattccttgtttgtgaaggcattttagttggtaaggatgataactggatacagcacgccaagtgacatgttctaatgagctctcgggcattcaagtcatcatcatatagagctgcagcaggacagactcaacattatcttgctcgaagttcattgcctgtcgtaaagaactcgtggggatcaccaccttcacctttcaatgagcttccgagagtgtcaagaggtgtgcctctgtcatatctctcagcctcgtcttctctgcttctgaatggagaacaaggtagtctatctggtacattacctgtgttacctgtccgcaggaaaaactcttttgactccacgggcgtcaaaagatgtaccttcctagcttccgattttcccccgatggcccagaagccacaattggtggtgggagactttgggtttcctgcctttacctaatgccccttgaattgaaactttggggtgaaggcccggtcccgtttaccaattttcacccagtcctagnaggntttgnattnttacccncccnttttttggggcannggaggttcnaaggtggtccnaanggtancttttttanggttct

SEQ ID NO: 96937 - DNA, 387 bp, Arabidopsis thaliana columbia
aagctcaatattctcttctttcattggactcgatcaagtttgagcttagcttttaaaaaaagagagaaacaaatcatgaggacaatggttgatttaggaaagcaaagagatcataactatcaccacatgcaaatcataaccactcctacctccgtggattgttctcgcgaattccgtcaccgacgaacacttcgttcactcatcgaatgcatgattccatactgttgcacttaccaacaacagccataccaagacgacaccctttcagtctcatccacttcatcttcgtcttcatcctcagaccactcttcctcctcccagagtagcagtaccgtatgtggaactttcttcggacaccgtcgtggccgagtcagcttctgccttcaa

SEQ ID NO: 96938 - DNA, 587 bp, Arabidopsis thaliana columbia
  unsure (1)..(587): unsure at all n locations
agctcntatacgactcactatatgggaaagctggttccccctgcaggtcccggcccgaatttcccggtccgaccaccccgtccgcctttttttttgatatatcttcgccatttctcgtcgaaattagggattttgttcattaaatcttcctgatttggaaggtattttcattgtctgcttgaaaaaaattcaatctttgtcggttcattatgagtaattggagaagacaaaaacccagaaacaacaacagcaataattatagtcgtcaacgagggacgacgatgacgcaatcatcatcaaagccacctcttgctaattgcaagatctctgttccagcgtgggagaaggatttttgtgctgtgattggttcagttccatggtggaaagttgtagaggccaagcggtttatgcacatatacgatagagtggtccaatgggacgactcagctggtgaagacgcattcaagaacgctaaatctcgtttctgggcagagataaatggtttaacttgtgacttatctttgcctgatcctgatgtttacattgatgatgttgattgggatgctgaagttgacaatgagttgata

SEQ ID NO: 96939 - DNA, 833 bp, Arabidopsis thaliana columbia
tggccgtttgcggtaccggtccggaattcccgggtcgacccacgcgtccgaacaaaagaaaaaacaaaaaagaagagaaaaatggagaattctcagagtcagggtaaaaacaagaagaagaggctaacacaagatcaagttagacaactggagaagtgcttcactatgaacaagaagcttgagccagatctgaaacttcaactgtcgaaccagcttggtctacctcaaagacaagtcgctgtctggttccaaaacaagcgagccaggttcaagactcagtctcttgaggtccaacactgcactcttcagtccaagcacgaagcagctctctccgacaaggcaaagttagagcatcaagtgcagtttctccaagatgagctgaagagagcaaggaatcagcttgctctgttcacaaatcaagattctcctgttgataattctaatcttggttcttgtgatgaagatcatgatgatcaagtggtggtattcgacgagctttacgcttgctttgttagcaatggacatggatcttcatcaacctcatgggtctgattctgtttcgacgcagacaagattccaatatatatagtcttgtctctgttttgtttcgtttgatctgtttctctttgtctgaatagatttaaaatttgtaattaaagtcattcagacattcactaatacaaagagatgattttcttcaaaaaaaaaaaaaaaaaaggggcgggccgctttaagaaggaacccaagctttaccgtaccgcgttgccatgtgcgaacgtcaattaagcttctttcctaataagggggccaacccttaaaaatttcaaatttca

SEQ ID NO: 96940 - DNA, 808 bp, Arabidopsis thaliana columbia
  unsure (1)..(808): unsure at all n locations
agttatgcaagatttcaggttagagttcttgagtgcagtgataggtttagggagatcttcatcaagagggatgttcatagattcttgctacagtcactgccaaaccgagacacaaacttcatggttctggcaagattctccaattctaaaccgaacgacaatagcaaaagctgttggagattgggtttatgacagaacattgtttcagaagatagattgtccttacccttgtaaccctacttgccaccacagggttttcactcctctagatgctcctccaatttaagtgattctaccatatacagtatagatttattattattttgaaaagaaaatttgcttataaatgattcatttgttagatacatatagtgaaatattcctagggtttagctatagaagatgaaaaagaaaaagagtgtgattaattcttgagtgttgagaataagcaataggagtaattttcttcagcacttgtcttgtgtgctgtttaaattgctctgtttctcttctattctgatgtaaaatgcaaattgttacctttatcctatcaaataaagtataattcttttctcaaaaaaaaaaaaaaaaaaagaaaaaaaaaaaaaaaaaaaaaaaaaaaaaaaaaaaaaaaaaaaaaaaaaaaaaaaaaagggnggacaatataaataatccaaaacttactaacccgttcaagcgatccaataagctttttaaaaatgccacttaatttcaattcatttgccggtctttaacaatttacaacactttaaaaaccctgctttcacccaacttaattctcttgata

SEQ ID NO: 96941 - DNA, 467 bp, Arabidopsis thaliana columbia
  unsure (1)..(467): unsure at all n locations
caaacgnatgcttcaggnttnnccccgatcnggagtttccccttgatccatcccctcgcacatcaggcgagattgcaggtcctggatggggaagatagtagtaacaacgggaagcgtggaccgagtattggacagactgtaagaaacttggttagagaaggtggatggacggcttgttatagaggattgggaccaagatgtgcttcaatgtcaatgtctgcaacaactatgatcactacctacgagttcttgaaacggctttctgctaagaaccatgacgggttttattctaaatcatagtgataacaactgggaatccacatagaagaatcttttatggaaatgtctctagttttcttacttatcttgttctttatctagctcttctgctatttcatttgtttccagtcatatgtaaggaatgtgttaaattcagttgtttttaaataaataaatgttctttccac

SEQ ID NO: 96942 - DNA, 795 bp, Arabidopsis thaliana columbia
  unsure (1)..(795): unsure at all n locations
gcctacctaaaacgaaattgaaattaatgaaatataaaaaaggaggatgtgaaagacccgtatataacgtgatataaaattttatctactcttctctttcacttccatcatatttattttgatttattataatttctatttattattagtattcctcctaaggtacgaatactaaaaaataccttgctaacaactactatgttttataatcatacacaaatttatgaaaaattttttggatctagagtatataaattcgaatttttttataaatacaaaattttactgttattgttatatagaaaagaataatcctgtatataaatataatatataattctgaataaaaaaaaatatatatatattattatattataataatattatattattatgaataatttcttcatcataaaaaaataaaaaattaaaggccataaaaaaaatggatctaaaaagtataaaaagatttgagattaccttaactggaactggcttagttttcattcattgtatgaactaatgaaccaagaggttaagcttttttatttatttattttttctattcttttgactatatgaaaaattcataatcatattgacaacagtgtatggaccaaatataattctctcatagataaatggatctatttatccctgacgcacacacgactgtatttttttctttattctgattgtatctacatatttgcagtacgttcttttttttttgggggggggttgntaactcaacggtagagtacttcgcttttaagtgcgagtagcattctttac

SEQ ID NO: 96943 - DNA, 579 bp, Arabidopsis thaliana columbia
  unsure (1)..(579): unsure at all n locations
ncnngacccacgcgnntccgctcngtctctctacttctctatcatctctatctctatctctcttctccttcttcttcagtttcgatcattcttgaatctgattcttctcgagaaaaaagcgtttcaatttcagaaatttcgactacgattgttgctttgttcaattagaagaggcgaaaaaggatggcgacggttaatgggtacacagggaatactccggcggcgactacaccggcagccaccggatcaaagcaatctgctcctccgactaagaccgtcgatagccactccgttctaaaaaggctgcaatctgaactaatgggattgatgatgggagctgatccggggatatctgcgtttccagaggaaggcaacatattttgctggaaagggccaatttcaggaaggaaagatactgtgttcgaaggaactgagtacagactctcactcaactttctctaacggttaatcccttttaagtctcccaaagntaaagtttggnncatgctgntttccccccanttgnggncctttttggnaanaatttctttnggcattcctcagggtaaatgggcanct

SEQ ID NO: 96944 - DNA, 562 bp, Arabidopsis thaliana columbia
  unsure (1)..(562): unsure at all n locations
gaaatatattgctttgggtgggaaagatggagatgtatcttttgctgaagttaagacaatggaaatctaccactacagtaagaggctgcatcttggtcaatccattgcttcacttgagttctgccccagtgaaagggttatgctgacaacttctagcgaatggggagagatggtgaccaaactcactgtaccaaaggagtggaaagagtggcagatatatgcactgctgttttgcttgtncatggcatcagtgatagctgcatacgtattcttcgagaactcagattcgtttttggaagttacccatggggaaagatccaaaaaaggcccaaaggtttaggccttttttggggggttccccctccacggccttctggggggtccatagtagggggggccctggccctagaaaggttatgtaactttcccctgcttttcctctttccttnctaaacttgtttcaagggnttttttttgttttttccccccccccctnattttctnttanaaaaanccctgtgggtnaattggntttttncaagannaananctnttgnnntta

SEQ ID NO: 96945 - DNA, 755 bp, Arabidopsis thaliana columbia
  unsure (1)..(755): unsure at all n locations
aaacaaccccccccggnaatttccgggtcgacccacgcgtccggaaatatattgctttgggtgggaaagatggagatgtatctgttgctgaagttaagacaatggaaatctaccactactgtaagaggctgcatcttggtcaatccattgcttcacttgagttctgccccagtgaaagggttatgctgacaacttctagcgaatggggagagatggtgaccaaactcactgtaccaaaggagtggaaagagtggcagatatatgcactgctgttttgcttgttcatggcatcagtgatagctgcatacgtattcttcgagaactcagattcgttttggaagttaccaatgggaaaagatcaaaaaagaccaaagattagtctatttggaggttcctcctccacgccttctgaggatcatagtaggtggaacttggacctatagaaagattatgtaactttcctctgctttttcttctttcttccttatcttgttgcagcgtttttttttgtttttttcctttcttctgattttgctctgacaaatacctgttgattaattgatttatttacagacaatttctggccgctccaaaaaaaaaaaaaaaaaaaaggggggttggtttttagaaggattccaagttttacttttcggtgttggnttgggggaaggggggtgaggttttttttttttaagtgggccacccctaaaacttcaaaaatctcactctgcgccccgttttgtctttttttacta

SEQ ID NO: 96946 - DNA, 674 bp, Arabidopsis thaliana columbia
atcattcgatactctctctctctctcaagaaaccaaaactaaggagaggaagaagaagatcctgtccggcgtgtgggtcttcaagaacggagtgataagacttgtggagaaccctaaccagtcaggatccgacacacagaaccgaaggaaagtgatggtctatttaccgacaggagaagtggtctcatcttactcgacgctcgagcagatcctccagagtcttggatgggagagatactttggcggcggcgacacagatctcctccaattccacaaacgctcctccattgatctcatttccctgcctagagatttcaccatattcaactccgttttacatgtacggtatcgtcgtcaagaaccctaattacttccatgtccgagactcccattgattcttcttttgtgtgttggtgtgtgtgttgtgttcggttgttttataatttagagtttgttgggttttgttttatagttgcatgtgcatgttttatttgttttggacgttggaagttgtgttacgtaattctggtttgatgaaagttgagattaagaagggacatgaattagggagaactcaatttcaaaattaattgttctcttccttagcatgattgttctcttcactggttgtaattgaaagatattctctttggctcaaaaaaaaaaaaaaaaaa

SEQ ID NO: 96947 - DNA, 358 bp, Arabidopsis thaliana columbia
  unsure (1)..(358): unsure at all n locations
gaaaaccctcgtcggatcggttaggtttcctctagctcgtttgattgactcggacgggtcaatgattccggaattgatcaactcgctcgagctggttcgtccatcgggtcgaccacaggggaagattcgtttgaagctcgcgatcaaagacagaccaatccctccaccgcagcatcctccgccacgtcctcaatctcaaccactagattactattctgcccctcaaggaaaccattattactncccttaggccttcttctccttcttcttctcaaggaaccgttaacggttcaatctcctaaggggtgcntacagggaatttttaaaagtcaccggtttccggtttcttaagggttta

SEQ ID NO: 96948 - DNA, 679 bp, Arabidopsis thaliana columbia
  unsure (1)..(679): unsure at all n locations
ctttgatacagatatttgagatacgagcgcacgttagctaagaccaccgcgtaagccaccgtctcgtcttgaaacgcaccgtattcatgacttcgtcggagccactcgacctggttgtcaccgtcgtctctgccaagcacctgaagaatgtcaactggcgtaacggtgacctgaaaccctacgttgttctgtatcttgaccaagaccaccctctctccacccgctccgatgattcctcctccatcaaaccggtgtggaacgagcggattactcttcctctcacccgatctgtccacgaatcggtcctcaacatcgaggtttttcattccaattcttcggatctgggcggaaaccctcgtcggatcggttaggtttcctctagctcgtttgattgactcggacgggtcaatgattccggaacttgatcaaactcgcttcgagcttggttcgtccatcgggtcgaccacaaggggaagattcggttttgaagctcgcggtcaaaaggcaaggccaatcccttcacccgaagaattcttnggnanggccctaaatttaaccnctaggtactattttnncccnnaagggaacnctttttattcccctaggnttcttntcttnttctcntaagaacggtnaccgttaatttttagggnnntaaggngttttaagaaccgttcgg

SEQ ID NO: 96949 - DNA, 403 bp, Arabidopsis thaliana columbia
acggacgcgtgggtcggtcgttacggtgtttagagtggagcggtatatggattcaggagctgtggatatggttcacaaatggcaatcggttggtccgaaaactgatccgaatctgtttatgagaatgttgattcaaccagtgacgaggaagaaggtaaagactgtgagagcttctgtggttgctctgtttttaggcagagcagatgaagttgttgctttgcttagtaaggagtttcctgaattgggtttaaagaaggagaattgttcggagatgacttggtttcagtctgctttatggtgggacaatcgtcttaatgctactcaggttgatcctaaagtgtttcttgatcggaatctcgatacctcgagtttcggtaagaggaaatcggattacgtcgcgact

SEQ ID NO: 96950 - DNA, 564 bp, Arabidopsis thaliana columbia
  unsure (1)..(564): unsure at all n locations
ccacttggatctttcttacttactccattatctttttctctctctttccctcatctcattaatggcgagctctacatctttagcgatagttcttcatcaatcttccaatcatgacgaactcttcatgaagcaaactcttcaattctcagaaaccctcaaggatttaaagaatctgcggaaacagttatactcagcagctgagtacttcgaaacatcttatggcaaagcagaacacaaagaaacagtgatagagacgttgaaagagtatgcagcaaaggcagtagtgaacacagtggatcatcttggttctgtctctgacaaattcaactcttttctctctgataactcaactcatttctccaccactcatcttcgtttatcttctcttgaacaaaggatgagactatgcagagattacatggggaagagtggcactcatcagcatttgcttctaatttcaatatcctngncntcataagncgttacttcttcctcaacaagganggaggcaccaagttctntgcaggggggatggcctacaaccgggttnacggggtncttntt

SEQ ID NO: 96951 - DNA, 521 bp, Arabidopsis thaliana columbia
  unsure (1)..(521): unsure at all n locations
ctcactattctgggcaacancatggagtgtattccccaaaatncccatggngtcccattgtcccttttaactacacaggcactccacctaacaatactatggttagtaacgggacaaacttgatggttctaccttataacaccagtgtggagttggtgatgcaagacactagcattcttggcgcagaaagccatcctcttcatcttcatgggttcaacttctttgttgttggccaagggtttgggaatttcgacccgaacaaaggatcctaggaacttcaaccttgttgaccccaatagggagggaccacaagtcgggtgtgccatcttgggtggattgggctgctatttcgattccttgtcagattaaccccaggaggtgtgggtcatgccctctctcttggaagtgcataccagttggggtctgaggatggcttggcttgttcttgatggagataaacctgatccaaaaacttttttcctcctcctggatacttgcccaattcttgaaaatttttcccc

SEQ ID NO: 96952 - DNA, 725 bp, Arabidopsis thaliana columbia
tagcaatggcgtctggagcagtagcagatcatcaaattgaagcggtttcaggaaaaagagtcgcagtcgtaggtgcaggtgtaagtggacttgcggcggcttacaagttgaaatcgaggggtttgaatgtgactgtgtttgaagctgatggaagagtaggtgggaagttgagaagtgttatgcaaaatggtttgatttgggatgaaggagcaaacaccatgactgaggctgagccagaagttgggagtttacttgatgatcttgggcttcgtgagaaaccacgcgtccgaacaatttccaatttcacagaaaaagcggtatattgtgcggaatggtgtacctgtgatgctacctaccaatcccatagagctggtcacaagtagtgtgctctctacccaatctaagtttcaaatcttgttggaaccatttttatggaagaaaaagtcctcaaaagtctcagatgcatctgctgaagaaagtgtaagcgagttctttcaacgccattttggacaagaggttgttgactatctcatcgacccttttgttggtggaacaagtgctgcggaccctgattccctttcaatgaagcattctttcccagatctctgggatgtagagaaaaagtttgggctctattatagtcgggtgcaatcagaacaaaggttgctgctaaaggtggaaaagtagagacacaaagagttctcctgggacaaaaaaggggtcgc

SEQ ID NO: 96953 - DNA, 452 bp, Arabidopsis thaliana columbia
catttctctaccccaccttctgctctgcttccgagagctcagtgtacctcgccatggaaccaaggcaccatggccagcttcgacgatgagcatcgtcattcctcattctcggctaagatttgcaaagtctgtggcgatgaggtcaaagacgatgacaatggtcagacttttgtggcgtgtcacgtgtgcgtttacccggtttgcaaaccttgctatgaatatgagcgtagcaacggtaacaaatgttgccctcaatgcaacactctttacaaacgccacaaaggctctccaaaaatcgccggagatgaagaaaacaatggtcctgatgattcagatgatgagttgaatatcaaatatcgccaggatggttcctccattcaccagaattttgcctatggatcggaaaatggagactacaacagttagcagcaatggcgtccaaatggtcgagc

SEQ ID NO: 96954 - DNA, 1525 bp, Arabidopsis thaliana columbia
  unsure (1)..(1525): unsure at all n locations
aggcaaaagtagtaaataaggaagaaacaggaggggcgttttcgggagaagaaggaggaatatgagtgtgagttgttgttgtaggaatctgggcaagacaataaaaaaggcaataccttcacatcatttgcatctgagaagtcttggtgggagtctctatcgtcgtcgtatccaaagctcttcaatggagaccgatctcaagtcaacctttctcaacgtttattctgttctcaagtctgaccttcttcatgacccttccttcgaattcaccaatgaatctcgtctctgggttgatcggatgctggactacaatgtacgtggagggaaactcaatcggggtctctctgttgttgacagtttcaaacttttgaagcaaggcaatgatttgactgagcaagaggttttcctctcttgtgctctcggttggtgcattgaatggctccaagcttatttccttgtgcttgatgatattatggataactctgtcactcgccgtggtcaaccttgctggttcagagttcctcaggttggtatggttgccatcaatgatgggattctacttcgcaatcacatccacaggattctcaaaaagcatttccgtgataagccttactatgttgaccttgttgatttgtttaatgaggttgagttgcaaacagcttgtggccagatgatagatttgatcaccacctttgaaggagaaaaggatttggccaagtactcattgtcaatccaccgtcgtattgtccagcacaaaacggcttattactcattttatctccctgttgcttgtgcgttgcttatggcgggcgaaaatttggaaaaccatattgacgtgaaaaatgttcttgttgacatgggaatctacttccaagtgcaggatgattatctggattgttttgctgatcccgagacgcttggcaagataggaacagatatagaagatttcaaatgctcgtggttggtggttaaggcattagagcgctgcagcgaagaacaaactaagatattatatgagaactatggtaaacccgacccatcgaacgttgctaaagtgaaggatctctacaaagagctggatcttgagggagttttcatggagtatgagagcaaaagctacgagaagctgactggagcgattgagggacaccaaagtaaagcaatccaagcagtgctaaaatccttcttggctaagatctacaagaggcagaagtagtagagacagacaaacataagtctcagccctcaaaaatttcctgttatgtctttgattcttggttggtgatttgtgtaattctgttaagtgctctgattttcagggggaataataaacctgcctcacttttattcttgtgttacaattgtatttgtttcatgactatgatcttcttctttcatcagttatatgaatttgagattcttgttggttgnnnnnnnnnnnnnnnnnnnnnnnnnnnnnnnnnnnnnnnnnnnnnnnnnnnnnnnnnnnnnnnnnnnnnnnnnnnnnnnnnnnnnnnnnnnnnnn

SEQ ID NO: 96955 - DNA, 703 bp, Arabidopsis thaliana columbia
aagaaattgtcagtgcatatgaactgcttgatcactctgattttggattctgtttcagcgatgtggtggtcaagttacttccagaaggaaaatttgatccaaatgcagacacaatcgtcgctacagaggcgaaacacctacttacagagagtgactacagtggcgcatattttttgtcaagtattggtgttgttacaggttttaaaaatggttccgtgaaggtgaaatgggccaatggttctactagcaaggttgcaccatgtgaaatttggaaaatggaaaggtctgaatattccaactctagcactgtaagttcggaaggcagtgttcaagatctaagtcagaagattagtcaatcggatgaagcatcttcaaaccatcaggaaacgggtctggtgaagctctacagtgttggtgaaagttgcaacgagaacattccggaatgtagttcatttttccttccaaaagctgccattggatttatcacaaaccttgcatcaagcctttttggttatcagggttccacttcggttataagttcacattcacgttgcaatgattctgaagatcaaagtgactctgaggtccttgttcaagaaacagcagaatcatatgacaactctgaaacaaattcaggtgaagtggatatgaccaccacgatggtcaacatacctatagaaggaaaaggaattaacaagacact

SEQ ID NO: 96956 - DNA, 439 bp, Arabidopsis thaliana columbia
ggcagcatcatcagtactactctcgtgcttcaatttccatcatcaaccaaaccttctccatggctgcaactactcatctaaccattcactcctcagattcaacttttcaaccccaaaacctctcctgatctcctcacggagctgctcacgacgattcagagtcttgtcagagaccatcaccgtcaaattggaagaggaggagaaggatgatggtgcaagtgctgttcttgatcctcctgccgccgttaacactaagctctacttcggtaacttgccttacaatgttgacagtgcaactctggctcaaatcattcaagatttcgctaaccctgagctcggtgaggttctttacaacagagataccggacagagtcgtggattcgccttcgttaccatgagcaatgtcgaagattgcaacatcatcatcgataacctcgat

SEQ ID NO: 96957 - DNA, 773 bp, Arabidopsis thaliana columbia
  unsure (1)..(773): unsure at all n locations
aatttatccaaaattaaaatgcgtacaagcaaagcttcagtgacccaaacatggctgctttacacacagctttgtctttggaaagatctcataatccgctatgtccgtcagatcataagaagagcaaaatcgatgcttttcagtcaaaacatggtcgctgattccgccgagatcagtgttatcgatgtcaagtctcatctctccgttgcgaaagatcctagtaactttcagattgccgaaattcgaattcatgattcaatttgtattgatattccgagctctgaagaaacgcctcttttagaatcgatcaagagttgttctgcaactactattgaagagcatgttactgagtttgtaccaaatataagctcagggagttatgcagataagggtgactaccgggagtacatggaagatgaacacatatgcatagacgacctttcagatcatcttgggtcttccttttacagatttccggtgcctatggctttctacggtgtgtttnatggccatggtggatctnacgcatcacagtatataaaagagaatgctatgagcttgtnctttgaagatgctgtttttcgacaatcgccctctgttgtggactctcttttcttgaaagaactggagacatctcaccgggaagcttataggctttctgatcttgcaatgngaggncggaaagaatagttagtaagttcgtgcggnaacaaaccnganttnnntgcnccttggaaatcggaaggccatttaatgggcnncnaatgtttggg

SEQ ID NO: 96958 - DNA, 706 bp, Arabidopsis thaliana columbia
  unsure (1)..(706): unsure at all n locations
gaagatgtttgcagcttcttgtctcgcatcgtgttgngctgcttgtgcctgcgatgcttgccgtactgtggtttctgggatcagcagacgttctgctagaattgcttactgtggtctctttgcactttccttaatcgtttcatggattctccgtgaagttgctgctcctctcatggagaagctcccttggattaaccattttcacaagacacctgatcgtgaatggtttgagactgatgctgtgttgcgtgtcagcttagggaatttcttgtttttctctattctatcggttatgatgatcggtgtgaaaaatcagaaagacccttcgtggatggtatacaccatggggggttggatgatgaaaataatctgttggtgcattttagtcatctttatgttcttccttccaaatgaaatcatcagtttctatgagtcgatgtcaaagtttggtgctggattttccctgcttgttcaagttgtacttcttttggattttgttcatggatggaatgacacatgggttggctacgncgggcagttctgggatgctgcttttccccgtggttccccttgtatggtaacttggcaacattcggcttctctggggttctnttccactgggttantccatctnggcangattntgggctcaanaccttnttcatatcatgactttganatttggattcggctttgccattntagg

SEQ ID NO: 96959 - DNA, 530 bp, Arabidopsis thaliana columbia
ttaggtgcactatagaagagctatgacgtcgcatgcacgcgtacgtaagctcggaattcggctcgagatcaagtcatggagatttactttttatctagaggctcctctgttggatactggcgtggcgacattcggtacctgatggatgatgttcaagctcttaaacctactgtgttttgcggtgttccacgagtttacgacaaactatatgccggtataatgcaaaaaatatcagctagtggcttgatacgcaagaaactgtttgattttgcttataactacaaattgggaaatatgagaaaaggattctctcaagaagaagcttctcctcgtctagacagacttatgttcgataagataaaagaagcattaggaggaagagctcatatgttgttatcaggagcagcgcctctacctcgtcatgtagaggagttcttgagaatcattcctgcctctaatctctctcaagggtatggattgactgagagttgtgggggaagcttcacgaccttagccggagtattttctat

SEQ ID NO: 96960 - DNA, 498 bp, Arabidopsis thaliana columbia
gagtcttggtgaagtgataaaagcaggagcaacaactctcaacatacctgatactgttggtataactttgcctagtgagtttggtcaactgattactgatttaaaggccaatactccggggattgttaatgttgtcatctcaacacattgtcagaatgatcttggactctctacggccaacactttatctggggcacatgcaggtgcgaggcagatggaagtgacgatcaatggaattggtgaaagagctggaaacgcttcactggaagaggttgtgatggccataaaatgccgtggagatcatgtatttaggaggtctatttaccggaattgatactcggcacattgttatgacaagcaagatggtagaggagtacactgggatgcagacacaacctcataaggctattgtaggagcgaatgcctttgcgcatgatagtggaattcaccaggatggaatgctgtaacacaagggtacatatgaaattatttgtcccg

SEQ ID NO: 96961 - DNA, 650 bp, Arabidopsis thaliana columbia
  unsure (1)..(650): unsure at all n locations
gaactctgtttcttcccgcactacgtcgttccttccatgcgaacaccgctctttgtcatcaatgccgcttttgattcttggcagatcaagaacgttttggctccaactgctgttgataagggaaaagagtggaagaattgtaagcttgatcttaagaaatgtagtgccgctcagctcaaaaccgtccaagggtttagagatcagatgatgcgagcattgtcaccggttcacagtacaccgtctagaggattgttcttagactcgtgtcacgctcattgccaaggaggaagcgccgcctcttggtccggtgacaaaggtccccaagtcgccaatacgagaattgcgaaagcagtcggaaactggttttatggccggagtgcatttcagaagatagattgtccgtcgccgacttgtaatcctacttgtcctgctatctctactgaagactagaatcatctctaaatgttcaattttttttaatttgaaattgaaagagctcgcaaacattttggatttgttttccaaatcggatcaataataatcactgcaatttgaataaaaaaaaaaaaaataatttgtattnnnnnnnnnnnnnnnnnnnnnnnnnnnnnnnnnnnnnnnnnnnnnnnnnnnnnnnnnnnnnnnnnnnn

SEQ ID NO: 96962 - DNA, 612 bp, Arabidopsis thaliana columbia
  unsure (1)..(612): unsure at all n locations
nnnnnnnnnnnnnnnnnnnnnnnnnnnnnnnnnnnnnnnnnnnnnnnnnnnnnnnnnnnnnnnnnnnnnnnccacgcgtccgcagaaacattttgatgttaagtttttgaaaaaatcgcgagtttctggatctgtatactttcttagaggagattttgatagcatcgtttacaggagtaagatccgggaatggcaatggaggttggggagatgtctcagccggaggcgacggcgagtcttctctctctcgcttccgccactcagcaaccgtacgtctccgagctcctctctttcactcttgatcgtctccacaaggaaccggagctgcttcgagtggatgcggagcggattcagaggcaaatgcaagaggtggctgttggaaattaccgcgcgtttatcaccgctgctgatgctttgcttgcgatccgtcaggaagtttcttccattgataagcatctcgagtctctgattggcgaagtcccaaaactaacgtctggttgcactgaatttatcgattctgctgagaatattttggagaagaggaagatgaaccaagcattgctggcaaatcacagcactcttcttgacttgcttgagattcctcagcttatg

SEQ ID NO: 96963 - DNA, 693 bp, Arabidopsis thaliana columbia
  unsure (1)..(693): unsure at all n locations
gacgcgtaggacgtcgcaacaccctatagtgagtcgtattaaccacagaaggggacctcaaagaaaacatcgaaatcttagagaagaagaaaagaaaaagaagagaaatgacagagaagaaagagatggaagtggtgaaagggctcaacgtggagagatacatgggccgttggtacgagattgcttctttcccatcaaggtttcagccaaagaacggcgtcgacactcgcgccacctacacccttaaccccgacggtaccatacacgtcttgaacgaaacgtggagcaacgggaagaggggttttatcgaaggcagcgcctataaggccgatcctaaaagcgacgaagccaagctcaaagtcaagttctatgtccctcctttcctcccaatcattcccgtcaccggagactacttgggtgctctacatcgatccctgactacccagcacgggtctcattggccagccttccaggggttatctcttggatatttgagcagggccggcgcaatttggaggatgggccggtttaggcaacttttttggagnaggcaatttgtgggaaggtttttttcatttagnaaagntttnnaaaggcttctttaaaggtgcaaaaccacctnngtccaaaaattccccttaaggctttaagggggtttttgggggtnaaaattttttttggaaatgnttnttt

SEQ ID NO: 96964 - DNA, 768 bp, Arabidopsis thaliana columbia
  unsure (1)..(768): unsure at all n locations
ctggtacgcctgcaggtaccggtccggaattcccgggtcgacccacgcgtccgaagataagaaaaagaagagaaatgacagagaagaaagagatggaagtggtgaaagggctcaacgtggagagatacatgggccgttggtacgagattgcttctttcccatcaaggtttcagccaaagaacggcgtcgacactcgcgccacctacacccttaaccccgacggtaccatacacgtcttgaacgaaacgtggagcaacgggaagaggggttttatcgaaggcagcgcctataaggccgatcctaaaagcgacgaagccaagctcaaagtcaagttctatgtccctcctttcctcccaatcattcccgtcaccggagactactgggtgctctacatcgatcctgactaccagcacgctctcattggccagccttccaggagttatctctggatattgagcaggacggcgcaaatggaggaagagacgtataagcagctggtggagaaggcagtggaggaaggttatgacatcagccagcctcacaagactcctcagagtgacacaccacctgagtccaacactggcccctgaaggctccaagggcgtttggtggttcaaaatcttctttttcggcaaataggttncaangggaacacaaaggnntttgtttcaccntctttgatcccttttggcctggggaaantnactnccccccttttngctnactnaangttattttcccaaaaacngggtttttggnttttttngg

SEQ ID NO: 96965 - DNA, 813 bp, Arabidopsis thaliana columbia
actatacggtaagctggtacgcctgcaggtaccggtccggaattcccgggtcgacccacgcgtccgatcgaaatcttagagaagaagaaaagaaaaagaagagaaatgacagagaagaaagagatggaagtggtgaaagggctcaacgtggagagatacatgggccgttggtacgagattgcttctttcccatcaaggtttcagccaaagaacggcgtcgacactcgcgccacctacacccttaaccccgacggtaccatacacgtcttgaacgaaacgtggagcaacgggaagaggggttttatcgaaggcagcgcctataaggccgatcctaaaagcgacgaagccaagctcaaagtcaagttctatgtccctcctttcctcccaatcattcccgtcaccggagactactgggtgctctacatcgatcctgactaccagcacgctctcattggccagccttccaggagttatctctggatattgagcaggacggcgcaaatggaggaagagacgtataagcagctggtggagaaggcagtggaggaaggttatgacatcagcaagcttcacaagactcctcagagtgacacaccacctgagtccaacactgcccctgaagactccaagggcgtttggtggttcaaatctctcttcggcaaatagattacacggcacacaaagactttgtttcacctctttgatccttttgtctgtgtaatatactacccccctttgtctactctaaaaaaaaaaaaaaaaaaaaaagggcggccgctctagaggatccaagcttacgtacgcgtgcatgcg

SEQ ID NO: 96966 - DNA, 874 bp, Arabidopsis thaliana columbia
  unsure (1)..(874): unsure at all n locations
gattttccnnnnnnnnnnnnnnnnnnncnnnnnnctatacggttagctggtacgcctgcaggtaccggtccggaaatcacagatcgaaatcttagagaagaagaaaagaaaaagaagagaaatgacagagaagaaagagatggaagtggtgaaagggctcaacgtggagagatacatgggccgttggtacgagattgcttctttcccatcaaggtttcagccaaagaacggcgtcgacactcgcgccacctacacccttaaccccgacggtaccatacacgtcttgaacgaaacgtggagcaacgggaagaggggttttatcgaaggcagcgcctataaggccgatcctaaaagcgacgaagccaagctcaaagtcaagttctatgtccctcctttcctcccaatcattcccgtcaccggagactactgggtgctctacatcgatcctgactaccagcacgctctcattggccagccttccaggagttatctctggatattgagcaggacggcgcaaatggaggaagagacgtataagcagctggtggagaaggcagtggaggaaggttatgacatcagcaagcttcacaagactcctcagagtgacacaccacctgagtccaacactgcccctgaagactccaagggcgtttggtggttcaaatctctcttcggcaaatagattacacggcacacaaagactttgtttcacctctttgatccttttgtctgtgtaatatactaccccctttgtctactctagttatcttccatcatctgcttttgtctatttacgacatcttcatatagttatgcaaagtcgtctcttttaccataaggaagcgcacacaaattcaatcagatccaatctggg

SEQ ID NO: 96967 - DNA, 566 bp, Arabidopsis thaliana columbia
  unsure (1)..(566): unsure at all n locations
cggacgcgtgggttacctgctggagatgttctataatctgcattagcgggagggcttgcctctgctctctccacttccttaatgcatccgattgacacaatcaagacgtgtgcaagcatcaaccttgtcatttcctgaagtaatagccaagcttccagagattggtgtccggggagtgtataggggttctattccagcaattcttggacaattttcaagccatggcctgcggacaggaatattcgaagcaagcaaacttgtgttgatcaattttgctcccaatctcccagaaattcaggttcaatcgattgcatcattctgcagcacactattaggcacagctgtgcgggattccatgtgaggtgctgaagcaacggttgcaggctggcatgtttaacaatgtaggggaagccattntcgggacgtggaagcaagatggtccaagtggctttttccgtgggacaggcgcaactttttnncgcgaagttccactatacgntgttggcatnggnctgtntgcagggtcccanaaagatggtggcggcaagttcttgggaagagaactt

SEQ ID NO: 96968 - DNA, 540 bp, Arabidopsis thaliana columbia
aaaaaaacactactctttccgtcttcttctctctactctattctaattctaaagagagagagaaaagctatggatggatatgaagctactaggattgtgctctctagaatccaaagcttagaccctgaaaacgcatcaaagatcatgggtcttctccttcttcaagatcacggtgagaaagagatgataaggctagcttttggtccagagactcttgttcactctgttatagtgaaagccaagaaagagttaggtctcatgaactgttcaaggtctccgtggagtcatcaagatgagttgattagccctaagaacaaccgtggctcttcactcaatccagcttctttgcccttttacgctaatggaggaagatcttctagggatttaaccaacgatttcgagctcatggatgttattgaacccccagaaggacttgattttttgggctccgtgcatgcgagaagcggtagctgcgttttggacggtttagggatgggtggtgattctgatttagggttggaaggtgtgccctgttcttac

SEQ ID NO: 96969 - DNA, 793 bp, Arabidopsis thaliana columbia
  unsure (1)..(793): unsure at all n locations
accacgcgtccgccgagagaaaccattttctgagagcacactttcgttgacttctctttaaccaatgtctttaaccacagtccctacgctcgccatcagatccggaccatccggtcatcactcgatgccggttcttggttttggaaccgccgcttctccgctaccggaaccaacgatgctgaaagagacggtgattgaggctattaagcttggttatcgccatttcgacacctctccaaggtaccaaacggaggagccgatcggcgaagctttagcggaggcggtttcactcggcttagttcgatctcgatctgaattctttgtcactaccaaactttggtgtgctgatgctcatggtggtctcgtcgtaccggcgatcaaacggagttttgaaaaaccttaaactggactatcttgatctttatataattccattgggccggttagctcgaaacctggtaaatacaagtttcctattgatgaagaatgattttatgccaatggatttcgaagttagtgttggtctggaaaatggaggagtgtcagagacttgggctcgcaaaatgcataggagtaagcaatttttcatgtaagaagcttcaacacatactctctatcgcgacaatcccgcctagcgtcaatcaagttgagatgagtccaatatggcaacaaagaaagctaagggagctttgtagatcgaacgacattgttgtcacagcgtactcggtgttgggatctagangagctttttggggaactcncanaattatggaatctgatgttctcaaagaaa

SEQ ID NO: 96970 - DNA, 643 bp, Arabidopsis thaliana columbia
  unsure (1)..(643): unsure at all n locations
actagattgcttgaaccgtgcgctttttcaggctgaatctcgatttcctaaggatggttgagcaagaaatggaagaaagaccggatttagtatccgttggatcttgtgttttggtcactctcctggttgggaaggatctatacgtccttaatcttggtgatagcagagctgttctagcgacctacaatggtaataagaagctgcaagctgttcagctcacagaggatcatacagttgataacgaagtcgaagaagctagactcttaagtgagcatcttgatgatcctaagatcgttattggtgggaaaatcaaaggaaagcttaaagttactcgtgctctcggagttggttacttgaagaaggagaaactaaatgatgcactcatggggatcctccgcgttccgtaaccttttgagcccgccttatggttccagtgggacccatccgatgagagttcacaagataaccgggatccaggttcactttggtaanagttgncaagcggatngggtttggtttgaattcccttccagncaacgaaggaanccganttgggggcggnccantncccttcggttncaaggnaaaccctcctgggggntcccancnaaagtttcctnncttaancgccttggaagcnaaa

SEQ ID NO: 96971 - DNA, 837 bp, Arabidopsis thaliana columbia
  unsure (1)..(837): unsure at all n locations
aaaagaccgggggcgttccacgcgtgcnnaaaanaanaactctnttttcttttacgagaagaaaacacccnngggcagcttnatacaaggtggttgcaccccaaacacttatnccnnaatataatccattacccaatatatcaattattccacgaggccaagctgatggactcacctttttcgctcctaacaaaaagaggctagagtccggattgtataacataagctaccttgagaaccaaatggctgctgcacttggtggaagggttacagaagacgtgatctttgtagacgagaatgtgacaaccgtaacatcaaatgatttcatgcaagtgtcgcgggtggctcgccaaatggttgagagatttgggttcagcaaaaagattggacaagttgctgttggtggccctggtggaaatcccttcatgggtcaacaaatgtcatcacagaaagattactcaatggcaactgcggatattgtagatgctgaggtgcgagagttagttgagaaggcatacaagagagcaacggagatcataacaactcatattgatatcctacacaagcttgcacagctcctgatcgagaaagaaactgttgncggtgaagagttcttgagtctctttattgacggccaagctgagttgtatatttcttgattcctcaaagttgccattgcttagtgcttacaataccataagctaataagtatattcgtgttcatatgtgtcaccgattcagtactcaccaattcagtataaaaaaaaaaaaaaagggcgaccgctctagaggatccaagcttacgtacgcgtggatgcgacgtcntagtcttctata

SEQ ID NO: 96972 - DNA, 1785 bp, Arabidopsis thaliana columbia
  unsure (1)..(1785): unsure at all n locations
cagctannnnnnnnnnnnnnnnnnnnnnnnnnnnnnnnnnnnnnnnnnnnnnnnnnnnnnnnnnnnnnnnnnnccacgcgtccgcgaaactgtcaccaatgatgagattgctgctgacttgaaggagcatgtgatcaagcctgttatccctgctaagtaccttgacgataacaccatctttcacttgaacccatctggtcgttttgtcatcggagggcctcatggtgatgctggacttacagggaggaagatcatcattgacacttatggtggttggggtgctcatggtggaggtgccttctcaggaaaggacccaaccaaggttgacagaagcggtgcctatatcgtgaggcaggctgcaaagagcgtggtagcagcaggactcgcacgccgttgtatcgtgcaggtatcatacgccattggtgtccctgagccgctctcagtgtttgttgacacctacaagaccgggaccatcccagacaaggatatccttgtgttgatcaaggaagcatttgacttcaggccgggaatgatggccattaaccttgaccttaagaggggaggtaacttcaggttccagaaaaccgctgcgtatggccatttcgggcgtgatgaccctgacttcacttgggaggttgtcaagccgctcaagccaaaggcctagacagaaacaaagctggcaattgcaagaactgagttgagtcactccccaactactgggaacttatcattataccattattattgcaaatgactgaataaagaaagcttctgcgttgtcaccattcacatttgttttcgcgaacacaggccagcggttcatatatctggtaatcgaagattgcaaatgaaagatttgagttttatgttttgaatttttgcctcttttttatttttcctttttcttttccctcttaatctcttgtattgtaatttttgattgtgtaaccaagaaatccatcctcgtgatgtttttttttttttataagaaaatatcatgcaagttagaaatccaaaaaaaaaagggcggccgctcgcgatctagaactagttgcacttatgccggagtatgatccagtggccaagatatcgattattccacgtggccaagctggtgggctcacctttttcgctcctagcgaagagaggctagagtccggattgtatagcagaagctaccttgagaaccaaatggctgttgcacttggtggaagggttgcacaagaggtgatctttggagaccagaatgtgacaaccggagcatcaaatgatttcatgccagtgtcgcgggtggctcgccaaatggttgagagattcgggttcagcaaaaagattggacaagttgcagttggtggagcaggaggaaaccctttcttgggtcaaagtatgtcatcgcagaaggattactcgatggcaacagcggatgtggttgatgcggaagtgagagagctcgttgagaaggcgtacgtgagagcgaaagagatcataacaacacaaattgatatcctacacaagcttgcacagctccttattgagaaagaaactgtggatggagaagagttcatgagtcttttcattgacggacaagccgagttatatgtttcttaaaatcaactaattggcttgtaataataccaattagcttcgatctatacatactgtatgttaatatacattgacatgttcagagacttttcttttaaaaaaaaaaaaaaaaaaagggcggccgctctagaggatccaagcttacgtacgcgtgcatgcgacgtcaagctgttatagagt

SEQ ID NO: 96973 - DNA, 2715 bp, Arabidopsis thaliana columbia
  unsure (1)..(2715): unsure at all n locations
ctcnnnnnnnnnnnnnnnnnnnnnnnnnnnnnnnnnnnnnnnnnnnnnnnnnnnnnnnnnnnnnnnccacgcgttcggccacgcgttcggttaacgagtggatatgagggagcaaacgtagaaaggactcgagaagtcatggcttctgcttaatctcctcttccttaaaaaccagaagatcctttgttccacgtttctcgtttgtagcttcttctctctcagaattcaattcgaattttgacaagtcttgacgaagaagaagaaacagagctgcttcaatggcttctaactcattactacgttcttcttcaaatttcttcttaggatcccatatcataatctcatctcccacccctaaaaccaccagaaaaccctctttccctttctccttcgtctcccgtgctaaataccaaatcactcgatcgtctcaagacgaaaattcgccaaatggtaaacccaattcgccattctcgtcgcaagtagccttagcagctattctactatcttcaatttcatcttcgccgctagctttagctgtagtggacgaaccagcttctccgtctgtcgttatagaatctcaagctgtgaagccatcgacgccatcgccattgttcattcagaacgagatacttaaggctcctagtcctaaatcatcggatctcccagaaggatcacagtggcgatacagcgagtttcttaacgctgtgaagaaagggaaagtcgagagagttagattcagcaaagatggttctgttgttcagcttactgccgtcgacaatcgccgtgcttcagtcatcgtccctaacgaccctgaccttattgatatcttggctatgaacggagttgatatatccgtctctgaaggagaatcctcaggcaatgacttgttcactgtcattggaaacttgattttcccgcttttggcctttggtggactcttcttgcttttcaggcgagctcagggaggccctggtggtggtcctggtggcttgggtggtcctatggatttcggacgttctaaatccaagttccaggaagtgcctgagactggtgtatcatttgcagatgttgctggggctgatcaagctaagttggagttacaggaagttgtggatttcttgaagaatcctgataagtacacagccttgggtgctaagattcctaaagggtgtttacttgttggaccgcctggtacgggtaagacactcctggctagggcggtggctggggaagctggagtgccgttcttctcttcgcggcctcaggagttcgtagagctttttgtgggtgtgggtgcatcgagagttagggatttgttcgagaaggctaagtctaaagccccttgtattgtattcattgatgagattgacgctgtgggtaggcagagaggagctgggatgggaggaggaaatgatgagagagaacagactattaatcagctgttgacagagatggatggattttctggcaactctggtgtgatagttttggcagctacgaataggccggacgttcttgattcggctttgttgaggcctggaaggtttgatcgacaggtcacggtggataggcctgatgtggctggcagagtcaagattcttcaggttcattctagggggaaggcactcggtaaagatgtggactttgacaaggttgccagaaggacccctggtttcacgggtgctgacttacaaaacctgatgaatgaagcggcgattcttgcggctaggcgtgacgttaaggaaataagcaaggatgaaatctctgatgctcttgagaggatcattgctggacctgagaagaagaatgcagttgtctctgaagagaagaagagacttgttgcataccatgaggctggtcatgctctagtgggtgctcttatgccagaatatgatccggttgcaaagatttctatcattcctcgtggccaagctggtgggctcactttttttgctccaagcgaagaaagacttgagtctggattgtacagtaggagctaccttgagaatcaaatggctgttgcacttggcggaagggttgcagaggaggtgatctttggggatgagaatgtgacgactggagcatcaaatgatttcatgcaggtgtctcgtgtggcacgtcaaatgattgagagatttgggttcagcaaaaagattggacaagttgctgttggtggccctggtggaaatcccttcatgggtcaacaaatgtcatcacagaaagattactcaatggcaactgcggatattgtagatgctgaggtgcgagagttagttgagaaggcatacaagagagcaacggagatcataacaactcatattgatatcctacacaagcttgcacagctcctgatcgagaaagaaactgttgacggtgaagagttcatgagtctctttattgacggttaagctgagttgtatatttcttgattccttaaagttgccattgcttagtgcttacaataccataagctaataagtatattcgtgttcatatgtgtccccgattcagtactccccaattcagtatatttgtgtatattccgttgttttagtgaatctaaatatactttgtaatgcaatgcaatttgtttannnnnnnnnnnnnnnnnnnnnnnnnnnnnnnnnnnnnnnnnnnnnnnnnnnnnnnnnnnnnnnnnnnnnnnnnnnnnnnnnnnnnnnnnnnnnnnnnnnnnnnnnnnnnnnnnnnnnnnnn

SEQ ID NO: 96974 - DNA, 581 bp, Arabidopsis thaliana columbia
  unsure (1)..(581): unsure at all n locations
aactgacttagctaatttccttcttcattatatcataattccaaatttcgcaaactaattttttcactttcttcttcgttgatctctctgaaagcttctcttcttcttctcaccatgtctggttatcctccatcaagccaaggttacggttacggcggtaatccaccacctcctcagccaccgtacggatcaaccggcaataaccctcctccgtacggatcatccggcagcaatcctcctcctccgtacggatcatcagcctcctcaccgtacgcagttccctacggagctcagcccgctccttacggtgcaccaccgtcagcaccgtacgcgtctcttccaggagaccataataagccgcacaaagagaaacctcacggcgcctcctacggatcttcatctcccggtggntacgggtgctcatccatcgtntggaccttccgactacggtgggtacggaggagcgcgaagaagtntgncatggaggaggtacggagagngcgagnagttttggcatgngggggtnaggagtctcttcgaagnttttntnaagccctttntgttttggtcctggggttttc

SEQ ID NO: 96975 - DNA, 930 bp, Arabidopsis thaliana columbia
  unsure (1)..(930): unsure at all n locations
agctannnnnnnnnnnnnnnnnnnnnnnnnnnnnnnnnnnnnnnnnnnnnnnnacggacgcgtgggcggtcgcgtgggttacctttaacaaaaaaaaaatggcaagcgcgaatccagaaaccgccaaacccacgcctgcaacggtggacatggctaatccagaggagcttaagaaagttttcgaccagtttgactccaacggcgacggcaagatctcagtcctcgaactcggcggtgtgtttaaggctatggggacttcctacacagagacggaactcaaccgcgtgctcgaagaagtcgatacagatcgcgacggttacatcaacctcgacgaattctcaactctctgtcgctcgtcttcctccgccgcagagatccgtgacgctttcgatctctacgatcaggacaaaaacggactgatctccgcctctgagcttcaccaggtgcttaaccgtctcgggatgtcttgctctgttgaagactgtactcgtatgatcggacctgtggatgctgacggcgatgggaatgttaatttcgaagagtttcagaagatgatgacgtcgtcttctctcctcaacagcaatggatccgccgctcctccttcgacctagggagttttccagatttcagatctggatttcgggaataagaataactatggaaattaggtactcttttcttcttaaatgtgatcaatcatcatcagtctaacttcaatcggatctcttttcattcatacatggttgagatttagatctgaatatggatatatatcgtttgctctccttgttcaaaacaaatttggtttctaatttcttactccgctcncggggtnattgnncaagtttcganctttntttnnnnnnnnnnnnnnnnnnnnnnnnnnnnnnnnnnnnnnnnnnnnnnnnnnnnnnnnnnnnnnnnnnnnnn

SEQ ID NO: 96976 - DNA, 1279 bp, Arabidopsis thaliana columbia
  unsure (1)..(1279): unsure at all n locations
atgggagacatgttctcgcaagctacgcccaactccttgacgtcatcatcatctcatccagatctcacacctttaacaggagcaattgagattgttcctccgcctcagaaaaagtttgagccaaaatcatcagtctgggcagacacgttgagcagggggcttgttaactttaacatatctggatctaaaacaaatccattggcagacataggagttgacttcgaggcgatcaacaggagagagaaacggctggagaaacaaacaaacacaccagcaacatcgactatcaatatgggtaaagccatgggatcaggcactggcttagggcgttctggtgcaactgctatgagaccctccacctaatccaaatgacaggctctggcatgcccatgggcggaggatgggtgttggtagctacggaggtatgaaccagaaccaacccatgggtatgggtatgggggccggaatgaaccaaaaccaaccgatgggtatgggaatgggacccggcatgaacatgaacatgaacatgggaggatatggccaaggctatccgatgcaaccacaaaacccagggatggtacctagcccaaacatgcctggcaataactacaatccgatgatgggtcaaggtggttacaaccctcaacaatcctatggtggtggataccggtaagatcaagccaaacatgatgcacttgacttcattcgtgtaatcaagaatacgctcgcctgtgctttttctttactctgggatatgtaatatcagtcgataaaagtactcaggttacattattcatccaggcaacacggctccacgaattttcttctctgtttgttcttgccttactcgtcactcatcattcatttttatttttttctggtttggaccaaattgagagcttgttgtgaaatttgtaccagtgtgagagtggcaaaccttgctcgggtctgccctttttttgttatatgcatataatttgatatatacacattcacttctatttctttattttgaagatgtgtaatacatttctcattcacggaacaaataaaatctttacagccgaaaaaaaataaaaaaaaaaaaaaaaaaaaaaaatataaaaaaaattattaaaaaaattaaaaaaaaaaaaaaaaaaaaaaatataaaaaaattatattaaaataaaattattataaantttaattttttttaaatatataaaaaatatattatatattattttttatttattattatgtgtggtggttttataaagaataaaaattttttttt

SEQ ID NO: 96977 - DNA, 740 bp, Arabidopsis thaliana columbia
aataggtttgacagggattcaaccccagtcccggtttttagtaaccgagaggcatcagaaagagtcaatgatcgagccaattcgatccttaaccggttgatgacatctaggggagttagatcagagcagaaccaggctagtgctgcagcagcagccattgtcgcagcatcagaggatattgatctaaatccaaacattgctcctgatcttgaaggagaaagcaacacgagattccatcctctcttgatcaggagacagttacagtcgcaccgagttgcaaggatctcgactttcacttctgcgttgagttcagctgagaggcttgtggatgcgtattttaggactcatccgttggggaggaaccaccaagagcaaaaccatcatgctcctgttgtggttgatgatagagactcattctcaagcattgcagctgttataaactctgagagtcaagtggatactgcagttgagatcgattctatggctctttcgacatcgtcctcgaggagaaggaatgagaatggttcgagggtttctgatgtagacagtgcagattctcgtccgcctaggagaaggagatttacttgagaaacataaataagaaaagctttcaacctggaagctgacgatgatgatgattaagaagaagataagaagaagattgtgtaactttatttttcttgtgttgctgtgttgtagtttgtttttgtaaatatccccacagggatggttttttttaa

SEQ ID NO: 96978 - DNA, 527 bp, Arabidopsis thaliana columbia
  unsure (1)..(527): unsure at all n locations
nnnnnnnnnnnnnnnnnnnnnnnnnnnnnnnnnnnnnnnnnnnnnnnnnnnnnnnnnnnnnnnnnnnnnnnnnnnnnnnnnnnccacgcgtccgctgaatcttcttctccgatcttcaaacattccggccgccaccgagttcttagccgttacaatgtcttcctctatgaacgtagcgacgatgcaagcactgactttctctcgccggcttctcccttctgttgcttctcgttatctctcttcttcttctgtgaccgttactggatactccggtagaagctcggcttacgcgccttctttccgttcgattaaatgcgtctctgtttctccggaagcttcaatagtaagtgatacaaagaagttggcagatgcttctaagagtacaaaccttataccaatttaccgctggatattctctgatcagcttactcctggtcctggcttaccggtgttgggccaaagaagatgaccgggaagctcctagctttcttttcgagtccgttgagcctggttctcaaatgtctagc

SEQ ID NO: 96979 - DNA, 700 bp, Arabidopsis thaliana columbia
  unsure (1)..(700): unsure at all n locations
nnnnnnnnnnnnnnnnnnnnnnnnnnnnnnnnnnnnnnnnnnnnnnnnnnnnnnnnnnnnnnnnnnnnnnnnnnnnnnnnngaccacgcgtgcgcccacgcgtccgacacttttcaagaaaaaaatagaatactgagtactaaactggaaaccctttataagcaaaaagaccaatagttaaaagttaattaagatttggcttaaggcgctttgctttattagagaggaaggaacgaaccatcatagaaatctctccttcgttcaagtttttctctactgtgttggttgagcaatcgagtgatggttattgcggtggcgacgacgagctccattgtttccggaatcaagctttcagggatcttaacttcgttcaacgccgtagatgatgcgtccagtagttgcggaagaagcaacttgaccggagttagaatttttccgacattgagtcggcgacgattctcatcgatcggagctgtttccccaattcgtggggatgctcaatcttcctttagtcgcagctctttcgcttgctctcagaatctcggtttgagcggtggatttagtgcatctgaagctctgccacctgcttgtgcagaggctagcccttcttccattaaatcttacaaccagatgattgaaaccttgattgatcgggttgatctatctgatactgatgctgtattattttcttgagtttttg

SEQ ID NO: 96980 - DNA, 1879 bp, Arabidopsis thaliana columbia
gtctctcgctactgctgcgtctccgtttaaagagactctaccactctttagtagatctctcacattcccgagaaaatccttgttttctcaggttcgcttgagattcttcgccgagaaacattctcagcttgatacttcaaatgggtgttgccactaatttcgcttctttacaagattctggagatcaacttacagaggaacatgttacaaaaggagagtctactcttagtattacagttgttggagcgtcaggggacttagccaagaagaagatatttcctgacttgtttgctctcttttatgagggttgtcttcctcaggacttttctgtttttggttatgctcggactaaactcactcatgaagagcttcgtgacatgattagtagtactttaacttgccggattgatcagagggaaaaatgtggggataagatggagcagttcttgaaaagatgcttttaccattcgggtcagtataactcggaagaggattttgcggaactaaacaagaagctcaaagagaaagaggcaggaaagatatcaaacaggctgtactatttgtcgatacccccaaacatattcgttgatgtggttaggtgtgcaagtcttagagcctcctcagagaatggctggacaagggtcattgtggaaaagccatttggtcgtgactctgaatcatccggagagttaactagatgtctgaaacagtatcttacagaggagcaaatcttcaggattgatcactatttgggaaaggagcttgttgagaacctttcagtgctccgattctcaaatcttgttttcgagcctctgtggtcaagaaattacatacgcaacgttgagctgattttttctgaggatttcggaacagaagggcgtggaggttactttgatcaatatggaatcatacgagacatcatgcaaaaccatctcttgcaaatacttgcactttttgcaatggagacgccagtgagcttagatgctgaggacataagaagtgaaaaggtgaaagttttgagatcaatgaaaccgttgcggcttgaagatgtggttgttggtcaatacaaaggccataacaagggaggaaaaacttatccagcttatacagacgatccaacggttccaaatcacagtctcactcctacatttgctgcagcagccatgttcatcaacaatgcgagatgggacggtgttccttttcttatgaaagctggaaaagctctccataccagaggagcagagatcagagttcagttcagacatgtcccaggaaacttgtacaagaaaagttttgctactaatttagacaatgcaacaaatgaactagtgattagagttcagcctgatgaagggatatacctgaggatcaacaacaaagttcctggtcttggaatgagactagatcgcagcgaccttaaccttctatatcgatccaggtatccaagagagataccagatgcatatgaaagactgcttctcgatgcaatcgaaggagagaggaggttgtttatcagaagtgatgagctagatgcagcatgggatctattcacaccggctttgaaggaactagaggagaagaaaatcattcctgagctctatccatatggaagcagaggtcctgttggtgcacattaccttgcatctaagtacaatgtgagatggggagatcttggagaagcttaagctttcgacagaaacaatatgatttggtgttaatatgagtaaactaacttgtcgatattatcaatgcgtagataaatccttgttaccaaaacttgctttttctctgacattttttgattgtttttggttctaaatcgagcatttcggaggaatgtaccaaaactcttgcaggaatagaccatttccatcattgc

SEQ ID NO: 96981 - DNA, 574 bp, Arabidopsis thaliana columbia
cggacgcgtggtgtttcatcttctgcagatggcttgaaagtaaaagagggtgggggagacccttttgtgtttgcggatgccttgaaatcactaatcaggctattacgacttgcacagccattgggaaaaggccttctgcagaggcttctcttaaatctatgtgctcacagttttacaagggcttacctggttcaacttttactggatatgattaggccggagatggaaacatcaccgagcgagttggcaataactaatccgcaaagactctatggctgtcaatcaaatgttgtttatggtcgatctcagctattgaatggtcttcctcctttagtgttccgccgggtgcttgaggttttgacgtacttggctacaaatcattctgctgttgctgacatgttgttttactttgattcgtcacttctatcccagttgtcaagccgaaaaggtaaagagaaagttactcatgtgacagattcccgagatctggagataccttttgttgtcttcctaaaactgcttaatcgggctcagcttctgcagagtacatctcaactaaggctggtcatgggct

SEQ ID NO: 96982 - DNA, 1550 bp, Arabidopsis thaliana columbia
  unsure (1)..(1550): unsure at all n locations
nnnnnnnnnnnnnnnnnnnnnnnnnnnnnnnnnnnnnnnnnnnnnnnnnnnnnnnnnnnnnnngggtcgacccacgcgtccgtagtgatgcagcaaccaccgtcaaacgccgccggagctggacagataccatcaggacaacagcatttgtggatgatgatgcaacagcagcagcagcagcagcagatgcagttgtctgcggcgccactaggtcaacatcagtacggtattggatctcagaatccaggatccgctagcgatgttaagtcgttgtggatcggagacttgcagcaatggatggacgagaactacatcatgagcgtctttgctcagtctggcgaggctacatcagctaaagtcattcgtaataagctgacgggacaatctgaaggttatggattcattgagttcgtcagccactctgtagcagagcgggttttgcagacttacaatggtgctcccatgccgagcactgaacagacgtttaggctcaactgggctcaggctggggctggagagaaacgattccagactgaagggcctgaccataccattttcgtaggtgacttggcacctgaggtgactgactatatgctctcggacacattcaagaatgtgtatgggtctgtcaaaggggctaaagttgtgcttgacaggaccactggaaggtccaaggggtatgggtttgttaggtttgcggatgaaaatgagcagatgcgtgccatgactgaaatgaatggtcaatactgctcgacaaggcctatgcgtattggtccggctgccaataagaatgctcttccgatgcaaccagctatgtatcaaaacactcaaggagcaaatgctggagataatgatcctaataacacaacaatttttgttggaggtctggatgctaatgttacagacgatgaattaaagtcaatttttggtcaatttggtgaacttcttcatgtgaaaatacctccaggaaaacgttgtggattcgttcaatatgccaacaaggcgtctgcagagcatgcactttcggtgctgaatggaacacaattaggtggacaaagcatccgtctttcgtggggacgtagtccaaacaagcagtctgatcaagcgcaatggaacggtggtggatactatggataccctccacagccacagggcggctatggttatgcagctcaaccaccaactcaagaccctaatgcgtactatggtggttacactggctatggcaactatcagcagcaacgtcagtgaaacatcaacatcagctatttctaccaatgtcttggaacaaaagatgagcgattgtgtcttattaggacttctagattaaaagtgctctctttttgtttgagttttattttgcaaatgagtcgatcttgaatttgctatgaacaaagtgtttactgaatgttgaaactttattctgttgttttttaaaataaatatttatccaaaatcaaaaaaaaaaaaaaaaaaaaagggcggccgctctagaggatccaagcttacnnnnnnnnnnnnnnnnnnnnnnnnnnnnnnnnnnnnncgcc

SEQ ID NO: 96983 - DNA, 631 bp, Arabidopsis thaliana columbia
  unsure (1)..(631): unsure at all n locations
cctnaaaggncaaantggnccncgggtggcnttnaacngngccccgggtcaggatccgccncggttaaaaagcctgcntntgttctcggncttggcggctttngggtancatttcagaggttgggggaaggatcgatatgccccggattatgccaggagctatgcaggtatgtcgtgatccggccttacaggtacgttagggttatgccgtctggccaaagcttcagtccaatgccaatccatattccgtttcacggatgggtttttcccgcatatgccaagaggtcatcaagccaacctaaactatgggcatccgcttaaccctgctttgagtccctttactcataacgtggcttcatatacaccgtggccaaactcacccgttatgaactatgcacagccgttgaacggctcagacacaaatctttacaggtatccttctgcaagtaatccctgacagcaagagtagtgtttgagtacttcaatgtctgtaatgaaaagcagattctatagatattagcctttaggagctccctgttctgttccgaacaatggctacttctttcttatataacaaacaagacatctacttttttatatctctgaattatattattatcgaactttgaat

SEQ ID NO: 96984 - DNA, 732 bp, Arabidopsis thaliana columbia
cggagattggccctcgagtgcagtggcgacgactgttgctgaaggagtagcttgcaaaagcgcgtgtgaagcgtttggaacgccggagtactgctgtagcggcgcgttttggtacgccggacacgtgtaagccaagcgagtactcacagtttttcaaaaacgcgtgcccgagagcttatagttacgcttacgacgacggaactagtaccttcacttgtggcggagctgattacgtcatcactttctgtccttctcctaacccaagtttgaagagtgcaccgaagggagtccaacccggagctgttagctactctaaggcatctccaaacgcgtcgccaactctttctgccgtggtttcagattggcgttttgcctgtcgcgtcttgggtgatgcaacgcgttttgtgattcatgtacggctgcgtttgaagtttttaataacatcaatctcaatcattcggccagagagaaaagatcattggagagcagcttttagttagtcgaggagtgatttattctaggtgatcatttgtgggcgccccccttatttgagggtggcttgggtctagtattactattagtttctacgtaattttttagacaaatggtcagtctttatggtgtctctgtaagatatataacagttttgcttgcccccctcaaagaaaaaaaaaaaaaaaaaaaccaagagcgcccgctctaaaggatccaagcttacgtacgcgtgcatgc

SEQ ID NO: 96985 - DNA, 582 bp, Arabidopsis thaliana columbia
  unsure (1)..(582): unsure at all n locations
nnnnnnnnnnnnnnnnnnnnnnnnnnnnnnnnnnnnnnnnnnnnnnnnnnnnnnnnnccgacctctcttcactcttttcctctctctccctccctccctcttccattaaatctttgtggttctcttttattgttttgatactgtgctctgcttcggagagtgtagaaagagacagagctaaagtctctgtgtttcttctcagcaggactaaaaggaaaaaaggaaatcgattgctaatgtcgggtgagaaacaagcggaggagtcaatagtagtctccggggaggatgaggtggccggtagaaaagtggaagattcagcggcggaggaggatattgacggcaacgggggcaatggatttagtatgaagagcttcctctggcatggcgggtccgcttgggacgcctggtttagctgtgcatcaaatcaagtggcacaagtgctgttgacgctgccgtattcgttctcgcagttgggaatgttatcaggaatattgcttcaaatattctatgggttaatgggatcttggactgcttatctcatcagtgttctttacgtcgagtatcgtgcccgtatggagaaac

SEQ ID NO: 96986 - DNA, 684 bp, Arabidopsis thaliana columbia
  unsure (1)..(684): unsure at all n locations
atncccccggtcttcccaattancccgctttntcccgaccagggttttcaaagtgccatgccccattgtttgaactncacggnccncttttcggncattaccctggccatgccaggtgatgctaagcaacctgatggttcatttgcgtgtgttncagaaacccctactcgttcacgctggntgaaccgaaggaagagctgttacaggttctgggactacaagaagagaaaggaagctcactcgagttcctgcgcaggggatacaagtcggcaacttggtgggaagaggatgtggagctcgaggcatcatctaattggcgtaactgaacgatggccaagtcatggattcacacttttggtaagtttgttaagtctctcaagattgagatatttacacttgtatatgtgcaaagttggtagagagagtttgggagatgttaatgggaatgattaaggatagtttcaatatgttttctatatataactcagtccaattatgatagtgtctgctccacccaaaaaaaaaaaaaaaaaaaaaaagaaaaagaaaaaaaaaaaaaaataacaaaaaaaaaaaaaaaacaaagacagaataaaaaaaaaaggggcccccccaaaggtttcaagcttacgtacccgtgcatgcaaattcaaaactcttctaaagtgtcacccaaattcaatt

SEQ ID NO: 96987 - DNA, 807 bp, Arabidopsis thaliana columbia
  unsure (1)..(807): unsure at all n locations
tgttttgagatgatacgaagaacttggaggcccattagccccgaccctttatattttatcaatgcagcacttgtgactctctgtcatagagaagtttgtggaaaccttagccagttcaaccccagctgttttgttcaatcttgagctagatacttgcggtctggcgtagggcatattggctttcccgctaaagatctgcactcccggtttctatctcaattcattcccgtcttttatatccgaaccagagagttttcaaagacagtggcagtggcaccatttgtgttgaactacaacggagcactttttcgacaatatcctgggccatggcaggtgatgcttaagcaaactgatggttcatttgcgtgtgttgcagaaagccctactcgtttcacgctgggtgaaacgaaggaagagctgttacaggttctgggactacaagaagagaaaggaagctcactcgagttcctgcgcaggggatacaagtcggcaacttggtgggaagaggatgtggagctcgaggcatcatctaattggcgtaactgaacgatggccaagtcatggattcacacttttggtaagtttgttaagtctctcaagattgagatatttacacttgtatatgtgcaaagttggtagagagagtttgggagatgttaatgggaatgattaaggatagtttcaatatgttttctatatataactcagtccaattaaaaaaaaaaaaaaaagggcaggccgctctagaggatccaagcttacgtacgcgtgtatgcgccgtcnnnnnnnnnnnnnnnnnnnnnnnnn

SEQ ID NO: 96988 - DNA, 1630 bp, Arabidopsis thaliana columbia
tcaaagccagtcaacagttagtattacggtggttggagcctctggtgatcttgctaagaagaagattttcccggctcttttcgccctttactatgaaggttgtctccctgagcattttacagtatttggatattctaggagtaagatgacagatgttgaacttagaaacatggtcagcaaaaccctcacttgcagaattgataagagggcaaactgtggtgaaaagatggaagaatttctcaagagatgtttttacatttctggtcagtatgattctcaggaacattttatcgaattggataagaagctcaaggaacatgaggctggaagaatctcaaaccgcctcttttatttgtctatccctccaaatatatttgtagatgctgtgaaatgtgcaagcacttctgcttcatctgtcaatggatggactagggttatcgtcgagaaaccttttggtcgagattctgaaacctcggctgctttaacgaaatccctcaagcagtatttggaggaagatcaaatttttaggatagaccattacctaggaaaggagctagtcgagaacttatctgttcttcgattctcaaaccttatatttgagccgctatggtcaaggcagtacataaggaacgtgcaatttatattttctgaggatttcggcactgaaggacgtggagggtactttgacaattacggaataataagagatataatgcagaatcatctgcttcaaatcttagccctctttgccatggaaacgcctgttagtttggatgcagaggatatcagaaatgaaaaggttaaggtgttacgttcaatgaggccaattcgagttgaagatgtggtaataggacaatacaagagccacacaaagggaggagtcacatatcctgcctacaccgatgataaaactgtaccaaaaggtagtctgactccaacatttgcagctgctgctcttttcatcgacaatgcaagatgggacggtgtgccctttttaatgaaagcgggcaaagcactacacaccaggagtgcagagataagggtgcagttcaggcatgttccggggaatttgtataaccggaatactggttctgatcttgatcaagctacaaatgagcttgtgatccgtgtccaaccagatgaagcaatctatttcaaaatcaacaacaaggtccctggtttaggaatgagattagatcgcagtaacttgaatcttctatactcagcaaggtattcaaaggagataccagatgcatatgagaggcttctgttagatgcaatagaaggagaaagaagattgttcataagaagtgacgagcttgatgcagcttggtcgctattcactccattgcttaaagagattgaagagaagaagagaatccctgagtactatccttatggtagccgtggtcctgttggtgctcattatctagctgctaaacacaaggtgcaatggggtgacgtcagtattgaccagtaaaacattttcttgtttgtattctcttttttttacattgataatagatttatctaggattcaagctttttctacgcctctttttacagctttaatttgtgcaatttggttatgtaccatttaataaataaataaaccaaaggggtttctctt

SEQ ID NO: 96989 - DNA, 843 bp, Arabidopsis thaliana columbia
caagctttccgtcgttaagctcaacggctcccttttcgatgtggaagttgcaaaggattgctcagtggcagagctcaaaagagctgtggaacaagtattcaccatttctcctctggaaggtcacggcatgatttcatggtctcacgtctggggtcatttttgcttgtgttatcgagaccagagattagtcaatgacatgactagcatccgttatctcggtctcaatgatggagaccaattacatttcgtaaggcatttgtcgatagaccactctcctatgaacaaaagatccaagagcccgagttgcaagcggtacctcgagttggatgtgtcatccattgtcaacgaaatccaaatacaaaaccaaaaccagaacggtgtggatgatgtagctgagaagtgttatccaggagcacaagacgagttaccggcagcagaatccagactagttaacttaattaaaggatggttgccatatgctggacgttggggagtttccagaaaaggacccgagtgtcgcagtggtccctccagattttctttgaagcatttcggtggcagacccaagatgtaaatcccgtaagtcacaaccctcttcctatgtcccctttttaatctcttccaatgattattggtttatgaatttgttgtccagggttgtatcaaaagatccatagttttacaaaatttccatatcctatccttcaatgcaattgtggaaagccttgaaggcaaggtacattttttatttcgcataaatttcagcctagaaccacagtaggtagggcacctgttttgtgataaaacaagaatggattgagtatttgtgttgattttgaataa

SEQ ID NO: 96990 - DNA, 575 bp, Arabidopsis thaliana columbia
  unsure (1)..(575): unsure at all n locations
gtaccggtctggaatgtccgggtcgacccacgcgtncgctcactcctcagctcctcaaatcagaatgaatcaatccgcgcaaaattacttttccgtgcaaaaaccttcagagacttcatcagggccgtacacaagtccgccaccaattggttatccgactagagatgcggtggtgggtgatcctccggcagcagcagtggagacaaactccaagggcgtcaaccccgaagccataatgagttgttttagtacttgtatggagtgtatcttctgctgcggcgtatgctccagcctctgtacatcagagtaaatcagcatgatgagacagaagtcgttgcccaaacctgaaaaacaacacgtgatagaaaatctatatatatatatatatatatatatctattatagtagtcgtttctatggatttccacggattttaaagtttatttgtttcactgtttaaaaatgaatcatttgcttcgtgtattttggttcctatataaataaaaggatttaaaacccnaaaaaaaaaaggggggccgcntngnggnccnagtttcggccggtnantcngcgna

SEQ ID NO: 96991 - DNA, 809 bp, Arabidopsis thaliana columbia
  unsure (1)..(809): unsure at all n locations
gaaatttgtgaagcggaatataaccaatttttcaacacaagaaaaaacaagctaattgcccaatgtttttaccgccaaagcttttaattccgactcactattagggaaaagctggtacgccctgcagggtaccggtcccgaatttcccgggttgaaccccgcggtccgctgtccgtgaattgttctgtaataaatgttttttattgttcaatattgactcttctttcttttatataatgaataatgtaaaaaatttcctaatattcgtctaccttataaattagaagcacaacactctctccttttcacaaatctcacatcctcactcctcagctcctcaaatcagaatgaatcaatccgcgcaaaattacttttccgtgcaaaaaccttcagagacttcatcagggccgtacacaagtccgccaccaattggttatccgactagagatgcggtggtgggtgatcctccggcagcagcagtggagacaaactccaagggcgtcaaccccgaaggatgttgtgctgccatatgctgctgttgtgtcctggatgcatgcttctgagacttcggaattaacgatttcatgcaaattattgatgtaataaaagagtatttgatgctagttatgttacctactctctgtttggaatatactctgtggatggttgttactatgttttatgtaagtgattatatatatatatatatatattccgttgaaaaaaaaaaaaaaaaagnnnnnnnnnnnnnnnnnnnnnnnnnnnnnnnnnnnnnnnnnnnnnnnnnnnnnnnnnnnnnnnnnnnaaac

SEQ ID NO: 96992 - DNA, 749 bp, Arabidopsis thaliana columbia
  unsure (1)..(749): unsure at all n locations
tcactatagggaaagctggtacgcctgcaggtaccggtccggaattcccgggtcgacccacgcgtccgatcctcactcctcagctcctcaaatcagaatgaatcaatccgcgcaaaattacttttccggtaattatcttcaattgttttctaaaatcatgatcaatgtctaacgtataatcatgatgaacaataattctttactcaccaactagataattttttttttttggcacagtgcaaaaaccttcagagacttcatcagggccgtacacaagtccgccaccaattggttatccgactagagatgcggtggtgggtgatcctccggcagcagcagtggagacaaactccaagggcgtcaacctcgaaggcataatgagttgtatcttctgctgcggcctatgctccagcttctgtgagtaaatcagcatgatgagacagaagtcgttgcccaaacctgaaaaacaacacgtgatagaaaatctatatatatatatatatatatatatatatgttagtagtagtcgtttctatggatttccacgcattttaaagtttatttgtttcactgtttaaaatgaatcatttgcttcgtgtattttgtttctatataaataaaagaaattaaaaaccaaaaaaaaaaaaaaagaagggcggccgctcnnnnnnnnnnnnnnnnnnnnnnnnnnnnnnnnnnnnnnnnnnnnnnnnnnnnnaacggaattgcacctcaacctttcccccatt

SEQ ID NO: 96993 - DNA, 675 bp, Arabidopsis thaliana columbia
  unsure (1)..(675): unsure at all n locations
ataaagactttctcacaagtgaagacgttcccacccaagggggacgaatgttttcaaaaagccgtgacccgggcgaggggtattattgcagtctctccagcaaaaggcttttagaagggttatgttacagctgggtgcagtggcaaccactgtggtgtgtttgactcaagttgctactcaggatgagcttagagatgatgaggagtatggagatataatggaggtcttgagacaggaaggcggaaagtttggtggctttgtccaatgttgggtttccgcgtccaagcccccaatggtgagccagtggcagcccttggcaaggtgtttttgaagtatgccgatccagagggctcgactaggtgcaaggttcgtggatgaatggtaggaaatttggaggaaatgaagtcgctgcagtgtattaccctgaagtcgagtttgaacagggtgattatggagcctgatcacttctttgtttgcctttctattacttaaaagttaagtcccttggcttcagtttcaagacccttttgcgtgattgtaagagtatgagattatcgacacgttgcttattataacgtttttatctcaaaaaaaaaaaaaaagggcggccgctctagaggatccaagcttacgtacgcgtgcatgcgacgtcatagctctgtctatannnnnnnn

SEQ ID NO: 96994 - DNA, 642 bp, Arabidopsis thaliana columbia
  unsure (1)..(642): unsure at all n locations
ganananaaacccnaaaaaaagtgnttnntacnctttgaangcctaaaagccgcggaccnaatcccctttaccccttttccaaaatgggaaccccccctttttgcctttggtgggnttggnattgaatttcttnccnaaacctaagatttgttccagagtgtaactacatttgccttcgcctctggccactattccttaaaagaaaaaactgacctgtttttgtctgtgttcccttgtcctgtattcgaaatgttttgccccttaactcttaaaatgcaggtgctttgaccaatggtgtgattccgcgtcccaagccccaatggtgagccagtggcaggccctggccaggtgtttttgaagtatgccgatacagatggctcggctagggcaagattccggatgaatggtaggaaatttggaggaaatgaagtcggtgcagtggattaccctgaagaccaggttgaaccagggtgattatggagccctgatcccttccttgtttggcttcctattccttaaaagttaagtgctttgctccagtttcaagacccttttgcgtgattgtaagagaataaaattatcgccccgttctaaccggcccgcgaattcttcaagccccgggcagcctctagttctagagc

SEQ ID NO: 96995 - DNA, 770 bp, Arabidopsis thaliana columbia
tgccaaccagggaccaatgctacaaaagcctgaacaagagaacgtattattgcatgcacagcagcaaatagcttttcagagggttatgttacagcctggtgcagtggcaaccactgtggtgtgtctgactcaagttgttactgaggatgagcttagagatgatgaggagtatggagatataatggaagacatgagacaggaaggcggaaagtttgccttttgctataaagaatcagccctaacatacacagacaggagactgcataaacctcctaatctatttatcaccaatggccactatttcttaaaagaaaaaactgacttgtttttgtctgtgttttcttgtcttgtattcgaaatgttttgtcctttaactcttaaaatgcaggtcctttgaccaatgtggtgattccccgtccaagccccaatggtgagccagtggcaggccttggcaaggtgtttttgaagtatgccgatacagatggctcgactagggcaagattcgggatgaatggtaggaaatttggaggaaatgaagtcgttgcagtgtattaccctgaagacaagtttgaacagggtgattatggagcctgttcacttccttgggttgctttctattacttaaaagttaagtactttgcttcagtttcaagacccttttgcgtgattgtaagagtatggcggccgcgaattcctgcagcccgggggattctatagttttagaacggccgcccccgcggtggaggttcaggctttggtcccgttagtta

SEQ ID NO: 96996 - DNA, 672 bp, Arabidopsis thaliana columbia
  unsure (1)..(672): unsure at all n locations
gataagactcttcaagtgagacgtgccaaccagggaacaatgctacaaaagcctgaacaagagaacgtattattgcatgctcagcagcaaatagcttttcagagggttatgttacagcctggtgcagtggcaacccactgtggtgtgtcctgccccaagttgttactgaggcatgagcttagcagatgatgcaggagtatggagatattaatggaagaccatgagaccaggaaggcggaaaagtttggtgctttgacccaatgttgtgattccgcgtcccaagccccaatggtgagccagtggcaggccttggcaaggtgtttttgaagtatgccgatacagatggctcgactagggcaagattcgggatgaatggtaggaaatttggaggaaatgaagtcgttgcagtgtattaccctgaagacaagtttgaacagggtgattatggagcctgatcacttctttgtttgctttctattacttaaaagttaagtactttgcttcagtttcaagacccttttgcgtgattgtaagagtatgagattatcgacacgttgcttattataacgtttttatctcaaaataaataattatgtataattaaaataaaattaattttaaattaatttttttaatttattttttatttatnnnnnnnnnnnnaacggaatt

SEQ ID NO: 96997 - DNA, 419 bp, Arabidopsis thaliana columbia
atctgtcaaccaaaaaagagcttttgcgaactcttcttatcctttcaatttaacagagtcatcagcttgaagacgaaagcctttctaattccaatcttcttcacttgtatgacacgttcgtctactcttgcgcttggtcggttttcttaggatttttgcacaagaatgatcaacgcatgattcggattccaggatagagaatccatggctactttcaatgttctttgtagcaatcgatttagattcaatggaggttattctccggagaaatttaatagaaaggtgtcttcgaggagtagtgagcttaatgtttgtgtctctagaatcaggactcaatcgtttagttgcaggagacttggtgggtttatggaaattggtgaaaccagattaggggttattagagttcatggcgattctcg

SEQ ID NO: 96998 - DNA, 430 bp, Arabidopsis thaliana columbia
aagagactgaatcaggtgaggaaccgacttcttcaggcaacgaagcatcggaggagaaacttcaggcacttttaagtatcgcaacggtttgtgtgaccattcaacccgataaccggcctgtgatgagagaggtgttgaagatggtgagggatgcaagggctgaagcaccattctcgtctaacagtagcgaacattcgcccgggagatggtcggataccgttcagagcttgccaagggatgatcaagtgagcatttagagaaattgggtgggccttcttcattgctttcatagaatgacacgtgtgattcttgaagtagggttcatagtgtaaagcttcttttttattttgtaacgccattttgattcatcgaccttgtaggacttgcataagatctattgaattgagatgctggcattgagtagttgaag

SEQ ID NO: 96999 - DNA, 361 bp, Arabidopsis thaliana columbia
cggacgcgtgggctttatacctctctccttcttcttcttcttcttcgtgttctctctcttatgtccttgtccaatttccaaatcctttgttggcgaattttgtcttctttcttcctgagatttcccttcttgtcttcaagaaaccttgatcagggtttctattgtttaaggagggagaaacgaaatgtcaggtggtggcggatcacagagtagttgaaggaggtatcttggagctattaaagataccaccacagtttcattagctaaggtcaatagtgattacaaggaattggatattgctattgtgaaggctactaatcatgtggaacgtccttctaaagaaagatacatcagagctatt

SEQ ID NO: 97000 - DNA, 711 bp, Arabidopsis thaliana columbia
  unsure (1)..(711): unsure at all n locations
ctcatattgttcaagccaacaacaacaattacttttacccaatgagcaaatgaaccagtttggacatactggaaatcttcagaacacccaacaacaacaacagagatctgataatgaacctgctccacagcaacagcaacagccaacaaagtcttatccgcgagcaagaaagagcaggcaagggagcacaggaagcagtccaagtgggccacagggaatctctggtagcaagtcctttcggccattcgcagccgttgatgaggacagcaacatcaacaatgcacctgagcaaacgatgacaacaaccacaacgacgacaagaacaactgttactcagacaacaagagatgggggaggagtgacgagagtgataaaggtggtacctcacaacgcaaagctcgcgagtgagaatgctgccagaattttccagtcaatacaagaagaacgtaaacgctatgactcctctaagccttaatcctctctatgcgtattgtacttgatatgtattttacaaaattagaaaaattgtgatagatgttatcctcaatatatgtaccatgtaaacgtattatggtgtaagcctcatttatatgtgttaatttgtcttggccgaaaccaaaaaagnnnnnnnnnnnnnnnnnnnnnnnnnnnnnnnnnnnnnnnnnnnnnnnnnnnnnnnnnnnnnnnnnnnnnnnnnnnnnnnncnnnnnn

SEQ ID NO: 97001 - DNA, 726 bp, Arabidopsis thaliana columbia
cgaaaaaccgttatgagagcatagtgctactagtggatcggtaaacaataaatgccgtaataaaaatctaaacgtcacgcgcgtgatgaaaaaacaggaagtaaatcgtcgacgtcgttattcaactaccatttctggatcacaactcccacacactcttttaaatcaaaacaaaatatctctttcctgttagagacaatggacggattgatcagaggtttggtcgacgtggctatcggaggaaaccaacgccgcggcggagacgatggtggtgatgatgaaggcaactcgagggacgagagatccagatctacttgggctaatgtggtttccggtgaggaagaggatcagaatcgcgcgggaggatcgtcgcacggccgtcgccagaattcagaggagaatcaatgggagaagaagggcgaaaggcttcccacaaggcattcacaatcacatgaggaggaccaggaagagaatacatatgcggctaaagtgagcgagaaacaagacttctcggagagccagcaagaggaaaatgatggttgggaaactgtgggcaaaaagaaacctgcaaggcaatcacataaggtccagaaggagcaatggcaagattacaaacgcccagcaagtgaacaacactactcagacgaagttgaaacttatggaaacctagaaccctcacaactagagctctcaggtctctcagaagcttgcaacaaactgtgggag

SEQ ID NO: 97002 - DNA, 517 bp, Arabidopsis thaliana columbia
  unsure (1)..(517): unsure at all n locations
nnnnnnnnnnnnnnnnnnnnnnnnnnnnnnnnnnnnnnnnnnnnnnnnnnnnnnnnnnnnnnnnnnnnnnnnnnnnnnnnnnccacgcgtccgattctagtttctgctatcaaacacattttgacatctatccaattgctatcgtgcacatttgaacacaaactttgtttcaatttagcgtttacagtcgcagacgcaatcgcggttaagtgaagcgcatcgtcactttccacattcatagtaatatgcaacaactgagtaacagaaatttgtaatcgaactcagatttcgaagaagcagatctcacaatgtctggaaaacagcaaaatcatcgttctacttcctccagacccagatccaaaaccctaatcctcatcggctctctcttcaccgtctctctactcgtcatcctctacacctcttcttcctcctcccgagcctccatctccaatcccaaccccgtcggaccgaccagagacgtccttccgtacctcgcttgacattttctaatatataa

SEQ ID NO: 97003 - DNA, 480 bp, Arabidopsis thaliana columbia
cggacgcgtgggctaaaaatcccttctctctttctttctttctttttttctctccctctcttctcaggcgagtatgcaaagcaagaacatgatcgtggcttcatctcatcagcagcaacaacaacagcaaccgcagcagccacaaccgcaacttaaatgccctcgttgcgattcttccaacacaaagttctgctactacaacaactacagcctctctcaaccacggcacttttgcaaggcttgcaagaggtactggacgagaggtgggactctcaggaacgttcccgtagggggtcgctaccggaagaacaaacgtgtaaagcggccatcaaccgcaaccacaaccactgcctccaccgtctcgacgactaattcttcatcccctaataaccctcatcagatctctcatttctcttccatgaatcatcatcctttgttctatggtttatcagatcatatgagcagttgtaataataatct

SEQ ID NO: 97004 - DNA, 1672 bp, Arabidopsis thaliana columbia
  unsure (1)..(1672): unsure at all n locations
aatacgactcactttagggaaagctcgtacgcctgcaggtaccggtccggaattcccgggtcgacccacgcgtccgattcttctcctcctatcggactttgccacaccagatcggaaaatcccaatcctcttttcctttgttttttttgctatcttcaatcaaaaactctccgacagattcaatgaagcagcaaaagagataaaaccctaacaaaagtaaacaatcggagttttaatcttcttcttcttcggagccggagttttgtctgatctgtcggagaggacgtgtcggcatctattaaaatcctagctggacttccacatcactttactcaattagaagctgttttgagtaacacaagtaagtagtaagcttataaaacaatgggaacgagcgaagacaagatgccatttaagactaccaaaccaacatcttcggctcaggaagttcctcccacaccgtatccagattggcaaaattcaatgcaggcttattatggcggaggaggatctccaaatccttttttcccatccccagttggatctcctagtcctcacccctatatgtggggtgctcaacaccatatgatgccgccttatggcaccccagttccgtacccagcaatgtatcccccgggggcagtctatgctcatcctagcatgcccatgcctcctaattctggtcctaccaacaaggagcctgcgaaggaccaagcttctggcaagaagtcaaaggggaactcgaaaaaaaaggctgaaggaggtgataaagcgctctctggttcagggaacgatggtgcctctcatagtgatgaaagtgtcacagcgggttcatctgatgaaaatgatgagaatgccaatcaacaggaacagggttcaattcgaaagccaagctttggacagatgcttgctgacgcaagttctcaaagtacgactggtgaaatccaaggttcggtgcccatgaagccggtagccccggggactaatctgaatatcgggatggacttatggtcttcccaagctggtgtaccagtgaaggatgaacgagagctcaagcggcagaagaggaaacaatctaaccgtgaatccgctaggcggtctagattgcggaagcaggccgaatgcgaacaacttcaacaaagagtagagagtttgtcgaacgagaatcaaagcctgagagatgagctacagagactctcaagcgaatgtgataagctcaagtctgagaacaactcaatccaggatgagttgcagagagtacttggagcagaggctgtagctaatctagaacagaatgctgctgggtcgaaagatggtgaaggaacaaattaacacttaggaaaattggaactttacaacggattattgggatttttcaacaccggataaaaaaaactgagtccaaagtcatttgagattacgtaactatacaatcgtttgacatttttgtgtaatagagatttgacctacaagactgtagaagctgcaaaagctacgattacactttgttttattagtcttcgtgattggaatcggattctgaatccgagtttgtttttgnnnnnnnnnnnnnnnnnnnnnnnnnnnnnnnnnnnnnnnnnnnnnnnnnnnnnnnnnnnnnnnnnnnnnnnnnnnnnnnnnnnnnnnnnnnnnnnnnnnnnnnnnnnnnnnn

SEQ ID NO: 97005 - DNA, 766 bp, Arabidopsis thaliana columbia
  unsure (1)..(766): unsure at all n locations
nnnnnnnnnnnnnnnnnnnnnnnnnnnnnnnnnnnnnnnnnnnnnnnnnnnnnnnnnnnnnnnnnnnnnnnnnnnnnnnnnnccacgcgtccggcgcgtggccgtttcatcagcctatctacggacctcagtctccgccgttagtcgcacctaacggcgacgtcggagttgacggaatgattataaacatcgcgactcttcttgttaacaccgtaacgaatccgtctccagaagctgtctcggcttgtaccgggatattcggttcgggtgcttacccgggttacgcgggtcgggttctcgtagacaagacgagtggagcgagttacaacgctttgggtctcgccggtagaaaatatctattgccggcgttgtgggatcctcagacttcgacgtgtaaaactatggtttgaattttagatggtctgtgaacgagacacgtggctagaattgatggtgattaaaagcttgttgtagtcaaagaaagtttgtagatatctatcgcgtctggttcggagtttggggaaagggatgtgtttgttttgttattttgttatgccctgtgtaaattcgatctttggaaatatgtgaaagatagattcatatatctattttaataataacgatttgtagtttccccctcaaaaaaaaaaaaaaaagggcggacgctctagaggatccaagcttacgtncgcgtgnnnnnnnnnnnnnnnnnnnnnnnnnnnnnnnnnnnnnnnnnnnnnnnnnnnnnnnnnnnnnnnnnnnnnnn

SEQ ID NO: 97006 - DNA, 444 bp, Arabidopsis thaliana columbia
aaaaaaacaatttcttctagcgaagaagcagaattaatcaaagttcagagctttcactatgaatatcccaagtggaaccttctcaagatctgatcatttccatgcttcaagtgatgcttctctcttttcaagctctcttcctcttattcaacaccaaaacatcaaccctcgtgacagctaccatcagtctgttgatgaaatggcttctggcttagaccattttagtggaggcattggcaatatgcttgatgatggtgactcacatccaatcggaaacatgcttcctgatgatgaggaagagcttttctctggtctaatggatgatttaaacttaagttccttgccagctacgttggatgacttggaagattatgatttattcggtagcggaggaggtcttgaattggagactgatccatatgacagtctaaacaagggcttctc

SEQ ID NO: 97007 - DNA, 586 bp, Arabidopsis thaliana columbia
aatactgtaaatagaaggttttctccaatacagagaatcagtaaacctcacaaacctaaaaaagaacaaaaacgcagaatgtctagcagacgaagtcgtagaccaattacagaaccaaccctgcacaaacaccactggctcagcttcagtccctggaacagatcctggaatcccaaatttccctaacctcctcgctaaatgccgcctcaacacaaaacgtaaccagagacggtttgatattgcaagtttgtgctcctaagcatcattcgacccctgacttgagcagtttcgccaatgtcttaacaaagaacctgaatgattctaagttcactggagctggagttggtattgattctgatggtatttggcttgttaccgtcctcactacaaacacaccagggggtagctattctaactcaggagcttttgcattcggagttaatggccttgtttcttcaagtttgatgtttcttcatgttttgagtcacaactcgttgtctttgttttcttaatatgacgtgattatggtgaaatttttaataaattcgtgtggcaatcaattaaagagagaataacaatatattaa

SEQ ID NO: 97008 - DNA, 386 bp, Arabidopsis thaliana columbia
  unsure (1)..(386): unsure at all n locations
nnnnnnnnnnnnnnnnnnnnnnnnnnnnnnnnnnnnnnnnnnnnnnnnnnnnnnnnnnnnnnnnnnctttttttttttttttttagaacgttaggctttgtaacaactaagtttaatgccgagtataaatagggatacaataatagtccataaattctccaatgaatccaggtatagacttttatagtattacaaaaggacccaagaacaatgtaaaagagaaagaaagagtgtagagtatataagtattgaaaacacattcaatcaattgcagactgtgaatctgcaggtcccggaattagccttgatgaaacgaatagcagtcatgacgacatacactcccgaatttccctgtagtagctcatgagcttttgcattcggagtta

SEQ ID NO: 97009 - DNA, 949 bp, Arabidopsis thaliana columbia
  unsure (1)..(949): unsure at all n locations
atgagtcaagaatggacagcaaccatattctgctcattataccagattcgaggcaagtgaaggcagaagacttgcaggcaggagtgtgctatctgcaaattactgctgttgatgcagtgatggaagatgaggatcttgggagcagaagagagagaatattttctctttcaactggaagtgttcgagcacgagtgtttgatcgtttcttatttgacacaccatttacgaaaaatggtaaaacccaaggtggattagaagatcaatggaagagaagaacagtgctgcagactgagggttcattccctgcccttgtgaataggcttgttggttaccaagtctgaatcccttgaattctcgccagtggagaatgcgattggaatgattgaaacgcggacaaccgctctgagaaatgagctagaggagcctcgtagctcggatggggatcacctaccacggcttcaaagtctgcagaggattctccaaggaagtgttgcagtgcaggtgaacagtggggtgttgagcgtgtgcacagctttcttatcaggagagcctgcaacgagattgcgttcacaggaactgcagcaactaatcgcggcactgcttgaattcatggcggtttgtaagcgagccattagggttcactttagattaatcggagaagaagatcaggaattccatactcagcttgtcaatggatttcagtctctcaccgcagaactctcccattacatccctgctatcttatccgaactttagtgtatctttgtcagtttttgttacgagttttgtgcttttttcttccaccatttggcttggctatatgtttatcatttctgtaattcttagtgcggccgcaacaagtgagnnnnnanttataaatgacaattggttgacttctaattcagaagcttatgttatnnnnnnnnnnnnnnnnnnnnnnnnnnnnnnn

SEQ ID NO: 97010 - DNA, 751 bp, Arabidopsis thaliana columbia
  unsure (1)..(751): unsure at all n locations
tccaccggattcattaacctggttttcaaattcgcggccgccttctcggcctcggcctctgcctctctgaaatcttctgggctctccacaaattggtctctcctctctctcgccgactccacaaattttgagcttctttttttgaagttcttgagaacaagtgaaagagcttaatatccacaagactcttgtttctttcttaaatggctaaagtttattggccttatttcgatcctgaatatgagaacttgagctccagaatcaatcctccaagtgtttctatagataacactagctgcaaagaatgcactcttgtcaaggtggacagtatgaacaaacctggaatactacttgaagttgtgcaagtcctaaccgatctcgatctcactatcactaaagcttatatctcttctgatggtggatggttcatggacgtattccatgtcaccgatcaacaaggaaacaaggttactgatagcaaaaccatcgattacatcgagaaggtgttaggaccaaagggtcatgcttcggctttcacaaaacacttggcctggtaaaagagtcggtgtccattcatttaggcgaccacacatcggttaggggatttttgcttcgtgaatcgtccctgggctctttgtcggggggtttcacgcccgtacctagccaggccctcaaaccatttattgtgggttggaaagtttntggtttgggnttttaacccgttgggttttgggngtgncccccttttgng

SEQ ID NO: 97011 - DNA, 1070 bp, Arabidopsis thaliana columbia
  unsure (1)..(1070): unsure at all n locations
acagaaagaagggtttcaatctcattaaagagaaaagaaacgattagagaaagagaagagggtagagacttcttttctttgtttctgtggaggctcttcttcttcttcttctctgtctctgtctctgtctctctgtaatcttctgtgctctccacaaatttgtctctcctctctctcgccgactccacaaattttgagcttctttttttgaagttcttgagaacaagtgaaagagcttaatatccacaagactcttgtttctttcttaaatggctaaagtttattggccttatttcgatcctgaatatgagaacttgagctccagaatcaatcctccaagtgtttctatagataacactagctgcaaagaatgcactcttgtcaaggtggacagtatgaacaaacctggaatactacttgaagttgtgcaagtcctaaccgatctcgatctcactatcactaaagcttatatctcttctgatggtggatggttcatggacgtattccatgtcaccgatcaacaaggaaacaaggttactgatagcaaaaccatcgattacatcgagaaggtgttaggaccaaagggtcatgcttcggcttcacaaaacacttggcctggtaaaagagtcggtgtccattcattaggcgaccacacatcgatagagattattgctcgtgatcgtcctggtctcttgtcggaggtttcagccgtactagcagacctcaacattaatgtggtggcagctgaagcatggactcacaaccgtaggattgcgtgtgtcctctatgtgaatgacaatgcaacttctagagccgttgatgatccagaaagattgtcttccatggaagaacagcttaacaatgtgctgcgtgggtgcgaagaacaagatgagaaatttgctcggacgngtctctccattgggtcgactcacgttgatcgaaggcttcatcagattgttttccgctgctaggggcttcggggcagttcctaaggtttntncattctccctttttttcgggtttngggcccaaaataccgggttagcatttttaaggaaaagttacnccgg

SEQ ID NO: 97012 - DNA, 478 bp, Arabidopsis thaliana columbia
tctaaatcgaagatggattcctaagatcgcatcaatggcgtctactagacctctcagttcacttccttacttgttcctctccttgtctctcctcttcgtcgtctcgcttctcttcttcttctccaattccttaatctccaatccaaatccgagcatttcacacaatactctccaaaacggtatcaatgtctatgtagctgagcttccaagatccctaaactatggtcttctcgacaaatactggtccgcttctactccagattcacgtatacccaccgtcccagatcacccgacccgtaaaacccatttacccaaacccgataaacacccaccgtacccagagaactccgttgatcaagcagtacaagtgctgaagtactggatcatgggagacctagaaacctcaccagagaaacgaattggatcttttgctaaaagaggttttagtgaatctgacgctgatgttgtcttcgtgcct

SEQ ID NO: 97013 - DNA, 670 bp, Arabidopsis thaliana columbia
gatggagataacgggtcaaagcccagttgcttataaacatttgcaaaagagctggtgatgacatcagatgaagcttctttcaagaaccggcggctcccaaagggatacttctatgttcctgttgattgtcttcaggaagacaaaccgggaaaccagaagctggcttcatctgacaagccagcgaaccagaagacatcttcaggtgatcagtcaggttaagacgacgggtaaaagctgagaacacacattttggctcattgctcctaccttaattagatactggctattggtggacattgtcttctgcgccctaaccaggattcaccaactggcttaaagcaaaagaacagatggtattgcgctacaaaagagctgtggctgcaactgagaatcagctaaaaaaagctattgtgaagcttttgggtactcgaatacaacactgtgcaataaaggtaatgtttgagatttgagggtaacatctctataggaaaaaggcttcagattggattcagggaagtgagaaaaaagctccctattaccatataaagaaggatcggtcacgtgtaattctgtttgtataaagaaacggaaaaaaaaaaaaaaagggcggccgctctaaaggattccagcttacgtacgggtggatgggacgtcataactcttctatagt

SEQ ID NO: 97014 - DNA, 449 bp, Arabidopsis thaliana columbia
cttaaccaatatcacgtgtctaaaattttttgctcctgtttcactaaaacgttgacttttagataatggaactcaatctagaggtgatccaaagagaagtgatcaaaccttcatcacctgcacctcatgatcgccttcaactatcagtcatcgattttggcactgcagaagcttgcgtgcccatgatcttcttctacaacctcgcggatcttgcggaaaagtccccggatattgtctcaacaaggctgagaagctctctatcccaggcgctgtcacgtttctatcctctcgctggaaaaaaagatggtgtccccatcagctgtaacgacgaatgtactgtgtttacagtggcaccgcacatatcttcttttggctgatttccctaatgaacattgatgtcaacttttttaaagattttcgtttcctcccttttcaccaattgatttctt

SEQ ID NO: 97015 - DNA, 460 bp, Arabidopsis thaliana columbia
aaacgctgcattctgttgagcttttttgtcggcggacggtacttggggggtacgttagggtaaaattgctgcatgaaacccggtttttatggagaaactagcggcttgtgcgacagctgttgagtcaagagtggaaattgatgggaagatagtgaccagtagagggcctggaactaccatggaattctctgtcacgcttgtggagcaacttcttgggaaagagaaagctgttgaagtctctggccccttggtgatgcgtcccaaccctggtgatgagtatactattactgagcttaaccaagtcagctggtcattcgagggtaccccacagattcttgtacccattgcagatggctcggaggaaatggaagctgttgctatcattgaatgtcctgaacgccgggcaaaacgcaaatgttgtcgtagctgcgcttggtaacagtttggaagtggtagcatc

SEQ ID NO: 97016 - DNA, 726 bp, Arabidopsis thaliana columbia
  unsure (1)..(726): unsure at all n locations
actccgtgtnatcaacgctggtatgaaccaagagctcttnttctnagtcgccaaccaccagttcacagttgtagaaactnattccgcctacacgaaaccattcaccacaaatgtcatcatgatcggtcctggccaaaccactaacgtcctcctcacggcaaaccagagaccaggccgctactacatggcagctcgagcctacaacagcgcaaacgccccgttcgacaacacaaccactactgctatcttacaatacgtcaacgctccaacaagacgtggccgtggtcgtggtcaaatcgctcctgttttcccagtcctccccgggttcaacgacaccgcaaccgcaactgctttcaccaaccgtctccgatactggaaacgagctccagtaccacaacaagtcggacggggaacctctttttcaccgtcggattagggctaatcaactgtgccaacccaaacagtccccgttgccaaggtcctaacgggacccgattcgcagcaagcatgaacaacatgtccttcgtgctaccacgaagtaactccgtcatgcaagcatattaccaaggcaccccaggaatcttcacaacggattttccgcccgttccaccggtgcaattcgattacacaggtaacgttagccgcgggttatggcagcccataaaaggaaccaaagcttacaagcttaagtacaaatctaatgttcagattgtgttacaagacact

SEQ ID NO: 97017 - DNA, 646 bp, Arabidopsis thaliana columbia
caagtcgttgcgagtttgattggtttttacttgtctagtgttttatataaacttgtgttgtgtaagtaactaaagagccatggcgtctcaacaagagaagaagcagctggatgagagggcaaagaagggcgagaccgtcgtgccaggtggtacgggaggcaaaagcttcgaagctcaacagcatctcgctgaagggaggagccgaggagggcaaactcgaaaggagcagttaggaactgaaggatatcagcagatgggacgcaaaggtggtcttagcaccggagacaagcctggtggggaacacgctgaggaggaaggagtcgagatagacgaatccaaattcaggaccaagacctaaatcaaacttccccacacggatgtaatattaatccggtttaaatctttcccatgtagttatatcttgtgtagtttcctgtgcgtacttaaggttcttgtttagtttacggatggtgatgaccatgtgtatgttttcgtctacgtaaagtgtctcgtttgttttccagtaccaatttctcttctttagtaagaagttaatgattgtggattaaaaaaaaaaaaaaaagggcggccgctctagaggatccaagcttacgtacgcgtgcatgcgacgtcaatagctcttcta

SEQ ID NO: 97018 - DNA, 1448 bp, Arabidopsis thaliana columbia
gagaaaccattctctccgactaagagagagaagcgaatttgtttttttttcttttgtgggttcaattcgaattgttttccctgagactcaagttactgtgtcattactctgcattgagcaatgggtagcaacgaagaaggaaaccccactaacaactctgataagccatcgcaagctgctgctcctgagcagagtaatgttcatgtgtatcatcatgactgggctgctatgcaggcatattatgggcctagagttggtatacctcaatattacaactcaaatttggcgcctggtcatgctccaccgccttatatgtgggcgtctccatcgccaatgatggctccttatggagcaccatatccaccattttgccctcctggtggagtttatgctcatcctggtgttcaaatgggctcacaaccacaaggtcctgtttctcaatcagcatctggagttacaacccctttgaccattgatgcaccagctaattcagctggaaactcagatcatgggttcatgaaaaagctgaaagagttcgatggacttgcaatgtcaataagcaataacaaagttgggagtgctgaacatagcagcagtgaacataggagttctcagagctccgagaatgatggctctagcaatggtagtgatggtaatacaactgggggagaacaatctaggaggaaaagaaggcaacaaagatcaccaagcactggtgaaagaccctcatctcaaaacagtctgcctcttagaggtgaaaatgagaaacccgatgtgactatggggactcctgttatgcccacagcaatgagtttccaaaactctgctggcatgaacggtgtgccacagccatggaatgaaaaagaggttaaacgagagaagagaaaacagtcaaaccgagaatctgctaggaggtcaagactgaggaagcaggctgaaacagaacaactatctgtcaaagttgacgcattagtagctgagaacatgtctctgaggtctaaactaggccagctaaacaatgagtctgagaaactacggctggagaacgaagctatattggatcaactgaaagcgcaagcaacagggaaaacagagaacctgatctctcgagttgataagaacaactctgtatcaggtagcaaaactgtgcagcatcaactgttaaatgcaagtccgataaccgatcctgtcgcggctagctgaccgtggccgcaacaatgagaacccgatatttcttcctttgggttgtgattgtaacttaaaaggagactttttgtttttattcttagatttgtagctctctgcatagtgagcataaattgatgtaatatggtttaagagattcggtgttctctggtgtgtgctgcaaccacataattggtgatagataggtttagttatataagcaaatgtattagagataaggggagacatatttgatggtcttt

SEQ ID NO: 97019 - DNA, 710 bp, Arabidopsis thaliana columbia
tgcggcactggtccggaatctccgggtcgacccacgcgtccgatcatttctttctctcaccaaccaacaagttctcctttctacccatttcgtctccttcattttgacgttttctttagatctgttaataatcccatccatggcttggtctagtcactagtggtgttatctctctgtgtggaataaaaagcaaggttttttaatcacttggattgttttaagatatggcaactttgaacccttttgatttgttggatgatgatgctgaggatccaagccagctcgctgttgccatcgagaagattgataagtccaagaaatctggacaggtttcgagcttgcctgctaagtcagctcctaagcttccatcgaagccacttcctcctgctcaagccgtgagagaggcaaggagtgatgctccacgtggtggtggaggccgtggaggatttaaccgtggtcgtggtggttacaaccgtgatgatggtaacaatggatattcagggggatacactaaaccctcaggtgaaggagatgtttcaaagtcttcttacgagaggcgtggcggtggtggtgctcctcgtggttccttccgtggtgaaggtggtggacctggtggtggtcgccctggggggttcaccaatgagggtggtgatggggaacgtcctcgaagggcctttgagcgtcgtagtggaactggcagagggagtgac

SEQ ID NO: 97020 - DNA, 537 bp, Arabidopsis thaliana columbia
  unsure (1)..(537): unsure at all n locations
ctaattttgtgtctacttaaacctaactttgacatacatctgtctttgttcaagatcagcttaaaacatggctaccagggtttacgtcggaaatctctcaccgaccactaccgatgatatgttgagggaagccttttccggctacggaaacgtagtagatgcaattgtaatgagagacagatacacagataggtccaggggttttggatttgtcacatacagcagtcactccgaagctgaagcagccgtgtctgggatggatggaaagggacctgtatggtcgtagagtgagcgtgaaactcttttggtattggtgatattgatgaatgaatgccggttgattggtgctgaccttgaaaaggtcggaccaaatcttctatccccaaaattaaaaaaaccattccttgnaatggaattgggggctttcaaggggttttcaagnggcntgtttttggcccccttcaaagggtttttttccagggctccttttattttgatncccgggatnangccttaaaaaagngggtcccttnccct

SEQ ID NO: 97021 - DNA, 450 bp, Arabidopsis thaliana columbia
  unsure (1)..(450): unsure at all n locations
ctcatccaaaaggccaagatctttcacnacggatctatcagtttgattgaggaaccttgccgttctactcagcttgtagctatgaaaatcgctaaggctgcagggagtcttttatcttatgacccgaatttgagattgccgttgtggccatcagaagaagctgctaggaaagagataatgagtatctggaatttagctgatgttataaagattagcgaagacgagataacattcctgaccggtggtgatgatccttatgatgatgatgtggtgttgcaaaagctctttcatcccaatcttaagctttcttgttgtttcagaagggccctaatggctgtagatactacactcagggagtttacaaggtagagtttgggtggagtaaaaggtgaaagccctgtttgttacaacccggttncaggggattcaattccntgaggcgggtttttt

SEQ ID NO: 97022 - DNA, 623 bp, Arabidopsis thaliana columbia
  unsure (1)..(623): unsure at all n locations
gcctctttcaatggaggagatgttgcagaggctggtagagttctgtcactgtgaatgaaacaccgctcttcgaaactgcagctttatctggagaactagggaatagtttggctgatgttgtgatgaatgagagcgctccagtcacaagccaaccggagatagcagcaccaaaagagtttcacccatcggtagtcctgggcgtagctgcagcagtcaaaacacaaggaaaaacaactccgaagaagaaacttcaagcgatgaagaatcaaaagagctctacaaatgattctgttggagagaaggtgagtgttaacaagaggaaaagaggacagccacgcaagttcatagtcgcagagcctaagcagaagattggtgtgtctggtaataattcaaaggctgccactattgaacatgccgatatgactgatgatgataggcctctcgcttcatgggtccacactggaaattcatcatcggggcaatctgtttctcggactcctgatatagggcttaatacagttgtgggaaaagcatgtcgatattgtgggaaactcccccaggggnagagtcgacaatggttctgccatttgtaaaagaagtcacagctttgggaaagtccttga

SEQ ID NO: 97023 - DNA, 308 bp, Arabidopsis thaliana columbia
acgcgtccgaagaaacaaaagaaaacaaatttcttcagactttgtattctaccaaacaagaaatctaagccaaaacattcaaagcgatttctcaagcaaaactagaagatgaaggtaagtattatatggtttatgtatgtgtttttatggcttctttgattgacgttacaacatatcatttttttagcaaaagatcttgatatgagtgactatgacccgatgacaaaccccgagcaaaaggcaatgacaaaaggcagttcagctttaaggccgtgggaataaaaggcgatcacaggaaccagatagag

SEQ ID NO: 97024 - DNA, 457 bp, Arabidopsis thaliana columbia
gaaatcacaactatcgacaatgactaattgatgagaagaatagaaacaaaagaatacaaatttcttcagtcttgggattctaccaaacaagaaatctaagccaggtcattcaaagcgatttctcaagcaaaactagaagatgaaggtaagtattcaaaagatcttgataagagtgactatgaccgatgacaaaacccgagcaaaagcaatgacaaaagcagttcagtttaaaggtaagaagacctttccacaaaaaagattaccaaactctgttggatctaatggttttataggcgtgtcagccgtggaaataaaaggcgatcacaggaaccagatagaggtaaccggcgttgaagttgatatgatccctcttatccaaatactcagaaagaaagtagcgttcgcagagcttgtgagcgtgaccaaagttgaaccaccaaaagaagaagacgagaag

SEQ ID NO: 97025 - DNA, 556 bp, Arabidopsis thaliana columbia
accaaatatataaggctgatcccaacatgacgattaagtatcctacggggactcctacttatgttgctcctgtggatgtttattcaaccgcgaggtctatgggtccaagagctcagatcaatctcaactacaatctttcttggtttttcagcattgactctggtttcacttaccttgttagacttcatttctgtgaggtttcttcgaatatcactaagatcaaccaacgggtgtttacaatctacctcaacaatcaaactgctgagcctgaagctgatgtgattgcttggactagttcaaacggggttccgtttcacaaggattacgtggtgaatcctccagagggaaatggacagcaagatttgtggcttgctcttcatcctaacccagttaacaagccggagtattatgattctcttcttaatggagtggagatattcaagatgaatacttctgatggtaatctggctggtaccaatcctatacctggtccacaggtgactgctgatccatctaaagtcctacgcccgactactaggaaatcgaaaagcaatac

SEQ ID NO: 97026 - DNA, 581 bp, Arabidopsis thaliana columbia
  unsure (1)..(581): unsure at all n locations
gaactagtctcttcttcgaacgcttgcaatggatcttctcaagactccttcctccacggntggtctatcagaaacattcgctaggttaaagtcacaaggcaaagtggctctgattccatatatcacagntggtgatcctgatctttctacaacagcgaaagctcttaaagtgcttgattcgtgtggctccgacataatcgaactcggtgttccatactctgatccattagctgatggtccagcaatccaggctgctgcgagacgttccgttacttaaaggaaccaactttaactccattatctctatgcttaaagaggttattcctcagttatcttgtccaattgcattgtttacatattacaatccaatcctgcgacgaggagtagagaactacatgactgttataaagaatgctggagttcatgggcttctggttcctgatgttccactcgaggagactgaaactctgcggaacgaagctcggaagcatcaaattgagctagtactgctcacaacacccacaactccaaaagaacgaatgaatgccattgttgaagcctctgaaggatttatctatctc

SEQ ID NO: 97027 - DNA, 685 bp, Arabidopsis thaliana columbia
cactcacttttagggaaagctcgtacgcctgcaggtaccggtccggaattcccgggtcgacccacgcgtacctgttcttttctctctgttcattctcttttctttagcttaattcagcaaaaaatttatctttgtttctctcttttgtttctttcctctgcaaagtaaagttatgagagcttaataatgtttgtctcatcttcaagcttcagatctgattccttgtttctacaagtaattgtctctttctttttcgattaaccaccatttctgtgaagaaaacctttttgcttgcttcaagattcgagtgaggaaaattttagctgaaaatgctggaaattggaagtcccaatgctctgtttttccgtacgaatactacttgtaataatcttctccgtgagcttcagaaaatatgggttgaaattggtgagactgagactgagaaagatagaatgcttatggaattagagagagaatgtcttcaaatctatcaaagacaagttgatgaggctgcaaattctaaggcaaagcttcatcagtctgttgcatcaatagaagctgaagttgcttctttaatggctgcccttggtgtgttaaacatcaactcaccgattaaactggataaaggttcaaaatcattgaaagaaaagcttgcagctgtgacacctctagttgaggaattgag

SEQ ID NO: 97028 - DNA, 607 bp, Arabidopsis thaliana columbia
  unsure (1)..(607): unsure at all n locations
gtccanccaagcaattcctnacagccaacnggaggcgtttgagcggtttgagaggtncttctggagcnggnggaccactntcaaaatgcgccactggggcatcaagcaggctcgtcgggtgtaaggagccaaagatttgatcctagctcttatcagcaacgagccgaggcattggagggattgcttgaattcagtgcaaggttgcttcaagatgagaggtacgatgagctcaatgtcttattaagaccatttggtccaggcaaagtttcacccagagaaacagcgatttggttgtccaagagcttcaaggaaaccactactactaagctgggagattgagagacggatttctaattctaacctgttgtgacttgaaaattttccacctttaacagtttatcaagaaaattgtatcaaagtttaactacctaggttgtcttctttaatgagtagcggaccctctttgtctgatacattgaaattctagaaaaaacttggccggtttcccaaaaaaaaaaaaaaaaaaaaaaaaaaaaaaaaaagggcggccgctctagaggatccaagcttacgtacgcgtgcaggtgacgtcataatcttctatagg

SEQ ID NO: 97029 - DNA, 1943 bp, Arabidopsis thaliana columbia
  unsure (1)..(1943): unsure at all n locations
nnnnnnnnnnnnnnnnnnnnnnnnnnnnnnnnnnnnnnnnnnnnnnnnnnnnnnnnnnnnnnnnccacgcgtccgctttttcgctctggtttttttagagagagagaaagatgaaaatgcgtttaattgctgtttaggtttcgaattcgcgatttgaatttctgggtttctctctgtttaagcttcttcttcttcatcttctgcttacgtttcttcttcaaggagctttcggattcttgtagaaagagtcattgttctcttgagtgggaaaccttgaaaccattcctatgggaaatagcagcgaggaaccaaagcctcctaccaaatcagataaaccatcttcacccccggtggatcaaacaaatgttcatgtctaccctgattgggcagctatgcaggcatattatggtccaagagtagcaatgcctccttattacaattcagctatggctgcatctggtcatcctcctcctccttacatgtggaatcctcagcatatgatgtcaccatatggagcaccctatgctgctgtttatcctcatggaggaggagtttacgctcatcccggtattcccatgggatcactgcctcaaggtcaaaaggatccacctttaacaactccggggacgcttttgagcatcgacactcctactaaatctacagggaacacagacaatggattgatgaagaagctgaaagagtttgatgggcttgctatgtctctaggaaatgggaatcctgaaaatggtgcagatgaacataaacgatcacggaacagctcagaaactgatggttctactgatggaagtgatgggaatacaactggggcagatgaaccgaaacttaaaagaagtcgagagggaactccaacaaaagatgggaaacaattggttcaagctagctcatttcattctgtttctccgtcaagtggtgataccggcgtaaaactcattcaaggatctggagctatactctctcctggtgtaagtgcaaattccaaccccttcatgtcacaatctttagccatggttcctcctgaaacttggcttcagaacgagagagaactgaaacgggagcgaaggaaacagtctaatagagaatctgctagaaggtcaagattaaggaaacaggccgagacagaagaacttgctaggaaagtggaagccttgacagccgaaaacatggcattaagatctgaactaaaccaacttaatgagaaatctgataaactaagaggagcaaatgcaaccttgttggacaaactgaaatgctcggaacccgaaaagagagtccccgcaaatatgttgtctagagttaagaactcaggagctggagataagaacaagaaccaaggagacaatgattctaactctacaagcaaattccatcaactgctcgatacgaagcctcgagctaaagcagtagctgcaggctgaatcgatggtaattcatgtcgatttctacttaatttgtcgacataaacaaagaaaataagtgctactaatttcagaaaaacttgatagatagatagtatagtagagagagagagagagagagaggtgtgatgattattgatctataaattttcggagagagagagggagaaagagaaacttttcctccagatgaaaatttggtgttatggtttgttactgttaatatagagaggcttttctttttttataaaatggcttcctttgttgcatttccttgttttagacctgatgtaattttatgaaatcggtgttattgctttgcgtaagcttttgtttcttttgtcaaggtttcatgcataaaggatctttcttttcaggtttcatacatctctctccgaaaatttatagatccaataatcatcacgaatatcacaaacattatgagtctgtctttgggtgattttcttcgctactcttgaggactgtcaatcacacaaggcattcttt

SEQ ID NO: 97030 - DNA, 490 bp, Arabidopsis thaliana columbia
ttttttatttacaataagtgtttcttattttctttccaagatcgaaatgccaaatgtatacgagagacacaagtatgttacatcataatatacaaggtgtctccatagttttggtattagcacacaagtcaagagtatgccctacaaggaaaagattttttagatatcctattcaccttgtatctacagactgacaagacactaggactcctgttattcccaatcagcgtcgaagaatccagcatctttcatttctgaatagtagacattctccaaattcagatcttcctcctggaaaaagtctgcaagaaaagtaacatacaaaagaggaacatagaaggcgtggtaacaaacacttgtgatcccatacaaccataatccaaaatgagcaccgtttgccgtaagagcacatgcaaatagggagagcccatttaaggcgagcatgacagttatatacttgtagaatgcaggtcttgctggtaatctcctc

SEQ ID NO: 97031 - DNA, 613 bp, Arabidopsis thaliana columbia
  unsure (1)..(613): unsure at all n locations
ttagagttcatagcctcgtcatatctcctagttccaatggcagcatgatgtgtacgtcaatgagtagagaaggtaggctagacaatgtgtagtngactacgatgatacaggctatgatgtagaggctgtgtacttcctgcgccgtgtcaaggatgttgtggaggatccacaaaggctccttcttgcatataaagattggtttcgaggagtcacaaagtgtctggcttttgccagttatagacctgcagtgtctttaaaacgtttgggggtaacaacaattcttatctttcaagtttctttacagtttcccgagtattgcgggattggaagaataggcctcagtgtctacgttcttactttttacacagtttgatacagatatgttcaattttgactgaataagatacccttttgaggtttttcggattgaatgatttcctaataagatctagacgagagagaagttacatgctttctttgtattaaatagaaaagctgagaaagtgaacatacgttgctttcttactttcaagggaaaaaaaaaaaaaaaaaaaaaagggcggccgctctagaggatccaagcttacgtacgcgtgcatgcgacgtcatagct

SEQ ID NO: 97032 - DNA, 1136 bp, Arabidopsis thaliana columbia
  unsure (1)..(1136): unsure at all n locations
cctgctgaagataagcagaagcccagagtggaaagtnctcctntagcagagaaacccaaagcaccatcctcaccacctccacccaaacagtctgctaaagaaccgcagcttcctcctaaggaaagagaaagacgggttccgatgacaagacttcggaaacgagttgcaacaagattgaaagactctcaaaatactttcgcgttgctgacaactttcaatgaagttgatatgacaaatttgatgaagctccgatcccaatacaaggatgcatgttatgaaaagcatggagtgaagttggggcttatgtctggatttattaaagctgctgttagcgcccttcagcatcaaccagttgtaaatgcagttattgacggggatgatatcatatacagagactatgtggatatcagtatcgctgttggtacctctaagggacttgtagtaccagtcataagaggtgctgataaaatgaactttgccgagatagagaagacgataaactcacttgccaagaaggcaaatgaaggaaccatatccatagatgagatggctggcggatcattcaccgtttcaaatggcggtgtctatggaagtctcataagcactccgatcattaatcctcctcagtctgccagactcggcatgcgctcgtttgtgtcacgtccaatggtagtaggaggaagcgtagtgcctagacccaatgatgtatgtcgctcttacgtatgatcacaggctgattgatggtacagaggctgtgtacttcctgcgccgtgtcaacgatgttgtggaggatccacaaaggcttcttcttgacatataaaagatttggtttccaggagtcacaaagtgtatggcttttgccagttatagacctgcagtgtctttaaaacgtttgggggtatcaacaattcttatctttcaagtttctttacagtttcccgagtattgcgggattggaagaataggccacagtgtttacgttcttactttttacacagtttgacacagatatgttcaattttgactgaataagatacccttttgaggttaaaaaaaaaaaaaaaaaaaaagggcggccgctctagaggatccaagcttacgtacgcgtgcatgcgacgtcatagctcgtctatggt

SEQ ID NO: 97033 - DNA, 890 bp, Arabidopsis thaliana columbia
  unsure (1)..(890): unsure at all n locations
gaatatcctttgtctatagttcttgttggtgttggagatggtccctgggacaccatgagacagtttgatgacaacatccccgctcgtgcctttgacaatttccagtttgtgaatttcacggatataatgtcaaagaacattgatccagcaagaaaagaggcagaattcgcgctttctgccttgatggagatcccgtctcagtataaagccaccctcgaactaggcttacttggacaaagaaccggacattgtccagacaggattgcgcttccaccaccaacttatgctactcaatctatgcgcaacagcccaagaacttcccgatcaaccagttttcaaaaccaaaccatatgataatggtgtttcctctacaccaccttcaactactcataacgagagccagcaacagttttgccccgtatgtctagtgagtgcaaagaacatggctttcaattgtggtcatcagacttgcgctggatgtggggaagacctccatgtgtgtcccatttgccggagctcaatctcggttcgtatcaagctttattaagataagtctctcaagaactgaaggaacccgaggtggtctgagatctttcacagccaacaccatcccaacttagatctcatttaccagtgtcctaacatttgtttttactttgaggggaataaccggttcctctcaaaggttttgtagataatctgttgtcaattttgcattctcattgcacatgaaaaaaccacagcagactctctcgtgaataaaggatcctttctctgcggttacacatttttacttaaaaaaaaaaaaaaaagnnnnnnnnnnnnnnnnnnnnnnnnnnnnnnnnnnnnnnnnnnnnnnnnnnnnnnnnnnnnnnnnnnnnnnnnnnnnc

SEQ ID NO: 97034 - DNA, 740 bp, Arabidopsis thaliana columbia
  unsure (1)..(740): unsure at all n locations
gacccacgcgtacacttgaggatcgtatggaagcagcaaatgctcttaaaaagcaaatgtgggctgaagcacagttagataacagctgtatgagagatgtacttaagcttgatcttcaagggttagcaagcagcaaaactgaatcaacgataggcctaccaatcattcaaagctctactcgtgagagggatagttttgatagagacccttctcaacttctagatgaaacaaagcccctggaagatctttcgaacgatcttcataaatcatctgctgagagagcacttattaatcaggatgccaatataagtcaagaaaattatgcttcaaagagatcacgctcccaattaaagtcatatataggccacaaagcagaagaggtgtatccataccgatctttgccgcttggacaagatcggcgccacaatcgttactggcattttgctgtatcagtgtctaagagtgatccttgttcgaggctcttatttgttgagctacatgatggcaagtggctcctcaattgattcaagaagaggcttttgatattctnggttgcatcattggataatgcgtgggatcagagagtctcatttacggnttaatgctnncagaagatcngagggtncattcaaaagnggattgcttttaaagntattaaggcttagctngaaaccccnttncntttacgggaaaanagtgttngggaatnaattctccntcangattctttggncccatng

SEQ ID NO: 97035 - DNA, 849 bp, Arabidopsis thaliana columbia
  unsure (1)..(849): unsure at all n locations
cttataaaaccccacaccttccttgtttccttctttctacaccgcactctcttcttctggttcttcttcctctctgttttttctctctctttgtttggaaccaccatggataatgtcaaacttgttaagaatggtgttttgagattgccacctggattcagattccatcctactgatgaagaacttgtggttcaataccttaagaggaaagtttgttcttctcctttgccagcttcaatcatccctgagtttgatgtttgcagagctgatccttgggatttacctggcaatttggagaaagagaggtacttctttagcacaagggaagctaaatacccaaatgggaaccggtctaaccgggcaactgggtctggttattggaaagctaccggtattgataaacgggttgtgacctctagaggaaatcaaatcgttggtttgaagaaaactcttgtcttctacaaaggcaaaccacctcatggctcaagaaccgattggttcatgcacgaatttcgcctctcttcttctcctccgagttttatggggcccactcagaaccgggtactctgtcgtatcttcttgaagaaaagagccggtaacaagaacgacgacgacgacggagatagccgtaatcttagncataataataataacaattcgngtgaccaaattgagntaattacaacaggccaacagntgnttaaaacaaaacccaatcttctttgntttcattggnaaaggaaggnccaccagttttgancctttttcggggtntccttttttcgntcatgtttaagtgggggnnncgcgggggtnttnttttttttccgttgagggncnntggttnaa

SEQ ID NO: 97036 - DNA, 496 bp, Arabidopsis thaliana columbia
  unsure (1)..(496): unsure at all n locations
aagaatggaaacccatgttttatctcgcattttcctcctagttctctgcatctacagccttaaaaccatggtttatggggctggagaatgtgggagaaatcctccagacagagaagccataaagttggctccttgtgcaatggctgcacaagacacatctgctaaagtgtcagcaatttgctgtgctcgagtgaaacagatggggcagaatccaaaatgcctttgtgctgtcatgctttcttccacagctaggagctccggagcaaagccagagatctcgatgactattcctaaacgctgcaacatcgctaatcggccccgtcggttacaaatgtgggagcttatactcctgccttgaagccagcagccagaaagcaatagacgggttcttcaaaaccaggccaaattggcccaggtccacagttgtattacctgggttccataaaaatatgggcccaaagggggattggcccgaaaggggnnccnttttcnnggg

SEQ ID NO: 97037 - DNA, 475 bp, Arabidopsis thaliana columbia
aatcggagaaaaagctacggagctcgagagaagagtgaatctatgtcgaacccaaacgaaccagccagggctcttctgccttacctgcaacgtgccgatgagctgcagaagcatgaaccacttgttgcttattactgtcggctatatgcaatggaacgaggattgaagattccgcagagcgagagaactaagaccaccaattcgattctcatgtctctcattaatcaactcgaaaaggataaaaaatcattgactctgtccccagatgacaatatgcatgtggaggggtttgcacttagtgtcttttgctaaggcaggcaagcagggtcgtgcaggaagagcagactttgggcacttgccaaacctttttatgctgcgagcatcttctttgaaattctgagccagtttggtcccgtacctcctgatatagagcagaaacacaagtatgctgcttggaaggctgctgacataagga

SEQ ID NO: 97038 - DNA, 392 bp, Arabidopsis thaliana columbia
ccaccaccatctccgatttcgtttataaaaccctcaaattctcagctcaacacttctcaggtttcgtgtaacatttcacacacacatttgtcgagatcttaacaccaagcccaaatcagaagagtcacaactttttacttgattttatcaaagtggcgcttatgaatggaagcatgaaatctatcatcggtcaaatcatcgatgagcaaccaccgtcaaccaaacttctcctctcgccgtctccagacccacttctttccggatctccgccgtgcaaaccgacccaaaaacaccagctgcttcatcggcgtcggcggcgacgacgactccggcaacgttgacgaagcccgttggagttaatgtgggtaaaggaaaatgggcaccagagagtt

SEQ ID NO: 97039 - DNA, 1014 bp, Arabidopsis thaliana columbia
  unsure (1)..(1014): unsure at all n locations
ttttgggaaagctgccacgcctgcaggtaccggtccggaattcccgggtcgacccacgcgtccgcacacacacatttgtcgaaatcttaacaccaatcccaaatcagaaaaatcaaaactttttattttattttatcaaaatggcgcttatgaatggaagcatgaatctatcatcggtcaaatcatcgatgatcaaccaccgtcaaccaaacttctcctccgccgtctccagacccacttctttccggatctccgccgtgcaaaccgacccaaaaacaccagctgcttcatcggcgtcggcggcgacgacgactccggcaacgttgacgaagcccgttggagttaatgtgggtaaaggaaaatgggcaccagagagttggaggacgaagaaagctttacagcaaccggactatccagatttagctgcgcttgaagctgtgctagagacgatcgaagcttttcctccgatcgtgttcgccggagaagctagattgcttgaggaacgattaggacaagcagcgatgggtgaagcgtttctgttacaaggaggagattgtgcagagagtttcaaagagtttaatgcgaataacattcgtgatactttcaggattcttcttcacatgggtgctgtgttgatgttcggaggtcaagtccctgttgttaaggttgggagaatggcgggtcaatttgcgaaaccaagatcggattcgtttgaggagaaagatggagtgaaattgcctagttacagaggagataacattaatggagatgcgtttgattcgaaatctaggattcctgatccacagaggatgattagagcttatttgtcaatctgcagctactttcaatcttttgagagctctttgctacgtcggtggttatgcttgctatgcagaggagttacccaactggaatcttgatttcacctgaccggagagggccaacggggccaggtaccctgagccgagctaacccgtgttgattcaagcncttgggttccagngcacgcngcgg

SEQ ID NO: 97040 - DNA, 540 bp, Arabidopsis thaliana columbia
  unsure (1)..(540): unsure at all n locations
gagagaacgaggccttgatggcaataagaaagttgggatatggagagttgttgttgttcataatctcccctattcagatggaaggcgcaatggaaaggtgcccaagcttcttgtccataggatgtttccaaatgctcgctattctttatggattgacggaaaactagaacttgtcgtcgatccatatcaaattcttgaaagattcttgtggaggaaaaatgctacttttgctatttctagacattacaaacgatttgatgtcttagtggaagccgaagcaaataaagctgctggtaaatatgataatgcttctatcgactttcaagtggatttttacaagaacgaagggttaaccccttattctgtcgcaaagctcccaatcacaagcgacgtacccgaggggttgtgtcattttaagagagcatgttcccataagcaacctcttcaattgtctttgggtnaacggagttcccngnttantttntgggggccaaatagtttntcanccgnagggggtaaggncggggaaaaacaactngg

SEQ ID NO: 97041 - DNA, 526 bp, Arabidopsis thaliana columbia
  unsure (1)..(526): unsure at all n locations
nnnnnnnnnnnnnnnnnnnnnnnnnnaaaccatacgaagatattgaagacgatgacgacaaatgtgagccttactctggtggccaggcggccatagcgctggaaagatatttgttggaggtttagccagggagacaacttcagctgaattcctcaagcattttgggaaatatggagagatcactgattctgtgattatgaaggataggaaaactggacagcctcggggatttgggtttgtcacatatgctgaggcctctgtggtcgacaaagttatccaagacaatcacattataattggcaagcaggttgaaattaagcggacgggaccatccttatggaaggtagagagttccatgaaagcttgaatcttcttcttacttgttgtggcatgcttagcatcatgtatgggtatcaagattgatagctaggcatttgtattttgagagatgaggcttttagggctttgattcccctgagtagtttaaatcaatacattttttagattataattatctcggggtaac

SEQ ID NO: 97042 - DNA, 553 bp, Arabidopsis thaliana columbia
tatggtgggtcatacggtgacccaggaggtggttatggtggacctagtggcagttatggaggcgggtatggtagtagcggaataggtgggtatggtggtggaatgggtggtgctggtggcggaggctatagaggaggtggtggctatgatatgggtggagctggagggggaggcgcaggaggatatggtgctggtggtggcggaaacggtggaggatcattttatggaggaggaggaggtagaggtggatatggaggcgggggcagcggacggtaccatccttatggaaggtagagagttcgaccccccgcttgaatcttcttcttacttgttgtgtcatgcttagcatcatgtatggttatcaagattgatagctagtcattgtattttgagagatgaggcttttagggctttgattcccctcagtagtttaaatcaatacattttttagattaaaaaaaaaaaaaaaaaaaagggcggccgctctagaggatccaagcttacgtacgcgtgcatgcgacgtcaaagtcttgtatagttcacataattcaat

SEQ ID NO: 97043 - DNA, 488 bp, Arabidopsis thaliana columbia
tcgatttttacgagtcattaattttgtgtgcaggtactgctttttaaatggcttctcctattcccgtcggcgttactaaggaacaggcgtttagtatggcacaaacggagatggagtatcgcgtggaactctttaacaagcttgctcaaacatgctttaataaatgtgtggataaaaggtacaaggaagctgagctaaacatgggtgagaatagttgcatcgaccgttgtgtttccaagtactggcaggtaaatggaatggttggacagcttctaagtgctggcaagcctcccgtgtaatccagtttaaaggcaattattacagaccaaaaagctcatggagggaacacaactctgttctttgtttttctaaagtttaaggcaatcttgtttttattgtcaagaaagttgcatcacatttttggcgctgatttggacaaattatgcaattccatgtgaacccattattattaacctaagggtgaaatg

SEQ ID NO: 97044 - DNA, 1442 bp, Arabidopsis thaliana columbia
  unsure (1)..(1442): unsure at all n locations
ggaaaggaaaagagacacacacaaataaagaaaacgaaaacacttttatacttatattgcagccatggctccgactttgcaaggccagtggatcaaggtggggcagaaaggaggaacgggaccaggacctagaagttcacacggcatagccgcggtcggagacaagctctacagtttcggcggcgagttaacaccaaacaaacacatcgacaaagacctctacgtctttgacttcaacactcaaacttggtcaatcgctcaacccaaaggagacgccccaactgtatcctgcttaggcgtgcgcatggtggccgtgggaactaagatctatatctttggaggccgcgatgagaaccgcaacttcgaaaactttcgctcctacgatacggtgacatccgagtggacattcctgacgaagcttgatgaggtgggaggacccgaggctcgtactttccattcgatggcttcggatgaaaaccatgtgtatgtattcggtggggtgagcaaaggcggtactatgaatactcccacgcggttcaggacaatcgaggcgtataacattgctgatgggaaatgggctcagctaccggatccaggagataacttcgagaaaagaggaggagcgggattcgctgtggtacaagggaagatttgggtggtttatgggtttgcgacctcgattgtgcccggaggcaaagatgactatgagtctaatgctgtgcaattctatgatccggcttccaaaaagtggaccgaagtagagactacaggagcgaaaccttccgcaaggagcgtgtttgcccatgcggtagtgggaaagtatataataatatttgcaggtgaggtatggcctgatctcaatgggcattatggtcccgggacgctgtccaatgagggatatgcgttggacaccgagacactggtgtgggaaaagttgggagaagaaggtgcaccagccataccacgaggttggactgcctatactgctgccactgtcgatggaaagaatggcctcctcatgcatggcggaaagcttccgaccaacgagcgaactgatgatctctacttctatgcggtcaattcagcttaatgcgtgtcaagatttgtgttgtgtgtgtggctcgttaatatttattactatccaataaggagccctaatggtttgctgtattattacaaattatctgtgtgtgggactcgtcgagcttttttactctaatgaggcctactcatggttgtgtgagtggttcctcaagtatcattgtccaataaggagccaatttatttatggctggctgttttattacaaattatgtgtatgtgttaataattaaagattgaattatctacaagtttttcgtattatcattaaaaaaagggcggccgctctagaggatccaagcttacgtacgcgtgcatgcgacgtcgtagnnnnnnnnnnn

SEQ ID NO: 97045 - DNA, 569 bp, Arabidopsis thaliana columbia
  unsure (1)..(569): unsure at all n locations
tgcagtaccggttcggaattcccgggtcgacccacgcgtccgacaggcaacttcacaaagataatggacgccataaagaaagctcctgattatagctcgacacgtttcgtcatatacattaaaaaaggtttatatttggagaatgttgagatcaagaagaagaaatggaacattgtaatgttaggtgatggcattgacgtgactgttatttccggtaaccgcagcttcatcgatggttggaccactttccgatcagctacattcgcggtaagcggaagaggattcttagcaagagatataacgttccagaacacagcagggccagagaagcatcaggcggtagcactgagatcagactctgacctctctgtgttctacagatgtgcgatgaggggttatcaaggtacactcttcacgcacaccatgcgtcagttctaccgtgagtgcaccatcacgggaacagtggattttatatttggggttgggcttttgtttttaaaactgcnaatttggctaaagggccccttaccaaaggncncctttntnanaaggcggaaggtttancngtc

SEQ ID NO: 97046 - DNA, 543 bp, Arabidopsis thaliana columbia
  unsure (1)..(543): unsure at all n locations
aaaaatnccgggcccaattgcccatcctaacccggcagggctttttcggagccatggagcctatccgggacggttttcattaggaacaatatggcccacgttgtgagacccgaaggatggcttgaagtggaacgctgattttgcgttggacacactcttctccggagagtccatgaactacgggcctggtccaggactcagcagccgagtcaaaatggcctggttacccacgtctttaacaactcggatcaggctaacaacttcaccgtttctcagttcattaaagcgaaatctttggctgccttctacgggagtaacgtttagtgatggcttgtatatctaaactggctcagtgtttctattgtgaatgttcctgttttttgttccttttcattttgttttgcgttttcttgtcatgttcttctaagttggtttgttgtggtatttcacggttttggaaaaatattgataaatggggaatttaagtcgatcggctgaagttgaacaaatcatatattgcccataaaggttaatagattttgt

SEQ ID NO: 97047 - DNA, 537 bp, Arabidopsis thaliana columbia
aacagaaataggagacttaacaccagcattcttgttcggtacattagaccatccggaacaagtaatatcctcattgattgtggcaagttcttctaccatagtgcccttcgatggtttcccaccttcgggctaagaacacttgatgcagttgtaattactcattctcatgctgacgcaattggaggtcttgatgatcttcgtgattggacaaacaatgtccaacctcacattccaatttacactgctatacgtgatctcgaggtgatgaagaagacccattattacttggttgatacaagtgtcatcatacccggagctgcagtctcagaggttggagtttaaaggcatacacggggaccagccattttgtgggtaaacgatcttgaaggtcaccccattacctgtattggcatggaggtaactaccggtccccttggtttccgctttggtaatgtctgctacataagcgatgtcagtgacataccggaagaaacctacccgctccttaagactgtgatctcctaattatggatgctt

SEQ ID NO: 97048 - DNA, 897 bp, Arabidopsis thaliana columbia
  unsure (1)..(897): unsure at all n locations
cacaaacaaaaaagctatatgtcaatttggctgaactctggccaaatagattgatggattatcgtgggatcaaacatgcaattttccgggcaaaggagagacgaaaagcattgtatggaaaccttgcgaaagagatggatcaaacaaagatgaagaagagtatgaagcagttggtaccaagaacagactgtactgcccagcccaacaccgatttagtggttcagagacctacacagtgggggaaaaaaattgattgttgctccatatgcaaccagcacttccgtggtcactagtcaacctatggttgccagatctaatcagcagcagcctgagcagctaaagggaatctcaagctcttgcaatcctacagaggaaacaagagtggtcaagagaaagaacgaggctgtaatggctgagaaacaagtcgttcttgccctgaagaagcccgaacatccacagacacgtgtaatcccagctcctcagaatctgaacatcccacgaacaaccccggacctgaacttgccaagttgacatcacgattgacaaaggagctcttagaaacgccggagacaataacctctggcctcttccttccttgtattttgaggtggcacggcattagtcctggcgatgccgatgcttggtttttttagctacaaagcatggtttataaagttgtctgtattccagtttggctcttattaagttagttactctatttacgtgtcctttttcaaaactctaatgtataaagttatgattttacgggcaactctttacttttgagtgaatgaaaaaaaaaaaaaaaagnnnnnnnnnnnnnnnnnnnnnnnnnnnnnnnnnnnnnnnnnnnnnnnnnnnnnnnnnnnnnnnagggcaccgtcaaaccaaccgggg

SEQ ID NO: 97049 - DNA, 663 bp, Arabidopsis thaliana columbia
aatagtgtatcgcgtggaaaaggccaggatctgttcctccgagccttccacgaaagtcttgaaagaatcaaagagaagaaacttcaggtaccaacaatgcatgcagtagtagtaggaagcgacatgagcaagcagacaaagttcgagacagagctacgcaactgtgtccgagaaaagaaacttgagaactttgtccacttcgtcaacaaaactctaaccgtagcaccatatatagcagccatagacgttcttgtccaaaactcccaagccagaggagaatgctttgggagaataacaatcgaagccatggcctttaagctacctgtacttggtactgcagccggaggaacaatggagattgtagtgaatggaacgactggtctgttacatagtgcagggaaagaaggagtgatacctctcgccaagaacatagtgaagttggcgacgcaagttgagttacggctgagaatgggaaaaaatgggtatgagagagtaaaagagatgtttttggaacatcatatgtcacatcgaatagcttcggtactcaaagaagtcttgcaacacgcaaaggctcgtgctttacgatgagatcactacaatgttgtaaaatgtttcttcatctctcttacttattctgttcatagaaaaatacaaatactaccc

SEQ ID NO: 97050 - DNA, 536 bp, Arabidopsis thaliana columbia
  unsure (1)..(536): unsure at all n locations
nnnnnnnnnnnnnnnnnnnnnnnnnnnnnnnnnnnnnnnnnnnnnnnnnnnnnnnnnnnnnnnnnnnnnnnnnnnnnnnnnnnccacgcgtccgctcttcgccaacactgttcttgtctatgttcaagataatgttggctggaccttgggttatggacttccaacattaggtttggctatttccattaccattttcttgttgggcactccgttttaccgccataaacttcccactggaagcccattcaccaagatggctcgagtcatcgtggcttcatttcgcaaagccaatgcaccaatgacgcatgacatcacgagcttccatgagctgccttctcttgaatatgagcggaaaggcgcctttccgatccaccctactccaagtttacgattcttagacagagcttcactcaaaacagggacaaatcataaatggaatctttgtactaccacagaagttgaagaaaacaaaacaaatgctgagaatgttaccaatcttgttcataactttcgtcccaagtatgatgcttggacaa

SEQ ID NO: 97051 - DNA, 559 bp, Arabidopsis thaliana columbia
  unsure (1)..(559): unsure at all n locations
attggtaagagatggcaaaccaaagaaaaccaatccttcctctattacttgaaaagaaaccagttgagcttgttaaaccctcaaaacacactcattgtgaaactctttccctctccactttagacaacgatcctttcaatgaagttatgtatgcaacgatttacgttttcaaagccaatggaaagaacctagatgatcctgtctctttgcttaggaaggctttgtccgaacttcttgtgcattactaccctctctcgggcaagctgatgagaagtgagagtaatggaaagctccagttggtttatctgggtgagggagttccatttgaagtcgctacatcaactctagacctctcctctctgaactatatcgaaaacctcgatgaccaagttgctttgcggccttgtaccctgaaaatcggaatcggctacggggggaaacgtttttttcatcanccncnttaggttttcaaagggtnnccaaagttttccctttnggggggttcnccatttgggacccggatttgcanacggttttgnttaattggaacggtgtngnc

SEQ ID NO: 97052 - DNA, 933 bp, Arabidopsis thaliana columbia
ctaactctttccttattcttgtaccattctaaatcagtaagtccttaacgtacgcaccatgtgtacgttagagaagcgcggcgatctctttctcctaaccctaaccggcgaagacgagcacagattccaccccgacacgatcgcctctgttctctcgcttcttgaacaagcaaagtctcaatccacaaaaggatccgtcctcatcactaccggtcacggaaagttcttctccaatggctttgacctcgcgtgggctcaatccgctggacacggtgctataaaacggatgcaccaaatggtcaaatcctttaaaccggtgttagccgccctcctcgatcttccaatgccgacgatcgccgccttgaacggccacgcggcagcctcggggctgatgtttgcgctgagccacgactacgttttcatgaggaaagaaccgtggggttctatatatgagcgaggtggacatcgggctaccggtgccggactacttctcggcgttggtcgtggctaaggttgggtcaggtatcgcgagaagggagctgttactgagcgggaagaagctcaaaggagaagaagcggtggctctcgggatcgtggactcagcggcgcatgatagtgcggaaggtgtggtggaggctacagtgagccttggagaaagtttggccgctaagaaatggaatggtgaggtgtatgcaaccattaggaagagtttgtatccggagctttgtcggatggttgatttaacggcaaataacttggccactcacaacctctagaaactctcattgtcttgttgggagaaaaatggttgaaatatgaatattgccgacaaaagtcaacgtccatttcactaagcacgtattttaagggaggccgctctagaggatccaagcttacgtacgcgtgcatgcgacgtcaaactcttctatagtg

SEQ ID NO: 97053 - DNA, 528 bp, Arabidopsis thaliana columbia
  unsure (1)..(528): unsure at all n locations
nnnnnnnnnnnnnnnnnnnnnnnnnnnnnnnnnnnnnnnnnnnnnnnnnnnnnnnnnnnnnnnnnnnnnnnnnnnnnnnnnnccacgcgtccgtctctctctgtgctcttccagtctctatcgatcgccttctgaattttccggcggaaaagcaaatgtccgttaacgacagtatcgatcctcggttcgtattccacgttgaagatgaatctttgcgtttccgtgtgggagattcaggtactaagatccgggagctcgaaaccgtcggcgatcgccatttcagaacccagcaaggtttctgcggaaatagaattgagaaagatgaaaccatgtattccgatggagatgatgaagagtacgacgtttctatccgaagacgaactgctctgattcagcctggtattgattccggtaacaattatgattctgctgcagctgaagaaaccaacagagaaagtaaaaatccagttggttgggaactggttgtgagagaagatggggaaggtaattcaacgattgatcgacatg

SEQ ID NO: 97054 - DNA, 514 bp, Arabidopsis thaliana columbia
cttgttgaatgtattattattcctattgatcatcacgtgaaatatagaaaaataaaataaaaaagcaaaatccacttttgtgttttccttttcgtttacgaccaaagagatccactttatgctctcttcattttctccatgtaatgatttttctcgagagatttctgaaaataaagtcgtttctttttttttttgccttggtcactcaagactctcttcttcactctctgttttttgtcctcttctaaaatttagagaaaaaaacgaaagttttcaccaaaaacagaggaggagctatgtcatcgtcgacgatgtacagaggagttaatatgttttcaccggcaaacacaaactggatttttcaagaagtcagagaagccacgtggacggcggaggagaacaaacggttcgagaaagctctcgcttatctggaccacaaagacaatcttgagaggctggtccaagatcgcagatttgattcccggcaaaacagtagcttgacgtcattaaacga

SEQ ID NO: 97055 - DNA, 1396 bp, Arabidopsis thaliana columbia
  unsure (1)..(1396): unsure at all n locations
cccccgcccccccntttgaatttgcattggccatggcccgggtcgacggtatcgataagcttgatatcgaattcgcggccgctctctctcttctacattgtttcttgaggtcaatctattaaaaatgggattatattcactaatcacaggaagaagaggaccaagtggatttggttcagcttcaacagctgaagaggttactcaagggattgatgcaactaatctcactgcaattatcacaggagggacaggaggaatagggatggagacagcgagagtgctgtcgaagagaggtgctcatgtggtgatcggtgcccgaaacatgggagctgcagaaaacgccaaaacagagattctcagacaaaacgcaaacgcacgtgtcactcttcttcaattagatctctcttccatcaaatccatcaaagcctttgttcgtgaatttcatgccctccatcttcctctcaatctcctcataaacaatgcaggagtaatgttctgtccataccaactctctgaagatggaatcgaattgcagtttgctacaaatcacattggtcactttctgttgacaaacttgctcttggacacaatgaagaacacagctaaaaccagtggttgttgaaggaagaattttgaatgtatcatctgtagctcatatctatacttaccaagaaagaatccaattcgacagcatcaatgacatttgcagttactcggataagcgagcttaccgacaatcgaaactagccaatatattgcatgctaatgagctcttccgtcagcttcaggaagaaagagtaaacttaaccgcaacctcagttcaccctggtcttattctcaccaatctcttccaacacactgctcttttaatgaggttcctgaagttcttcagcttctacttgtggaaaaatatacctcagggagcagcaacaacatgttatgttgctctgcatccaagtgtgaagggagtaacaggaaagtactttgctgattgcaacgaagtcactccaagcaaacttgctagagatgagactttggcacagaaactctgggatttcagtgttaagctcattaactcggtttctaaaaagaactacctcggtttcgatgacaccacttgaatctctacggtgttcttgttgaatgttacctaaagagtgaaaaaaaagtaagaacaagtagagattgtgatgtttctttccacattatcgtatggtaactcatgagatgcattgttgtatgcttaaatattttatcgagtgaatatgtaaccgcgtccctcttttcatagtatggacaataaaaagcggccgnnnnnnnnnnnnnnnnnnnnnnnnnnnnnnnnnnnnnnnnnnnnnnnnnnnnnnnnnnnnnnnnnnnnnnnnnnnnnnnnnaa

SEQ ID NO: 97056 - DNA, 596 bp, Arabidopsis thaliana columbia
  unsure (1)..(596): unsure at all n locations
atgannnnnnnnnnnnnnnnnnnnnnnnnnnnnnnnnnnnnnnnnnnnnnnnnnnnnnnnnnnnnnnnnnnnnnnnnnnnnccacgcgtccggtggagcgcgatcctttggggaatcgggacggaccgtgattggtcggtctctctcgttacggtgaggctgaggctgaggcggagattgagagagaccaaccatgatacgacgaatcaccgagagagcttctggtttcgctaagaatattccgattctcaaatcgtctcgatttcacggcgagtccctcgattcctccgtctcccctgttctcattcccggcgtccatgtcttccattgtcaggatgctgttgggattgtagctaaactatcagattgcatagcagcaaaaggtggcaacattcttggctacgatgtttttgttcctgaaaacaacaacgtcttctactctcgcagcgagtttatctttgatccggttaaatggccgagaagccaagtggatgaagattttcaaactattgcacaaagatacggtgccttgaattcagttgtgcgtgtgccttctattgatcctaagtataagatagctcttcttctttcaaaac

SEQ ID NO: 97057 - DNA, 460 bp, Arabidopsis thaliana columbia
agattcaagtaaattaatttttgatcttttcattttatctctctctctttttcttctatccaaaacaccatttttgagatcagagcttctagcagcgtaaaaaatgcagacgaggtatatggagaggactaatagtatgagagagaagagaaaattggaggaagatgataatcagcagcagcagcaacagcctgagcgtaaaaggccagctcttgcaagtgtaattgtggaagccttgaagatggatagtttacagaggctttgttcttctttggaaccgattcttcgccgagtggtaagtgaagaggtggagcgggcattggcaaagcttggccctgcaagacttagtgaaaggtcgtctccaaaacgaattgaaggtatcggtggaaggaatttgcagctacaattcaggtctagattgtctgttcctttgtttactggagggaagatagaaggggag

SEQ ID NO: 97058 - DNA, 665 bp, Arabidopsis thaliana columbia
  unsure (1)..(665): unsure at all n locations
atgatgaagatgatgatgatactaaagaaggtggcactggactgtatgacgagcacaagatgagttcaacagttgaatacatggatagatttnttgggaacaatggagagagattgancgtggaagatgactcgtgcacttcctttgaacttgcacgtaatgcagtcaactgtgcagagaaagatgagactnttcctggagagcagcagaagaagttgaaggattgtaatgatccaatagataccaaagtctgggatgcttcgaggtgtttgaatgttccatcataatggcaaagatcttcaaccaacccggagaatcatggaggagatatttggtaatgggatgctggggaaaccaaggcaagaaacaagtggagaagcaaacatcattctccaacaacttgcagaatcatgggagagatattaggggtttatggggtcctccttcaaaaatgttcctattaaaaagtagtgagagttttagacttaaaagaattttccagcctttgtttttcatgtggattcttgtgaatgggctgctgtttcacttttcttggggccctctttcttaaaatcatttacttagaatgtcataatctctctgatttgctgtaaaagattttctcttctttgaactttaaattttttatatacaggaagttttga

SEQ ID NO: 97059 - DNA, 943 bp, Arabidopsis thaliana columbia
  unsure (1)..(943): unsure at all n locations
ctgcagtttcggaccggaattcccgggtcgacccacgcgtccggtctgggatgcttcgaggtgtttgaatgtttttacaaatggcttagatcttcaaccaacccggagaatcatggaggagatatttggtaatggatgctgggaaaacaaggcaagaaacaagtgaagaagcaaacatcattctcaacaacttgcagaatcatgggagagatatttggggtttatggggtcctccttcaaaaatgttcctattaaaaagtagtgagagttttagacttaaaagaattttccagcctttgtttttcatgtggattcttgtgaatgggctgttgtttcactaaaaaaaaaaggaaaaaaaaaaaatatataattataaaaaaagggnnnnnnnnnnnnnnnnnnnnnnnnnnnnnnnnnnnnnnnnnnnnnnnnnnnnnnnnnnnnnnnnnnnnnnnnnnnnnnnnnnnnnnnnnnnnnnnnnnnnnnnnnnnnnnnnnnnnnnnnnnnnnnnnnnnnnnnnnnnnnnnnnctttgaggaacatccccccttttttgcccagtttggggtttatttaacccaaaagaaaggccccccgcaaccccggatattggtcccctcttttcccccaaaacacatatttttgcccaccacaccccctctttggaaaatagggggccgaaatattgggggaaaccccgcgccctccttttttgattatccggggaggcgcccaattttaaatattcccccccggacagggggattagattggggtgtgggttttacaccgccacccaagcccggtgggacccgcgtttaccattctttgccccaaggcgccccctttaatagggcccccggctccctttttaagcattattcttttccccttttcttttttttttggccccacattttcgccgggggtttatttcccccgac

SEQ ID NO: 97060 - DNA, 459 bp, Arabidopsis thaliana columbia
gactcagaacctgctgcttggggttctcagggttataattaattctgaaactgagtcaggtcctgctgcttggggtgcttgggacaaaaagaaatcggaaactgaaccaggtcctgctggttggggtatgggggacaaaaagaattctgaaactgaattaggccctgctgctatgggtaattgggacaaaaagaaatcggatacgaaatcaggtccagctgcttggggatctacagatgctgctgcttggggttctagtgacaaaaacaactcggaaactgaatcagatgctgctgcttggggttctaggaacaaaaagacttctgaaattgaatcaggtgctggcgcttggggttcgtggggacagccaagtcccactgcagaacacaaggataccaatgaggatgatagaaatccgtgggtttccttgaagagaccaaagtagagagaggatgataa

SEQ ID NO: 97061 - DNA, 543 bp, Arabidopsis thaliana columbia
  unsure (1)..(543): unsure at all n locations
cgntgtgggctggacncggcggcattcgtggcaggcatngccttaccgcagtcgntgcggtttcctnttttccccnnccangtcgggaaggtncccnaactngncccaaaggcagtggattacagtggnccgtctcttagctactacatcaacaagttcaagccttctgaaattgttcacccttctaccccctccgtcacagaagccccaccggtggccgagctagaaacttcactgccagaaactccatcggtggctcagcaagaaacctcactgccggaaactatggctagtgaggctcagccagaggcgtcttctgttccaacaacaagtagtacctcttaggggcttagcctaggattatatctttgtgtaaaaatgagatgaagcatataccaagattatgcattctgttaatattcggatatacctatatgtatgtatacactctgtcactcttctctttgagtgaatgattatatcaaatctcaaatcctattatttttgctnnnnnaaaaaannnnnnnnnnnnnnnnnnccccc

SEQ ID NO: 97062 - DNA, 428 bp, Arabidopsis thaliana columbia
ctttctccttcttcttcttcttcttcttcttcttcttcttcttcttcttcttctttttctttagaaacaacacaaaccccaaaaacttaaaaaataactctacagagatggctgttggaatccttgaggttagtctgatcagtggcaaaggtctcaagcgctctgattttcttggtaagatagatccatatgttgagatccactacaaagggcaaacccgcaaaagcagcgttgctaaagaagatggaggtagaaatccgccatgggatgataatttgaaatggtgagcagagtttcctggctccggcgccgactacaaactcatcgtcaaaggtcatgggtcatgatactttctcctctgacgatttcattggcgaagccacggtacatgtgaaagagctattggaaatgggagtggagaaggaacg

SEQ ID NO: 97063 - DNA, 524 bp, Arabidopsis thaliana columbia
  unsure (1)..(524): unsure at all n locations
atcagggtttagtggattctccaaatctccacgggtcggttatttcagggagatccaaagaccataaaaggggaacgccactcctacaatctgtaaagagaaagacatagtgaaagaaggtcaagttctatgctacattgaacagctcggtggccaaatcccagttgagtctgatgtttccggagagattgtcaaaatactccgcgaagatggcgagcctgtaggatacaacgatgctctcatcacagtacttccctcatttcctggcatcaagaagcttcagtaagaactgattttggcttaattgtgtttgtgctttgtgtattttgcttcttagtttttctccacatagacaaaaataagctctactccaaaaaatctttgtccgtaccattacctttgttttaccaaaatttaattgaaacttttttgtttaaaaaaaaaaacaaaggannnnnnnnnnnnnnnnnnnnnnnnnnnnnnnnnnnnnnnnnnnnnnnnnnnnnnnnnnnnnnnnngtccta

SEQ ID NO: 97064 - DNA, 451 bp, Arabidopsis thaliana columbia
agaaaaaaaaaaactctccgactcggaagaagagggagagagatgaagaagccggtcggagccgagaagaagagggttaaacgatcatcgggatctgcatctacttccgttagagattctggttctgattctcaacctaggaagcaagctgtgaagaaggatagttttcagttgtttgctgagaaagttagagaccacaagggattagaatccagatgggctgttatggagcaagcacgagttgaatactttagagggaaagattttgtgagctttatgaagaataaccctgactttaaagatattctggaagaagataaagaccttgacacagacgatattgccaatgttttgttgggaaagaaccttttggtccgctgtgatcgtgttactaaaactcttcgtcccgggaagaaaaagctctctacttggcctgctcatatggagattt

SEQ ID NO: 97065 - DNA, 547 bp, Arabidopsis thaliana columbia
  unsure (1)..(547): unsure at all n locations
nnnnnnnnnnnnnnnnnnnnnnnnnnnnnnnnnnnnnnnnnnnnnnnnnnnnnnnnaacagataaatgatctatttgtattcctaataaagtctgaaaagaattataaccagaataactgttattataacccgggtgatagtaactagacaaatgtataactgtacaacatttgtcgtttttggtatcatcgatagttttcgtagcttcttgtgacgttagatttacagagtctggttgaagatagcatcttgagcccctcagcggtggatacgcatcatgactggaacaaggttatagtggctatatgaccgttcttcatcacctcaaaagcaacattctgatagccatacacatatgtagatccaaaagggttgctcgttgagcctttgcgtctgaatagctgctggcccacattccccgagtatttccttgacctgatcccagttagtgcttggagtgatcttgtttccacttttgtgtgcttctgccgaatccgctccagccgaaatcacaaagttgcactttatgtatgagttgaaatcagc

SEQ ID NO: 97066 - DNA, 478 bp, Arabidopsis thaliana columbia
aaaccgaaggaaaacaaacagaggtgcataacgattctgacggaaacttttgagatattttttttagagccaaaaggattcactttttttggttttatcttcgcatcgatctatgacgtacagcaatcccgtcgatgggacggtgcctgagctgaaattgagagtcgaagaagattccgataatggtgattatctgaaattgagaggaggatcagatgaagaagatgaaggatcatcggcggaatcatcgagatgtccgataggatccggttacttctgtcttggttctgggtgaaattgatctccttggtcgtttgtttgggttcattggcctttgttatcatcaaatgggttggtccctttttgattgaaaaggagctgattccatttataaattgggtgagaaacacattcagcataccggttctcggtcttctactatttgcctcagtggcattgtttccaagcattcttcttc

SEQ ID NO: 97067 - DNA, 3749 bp, Arabidopsis thaliana columbia
aaataaagctctcaattcaattctctctctttcacttttttttcctctgcttgcttcttctgttcatctttttgcttcgtcaaaattttgaccaaagttttgtacttttttgttgctgcaatttttgtgattagattggatctgggcttggagctgaatagcggatttgtataaggttattattagtcttctctatcgttgcggcgttcataagttggagaaagtggtaaagactgcttaagtatgtctgtttctatgagagatttagatccagctttccaaggagctggacagaaagctggtattgagatatggcgtatagagaatttcatccctaccccaattccaaaatcttctattgggaagtttttcaccggagattcttacatagtattgaagacaacggcgttaaaaactggtgcattgcgccatgatatccattactggcttggtaaagatacctctcaggatgaagccggtactgctgcagttaagacagttgaattagatgctgctctaggaggtcgtgcagtgcagtatcgggaagttcaaggccacgagactgagaaattcttgtcttattttaagccatgtatcattcctcaagaaggtggagtagcatcaggattcaagcatgtcgtagctgaagaacatattacccgcttgttcgtctgcagaggaaaacatgttgtccatgtcaaagaggttccttttgctcggagttcattaaaccatgacgatatttacattcttgacacaaagtccaagattttccaattcaatggatccaattctagtatccaagagagagcaaaagcactggaagtggttcagtacatcaaagatacttaccatgatgggacatgtgaagttgctacagttgaggatgggaaacttatggctgatgctgatagtggagaattttggggtttctttggtgggtttgctccgctacctaggaaaacagctaatgatgaagacaaaacttataattcagatatcaccagattattttgtgtcgagaagggacaggcaaatcctgttgaaggcgatacattgaagagggagatgctggatacaaacaagtgttacattcttgattgtggaattgaagtgtttgtttggatgggaagaaccacttctcttgatgatagaaaaattgcgagtaaagcagcagaagaaatgatccgttcatctgaacgaccgaaatcgcaaatgatccgcataatagaagggtttgaaacagtaccattccgatcaaagtttgaatcttggactcaagaaactaatacaaccgtgtcagaagatggtagaggcagagttgctgctcttttgcaacgacaaggagtaaatgtcagaggcctgatgaaagctgctccgcctaaagaagagcctcaggttttcatcgactgcacgggaaatctgcaggtttggcgtgtgaatggtcaggcaaagactctccttcaagctgctgatcattcaaaattctacagtggagattgctatgttttccagtattcttatcccggagaagaaaaagaagaagttcttataggaacgtggtttggcaaacaaagtgtggaggaagaaagaggttctgcagtctctatggcaagcaaaatggttgagtcaatgaaatttgtcccagcccaagctcgcatttatgaaggaaaggaaccaattcaattcttcgtgattatgcaaagctttatcgttttcaagggtggtattagcagtggatacaagaaatacatagccgagaaagaagttgatgatgatacatacaatgagaatggtgttgctctattccgaattcaagggtctggtccggaaaatatgcaagctatacaagttgacccggttgctgcatcactgaactcctcgtactattacatactacataatgattcttccgtctttacttgggctggaaatttatcaaccgcaactgaccaagaactggcggaaaggcagctagatctgattaagccaaatcaacaatctagagcacaaaaggaaggttcagaatcagaacagttctgggagttattaggaggcaaagctgaatattcgagccaaaagctcacaaaggaacccgagcgtgaccctcacttgttctcttgtacattcacaaaagaagttctcaaggtgacagagatatataactttacacaggatgacttgatgaccgaagatatatttatcatagactgtcactcagaaatctttgtctgggttggccaagaagtagtcccaaagaacaagttactagctttaactattggagagaaattcatcgagaaagattctctcctggagaagttatcccctgaagcccctatttatgtgatcatggaaggcggtgagccgtcattcttcacccggttcttcacttcttgggattcctcaaaatccgctatgcatggaaactcattccaaagaaaacttaaaattgtcaaaaatggtggaactccagtggcagataaaccaaaacgaagaactccagcttcatatggtggccgtgccagcgttcctgacaagtcgcagcagcggtcaagaagcatgtcatttagtccagacagggttcgcgtgaggggcagatctccggcgttcaatgcactcgcagcaacatttgagagccaaaatgcaagaaacctgtcaactcctcccccagtagttaggaaactctacccaagatctgttactcctgactcctcaaagtttgctcccgctcccaagtcttcagccatcgcttctcgaagtgcacttttcgaaaaaatacctccacaagaaccttcaattccaaaaccagtcaaagcgagcccgaagacacctgagtctccagcgccagaatccaattcaaaagaacaagaagagaaaaaggaaaatgacaaggaggagggatcaatgagcagccggatagaatctcttacgattcaagaagatgctaaagaaggagtcgaagacgaggaagatttaccagctcacccttatgatcgtctcaagacaacttccactgatcctgtctctgacattgatgtaacaaggagagaggcttacctttcatcagaagagttcaaggagaaatttggcatgacgaaagaagctttctacaagctgcctaaatggaaacagaacaaattcaaaatggctgttcagcttttctgagatataatccttcttcttctccatcaaaagatccgctataaggagaagatacaagggacagtgtcagtgcattttaagctgcttctgctccccatgagaagcttaatacatttttcatggcttgtttaaaaaaaacaacccagagcagttttcttttcttctatttttctttcttctccttcaaatctttctgatttgttttaatgatctgtttgcttgtttctctctatttcattctccattttttagtttgagtagatttttgttttcttcatattttgggattgtttcttcttcaggtcacaggttttgaccttgagtctttgatttatttattcttggggttattttgatatcaaattgaggaaatttggtttcaaaagtcaaatttttatttagtgagatttcataaaaacaaatagactctgtaattttgttttgcagaagttgaggattgagtttttttttttttttttgtgtacagcaaagtgtacaaactaaattgtgcttcctaaacttcagatttctttattttactacatttctcataaatatagaaataccatttgttggccaaaaaa

SEQ ID NO: 97068 - DNA, 582 bp, Arabidopsis thaliana columbia
tgacttatcaaaggtggtttttgttgccactgctaatagggtttcaacctattccacctcctcttctagacaggatggagctaattgagttgcctggttatacgcaagaggaaaaacttaagatagctatgcgccatctgattcctcgagttctagatcagcatgggcttagttccgagttcctcaagattccagaggctatggtaaagaatataattcagaggtatacaagggaagccggtgttcgtagtctagagaggaacttggctgctttagctcgtgcagctgctgtgatggtggcagagcatgaacaaagtcttccgttgagcaaagatgtgcagaaacttacatctcctctgcttaatggtagaatggccgaaggaggcgaagtggaaatggaagttattccaatgggtgtaaatgatcatgagattggaggcacccttccagcagtcccccagcttttggtggtggatgagaccatgcttgaaaaaatcctcgggcctccaaagtttgatgacagtgaagccgctgatcgagtggcgtcagctggcgtttcagtgggtctcgtttggactactt

SEQ ID NO: 97069 - DNA, 446 bp, Arabidopsis thaliana columbia
ctaaaagataaagatgagagaagagagaagtttatccgataacagcttccgcaatcattatttaacaattgtttttacataatatgtttaaatttatatcatatcattttattatttaatttataataaatcttattattgttactgatatttaatttaataggtcttagtaacatatactgcaactttttcaatttaaagcacaagagtcacttgttttaaacataactcttatttctaattttctatagcaaatttattataggcaatgttcgtcacgttaacgttgcgctagggatctgcgattgaaatttaaacgtcaacaatagcaaaagaaacaaaaaaaaaataataaagatgtctttgcggccacttttacaggggataccggtgtcgtcggcatcgctaagaaaaagcggcgaccatttttttagacgctgcggctc

SEQ ID NO: 97070 - DNA, 597 bp, Arabidopsis thaliana columbia
aatgaattgggtgatattcattgttttgacttggctagtgaacagtggaaggctgtggagactaccggggatgtaccggcggcgagaagcgtgtttccggcggtttcttacgggaagtacattgttatttatggtggggaggaagagccgcatgagcttatgcacatgggagctgggaagatgtctggagaggtttatcagcttgatacagagacgttagtgtgggagaggattgtgtgcgggaatgaagaggagaagccgagccaacgtgggtggtgcgcgtttacgaaagcggttaaggatggtgaggaaggtttgttggttcatggtgggaattctccgaccaatgagcggcttgatgatttggtgttttggggtttctctcatcttaatgtcaattaatgactagctgctttgtgtctttcgtgtttatgaactgtttagtgtgttgttgttttaaggagtttaagtggtgatgatatgtaactgctaagtgtctgagtttaaggagctatgtgtggtgaaactttgctacctattccaaatattttattaagtttggtgttttggtaatttaataaaaaacttgttagtctg

SEQ ID NO: 97071 - DNA, 778 bp, Arabidopsis thaliana columbia
acgcttagctgggaccggtacacagatctacaccgctttatcttcgaagaaaacgtctgcagcagacatgttgaaggcttaccagacatacatgtcggtctgccctttcaagaaagctgctatcatatttgctaaccacagcatgatgcgtttcactgcaaacgccaacacgatccacataatagatttcggaatatcttacggttttcagtggcctgctctgattcatcgcctctcgctcagcagacctggtggttcgcctaagcttcgaattaccggtatagagcttcctcagcgcggttttagaccagcggaaggagttcaggagacaggtcatcgcttggctcgatactgtcagcgacacaatgttccgtttgagtacaacgcaattgctcagaaatgggaaacgatccaagtcgaagacttaaagcttcgacaaggagagtatgtggttgtgaactctttgttccgtttcaggaaccttctagatgagaccgttctggtaaacagcccgagagatgcagttttgaagctgataagaaaaataaacccgaatgtcttcattccagcgatcttaagcgggaattacaacgcgccattctttgtcacgaggttcagagaagcgttgtttcattactcggctgtgtttgatatgtgtgactcgaagctagctagggaagacgagatgaggctgatgtatgagaaagagttttatgggagagagattgtgaatgttgtggcttgtgaaggaacagagagagtggagagaccagagaca

SEQ ID NO: 97072 - DNA, 959 bp, Arabidopsis thaliana columbia
  unsure (1)..(959): unsure at all n locations
nnnnnnnnnnnnnnnnnnnnnnnnnnnnnnnnnnnnnnnnnnnnnnnnnnnnnnnnnnnnnnnnnnnnnccacgcgtccgcggacgcgtggggaaccttctagatgagaccgttctggtaaacagcccgagagatgcagttttgaagctgataagaaaaataaacccgaatgtcttcattccagcgatcttaagcgggaattacaacgcgccattctttgtcacgaggttcagagaagcgttgtttcattactcggctgtgtttgatatgtgtgactcgaagctagctagggaagacgagatgaggctgatgtatgagaaagagttttatgggagagagattgtgaatgttgtggcttgtgaaggaacagagagagtggagagaccagagacatataagcagtggcaggcgagactgatccgagccggatttagacagcttccgcttgagaaggaactgatgcagaatctgaagttgaaaatcgaaaacgggtacgataaaaacttcgatgttgatcaaaacggtaactggttacttcaagggtggaaaggtagaatcgtgtatgcttcatctctatgggttccttcgtcttcatagatgttgtttcttacgttctaagcgactgggatttatgtagggcttttctgttgatagtctctcgccaacacgagtggattaagttcagagttagggttcttgaacactagaatgttgttatattatgcttgtgacatagcgtgtgtaagagtgtagcctaagagatatagtactcattgcatgatcttttgctatatgttcatgtaatcttttgttgcataaataatgaaaagttacatttttttcaaaaaaaaaaaaaaaagnnnnnnnnnnnnnnnnnnnnnnnnnnnnnnnnnnnnnnnnnnnnnnnnnnnnnnnnnnnnnnnnnnnnnnnnnnnnnnnnnnnnnnnnnnnnnnnnnnn

SEQ ID NO: 97073 - DNA, 484 bp, Arabidopsis thaliana columbia
cggacgcgtggggaaaaaacccggcgaaaaagggaaattcgaattcgtcttctgttgatcattgcttcacttctgcttccagagcttttactcagaagaagctcgctgatctcaaatctctctttttttccctcgcttccaagtctcagagcaatgaccaatacgtctcgtaccctgttttccaggagtattttggtctgagtggttctttaggagaaaggatctttgatatggttactcaacacaggaaagatgataaaatgacttttgaagatcttgttattgctaaggcaacatacgagaaaggaactgatgatgagattgctgagtttatttaccagactttggatgttaatggcattggggtcttgagaaggtctgatttagagtcgttcctggtggggattttgaagaggtgttctccactgagagttctgatgcggaatcaagtgattacaaggagatggtagatgcgctactcgat

SEQ ID NO: 97074 - DNA, 539 bp, Arabidopsis thaliana columbia
  unsure (1)..(539): unsure at all n locations
cgcgnccgaaaaacccggcgaaaaagggaaattcgaattcgtcttctgttgatcattgcttcacttctgcttccagagcttttactcagaagaagctcgctgatctcaaatctctctttttttccctcgcttccaagtctcagagcaatgaccaatacgtctcgtaccctgttttccaggagtattttggtctgagtggttctttaggagaaaggatctttgatatggctactccacacaggaaagatgataaaatgacttttgaagatcttgttattgctaaaatgacttttgaagatcttgttattgctaaggtacacacttaagtcttttcatccncttaatcattgggttcttccttctgagctttttgaaggtccttaaaaatgcaggggtcaaattttgntaatcnccntatggaaaagggnttgtanggtataaatgtggnccngnctcacggtggnatagnatccccccccagggtaaggcacctgnttttcntggaaaggctnttcccttttgtnaaacccngggtcgta

SEQ ID NO: 97075 - DNA, 825 bp, Arabidopsis thaliana columbia
  unsure (1)..(825): unsure at all n locations
agaaaaaaatcatcttcttcctcaatttcttctgattcctcctctctttcttctacttctcaccggatttctgttagttctctgataagtacatttcgtgcttatcaaatacttatattttaaggggttgaagttgtaattttgaagaagctgaagatcaatcaaaaataatagaagaacagagacgacgaaacgaaaccagccggagaactgagcagagaaaaacccccggcgagaatgggaaattcgaattcgtcttctgttgatcatcgcttcatttctgcttccagagcttttactcagaagaagctcgctgatctcaaatctctcttcgtctccctcgcttccaagtctcagagcaatgaccaatacgtctcgtaccctgttttccaggagaaaggatctttgatatggttactcaacacaggaaagatgataaaatgacttttgaagatcttgttattgctaaggcaacatacgagaaaggaactgatgatgagattgctgagtttatttaccagactttggatgttaatggcaatggggtcttgagaaggtctgatttagagtcgttcctggtggtgattttaaagagtgtgttctccactnagagttctgatgcgggnatcaagtgattacaaggagatggtagatgcgctactcgatgccggtaatttctcaaaatctggctgatggtcctgaaaaaaggaatttcttttgaagccttnagaagcttgntcccacttcgttnccaactnttaagaaagtcccnggaaagcttncttattccccgggccantnagccnnggnnannagnccnganct

SEQ ID NO: 97076 - DNA, 568 bp, Arabidopsis thaliana columbia
  unsure (1)..(568): unsure at all n locations
cgtatatgtatttacgcagacctttgctacacatcaactcacacatacgtcccccctccggtctattcgacgtctccggtacaatctcctgagacggttggctcacagtcccggtggtttctacagatacattgttccgcggaggcgataacatcggctgatggaaattattgttccgcgcggcgaggacaacgccgttactctcgagtttggaatcaattgcgttttcgattgactcgatgtgcttctgaagatcatcgaactggcgtttgaatgtttccactgcaactgaaaacgcagctaattcgtctatggatttcaaaaattgaggctgcttagattgaccgatcgccacgtccatacttgtagactctgtttcgacaatcttcggtaattctcttcgtcgctgttcagattgatgtcgcccctgcagtggattcgccgtcgttgtgggttgcgccgccaccgtcggtggataattgaacatgagcggacgcgtggnnnnnnnnnnnnnnnnnnnnnnnnnnnnnnnnnnnnnnnnnnnnnnnnnnnnnnnnnnnnnnnnnnn

SEQ ID NO: 97077 - DNA, 454 bp, Arabidopsis thaliana columbia
cactaaatttgcaaattattcaaaagaaaataatttatttgacacgaatttacatcctacgggcagatatagttgcgaaggggagacaattctctgctcctcaaaaggaacaatcctgtaaacttgatcgcaaacaatgaccatttatttgcttattcgttgagaaatactcttcactaggtaaatgagaacctaaaaacgaaacaaatgagttcataatctctacatagtagttacagatgatccctcagcttgcaagctatggtcattgagccacgagataatatcggacaagacacggagaatcatgtcgtctggttcgccttcgagcagagaatgataagcattttcatacaaaactatcttcttgtctggacttttggctttctcgtacaactctctgctcactgaaggatctgccactggattagctttctcatgtagaatcaatatc

SEQ ID NO: 97078 - DNA, 615 bp, Arabidopsis thaliana columbia
ccaggaagtgataaggaatgtagctggttctgctctgaatgaggagggcttacgagcttggaaagcaagtttccaacagagtaatagcatgtctgaccggaattatattacggatcattccactgtcagttatcttggtcctggtcttgatgagagtcagagccttactccatgctctgtggagaaccattatttttcagagaaaacatatgcaaaggacacattagatgagccgaagcggatagcaaagaagcttacttctcatgtatctggtacgggttgccataagaaagtttctgaaggaagcaatagaaaaagggataatgatttacatcggttgctgtttatgcctaatggacttccagacgggactgaattggcttactatgtgaaaacgcagaaactactacagggttacaagcaaggaagtggtatagtatgtagctgctgcagtagagagattagtccttcgcaatttgaagcgcatgctggaatggcggctagacgacaaccttatcgacatatcttcatctcttctggattgtcattgcatgatatagccatgtcactggccaatggacatgtcattacaactggtgatagtgatgacatgtg

SEQ ID NO: 97079 - DNA, 511 bp, Arabidopsis thaliana columbia
  unsure (1)..(511): unsure at all n locations
nnnnnnnnnnnnnnaaaaaaaattaaaagaacgaataaaaaatcaactgagatatatataaaaaaaaaactggaagaagaagaccgcccgcccgctttggatcgaatttgttaaatttttcttctctcgataataaaaacaacaaatgatcgttgatcgtttttctctagattcgattccgattccaaagaactagtctccggcgtgtaatctctgatcgttgaagatccaagctacgccgcatcttactcgccggcggcttgaatcatggctgataggagaaacaggtgtaaccagatcctccttttagcataccagagttttggcttagtgtttggagatttgagtatttctcctctctatgtgtataaatgtacattctacggaggattgagacatcaccaaacagaagatacgatatttggcgcgttttctttgatattttggaccatcactctcctttcactcatcaagtacatggtttttgtgttaagtgcagatgacaatggtg

SEQ ID NO: 97080 - DNA, 427 bp, Arabidopsis thaliana columbia
ccaacgtataccaagagtttcggagacgacgtcgttttgtctctgcgccgcgttcttagtctgagcgcacgctgggtcgtttctcctctaacgtcaactgtgtttttgcatcctcagagggtttaacatagttggggctaggaattttcatggtttctgttggttctaaatcattgccatctaggaggcacaggaccattgaggaagatagcttgatgggtgaacgaggaaagtctagtaacaatcacagtgaaaggaataagggaatgcgtaggaaggaccataagggtaaccgtggatttgatggagatagcagcaagaagaaccaatccggtggtgcccccaatgtaaagccagcatcaaagaaacactccgaattcgaacatcagaatcaatttgtcaggaaagagattgatccagagacttc

SEQ ID NO: 97081 - DNA, 886 bp, Arabidopsis thaliana columbia
  unsure (1)..(886): unsure at all n locations
caaatttagagcgagcaataatgagggtttctcaatctcttgtcccttttgccataattgctttggtcctttcctttgtcaatgcttatgatccaagtccactccaagacttctgtgttgccattgatgacctaaaaggcgtttttgtgaatggtaggttttgtaaagacccgaagcgagtcgatgcaaaagattttttcttctcaggtctcaatgtgcccgggaacaccaataatcaagttggctctaatgtgaccactgttaatgttgatcagatcccagggctaaacaccatgggaatatcattggtccgcatagactacgcaccgcatggccaaaatccacctcacacgcaccctcgtggctcagagatccttgtccttgtcgaaggaacattatacgtcggttttgtctcttccaatcaagataacaaccggttattcgccaaagtattgcaccccggtgatgttttcgtgttccccataggaatgatccattttcaggtaaatgtggggaaaattccagcagttgcttttgcgggattgagtagccagaacgcaggtgttatcacaattgcaaacactgtgtttgggtccaatcctccgatttatccagagcttcttgccagggcgttccagttggatgcaagtgttgtcaaagaacttcaggccaagtttgggtccatatgaactgatcatctaagtcgtttaagagtatttatcatcttttacaaaaaaaaagaaaaaaaagtatttatcattgaaacacttaattaaaggaatacacnnactatgaaatatttatgtaacaaaataaaaccngggattatngtaccaagtttcnatattataatatatcaacttttcccanatanaaaaaannaaaa

SEQ ID NO: 97082 - DNA, 537 bp, Arabidopsis thaliana columbia
  unsure (1)..(537): unsure at all n locations
nnnnnnnnnnnnnnnnnnnnnnnnnnnnnnnnnnnnnnnnnnnnnnnnnnnnnnnnnnnnnnnnnnnnnnnnnnnnnnnnnccacgcgtccgcgaaaccctaatttctctgcagatttttcccaaatctcagctctaagattcgttgtgagcaatgtcttctgtttcaagccagccacagtttcgttacacgcaacctccttcaaaggttcttcatttgagaaacttgccatgggaatgcactgaagaggagttaattgaactcggaaagccttttggtactggcgttaatacaaaatgcaatgttggagctaaccgaaatccagctttctttgcggttcgagatttgaatcaccctatacaaatgatgtcttaccctgcttcttcttctggagcccgctcaagttcgtggtaaaaactgtctacctccagtactccaacagggcaagagaatatgaacaaacacaccgacagcgggatgtttggggggaaatgtttcttttgggtagctttcgcaagcggacgatggcttttatgg

SEQ ID NO: 97083 - DNA, 437 bp, Arabidopsis thaliana columbia
gaggatccatggatatttcttgtaaaagtgtctttctaatcgtggctaagtcttcagttctatgcatgggggggtatagaaaaattgaagcaaaatagctattaaacgagaactttggtttactaaagacatcgacatattatattgttttagctcggtagaaaccaaatacttttcctaaggattccgttaaatagaaataaagaacgaagtaactagaaagattgttcgagttggcccgatctatcttctagaaggatcatctagaaagcaaaattttctgtgaaagtacccagacggaaaaaagctcacatagatgttatgggtcgaatttttatttcgttcccgtctttttttatttgggaatttctccatccatcataaaggagccgaatgaaaccaaagtttcatgttcggttttgaattagagacgttaa

SEQ ID NO: 97084 - DNA, 531 bp, Arabidopsis thaliana columbia
  unsure (1)..(531): unsure at all n locations
atgatacttccnnnnnnnnnnnnnnnnnnnnnnnnnnnnnnnnnnnnnnnnnnnnnnnnnnnnnnnnnnnnnnnnnnnnnnnccacgcgtccggacacactctcagtcgcacgctctttcacgcgccttttcgatttcacattcggatccgatttgttcacccgccgaagatccaccggcatcttctctaaacggctctgtcgagaaggatcggcgctattattgctggaggacgattgggtgtttactttttactagtaaacggagtaatttcccaagcgaaaggtttcatttttgagctccacgttgaacgaactaagcggtttctcggagttctcttgcttcctctccacccagcgcaatggagaaaacagacgaagagaggaagaaggctcagatgctggacgctcgggccagaaacattagccacaatgttcgctgcactgagtgtggaagtcagtccattgaagactcggaggcagatatcgctattcttcctagacagctgatccggaatgagataggagctgg

SEQ ID NO: 97085 - DNA, 687 bp, Arabidopsis thaliana columbia
  unsure (1)..(687): unsure at all n locations
ctgacgcgtggtctgtagggttttagtcggaggaagcaaggggcatgcgggttattactacacctgagggcttttcccgacggagttgagcttagaagctttctctccggttgacctacaacgggagggtccgaatcttcgtcccgggattatatctcctgaacctcagtcgatgattaaatatgggacgaatttgaagttgaaattttcggtcaccggagaagttacgactccggcgaaagtgactatggtatttccgacgttcacgacgcatagcttcgcgatgaatcagagggttttggttttggacaatgttaagtttacgaggaaaggcaaatcgccgatgtatgaggttcaagtgaggactccgaggtcggcgaatattgcatggcctggttattatatgatttctgtggtgaatcaagacataccaagcgaaggtgtttgggtaaagttagaatgattcattgacttttatttaatatctttatttttgtgtgtaattgtgttatattactgatatcaattgtatatgaatgtaataagaatatgtcttctcaacttgatgataataaattaattacctaaaaaaaaaaaaaaaaaaaaagnnnnnnnnnnnnnnnnnnnnnnnnnnnnnnnnnnnnnnnnnnnnnnnnnnnnnnnnnnnnnnnnnnnnnnnnnnacatt

SEQ ID NO: 97086 - DNA, 646 bp, Arabidopsis thaliana columbia
  unsure (1)..(646): unsure at all n locations
aacacaaaactcttccatttggcttctctcttgcatattcgctgcaaggatgggaaattcaaaaccactccctacaatttcttgtattatagtttcagtcttgtatttttcattctattgcataacaccaacttcttcatcagcctccatccaagatcaattcataaactgtgtcaaaagaaacacacatgtttcttttccactcgagaaaacgttattcacccctgcgaaaaacgtctctttattcaaccaagtccttgaatcgacggctcaaaatctccagttcttggcaaaatccatgcctaaaccgggattcatattcagaccgattcaccagtctcaagtccaagcttccatcatttgttcaaagaaactcgggattcattttcgtgttagaagtggcggtcacgattttcgaggccttgtctttatgtttcacgggttgaaaaaccgtttatattactcggcctgtcaaanttgnanncaaaatcanatgttggatattgnattccaaataggtncttggggtnaacctggtggctancgtttggtgagcttttactttcaagaatttgcangnggangtgcaaagattccatgggatttcccggggggtttnttgcacaatgtnntgggcattggtggg

SEQ ID NO: 97087 - DNA, 479 bp, Arabidopsis thaliana columbia
aacacttcaaaaaacatagcaacttcacttcttcctcctccttcctagtttctcgtttggtctcattctctttaattacctcctcctctgttctgctcatcccctgtttttatagttttatataaaatggtgagccaaaacgtcgtcgtatcagacgccaagaccgggatcataacgggctctacagtctctaactcctctgtctttactccgaccgctcaaaaaccaccgactgctcctggttacatctcagtttccaggaaaaaactcctcataaaccttgaaatcaatggagctgatcaaagtcaaagacttaactcttgggttgactccatgagagcttcttctcctacccatctcaaatcactttcctctttctcttccgaagaagaacacaattcttggatcaaacgacatccatcagcacttaacatgttcgaacgaatcatcgaagaatcaagaggaaaacaaatcgtcat

SEQ ID NO: 97088 - DNA, 1210 bp, Arabidopsis thaliana columbia
  unsure (1)..(1210): unsure at all n locations
tttgtgactcttggagcactctcttctctttgtctctgtgactcacattcatccaatccaggaggcatgtcgacatctgaggataaaccggaaatcatcagtagagtagttcatcaggagggtgacgtggaaatcgtcgatagaagtcagaaggataaggacgaggaaaaagaagaagggaaaggtggattcctcgataaggtgaaagatttcattcatgacattggtgagaaactcgagggaaccattggctttgggaagccaactgctgatgtctctgcgattcatatccctaagatcaatcttgagagggcagatattgttgtggatgtgcttgtcaagaacccgaatccagttcctatccctctcatcgatgtcaactacctggtcgagagcgatgggaggaaactggtttctggtttgatcccggatgctggaacactcaaggctcatggagaagaaactgtgaagataccattgacgttgatctatgatgacatcaagagcacttacaacgatatcaaccccgggatgatcataccttacagaatcaaggttgatctgattgtggatgtgccagtattgggaagactgacattgccgctggagaaatgtggagagatcccaattccaaagaaacctgatgttgatatcgagaagattaagttccagaagttctctttggaggaaaccgtggcgattctccatgtgaggcttcagaacatgaatgatttcgacttggggctcaatgacttggactgtgaagtttggctgtgtgatgtaagcattgggaaagcagagatcgcggactcgatcaagcttgacaaaaacggaagcggattgattaatgtgccgatgacattccgaccaaaggactttggttctgcgctttgggatatgattcgtggtaaaggaacagggtacacaatcaaaggtaatattgatgttgatacaccatttggagctatgaagcttcctattatcaaggaaggtggagagacccgtctgaagaaggaagatgatgatgacgacgatgaggaataaggaaacaaagtgctgcagagacagaatggtcatagttactaaatctccgatcttgaaatgtctatttaaaattaaaaaaaaagaaagacttgttttgtgtgctttttgataactgatggatcagacttttgaatagagccgtctttttattggacttctttnttcc

SEQ ID NO: 97089 - DNA, 574 bp, Arabidopsis thaliana columbia
  unsure (1)..(574): unsure at all n locations
gtaccgaaccgcagtttcgacccaggcgcacgcagacgatgtgtgctaactactccgaaacgcgctgtatacccctgcgggttacccttgcattcgtcccattcatgtcaaagctacagactttgtcttctctggcttaggcactcctggaaacactacatacatcatcaacgccgctgtcacacccgctttcgcagctcagttcccgggtctgaacggtctaggcctctctacagctagacttgacttagctcctaaaggtgtgatcccaatgcacactcaccctggtgcctctgaggttctctttgtccttactggctccattaccgctgggtttagctcctcggcaaacgctgtctacgtgcagacactcaaaacagggcaggtcaatggtttttccacagggctttgctttcaattttcaagatcaaacggggggaaaatcctctgntttcagccgttgtcaantttttaaaaagnggntaattcggggtctttaanntttnttggctttngnantttntttgctaaaaagnttttccactggacnngctggtgggntntntttcctttg

SEQ ID NO: 97090 - DNA, 1016 bp, Arabidopsis thaliana columbia
acacagtttatcccacacctctctatataaacacccgagaccgagaggagtgagaagagtagggaaaaagaaaagaaaagtagagtactatcttcctcttaaaccaaccattcaaaatgttgcgtactatcttcctcttatctcttctctttgctctatccaatgcctctgttcaagatttctgtgtcgcaaacctgaaacgcgctgaaacccctgcgggttacccttgcattcgtcccattcatgtcaaagctacagactttgtcttctctggcttaggcactcctggaaacactacaaacatcatcaacgccgctgtcacacccgctttcgcagctcagttcccgggtctgaacggtctaggcctctctacagctagacttgacttagctcctaaaggtgtgatcccaatgcacactcaccctggtgcctctgaggttctctttgtccttactggctccattaccgctgggtttgtctcctcggcaaacgctgtctacgtgcagacactcaaaccaggacaggtcatggttttcccacagggcttgcttcatttccagatcaacgcgggaaaatcctctgcttcagccgttgtcactttcaacagcgctaatccgggtctgcagattctcgacttcgcactctttgctaacagtcttcccactgaactcgtcgtgggtactactttccttgacgccactacagtcaagaagctaaagggtgttcttggaggaactggctaaaaaaagacttaggactactccttgactaaaacaccaaaacctgtttcttcatctttttttctctttaattgattcttgtcttctctgttttgtgtgccttgtaattcttcaaaacctgtcaaaattgttacattgtatgtgagttttttcaattaagatcctgagttggtcacaccgttcaaaaaaacccaccccatagagcgaccgctctagaggatccaagcttacgtacgcgtgcgtgcgacgtcataatcttaaacgaatggcaatcaa

SEQ ID NO: 97091 - DNA, 715 bp, Arabidopsis thaliana columbia
  unsure (1)..(715): unsure at all n locations
cgatactaacagagccttcacagagagatgtttcgattcaatttccgtcgtgaaatctccaaatataccggagtttatcaccggaagatgcacagcggtctagaagatgccggtccgatggcgtctcgccttaaatcacgttccgttgtccggtttagcggaccggatacggttaagtttcttcaaggtttgttaaccaacgatgtacggagattcggcgaatcctccggcgagaagaactcggcggttcctacgccgaacatggcttccgttacgaatccgcctatgtacgcagcgttgttaactcctcaaggaaggtttctatacgattttttcttgtatagcccttcgagacccgatgaaaagcttgatcggactggttcaggacccgggtcggattcgggtcgtgatgggtctgttgagttgtttgcagatgttgatgttgatgtcctcgatgaattgcttgaaactctcaaaaaatatcgcttgaggtccaaagtggatattgaaaacgttgcagaggagttttcgtgttggcagcgttacggtaggaatcttactggatcatcatctgttggttggggtggtggtgttgatcgtgctggtgagtctacagctagtggtnataagtatggatggcaatggtataaggatccgaggttggagtgtctcggttacagaagtatctttccgtctgatgcaactccgcctttag

SEQ ID NO: 97092 - DNA, 600 bp, Arabidopsis thaliana columbia
  unsure (1)..(600): unsure at all n locations
cccacgcgtccgcccacgcgtccgcaaatctctttctcttcctccatgggcatctgaaaccaaaaccttgctctccttctacttcatcaagaatccctttatgaacaccctacatcagaccaaacacgatccagcctctccggtgatcgaccaaatgtcggttcttgacctccctgagctggctcttgactgcattcttgaccttcttccaccctctggactctgcagcatggctagggtttgtagctccttgagggagagatgtgttagtgatcatctatgggagaaacatttgaagaccaaatggggcaaaatccttggccctgctgctcacagagagtggcaatgctatatctcctctnccacatatcatcttgattctcctcatcatcaaactgggaatcttggttttgccaaaatnatctctctgatccgatctntntcaatccgttttccgagnggntaaacaanggagggggtatgcancttctctgccacttgattnnagcaatgagcngctacctgnttcccggtgaaanaaggtngtttttgggtcccngcttnatggttnanaaccggtagggantggacatcttaggg

SEQ ID NO: 97093 - DNA, 617 bp, Arabidopsis thaliana columbia
  unsure (1)..(617): unsure at all n locations
nnnnnnnnnnnnnnnnnnnnnnnnnnnnnnnnnnnnnnnnnnnnnnnnnnnnnnnnnnnnnnnnnnnnnnnnnnnnnnnnnnnccacgcgtccgcagtttggttcatcaaatcccttttctcccatggaagaaagcaacaactcggccgttgtggattttcctgacaactttatggaccagctcttgtgggaggagtgctgggaagaagaggcaacgcagcatgaccaggcattatcatcaccatcagggctgaaggagagggtggcttgcgccatggggcacctgcaagaggtgatgggagagagggagttgctgatccagctgtgggtgcctgttgagacaaggagcggccgagtgctgagcacggaggagcagccttactctatcaacaccttctcccagagccagagcctggccctctaccgagacgcctcagctggctacagcttcgcagcagaagttgggtcggagcagctggtggggctgcctgggcgtgtgttcctgaggagaatgcctgagtggaccccagacgttcggtttttcacgaaggaggagtaccctcgcattggatacgcccgcaggtaccaggttcgagccaccctcgccctcccactct

SEQ ID NO: 97094 - DNA, 373 bp, Arabidopsis thaliana columbia
gtcttcttgttgattttttaaattttgggcccaacaaaaatttactagaccaacccacttagaggaagtaaaaatttacttctctttttttactcagaggaagtaaaaagtatcggaggaacaaaagagataaactcatgcagaactcctttacttattcaacacaatagtctaacttgtagggattcattgaagagaaattgactaattcttcctaacaactgacaagtagaacaaggagaagcaacttttctccatgaaacaaaccaagagtttgaggtgatgccttagcattcttcgaaacaatcaatcacttcagcatatttggtgagcaagtttataccggagagaaagcccaaatatgtttactggg

SEQ ID NO: 97095 - DNA, 601 bp, Arabidopsis thaliana columbia
  unsure (1)..(601): unsure at all n locations
gaagggagggcaggcccccattaaaaaaaagctncccntttgagaaaagnccaatttaatcgggnccgaatggactttggacggattcctaaggatcatcccatttaaatttggtcaagtatttgatgttccaaatatcatagtatactgatgacttctttttccccccgatttgttctccatttagcatatctgcaacccgtttagctacgctcttcttagcaaactccacccacccttcagaaaacctttggccacgaaatccaccagcccgcttacggtgcacttgtgcttcagaatcttcaggtgcaagataaatccttccgagttctccatattgagcgagaatacggcgaagtctaacgtgatccatgtgtggtgggatacgacttaagtagcaaacacctctattgtcagctttcgaagcttccttaagcaatttctctttcaacttctttttctttctatcagccttttgactcttcatcgtttccttggactccttctcctcggatattccatccgtaagctcgtgagattcctcactctgcatcttcttcagcagcgaaagtgagaaagaaaaagaagctagtgccgtcgg

SEQ ID NO: 97096 - DNA, 681 bp, Arabidopsis thaliana columbia
  unsure (1)..(681): unsure at all n locations
ttagtgtttaagaaacaaataatgaggtctatctcctttcttcatctctatctctagggttgctaaatctattgatgctggtgattacgactacgcaattgcatttcaggagaggattaggattcctgatgagaaaatgacttactatgaggatttagctgagatgtatgttggagatgatgtgtcgccggatttctatggttgggtgttccctaagtgcgaccatgtagctgttggaacaggtactgtgactcacaaaggtgacatcaagaagttccagctcgcgaccagaaacagagctaaggacaagattcttggagggaagatcatccgtgtggaggctcatccgattcctgaacatccgagaccacgtaggctctcgaaacgtgtggctcttgtaggtgatgctgcagggtatgtgactaaatgctctggtgaaggggtctactttgctgctaagagtggaagaatgtgtgctgaaccattgtccaaggtccacagaatggtaagaagatgatttaccgaaggggctttagggagnccttgggnaatngggaaaaccatcttnccnaccncagggnctttatgtgtccnaaaangttttcanctaacccggaaaaaacggttttgaatnnaanngtgaattccaaatcatngacacttcaacggtccccgngcctt

SEQ ID NO: 97097 - DNA, 1809 bp, Arabidopsis thaliana columbia
  unsure (1)..(1809): unsure at all n locations
nnnnnnnnnnnnnnnnnnnnnnnnnnnnnnnnnnnnnnnnnnnnngcaggtaccggtctggaattcccgggtcgaccacgcgtccggagagagagagactccattgttgaagtgtgttcactgaactcctcctcaaacaacaatggcgacgacggttacactcaaatccttcaccggacttcgtcaatcatcaacggagcaaacaaacttcgtctctcatgtaccgtcatcactttctctccctcaacgacggacctctctccgagtaaccgcagccagagccactcccaaactctccaaccgtaaactccgtgtcgccgtcatcggtggtggaccagcaggcggggcagctgcagagactctagcacaaggaggaatcgagacgattctcatcgagcgtaagatggacaattgcaagccttgcggtggcgcgattcctctctgtatggtcggagaattcaacttgccgttggatattattgatcggagagtgacgaagatgaagatgatttcgccgtcgaacattgctgttgatattggtcgtacgcttaaggagcatgagtatataggtatggtgagaagagaagttcttgatgcttatctgagagagagagctgagaagagtggagccactgtgattaacggtctcttccttaagatggatcatccggagaattgggactcgccgtacactttgcattacactgagtacgatggtaaaactggagctacagggacgaagaaaacaatggaggttgatgctgtcattggagctgatggagctaactctagggttgctaaatctattgatgctggtgattacgactacgcaattgcatttcaggagaggattaggattcctgatgagaaaatgacttactatgaggatttagctgagatgtatgttggagatgatgtgtcgccggatttctatggttgggtgttccctaagtgcgaccatgtagctgttggaacaggtactgtgactcacaaaggtgacatcaagaagttccagctcgcgaccagaaacagagctaaggacaagattcttggagggaagatcatccgtgtggaggctcatccgattcctgaacatccgagaccacgtaggctctcgaaacgtgtggctcttgtaggtgatgctgcagggtatgtgactaaatgctctggtgaagggatctactttgctgctaagagtggaagaatgtgtgctgaagccattgtcgaaggttcacagaatggtaagaagatgattgacgaaggggacttgaggaagtacttggagaaatgggataagacatacttgcctacctacagggtacttgatgtgttgcagaaagtgttttacagatcaaatccggctagagaagcgtttgtggagatgtgtaatgatgagtatgttcagaagatgacattcgatagctatctgtacaagcgggttgcgccgggtagtcctttggaggatatcaagttggctgtgaacaccattggaagtttggttagggctaatgctctaaggagagagattgagaagcttagtgtttaagaaacaaataatgaggtctatctcctttcttcatctctatctctctttttttgtctgttagtaatctatctacactaatgttgttactcttcaatgtattcagtatcatatttatgttttctgttcattgaattagtcaaaaagcatttggctttacaatccccaaaaaaaaaagaaaagcagatttcacnannnaagggcggccgctctagaggatccaagcttacgtacgcgtgcatgcgacgtcataatctttctatagt

SEQ ID NO: 97098 - DNA, 399 bp, Arabidopsis thaliana columbia
gaatcgttttttaagttttgctagttgagatattattgggggttactgtaatatcgaagaatcatatttcacggtatttactatagacaactactgtagagttacttgattaaggcgttaagaagagatactggtgttttttggcctcaatcagctaagatttttgtgcattgtatgatgagtatagcaaatgaacaacaatttgccatggatcaacttgtcgaaaccaatgatgattccgaaaagaaaccaagaattacatacacgaggaagtttcctatatccttgagcgagaaagacgtttgcaagaagctgccaaatctgcctggtgaatttgatgaagcactgttgcttgacttcgaagatccttcacccgagcgagcaagaatttcaggcgat

SEQ ID NO: 97099 - DNA, 593 bp, Arabidopsis thaliana columbia
cgtccacacgtgcccaaattcggagactggaccgaagatgctccattcacggtcgtgttcgaaaaagcaagcaagagcaagaaaaatatgaacgtggccaacccgaatgaatatccagatatgaatccaaacgctgcacaaaatcgaaatatgtctaggcctgaccaacaaccaccaaaccataatgttagaccaagacatgaaagattcaatagcagagacgaaaccgatttcagaccgtctcctgcacacaatgaaagaaacaacggagttggatcagttcctcccacaccagaaacatacaaccatcaaacatatggtggaggtggcagatcaatgggaaatccaacagaaataaatagacggcaatcacgtgatcatgtcccggcgcggccaatacgcaatcttagagggcaaagtagtgaaagggtatgcataactttaccattttatagtacaaaatatgtgtcacaactcataaatatatatcgctaagtaagtgtatttttctcaattaggtggcgactattcctccatttcctggaacgggttctaacatggaaaatcagagttacacacttatctttgacaaa

SEQ ID NO: 97100 - DNA, 530 bp, Arabidopsis thaliana columbia
  unsure (1)..(530): unsure at all n locations
nnnnnnnnnnnnnnnnnnnnnnnnnnnnnnnnnnnnnnnnnnnnnnnnnnnnnnnnnnnnncacgtaacatattacacaagagccacgcgtccgatacaaatgagagatcataaacgttaagtcggttatgtttcggtttgagctaattagaagttcatataatccgccgtccgctaatattcctcgattagaatctccggcgatcagaaatctcgcggtgaattttgatggaagaaaagctgccaaaatcgctcaagaatctcgatttgaatacgaatcgtggtcgtggaccagagaataagattcttgtttcagcttatgtatcttcgtcacgaatgtctccactgaaatcaaaacctccatctcttgtgagctcatgtcttggtgttattgggaagcatttggaggatatgattcgttgtttagctgaaatctctgttatatttcctgcagacatcaagatgtcgattgcagcaattcctagaagaaaaaagctgctggatgatgatgtgattatctggttggctga

SEQ ID NO: 97101 - DNA, 515 bp, Arabidopsis thaliana columbia
  unsure (1)..(515): unsure at all n locations
nnnnnnnnnnnnnnnnnnnnnnnnnnnnnnnnnnnnnnnnnnnnnnnnnnnnnnnnnnnnnnnnnnnnnnnnnnnnnnnnnnnccacgcgtccggttttgagaatttgacaaaaatttgtttatgtaatcttagttttcgctgattttgagtaagttatcgacatggatattgatgtcggaccagttgatccatctgtcctatacgagcaagacctccatgtttcttctgctgtttgggaaggacaggaacgaggtctacttcgttgtcaagaacacacttcattgctacatcaatggaaactcactgatgaacaaattaacctcgtggacaaagctggtttcggttactttcgcaaaatcggtccaatgagtttaaacaattcactgatctctgcacttgttgagcgatggagaagagaaaccaatacttttcatcttcctttaggagaaatgactataaccttagacgaagttgctttagtacttggacttgagattgatggagatcccattg

SEQ ID NO: 97102 - DNA, 499 bp, Arabidopsis thaliana columbia
  unsure (1)..(499): unsure at all n locations
ttggttcanttctccaccttaagggcagaaaaaaggattgatcaaattctattgagtctgactcatagtgatcatttatcaaagantgactctggttatcaaatgattgancaaccgggaacaatttacttacgatacttagttgacattcataaaaagtatctaatgatttatgagttcaatacatcctgtttagcagaaagacggatattccttgctcattatcagacaatcacttattcacaaacttcgtgtggggctaatagttttcatttcccgtctcatggaaaaccctttcgggtccgcttagccctatccccctctaggagtatttgagtgatgggttctataggaactggacgatcctatttgggcaaatacctagcgacaaactcctatgttcctttcattacagtatttctgaacaagttcctggataacaagccgaaaggtttttttattgatgatatcgatattgatgatagtgacgatatcatca

SEQ ID NO: 97103 - DNA, 390 bp, Arabidopsis thaliana columbia
tccgcgggtcgcacgccacggcgtcacactgacggcattaccatactacattccgatcgcagattctgcgctacaggtacatgaactggacaacttattctacctgaagcactcaagcttttgccattatatactctcgccttaaccaaaggtgtggggttacgaatggacgggagaattgatgaccgatcattttggataaaccatgtgtcttcattgtccactcctttggctattccgctagtttatccaaggatgattgctgtccatgatcttgatgcaaatgataatgaagaaaatgtggttccttgtccaatcccattacaaagtgaacaccttagcgatgagggagtctattttcttgagaacggtgaagatggtttgatatat

SEQ ID NO: 97104 - DNA, 486 bp, Arabidopsis thaliana columbia
  unsure (1)..(486): unsure at all n locations
attccactttagaacaatttgtgagagatgtgtttttaatagggacaggtgcaatggaatacagttcagcacacactgtatattatcgacaggcacgggctatacaagagttggcaaaaaaggattttgagaatttaaggcaagacagtgatgatgaagaaccacaaagccaacaacagcaacagcagcaaccaaaagttgccagaagaggccgtccgccaaagaaacatcctgagccgtcttctattgaccgcactgcttctgaaatgtcagctgatgctctcattcctggggatagctctaacaagttttctggtgcttacaatttaagaaaggctcctccttcatacaaattccgccaagcagaatcatcagttagaatcantcataacagtgnacccagngtggttggtcggtaggcttggggngngcggatttcccatctttcgggttgtgaaggcgggttaancaaggtnttgggggttg

SEQ ID NO: 97105 - DNA, 496 bp, Arabidopsis thaliana columbia
  unsure (1)..(496): unsure at all n locations
nnnnnnnnnnnnnnnnnnnnnnnnnnnnnnnnnnnnnnnnnnnnnnnnnnnnnnnnnnnnnnnnnnnnnnnnnnnnnnnnnnnccacgcgtccgcccacgcgtccgattttgattaggctctctgtttctctttcttggttctaaaagatatccgtcactctttagtattatgggaatcggtgaagaaagcacaaagcctatttgggggagcgtgagccacacgtcttcaggctacgctctcaacggcaaaatcatgctctcctccgtgatcgttctattcgtcgccgttattatgatcctctgcttccacagctacgcccgttggttattccgtccgcacaaccgtcgcattcgccgccgtattcgttctcacctccgcactctctccgcctcaccccgagaccaagctctcgaccaggctgttctcgacaagattccgatcttcgtgtactcctccaagaatccaccccccccagaagagaaaggaggagtgct

SEQ ID NO: 97106 - DNA, 422 bp, Arabidopsis thaliana columbia
agactacattaggggatctctctttgttcgctttgtggggaacgaactatggccgagagatggaggaacacggctctactcgtcatcgacatgcagaacgatttcatagaggaaggtgctgtgacgcaagtgaaaggaggaaaatctatagttcctaatgttatcagagtcgtcgaactcgcgaggcagcgtggtattctcgtaatttgggttgttcgagaacatgatcgtcaaggaagagatgttgaattattcaggcgccataactacagttctgagaaagtcgggccagttattaaaggcaccgtaggagcagaattggttgatggattgatgatcaacgaagaagatgactataagattgtgaaaactcgtttcagtgctttctttagtaccaatcttcattccttcttgcaaacttc

SEQ ID NO: 97107 - DNA, 726 bp, Arabidopsis thaliana columbia
  unsure (1)..(726): unsure at all n locations
gggaaaaaaacccaccctttccnaaaaaagtttaaaagggaaantcccncgnaaannacggtnnnttgnatgnaacgaaccccaaaaaagcttccaaangngggaaaacctccggncattnctaccgnggccgttgataancanaaccttatgtacgcagatgggtcncgacaaaccctcaatggagaccgtttgttgaccgcgactggcggtttggtcactaccaaatggatggtcttcaagacccgttgagtcgcgtggctcgaacccttctcatatggccgcttatcatgaaaaagaggataagaaaagttaagatcaagcacaccgatgatgctgggcttgttctacatcctgctttagcctcaccctttgactagagaaagaggtagaagaaatccgagtgtacaaactcatttccctgtatgatttgccaaacctttgggcctttggcgccattagagacgattcaccgttttgttgttaatgtttaaataaaggcaaaacggcatgatgttcggatgaggtgctttgttttttacatacgcctcgggactttaaccaacgacatttggttggaccaattaatagtaagtttaaccgacccaatgtccggtttttgttcaaaaaaaaaaaaaaaaaaagnnnnnnnnnnnnnnnnnnnnnnnnnnnnnnnnnnnnnnnnnnnnnnnnnnnnnnnnnnnnnnnnnnnnnnnnnnnacaatc

SEQ ID NO: 97108 - DNA, 677 bp, Arabidopsis thaliana columbia
tgtttccgacagtgatggacatcaataagatacaagagattttgcctcacagattcccatttctgttagttgatagagtgatagagtacacagctggtgtatctgcggtagctattaaaaacgttaccattaatgtctgcttccttcctgggcatttccctgagagccctataatgcctggagttctcatggttgagccaatggctcaagtgggaggtatagtgatgctacacccagaagttggcggatctagaagcaacttcttctttgctggaatcgacaaagtcagattcaggaagccagtgattgcaggtgatacgctggtgatgaggatgacacttgtgaagttgcagaagcggtttgggatagcgaaaatggaagggaaagcatatgtagggaactctgtggtatgtgaaggagagttcttgatggctatgggaaaagaagagtgatcacgcctttgtttctttcttcttcatatgggccttgtggctgctaattagttgtcacatcctaagttgagtctcatttctatcttcaatttatgatgtttgtttgcacattatgattatattaaaaaagcaacttcagttttaataaaaaaaaaaaaaaaaaaaaaagggcggccgctctagaggatccaagcttacgtacgcgtgcatgcgacgtcatagctc

SEQ ID NO: 97109 - DNA, 389 bp, Arabidopsis thaliana columbia
acggtttgattctccaaatcaaaagagattacttgaagagagaggtttgtgggaactaaagttaggttttggttgttcttgcaagtgagttgaaactctgtttggccgcaataattgggtttattgactccccagaaaggatacgtcacgtttggcaacagcctcggacctgcgtactaatacgagaattgggccaataataagactaaaaatgatatggattttatctaacatggatttaataagagattgacaaaaaagatccatctggaacagagtcaatctaattgtagtagggctatttttcttttcttttttttttgtcatactcatatatattgggtttctaattttcaacaaatgcgttgagaagaatagttccataaata

SEQ ID NO: 97110 - DNA, 983 bp, Arabidopsis thaliana columbia
  unsure (1)..(983): unsure at all n locations
gtgccacatccccccnctcggttcgacggtatcgcataagcttgatatcgaattcgcggccgcatatataccatggcgctcttgtctcaagcaggaggatcatacactgttgttccttctggagtttgttcaaaggctggaactaaagctgttgtttcgggtggcgtgaggaatttggatgttttgaggatgaaagaagcttttggtagctcctactctaggagtctatctatttaatcaatgcttctccattctgttaagaggagtaagagagggcatcaattgattgttgcggcaagtcctccaacggaagaggctgtagttgcaactgagccgttgacgagagaggatctcattgcctatcttgcctctggatgcaaaacaaaggacaaatatagaataggtacagaacatgagaaatttggttttgaggtcaatactttgcgccctatgaagtatgatcaaatagccgagcttcttaatggtatcgctgaaagatttgaatgggaaaaagtaatggaaggtgacaagatcattggtctgaagcagggaaagcaaagcatttcacttgaacctgggggtcagttcgagcttagtggtgcacctcttgagactttgcatcaaacttgtgctgaagtcaattcacatctttatcaggtaaaagcagttgctgaggaaatgggaattggtttcttaggaattggcttccagcccaaatggcgtcgggaggatatacccatcatgccaaaggggagatacgncattatgagaaactacatgccgaaagttggtacccttggtcttgatatgatgctccgaacgggtactgttcaggtaatctggntttagctcagaagctgttttgntcaggaggttcgncctgggctnntttanaaccttnggaacggcnnttttngnattccccttncagaggaanccaancgggtttttnncatgggnggcccttttggcagaacttcata

SEQ ID NO: 97111 - DNA, 788 bp, Arabidopsis thaliana columbia
  unsure (1)..(788): unsure at all n locations
tcgcgatctagaacttcccattcaaccaaccaatgaagctttactcaagcctttggaacgcggatgattgggccacgtactcctagatccttagcattcttgaacgttcggattggtatgttgtcaccaaagaatacgatctggtacatgttccaaaggattgagtaagtgtgatagcccttagaaggatcaaaccagagatagattcgttgttctctgtttccctttcctcctgtgaatacatttgtctgtaatatagctggttgtcctgttctgtttccaaggaactcaaagtctatctcgtcatgctcattgttggtagatgatagatagaaagctgtgacaactccggctgtgtcaccagctggaagctttatgtgcatactanaatgtccaaacaaatatgacccctttgattgaaatcctgtgccagtgtatttgtcgaggataagctgaagttcggaaccgccattgaactgtttctggtggtcaaaagcccaagttgggacgtagttacgaccaaatggtacatcaatggccttgcgtggaggaatagccattaccattgttgaagaaaccattagaaagagagccatgagagcccatggagatgaagaaacagtcatggttgtgttttagaaagagatagagagaaatgatgatgatgatcggacgcgtgggcggacgcgtgggcggacgcgtgggcggacgcgtgggtcgacccgggaattccggaccggtacctgcaggcgtaccgagctttccctaagtgagtcgtattagtgctg

SEQ ID NO: 97112 - DNA, 1427 bp, Arabidopsis thaliana columbia
  unsure (1)..(1427): unsure at all n locations
nnnnnnnnnnnnnnnnnnnnnnnnnnnnnnnnnnnnnnnnnnnnnnnnnnnnnnnnnnnnnnnnnnnnnnnnnnnnnnnnnnnaccacgttaaagaataaaacttgtttttttttttttttttatgaaaatacatagctaatcaatacatatatgaattataacatgtaattttaggcccaaatatagcataaacatcatgggccaacaaacaatacatatatcaatctcttgaacaagcataattcaaataataatgatagcataaattcattaaaaccctcaagagtagtaacttatgcgtctctgtcccttttacattcagctggcataaccgggaacctagtccggtcggtacagtagttgtagatggtccacttcatacgaacccatttgagacgacgccattgttcagcgtcaaggtcacggaactctttctgatcccaccacatgcggccttgtgtggcacagtacttggcttccacagaagcttggcaaccatctatgtggaatcctttgtaagatgcaacgaaaggtgcattggcccaattggtcttctctaaaccgcctctcgtggcccaatcatccgcgttccaaaggcttgagtaaagcttcattggttggttgaatgggaaacgtactcctagatccttagcattcttgaacgttcggattggtatgttgtcaacaaagaatacgatctggtacatgttccaaaggattgagtaagtgtgataagccttagaaggatcaaaccagagatagattcgttgttctctgtttccctttcctcctgtgaatacatttgtctgtaatatagctggttgtcctgttctgtttccaaggaactcaaagtctatctcgtcatgctcattgttggtagatgatagatagaaagctgtgacaactccggctgtgtcaccagctggaagctttatgtgcatactaaaatgtccaaacaaatatgacccctttgattgaaatcctgtgccagtgtatttgtcgaggataagctgaagttcggaaccgccattgaactgtttctggtggtcaaaagcccaagttgggacgtagttacgaccaaatggtacatcaatggccttgcgtggaggaatagccattaccattgttgaagaaaccattagaaagagagccatgagagcccatggagatgaagaaacagtcatggttgtgttttagaaagagatagagagaaatgatgattatcctggatctgacagctgactggactccagcagagagagagatgctaaggaacaaagtcccagttactggcttaaagactccttttagggatggtttgttaaagcatgtcgctgaagatgtccctgaaactcgcaaaggatggtttagagcgcagaggctacaaggaagcggtttcttgaacgcagtcgatgaagtggtcat

SEQ ID NO: 97113 - DNA, 2122 bp, Arabidopsis thaliana columbia
  unsure (1)..(2122): unsure at all n locations
agcccacgcgtccgctttctttcatttttttatcagtttctcatttctctctcagtcgcatataaatttgaaacgccgattcgtttttgctctttaagctttcttcttgatttcgacggtgtctctcaatctccgtcaagcttgacgaatttcaggagctatatataccatggcgctcttgtctcaagcaggaggatcatacactgttgttccttctggagtttgttcaaaggctggaactaaagctgttgtttcgggtggcgtgaggaatttggatgttttgaggatgaaagaagcttttggtagctcctactctaggagtctatctaccaaatcaatgcttctccattctgttaagaggagtaagagagggcatcaattgattgttgcggcaagtcctccaacggaagaggctgtagttgcaactgagccgttgacgagagaggatctcattgcctatcttgcctctggatgcaaaacaaaggacaaatatagaataggtacagaacatgagaaatttggttttgaggtcaatactttgcgccctatgaagtatgatcaaatagccgagcttcttaatggtatcgctgaaagatttgaatgggaaaaagtaatggaaggtgacaagatcattggtctgaagcagggaaagcaaagcatttcacttgaacctgggggtcagttcgagcttagtggtgcacctcttgagactttgcatcaaacttgtgctgaagtcaattcacatctttatcaggtaaaagcagttgctgaggaaatgggaattggtttcttaggaattggcttccagcccaaatggcgtcgggaggatatacccatcatgccaaaggggagatacgacattatgagaaactacatgccgaaagttggtacccttggtcttgatatgatgctccgaacgtgtactgttcaggttaatctggattttagctcagaagctgatatgatcaggaagtttcgtgctggtcttgctttacaacctatagcaacggctctatttgcgaattccccttttacagaaggaaagccaaacggatttctcagcatgagaagccacatatggacagacactgacaaggaccgcacaggaatgctaccatttgttttcgatgactcttttgggtttgagcagtatgttgactacgcactcgatgtccctatgtactttgcctacagaaagaacaaatacatcgactgtactggaatgacatttcggcaattcttggctggaaaacttccctgtctccctggtgaactgccttcatataatgattgggaaaaccatctgacaacaatattcccagaggttcggttgaagagatacttggagatgagaggtgctgatggaggtccctggaggaggctgtgtgccctgccagctttctgggtgggtttattatatgatgatgatagtctccaagctatcctggatctgacagctgactggactccagcagagagagagatgctaaggaacaaagtcccagttactggcttaaagactccttttagggatggtttgttaaagcatgtcgctgaagatgtcctgaaactcgcaaaggatggtttagagcgcagaggctacaaggaagccggtttcttgaacgcagtcgatgaagtggtcagaacaggagttacgcctgcggagaagctcttggagatgtacaatggagaatggggacaaagcgtagatcccgtgttcgaagagctgctgtactaagaaaatgggacgtgaacaaaaggtgtctataaacctttgggtgtgagtttatgctatctgaagaattcgagtctccggaataaggatttttttttttggttgtaatcggattttaaaaactgattttgttttagaaattcgaagcattgaaaagcagaagaaaaattgtatgtactaaacgatttcggtgtgggaaatcgtttgggagggtgtgtttggatcttgaataaattacccatttttcttgtccnnnnnnnnnnnnnnnnnnnnnnnnnnnnnnnnnnnnnnnnnnnnnnnnnnnnnnnnnnnnnnnnnnnnnnnnnnnnnnnnnnnnnnnnnnnnnnnnnnnnnnnnnnnnnnnnnnnnnnnnnnnnnnnnnnnnnn

SEQ ID NO: 97114 - DNA, 370 bp, Arabidopsis thaliana columbia
accacagcgtccgtcaggaacccagaaagagggacttgtcttttacctccaaagggttcctgccgtttcttttctacaatttttctcctgctaattatcaaatttttcttctgattttcattgtttgttagagattcttcttctcctctgcttttctattctctgggagctcgatgatggatgataaagctcgcaaagaagaagaacatcatgtgtctcaccaacataatcattctcctctgcaaagggatggaaattctgctgagattgcacaaggacaagagctatcatcaccgggccgagacctatggaggcgaagtcttgtgttagatttaccatcaacaacacctgaagatactacaagagatga

SEQ ID NO: 97115 - DNA, 506 bp, Arabidopsis thaliana columbia
  unsure (1)..(506): unsure at all n locations
gatgacgggtgacaccataagaagaaatgccttcagctatctcagagtaaagacttgcctccttagcaccacgtcctgctccactaacaccagattttgcatcgataatgatgttttcatgtttgatgagatttgcctttagtaaaggaacaagaggaagttgaatcgtagtcgggtaacagcctgggttagccacaagtcgtgcctttttttatgtcctcccttagtatctctgttagaccatacacaacttctttctgtaactctactgccttgtgaggctgaccataccattcttcatattctgcaatattacgcaaccggaagtccgctgaaagatcaacgattttcaatgcagtaggcagttccttgatgatttcctgagttgttcccttctgtcgtcttctcgcagccgtacggacgcgtgggcgcacgcgtggnnnnnnnnnnnnnnnnnnnnnnnnnnnnnnnnnnnnnnnnnnnnnnnnnnnnnnnnnnnnnnngta

SEQ ID NO: 97116 - DNA, 971 bp, Arabidopsis thaliana columbia
agacgatcttgctccttcttcttcttctttttcttcttcttcttcaactcgggaagatcaactctcaaatcctgtatacactctcttctcagctgtaatttctataatctcgtcaattatcatctattcaggggtaagctatgggatgtgcttcttctcttccagataggaactctggaactttaagtggtcttagcaattcagagaatgctgttccagctgatgccaaaaatctacgtgtgaagttagttctattaggagactctggtgttggtaaaagttgtattgtccttcgatttgtacgtggtcagtttgacgctacatctaaggtaactgttggagcctcgttcttgtcccaaactatagcattgcaagactctaccacagtgaagtttgaaatatgggatacagcaggacaggagaggtattctgctcttgcaccactatactaccgtggagctggagttgctgttattgtgtatgatataacaagccctgaatcgttcaagaaagcacagtattgggttaaggaactgcaaaagcatggaagcccagatattgttatggctctggttggtaacaaagctgatctacatgaaaaaagagaagtacctactgaggatggaatggagcttgcagagaagaacggcatgttcttcattgagacgtcagccaagacagccgataacataaatcaactgtttgaggaaattggcaagaggctacctcgtcctgctccttcgtcatgattggagtgttgaatcatctcatcttcagccatgtcttcagactactaatctttccatactttttaatgtaatgtttcaaaacaatatttctctatctgttaagtcaagtgtgttgtataatgtgaagatttgagtttgaaactggggatattacgaacctcaaaagtggaaacccaagttatatcaagcaatggatcatcagtacatattttagtgggattc

SEQ ID NO: 97117 - DNA, 662 bp, Arabidopsis thaliana columbia
tgttaaagtgatgatgtgtcaatcatatggagagagttggccaactttcatatatatgattcttaaacctgtaaaagttcagttcacccgacgaaccaacttccaagtagtagtccaaatcatagattcttttgaggttttaaatgtaccctcacgtcagaatctacttaagtctttcccctttttctgtctctctttcaccttttcttctccatcgatcttacctccacggaacttcttatttaaatcaaaaaaattcagaatcttttaatctcacgcaggcaaatgtctcgtaatttaatctatagaagaaacagagctctctgttttgttttaatcgtgttctgcttcccttaccggtttggcgctagaaacacgccggaggcggaccaatccacagcaaaagcaactcaaataatacacgtcagcaattccacgtggcatgatttctctcgtcttgtagatgtccaaataggtagccacgtcagcggcgtatcagagctcaaaagatacctccaccgattcggttacgtcaatgatggctccgaaatattttccgacgtgttcgatggtcctctggaatcggcaatctctctgtatcaagaaaatctcggtttaccaataaccggaagactcgacacgagtacagttactctcatgtc

SEQ ID NO: 97118 - DNA, 811 bp, Arabidopsis thaliana columbia
aagtaccgcttccggaatttccgggcttcttcgattttcctctcagaccaatcgggctttcgaatcccatcagtagaaatggctacatcaaggttccaagcattcttgaacagtcccattggcccaaaaacaactcatttctgggggcctatcgctaattggggttttgttgctgctggtttggtggatatgcaaaagccccctgaaatgatttctggaaacatgtcgtcagctatgtgcgtttactctgcattgttcatgaggtttgcctggatggtgcaaccacgtaactatttgctacttgcgtgccatgcatcaaacgagactgtacaactctatcagctctcacgttgggctagagcccaggggtatttatcctccaagaaagaagaggagaaaccatctcagtaaaccaaaatgaggaaaggtttcttcaacgctgcttcagaatttgttcgtgggaattactgaatccatccatttgattttctttcgaaacgtgttttgtattgtgtccccaagctatggttgctttacttgttggatcattcactaacattatatcctttgttttcataagtaaccgcttgtaataaaatttgggaccagtcgtcattcaaaaaaaaaaaaaaagggcggccgctctagaggatccaagcttacgtacgcgtgccttgcgacatccttagctctttttataggggccacctaaaattcaattcaacttggcccggcggttttaacaaaccttcgggaactggggaaaaaacccttggcggttaaccccaaacctttaaatccgcccttggcc

SEQ ID NO: 97119 - DNA, 1571 bp, Arabidopsis thaliana columbia
  unsure (1)..(1571): unsure at all n locations
ggatggccgacttggtccggttattcaactgttttcttccaccaccaagcagacgacggttggtggagcatcttccgggtagatataccggagaatttcacggaatataccgatttcccaatcacaccaatccgagtcactccatctggactccattgcttcactcctgcagctttccgcgacgggaaacgaatcgccttagcaactcgccgtcgcggcgtcaaccaccgtcacatcgagatttacgaccttgaaaacacaacgtttcagccggtgactgagtcactcaatccgagtttccaccattacaaccctttcgtgtctccagactccgagttcctcggctaccaccgattcagaggcgagtcaactcaaaggcgagtcaaatcggtacctaaacatcgaatccatcgtttcaccaatcaaaaccctccgattactaagaatcaacggatcgtttccatcatcatctcccaacggtgatctaatcgcattgaactccgatttcgacatcaacggtggaatcaaagtatctaaatccgacggttcaaaacgatggacgttgatcaaagaccgtacagctttctacaattcatggagtccaacagagcgtcatgtaatctacacatctctgggtccaatcttctctccggcgagaatcgcggttcagatagctcgaatcaagttcgatccatcagatctcaccgctgataaagaagatcttccatgtgatgtgaagattctcactctagagaacactgggaataacgcttttccgtcttgctctccggacggtaaatcaatcgtgttccgatctggtagatcaggtcataaaaatctctacattgtagacgccgttaacggagaatctaacggcggtggaatacgacggttaacggatgggccatggattgacactatgccttgctggtctccgaaaggagatctcatcggattctcatctaatcgtcataatccagagaacacggccgtgttcggtgcttacgtggtgagacctgacggtactggtttgaggaggattcaaatttcgggaccggaagggcctgaggaagcggcgagggagagagttaatcatgtgagtttcaataaagatggtgattggcttgttttcgcggcgaatttgagcggagtaacggcggagccggtgacgatgccgaatcagtttcagccttatggggatttgtacgttgtgaaattagacggaacgggattgaggaggctgacgtggaatgggtatgaagatgggactcctacgtggcatactgctgatgaattggatttgagtcagttgaatttgaacggtcaagatggtgacaagcttgaaggtcagtttgaggagccgttgtggatttcttgcgatatctgaatgcgatttctccttttcttataaaagactgtcatatttatgtaatctcgctttttttatttcaataaaacaaacaaaaataaatgcatttagcctttaaaaaaaaaaaaaaaaaaaaaaaaaaaanaaagggcggccgctctagaggatccaagcttacgtacgcgtgcatgcgacgtcagag

SEQ ID NO: 97120 - DNA, 994 bp, Arabidopsis thaliana columbia
  unsure (1)..(994): unsure at all n locations
aaaccgggggggacccacgcgtccgaccatctcctcctcctctatcttcacaccatcaacatcatcaagaacgggggggaatcgcagattgtccggcgccttcaccactgccaccgcatctcatatctccaaagaagtcaaaccgtaaaggttcaatgactcctcctccacaatcgcaccatgctccttctcctcccattcctgattctttgatttctcctgctcacgctccagtctctttctctatgaaacgcatctccccggctctagcaccttctccaacccaagtgtttcctctcaggtcctcttcaagaccttcaaaatctcggaaattccctctaggtccacctcttcaagcatttcctcctcctccccctaattcagattgttcttcaactatttgtttggaaccgtacacaaacacacctccgggatctccatgtggctgtgtctggccatttcaagttgagctacgccttagcatggcgctctacgacttcttcccaatggtttcagaatttcctcgggaaatcagcgccggagttttcatgaaacagagccaagtccgtataatgggagctaacgcggccagcgaacaacctgagaaatccattgtnctaatcgatttagtaccgcttggagataaattcgataacatgactgcaatgctgacttaccagagattctggagtaaaaaagtctatatagatgaaccaatctttggcggatacgncgtgatttacgtgcgtnatcctggtttacccgcttccccgccaacttctggtatgaccattatagntcaaggaccgtactctggtaataataacggaagggccggtcaaaaccgcttcggagttnnttgttccaagaagccgngcaagaaaaggggtcaattggtggaggttttctgtnattgntttttccgaactgntttatngggttattgttncgnannggtttggtnttgggttccgggnaaaagggtcgcngngta

SEQ ID NO: 97121 - DNA, 795 bp, Arabidopsis thaliana columbia
  unsure (1)..(795): unsure at all n locations
gggactgattgcacatttccagtctgttcttcatatgggaccgacgattatatacaatgtgcctggtcgaacagggcaagatataccgcctcgtgccatcttcaaactttctcagaatccgaatttagctggtgtgaaggaatgtgttgggaacaagcgagtcgaagagtacactgagaatggggttgttgtgtggagtgggagggatgatgtgtggcctgattccagatgggattatggagccacaggagttataccagttactagtaatttagttccgggtttgatgaggaagttgatgtttgaaggtaggaattcatctttgaactcaaagcttctacctttgatggcttggctgttccacgagccaaacccgattggaatcaacactgctttggctcagcttggagtttcgaggccggtttttaggttaccatatgtaccattgccactgtctaagaggcttgagtttgtgaaactggtgaaggagattggacgagagcattttgtgggtgagaaagatgttcaggctcttgatgatgatgattttatccttatcggtcgatattagcatacttttttttttttaatttttggttcctttttgtttggtgttaatgaagaagagatggttctatcatttggttttatgtagctgatgaatgaatgaaaactcaaggaatgatttccnaaaaaaaaaaaaaaaaaaaaaaaaanaaagnnnnnnnnnnnnnnnnnnnnnnnnnnnnnnnnnnnnnnnnnnnnnnnnnnnnnnnnnnnnnnnnnngtacctaa

SEQ ID NO: 97122 - DNA, 955 bp, Arabidopsis thaliana columbia
aaagctcttatctataaaacattctaaagaaaaatgaagatgataatccaaattttcttcatcatctccctcatttcaaccatctcttttgcctctgttcaagacttttgtgtagctgacccaaagggtcctcaaagcccatcaggttactcttgcaagaaccctgaccaagtcaccgaaaatgactttgcatttaccggcctcggcacagctggaaacacttccaacatcattaaagccgcagtgactccagcctttgctcctgcttacgcaggcatcaatggccttggcgtatctctggctcgtcttgacttagccggtggtggtgtcatccctctccacactcatcctggtgcttctgaggtccttgtagtcattcaaggcaccatttgcgccggatttatctcctccgccaacaaagtttacttgaagactctcaacagaggagattctatggtgtttcctcaaggacttcttcattttcagctaaactctgggaaaggccctgccttggcctttgtcgcattcggaagctcctccccagggctccaaattctaccatttgctctgtttgcaaacgatttgccttcagaacttgttgaagccacaacgttccttagcgatgcagaagttaagaagcttaagggtgtgcttgggggaactaattaagcttctcttagtttcattgttcatttttttaaaaatgtggttgtgcgttttgttatttcgagttcctttagcattttgagtttgtttcttctaatgatttggtttttctttatgagttgttattgttctcaatgtttcattttatagtctctttggcttcaaattgtaataactaataagcattatattgcagatttctaaaaaaaaaaaaaaaagggggatccactagttctagagcggccgccaccgcggtggggctccagcttttctaacccttataagggtt

SEQ ID NO: 97123 - DNA, 651 bp, Arabidopsis thaliana columbia
  unsure (1)..(651): unsure at all n locations
aagacgcagagcatttggactggccaatgagactgagaatcgtaatgggaatagcttactgtatggaacatatgcacaatctaaaccctaaacccatctctcacaccaacctcaactcttcttcagtctacttggcaacagattacgcagccaaagtctcagactttacgttcctcagctccacaccacttgaccccatgaccaacgtatccagctttggcgcccttctacaagagatcatcaccggaaagatcccggatccagattctctgctccaggaagaaaccaaacccgttgcagacccgactctgaaaagctttcaagaggaggtcatggagagagtgtgggaagtggttaaagagtgtttgagtcagaaggtggaaatgaaggaagtggtggttaagctgagagagatcaccggaataacgccggaagcagcgttgcctagtcggtctccggcgtggtgggcggagctggagattatatccaccgaaatgtagatatatcaattgcacagtaaactaatgtaccatcatcatctctgtactctctgcaaattcggacgcgtggnnnnnnnnnnnnnnnnnnnnnnnnnnnnnnnnnnnnnnnnnnnnnnnnnnnnnnnnnnnnnnnnnnnnnnnnnnnnnnnnn

SEQ ID NO: 97124 - DNA, 775 bp, Arabidopsis thaliana columbia
ggaggggccaattgggatccctttattgtaatagatcaaatccttcccttgttccggagttggaggggcttttttcggcggccaggttttaggttggcctccattgggaagtctgaattgaggaccctaataagtgttttttccgaaaccaagaattcgggattccccccttttttcttggggtcaggaaggaatggatcggtttaaccgtttttttaatgtaatctatttctcaattcgaaatgggagcaggtttaaaaagggattttagagtgtttagggttaggccagtagggtctcttagcgccttctttttttttctcagggaggttatttcaccaaatacttcctatggtaagaaagagggggggaccaggcacccttgaagagcccagtccaacgaagagttgtatgctgcgttcgggaaggatgaatcgctcccgaaaaggaatctattgattctctcccaattggttggaccataggtgcgatgatttacttcacgggcgaggtctctggttcaaatccaggatggcccagctgcgccaaggaaaagaatataagaaggatctgactccttcatgcatgctccacttggctcgggggatatagctcagttggtagagctccgctcttgcaattgggtcgttgcgattacgggttgggtgtctaattgtccaggcggtaatgatagtatcttgtacctgaaccggtggctcactttttctaagtaatggggaaaaggaccgaaacatgccactgaaagactctactg

SEQ ID NO: 97125 - DNA, 1019 bp, Arabidopsis thaliana columbia
cccacgcgtccggagattcgctttttctcctgcttacttctttttatcatcttctctttgtcggtttgatttggaaaaactttctgcaaaaaaaagagagattcttaaactttttatctcaagatcctttcaaaaaatctgaaaagagaagatttttaataaaaaagaatggttgaaactggtcaccatcatcaacatccaccggcaccggctgcagccggtcatccgccggttccatccatggcgatggcgcgtaacatgggaaccacttggcctccggcggagcaacttcatcatcttcaatattgcatccactctaacccttcttggcatgagacggttgtactggctttccagcattacatcgttatgctcgggactactgttttgattgccaacacactagtgtcaccaatgggtggagatcctggtgataaagcgcgggttatccagactatattgtttatgtcgggcataaacacgttgctacaaacgcttatcgggacaaggcttcccacggttatgggagtatcgttcgcgtatgttcttcccgtattgtctataatcagagattacaacaatggtcaattcgattccgagaaacagagattccgacatactatgagaacggtacaaggatcattaatcatttcttcattcgtcaacatcataatcggatatggtcaggcatgggggaacttaataagaatctttagtcccatcattgttgtgcccgttgtttctgttgtgagccttggcctattccttaaaggcttcccactgcttgcaaactgtgtggaaatcggtctaccaatgctgattctgttgatcatcacacagcaatatcttaaacatgcattctcaaggatttctatgattcttgaaagatatgctttacttgtttgcctggctatcatatgggcttttgctgctatccttactgtttctggtgcttataataatgtttctaccgcaacacaacaaagttgtcgaactgatcgtgcctttcttatgtcatc

SEQ ID NO: 97126 - DNA, 1152 bp, Arabidopsis thaliana columbia
  unsure (1)..(1152): unsure at all n locations
tgtcgtgtcatccagaaggcaattnaggtggttgatctagaccagaaaatccaaatngtcaaagaacttgatggacatgtnatncgatgtgtacgtnatcagaatgggaaccatgtggttcaaaagtgtattgaatntgtgcctgaagaaaacattgagtttatnatttnaactttctttggccatgtggtgaccctctccactcacccatatgggtgccgtgttattcagagagtattggaacactgccatgaccctgatacacagagtaaggttatggaagaaatcctgtccactgttagtatgctggcccaagatcagtatggaaactatgttgttcagcatgtgctggagcatggaaagcctgatgagcgcactgtgataatcaaagaattggcggggaagattgttcagatgagccagcagaagttcgcatcaaacgttgttgagaaatgtttgacttttggaggtcctgaggaacgagaattgcttgtgaatgagatgctgggaacaactgatgaaaacgagcctcttcaggcgatgatgaaggatcagttcgcaaactatgtagtgcagaaagttttggagacctgtgatgaccaacaacgtgagctgatacttactcgcatcaaagtgcatcttactgctttaaaaaagtacacttatggaaagcatgtcgttgcgcgtattgaaaaactcgttgctgctggagagaggagaatggctttgcagtccctaacccagccccagatggcttaagcccttaagtaatgtacagcttaactagggtggatggggctcccgtagcgttttgagaattaggtaagatctaaaccggaaataatttgcggggaaattgtgaaggagagctttgttttctctgctaaatctgtaaaattgtgtagtttgcttacggtttttttatacatagaacgaaacatccctctttaggctgatgagtgagagataaaaaggcagagaatggtgtaaagatggattttagggtttccttcccccaaaagagaatggctttttcattgccaaatgtgtaaaagtgagaatatgtgttcatgcttttaggacaatcccagtttagagtttttttttttcccnnnnnnnnnnnnnnnnnnnnnnnnnnnnnnnnnnnnnnnn

SEQ ID NO: 97127 - DNA, 513 bp, Arabidopsis thaliana columbia
aaatgccgcattgaacctacctttctttttcgcaatcgcgaaccacaggctcaccgtagtctttttcgatggacactacatcaaacctataaaggctacttatatcactatatcccctggcgaaacactagacatgttattacacgctgaccaagaccccgaacgcacttattacatggctgccagagcttaccaaagcggaaatatcgatttcaacaactccactaccataggaatcttaagttacacctcttcatgcaaagctaaaacatcatcgttttcaggatattacccaacccttcctttttacaatgacacctcagcagcttttggattctttaccaagatcaaatgcttattctccggtcaagttcctgtccaaatctctcgtaggataatcacgacggtttcaataaatcttcgcatgtgtcctcaaaactcgtgcgaaggtccaaatgggtcgagattagcagcgagtatgaacaacatatcgtttgtcacaccaagtcacgt

SEQ ID NO: 97128 - DNA, 797 bp, Arabidopsis thaliana columbia
agggaaagctggtacgcctgcaggtaccggtccggaattcccggttggacccacgcgtccgctcagtttttggtcgaagttggtgaagtcgccgccgggacaactcaggttgttacagatgataaacatgcgagataatccaacaatgcatgtcttacaagcttcaaagtttctatttttagctcttattttgatccagttgctgtctactcaactctttgctcaaagatctaaaagtccatggcaaacactcactggagatgctccccttgtcattgctcgtggtgggttttctgggttgttgccagattcaagtctcgatgcttacagttttgtatcgcagactagtgttcctggtgctgttctttggtgtgatgtgcaactaacgaaagatgcaattggactttgcttccctgatgtgaagatgatgaatgcttccaatattcaagatgtttaccctaaacggaaaacttcttacttgcttaatggagtccctactcaggattggttcaccattgatttcaacttcaaggatctgacaaaagttatcttgaaacaaggaatattatcacggtcagcggcattcgatggaaacagctacgggatattcgacagttaaagatatatctacgcagttaaaacctgagggtttttggttaaatgttcagcacgacgcattctatgctcaacataatctgagcatgagcagctttctgctatcaatttccaagactgtgattattgactatctctcttcccctgaggtgaatttctttcggaacattggtaggcgtttt

SEQ ID NO: 97129 - DNA, 491 bp, Arabidopsis thaliana columbia
attcacttcttctccaccgaatatatctttgtctttgccctttcccccttccttcgatgtgatacctaatcaaccactctcaacaccatccaaccaccacctccagagcaaagaaacagagcagacaacgaaacagagcagagaacgaaacagagagagagaaggagagaacgaaacagagagggaattctgttggttttgcaatggtttggaggttcgttaatggcgtcatagactcgggagattaagggagaacaagtactctgcatcttctggatttctcactatttctccttctctagaggaataggcgagaaattgagattaataaaaaggggtgttttttggttctccttcgtttgtataaagcctgccgcttcttaaggttctttggaaattctcaagtgatggaggaaaatctggtttacttcgcatgagctattaacgaaatttcatcatgattgtctcactgtcacacttgtgggagtatg

SEQ ID NO: 97130 - DNA, 536 bp, Arabidopsis thaliana columbia
  unsure (1)..(536): unsure at all n locations
ttcaagaaccatgaaatacacaaaattcttctcgagtcagatcttttcgggcaaggggaagatgttttggctctgttcttanctaancggtatttgaacatgtgtctggtatacctaataaatgaaagataaagacaatggttacctatccttgtaagctgaggccaggtttgcgtgagcttcagccattgtaggccggaagtttggagcatgcatgtaatcctgaattgcttcagttaccctcccgatctctttgtaagtattccctctattaaccagagcgtcagctgccaatgggtcaatacgaagaacctcattatagcaggatatagcatccgagtaatttccctgtagtaaaggagaagaaaacaagctaaatttgtcaaacatgagcaagactacaaaaatgattaaaaattgataatggagcacgtagctacctgttgcttgtaaattatagcaaggttattgaacggagcagatagccctgtagttacagccagagtagccttgaataatgaggaagcaggacccat

SEQ ID NO: 97131 - DNA, 604 bp, Arabidopsis thaliana columbia
  unsure (1)..(604): unsure at all n locations
ctanttcaanggaagggcnggccccnttnggagggcccnanananttaatttcccnccnaaaaaaatgncntncaaccttcagcggaacatttttgctanggccctcccaaaaaagcatacaccctgtaaggggtgtgagaagaggtacacgttccttctgggaaagtctggccgtacaagcaaggcctgcttatagctcgtaatggcagcttctacatgcccactatccttgtaagctgaggccaggtttgcgtgagcttcagccattgtaggccggaagtttatagcatgcatgtaatcctgaattgcttcagttaccctcccgatctctttgtaagtattccctctattaaccagagcgtcagctgccaatgggtcaatacgaagaacctcattatagcaggatatagcatccgagtaatttccctgttgcttgtaaattatagcaaggttattgaacggagcagatagccctgtagttacagccagagtagccttgaataatgaggaagcaggacccatcatattccactccatataaatgtttccaagattagccatggcttgtggatgatttggttgtaaagcaagacattgattatg

SEQ ID NO: 97132 - DNA, 463 bp, Arabidopsis thaliana columbia
  unsure (1)..(463): unsure at all n locations
taaacccccaaatccatgagtacaacacttcttcttcttctctctaagtccagttaaaaatcatctctttgcaatgttgactctttaatcttcgatttataagctctcgaaggaatctattaccttcaatctctctcgttgttagctctttgaattgtagaagagaatgggttgcttacttggttgcttcggtcgtcggaagaatcgtcgccgtcagagacgcagagaatctttccagccacgtttaaacagaatctctgaggaagctgcaaaggatgttcttttgaatcttagggttcctactgttgaagaagtcccaaagtatgcaaaagattcaacttgttgtggaagtccctaaaattttcggnggttgnctccaaaggggtaatcattttgaacgttttttnngaaaagtcccntnaaaggttntggaacnccgntcaactnnnntcttntnncaagg

SEQ ID NO: 97133 - DNA, 531 bp, Arabidopsis thaliana columbia
  unsure (1)..(531): unsure at all n locations
nnnnnnnnnnnnnnnnnnnnnnnnnnnnnnnnnnnnnnnnnnnnnnnnnnnnnnnnnnnnnnnnnnnnnnnnnnnncttctttccacgcgtccgcaaaaagctcagagcagagtcgaatcgcgatgaagcatcgagttcggtgttcatgaaggtcagagagttaagtattagcagaactggttaggtcttagtgacaaacaaggtattcatgttatccatccctgatactagaatgtggaatctagcatcgagttatcttacgggaaacattggaccgaaaaacgatatcagaagaccggtccatgctcatgcggagtgttcagatgacgatgtatcttctgtaggtagtaaagacgaaggtctcgagtgtcctatatgctgggaatcatttaatatagtttgaaaacgttcccgtatgtgttattggtgtggacattcgattgtgtaaaaaactgcaatttttgggccttcaatcgggctatctgtgaaaattccctcctcaccccggtccagttccctntnttcaattt

SEQ ID NO: 97134 - DNA, 715 bp, Arabidopsis thaliana columbia
  unsure (1)..(715): unsure at all n locations
ggaattcgggtcgaccgcgcgtccgacttttggaaggaaaacttgtgtacactattgaaacgacgtcntttttgaaagcaaaacataacccagtatgtttaggtctcgccggaaaaatcgaatcaagcatcttcttctttcacgtacgaaacaaaaagctcagagcagagtcgaatcgcgatgaagcatcgagttcggtgttcatgaaggtcagagagttaagtattaccagaactggttaggtcttagtgacaaacaaggtattcatgttatccatccctgatactagaatgtggaatctagcatcgagttatcttacgggaaacattggaccgaaaaacgatatcagaagaccggtccatgctcatgcggagtgttcagatgacgatgtatcttctgtaggtagtaaagacggaggtctcgagtgtcctatatgcttgggggaatcattttaatatagttgnaaacggttccgtatggtgttattgggtgttgggcatacggtgcttgtaaaaaccctgcatttttgtggggccttcaaattgggcttttttttgggaatttcccttttttanccccgggtcaacgtttcccctcttcaatttaattcccctgggggaaaccttttttnttttcccgcttggntttaangggccccntaggttccctncaaaggnccanttttgnctttngnttgcnnggggggtaattnggg

SEQ ID NO: 97135 - DNA, 475 bp, Arabidopsis thaliana columbia
tccccaaccatccttcagttccgccctcatctttttcccttcccttttacccattctcttctccatagccaaacgctataatagttctatctcctactcccctccgtgtgatcgctttcttttagaaagaaacagactgactcctggccgtaggatggaaacagtaagaaaagtacatccgaatcaacggctattgcgttctctcctcttccttcttgtgatgtggatttgtgtgtgtgtgatgtgtcggtgagtgtgttatagaagtcactatagccatcttcaaaggggagatagagctaggagtagtatttggtggtgtcacgtcgtttgttttttctatataatttttgtcactatgtctttctattatgggacatggcataatatatcatatgaataatttatccctaaaaaaaaaaaaaagaataacccaccccggacgctctagaggatccaagcttatgtacgcgtg

SEQ ID NO: 97136 - DNA, 534 bp, Arabidopsis thaliana columbia
  unsure (1)..(534): unsure at all n locations
tacaaatcccatcgatcttttcggaatcttccctcattatgctcagccaccattaccagagctccattgtttcagttctccgttcaacgattatcggaattattcacaacactattagtatcaccgtcgccaaccgattttgattaccagctttggtgacgacagtcgtgattaaggaggttttggtaaatttcttcgttcctgtttgttttcaaagatggctgctttgaaaggttatggcttgtgttctatggactctgctcttcaattcccctgtcctaagctattcaatagctacaagagaaggagctcgaaatgggtctctcccaaagcagctgttgtacccaatttcccatcnnccaatgngnagtttnggagggttaaaaaacagggcaaacacagncggcattaaagctctacgggnngtcacagnttttaaaacaccgggtttacccgnttggagntttggcctttagcctcggtggcnttgnannttnggtcaaaacgggcttaagggnaatnttggggcactgg

SEQ ID NO: 97137 - DNA, 517 bp, Arabidopsis thaliana columbia
  unsure (1)..(517): unsure at all n locations
gggttnnaaaanagnggagnccngccnaaaagccccaaaacgattgncccccgggtccngagtgacattatnccccgatgtggggatgctaacccaanaagcccgcccatgtttttgtggaggttgtgaagctgcttgaagctgcagaaacagagataatgacgacagcgagaaaagcccgtttcagatgttgcttgagccagccgatgacgattgactaaataatccccccctcaagaaaataacaaagaaagaaagaagaagaagaagatataagaaaaagggctttagatataagtttgtgtgtcagttatgtgtctctgtgtgtgtttgtgtatctataaaaatatgaaatgtattttgttttctcaagataggagaagtaagtaaccccaccaccaccattttagacttactgatttctagttctatttttctttttttcgtttgtgttgnatgcggcccgcgtaattccgatgatncaagcttnatgcgatgaccgtncgacctncgtagg

SEQ ID NO: 97138 - DNA, 862 bp, Arabidopsis thaliana columbia
  unsure (1)..(862): unsure at all n locations
agtgactgaatacgccaaaggaggttcagtgaggcagtttttnactaggagacagaaccgagccgtccctttgaagttagctgttaaacaggctttggatgttgctaggggtatggcttatgtccatggacgcaacttcatacacagagatctcaagtcagataaccttctcatctcagcagataagtccatcaagattgcagattttggtgttgcaagaattgaagttcaaaccgaaggaatgacaccagaaactggaacttacagatggatggctccagagatgatacagcatagagcctacaatcaaaaagtggatgtgtatagtttcgggattgtgctgtgggagttaatcacaggactcttaccgttccagaacatgacagctgtacaggcagcgtttgcggttgtaaacagaggagtgcgtccaacagtcccaaacgattgtctcccggtgctgagtgacattatgactcgatgttgggatgctaatccagaagtccgtccatgttttgtggaggttgtgaagctgcttgaagctgcagaaacagagataatgacgacagcgagaaaagcccgtttcagatgttgcttgagccagccgatgacgattgactaaataatccccccctcaagaaaataacaaagaaagaaagaagaagaagaagatataagaaaaagggctttagatataagtttgtgtgtcagttatgtgtctctgtgtgtgtttgtgtatctataaaaatatgaaatgtattttgttttctcaacaaaaaaaaaaaaaaaagggcggccaacaannnnnnnnnnnnnnnnnnnnnnnnnnnnnnnnnnnnnnnnnnnnnnnnnnnnnnnnnnnnnn

SEQ ID NO: 97139 - DNA, 1141 bp, Arabidopsis thaliana columbia
  unsure (1)..(1141): unsure at all n locations
cggttcgacccacccgtacggccctcgaacagcagtttcagcaggaagtttctatgcttgcttttttgaagcaccctaacatcgtgaggttcattggtgcgtgtcgcatgaaaccgatggtgtggtgcatcgtgactgaatacgccaaaggagggtctgtgaggcagtttctgactaggagacagaaccgagccgtccctttgaagttagctgttaaacaggctttggatgttgctaggggtatggcttatgtccatggacgcaacttcatacacagggatctcaagtcagataacctcctcatctcagcagataagtccatcaagattgcagattttggtgttgcaagaattgaagttcaaaccgaagggatgacaccagagactggaacttacagatggatggctccagagatgatccagcacagaccctacactcaaaaagtgggacggggtatagttttgggaatcgtgctgtgggagttgattacaggtctgttaccgttccaaaacatgacggcggttcaggctgcatttgcagtggtgaacagaggagtccgtccaacagtcccagcagattgtcttcctgtgcttggagagatcatgacacgttggtgggatgcggaccctggagtccgtccttgttttgcaaagattgtcaatcttctggaggcggcggaaactgagataatgacgaatgtgagaaaagcccgtttcagatgttgcatgacgcaaccaatgacagtcgactaatctgttgtgaagaaagagagaggagaagaagaggaatgaccaaagaagagaccataaaagaaaaaaccagagagagagagagagaaagcaagaagggctttagatatatgtaagtttgtgtgtggatctatccatctatatatatatatccgattgtatctcttttctcaagataggagaagtaacccatccattttagactactgattttctagatttttgtattaagaaagaacaacgaaaaaattagatgtacggtgattgtctcaagtgtttggtttagttttccttggaaaaaaaaaaaaaaaaaaaaannnttggtncgnccagggcggccgctctagaggatccaagcttacgtacgcgtgcatgccacgtctttggtggaa

SEQ ID NO: 97140 - DNA, 350 bp, Arabidopsis thaliana columbia
  unsure (1)..(350): unsure at all n locations
ggtttcttggcagtaacacttatggtttggatcgaggagaacatangagggagcggcagcttcactatatctaccgcggttttagcctctgcgatcttcgttttcgttgcgggatgcccgatgtatcgattcaagcgcccagcagggagtcctttgaccagaattgtgaatgtgtttgtttctgccgcaagaaaccgaaataggtttgtaacggatgcagaggtggtgacacagaatcataactctaccgacaaaagcattcatcacaacaagttcaagtttttgaataaagcaaagctcaacaacaagatatcagcaacacaagttgaagaaacaagaacgtttctagc

SEQ ID NO: 97141 - DNA, 844 bp, Arabidopsis thaliana columbia
tttgcacgttccgctccggaatttccgggtcgacccacgcgtccgagataggtggaaaatgtataaagctcgaacttagtcgtcctggatgggctcgtcgactgtcggtcccgtcacaaagtcaagatttggagagaaccgaagttacaaatttctacaatcaagtaggttcacatgttgctaattctccaccaggtaactggccaattggtagcccagtgaagggctctccttcgcatgcctttacgaggccacatggtctaggaatggtcaggccagttaactcagacaatatgccaggactggcttcaattcttcctgctcatccttctagctttcatggattttcaccagtcagtaatgaccaagggctattgaatcattcaaaccaaactattctgaataagggattgatgcacaacatttcctatgggcaacctcattctttgccagagcatataacagggggaatttccaactccatgaggtttatagctccacactcctcaggattcgggacttcatctgatcaccgctatcgctggggaagccctcctcagcatatgaattatcctggttacactggagtgtcgtcgtcatcgtcatctactgaacgtcctttcactgtcaggcatggttttccatttgctgagaggcaggctttattgcttggaaaataccagcatcatgtgggctctgctcccttaagcattcattttaatacacaaatgaattggtacacgggatcacccagagatacccctttggatttagtgatatggggaatcaacaagacactattacagtgctcatggaaaagcaaaccttggtgttagtctaccgg

SEQ ID NO: 97142 - DNA, 1065 bp, Arabidopsis thaliana columbia
  unsure (1)..(1065): unsure at all n locations
aacattgtatgagccgaagaactccatcaaatcaaatctcactcatcaaactttaacatttaactatcacaatatgttttcttttcttatcttcttgttggaggcttttcaggtggttattgctaccgtggtctccatagtcttcttagtgttcgcgggtctaacactggtaggttcagccacggcattaaccataacaacaccgctttttattatattcagtccgattcttgtaccagccacgatagccactgctgtcataaccacaggattcaccacgggtggcgcactcggagcgatggccgttgctctcatcagacgtaagatgggagctaagccgactgcggaaggaacttcgtcagcccaacctcttctcaaattgccagtttatggtggatatggaggattttggggaggaaagaaattttctggaacattcggaaataaaccagggggtggaaatccgtttggagacatctcaaaatggctcggaccaggggccgcaggtggaggtgcacctggaggattaggagggggcggaaatccgtttggaaacatctcaaaatggttcggaccaggggccgcaggtggagatgcatctgctgctggtggtgcacctgccgctgaagctgcaccagccgctggagctgcgcctgccgctggagctgcgcctgccgctggagctgcgcctgctgctggagctgctcctgccgctggtggaagtacaccacccacatggtaaaggaaataagtcaagttgttccaacatgtatattgtgcattgattcataaggaaacaaaagctttttaaaacgtcttatgctcatatgtattctccaaggtcaaagctgcttacacaagactatgctacaatgttcattaatttatagtataaatcatatagctcgatgaacaaatgggaacgtataatgtataatgtacggtcgactcttagaccatgtacattgcacatttagtcggcattgtagtctgtaaatcatactatatcaattcttaaggtttttatatactaagtaattttgtatnnnnnnnnnnnnnnnnnnn

SEQ ID NO: 97143 - DNA, 609 bp, Arabidopsis thaliana columbia
  unsure (1)..(609): unsure at all n locations
nnnnnnnnnnnnnnnnnnnnnnnnnnnnnnnnnnnnnnnnnnnnnnnnnnnnnnnnnnnnnnnnnnnnnnnnnnnnnnnnnnnccacgcgtccgcgacacgacacgaccgatctatagattcggcgagatcagaagaaagcttcccggagcaactcggtcgttgtgactcattccgagttaaaaaaaacgggttttcgacaccatggatatgagttcaatggctggttcaatcggagtttcggtagccgtactccgattcctcctctgtttcgttgccacgatccctgtttcattcgcttgtcgaatcgtcccgagtagactcggtaaacacttgtatgccgctgcttcaggtgctttcctctcttacctctcctttggcttctcctccaaccttcacttccttgttccgatgacgatcggatatgcttcaatggcgatttatagacccaagtgtggaatcatcactttcttcctcggtttcgcttatcttattggctgtcatgtgttttatatgaagtggtgatgcgtggaaagaaagaggaatcgattctactggagcgttaatggtgttgacgctgaaagttatctcatgttcaatgaattacaat

SEQ ID NO: 97144 - DNA, 357 bp, Arabidopsis thaliana columbia
cacgcctacgcgtgaattctacgaggatttaagcataagtttacaatagccatagtaatgcggtgggtacatgcttttgggtccttatcatctctattggtgtggtcatatctgaataagcagagctactacggatcacgaatctcttcttctcgtatgttttatgtttaagtgaggttcgatctagaacctcatcaattaatatcaataaaagtacacccatgatcaatgagaactcatgtaacaataatctctgttcgtaggttcttggggataaattagtcatcggaatagcataccagagatcgacgatctcattaatcattatgtataagtacaaaacttcgtaaaactatc

SEQ ID NO: 97145 - DNA, 540 bp, Arabidopsis thaliana columbia
  unsure (1)..(540): unsure at all n locations
cgtgtcgcgtgggcggacgcgtgaatggagagttgctgtcggagcgtcatagcttcaaggacgtttcatctgcggtcaagtggccgtctatttccctctcttagcttaactcatctcaagggcaagctatctctctccatcaactcgttttcctccaagattcagtctcatgctctccgaggagttggtataggcgagtcagataagaaaaatcccctgccgcgaggggccggagaaggagtcaaggaagatgcgaggagtaagctgcttcatgtagttttggtctctcctcagattcctgggaatacaggttgcattgcaagaacatgtgctgcctcagctgttggtctgcatttagtcgggccattaggttttcaagtggatgacgccagagttaagcgagctggtttggattattggccctttgtggttgtcaaagcgcatagctcatgggctgaatttcaagaatatttcaggcttcaggaaggganaaaaaaccaatgatancttttaccannaagaagaaacaaggatactttc

SEQ ID NO: 97146 - DNA, 367 bp, Arabidopsis thaliana columbia
tgtcatttctctctctagtggctttagtatggcggattggggacctgcggggtcgctgtgatactgttcgtgcttttgactccgggacttctctttcagattccggcgagaggtcgtgttgttgaatttggtaatatgcagactagtggagcgtcgattctcgtccacaccatcattttcttcggtcttataaccatcttcaccatcgccattcgtctccatatctataccggttaattgtaccgtaccggattcgtaacttcccccggttgtctagttttatgggttgttttggattttggttcttctctgtgtcttgtcaaaacgttatggaatttgtgaatctgaatatgcgttaagttaaaaa

SEQ ID NO: 97147 - DNA, 637 bp, Arabidopsis thaliana columbia
  unsure (1)..(637): unsure at all n locations
tgttttcccccccttgggggnncacccccnnaccgttttncnttnnaaaaatccctccggggnanccccgtggntttttaancccctttngggccttccccnggnganattggccccccgtatggtggattgccttccaaggattaaagttcccgagcagaaaatggaaaggaaggaaggtcaagccggaacaggaggaggatgggccaaaacccagtttcttctttgggaatttgctggagaagttactgccttgagagaaaaggtaactatgtgtggataaaacgtactgtaaaatgtgtattatgtatgatctagagggccttagtgtgatgtatgacttggtcagggattttggtggtttgcccgaagtcaaaccgaaccaaaactggttctcggttactttagactttagtcatagtaaaatgaacatgtctataaatgaataatatgcaactcttccaattggtaggcttgcttttgtctatgtaaaatcaatccttcttgttatgtatttatctttggcccaaaaaaaaaaaaaaaaaaaaaaaaaaaaaaaaagggcggccgctctagaggatccaagcttacgtacgcgtgcatgcgacgtcataatcttctagtagtgtgtacctaa

SEQ ID NO: 97148 - DNA, 1105 bp, Arabidopsis thaliana columbia
  unsure (1)..(1105): unsure at all n locations
nnnnnnnnnnnnnnnnnnnnnnnnnnnnnnnnnnnnnnnnnnnnnnnnnnnnnnnnnnnnnnnnnnnnnnnnnnnnnnnnnnnccacgcgtccgcggacgcgtgggctgcttcttgcggattcgagcccaaaatcacggttgagcattgtgaagagaaaggttactccgtgataaacgtgagctgcgaggatcgaccaaagctcatgtttgacattgtatgcacgcttacggatatgcaatacattgtgtttcacgccacgatttcatcaagcggctctcatgcttctcaggagtatttcatcagacacaaagacggttgcactcttgacacagaaggagagaaagagagagttgtcaaatgtctggaagctgcaatccatagacgagtcagcgagggttggagtttggagctctgcgcaaaggacagagttggattactgtcggaagtgacaaggattctgagagagcacgggctatcagtgtcgagagctggtgtgacaacagtaggagaacaagccgtcaacgttttctatgtgaaagatgcttcagggaatccagtggatgtgaagacgattgaggcgttacgcggagagattggacacagtatgatgattgacttcaagaataaagttccgagcagaaaatggaaagaagaaggtcaagccggaacaggaggaggatgggccaaaaccagtttcttctttgggaatttgctggagaagttactgccttgagagaaaaggtaactatgtgtggataaaacgtactgtaaaatgtgtattatgtatgatctagagggccttagtgtgatgtatgacttggtcagggattttggtggtttgcccgaagtcaaaccgaaccaaaactggttttcggttactttagactttagtcatagtaaaatgaacatgtctataaatgaataatatgcaactcttccaattggtaggcttgcttttgtctatgtaatatcaatccttcttgttatgtatttatctttggccaaatgtgatattttctggagttttaatctcttcttttccttctattttggaacttcttcgaatctttaatgtcaatattattgcagtgagnnnnnnnnnn

SEQ ID NO: 97149 - DNA, 758 bp, Arabidopsis thaliana columbia
  unsure (1)..(758): unsure at all n locations
cttttgaatgngcacttggcacccccctcgaggtcgacggtatcgataagcttgatatcgaatcgcggccgccatcgttacacaaagtttgctgaataaataaaaattaataattactggaatgagttccaaacatcagtattgtgtggctttcacgttaaaattatacattcttataccaacaacagtgacttttttttttatataactacaaaagatggagcctaaaagtggagtatcttagattttcttggggaatgtcataccaccgcctcggatagagagtgggggtcctttcacagagctcacctgattggtatcaaggaagattatgaccacagttatgtcatcgtggaaatgtctcctcacacctctctctatcttctttagatcagaatatctcatctctcgtttctttgccgcctcttgcagtgccatcttcaccagtctccgtgcaatcccgtttcgtgggtggttctgaacgatgtcaacagcttcttggttgctcatctgttcccatagtccatcagaagcgaatattagaaacttatcttgtggttggatctcatgctccgttatcgttggttccccactcaagataggtcttttgaacggttcacggattctatactttgtgtacaatggttcctttgttgaactcttgcctttttaagaatacacggtcgccctatgggatctaagataatctgaaataagggcnnccttaaaccacgccacacaattgttgcttttaaaca

SEQ ID NO: 97150 - DNA, 375 bp, Arabidopsis thaliana columbia
cacgcgtgcgagttaattggatatcatcaactttaccacataaagtacccaagaatatagatagaggataaccaactgggtggtttaaagaaatgggtgttatagatatggtcttgttttgggtgttattggtcaatgcccttctcattgttgatgcctcttcaagaaatatgccatttgcttaccaaaatgaaatgcaaaggcattgtagctccacaaagtacacctcactctgtgtccaaaacttacgagagtttcgacatggatctcttgacgggctcgactttgggtcttttcttgttaacaagactatctctgattccaatctgctaattccacctctctcctcgtcgatgggttcctccaaacttgttt

SEQ ID NO: 97151 - DNA, 942 bp, Arabidopsis thaliana columbia
  unsure (1)..(942): unsure at all n locations
cggaagnnnnnnnnnnnnnnnnnnnnnnnnnnnnnnnnnnnnnnnnnnnnnnnnnnnnnnnnnnnnnnnnnnccacgcgtccggaaatcaaaatcatcgattctcctttgtttcgcctaacccaattcctaaatctcagcatctttcatcaatccaatctctcaaataagcgagagagaaacaaagattatcgaatccttggagacgaaaacatactctcaatttgttttaggacatttgggttaccctgaggcttaaggagaatagtggtttagttatttatactgaattttgtgtcattcagactttccgagggatttctgtttggtaccgtttgcctcgtctgtgttttcatttgagctgcatcttaaagtgaaagttcagtgcttaaacagtaataaagtagtatttcaacaggctgctaataagattgctccctttcgcttacacagtgcttaacaagatggctggtgtaaagcgaaaattaagtaccgagtcagatgttcatgctcttcacaaagaactggatgaggtttcatgtcctgtttgcatggttcacccacataatgctgttctactgctgtgcagctctcatgacaaaggttgcaggtcctacatctgtgataccagttaccgacattccaattgccttgaccggtttaaggaatttgcattctgnaatccgcaaatgaccctacttccgaggcggacttggcttcaaggggaccataataacggatctttntacgggcatgggtcaagccagttgnagnagttttaccgtgaggnttggaaccgagggtcttcttggggttccgaatactnngggggggggggggtttnggagaagttngtcanaggtttncaaatttaaanccctntccggggccttttnggtgaggtttgagggannccgnntttcaaaccnagttnccggancnc

SEQ ID NO: 97152 - DNA, 481 bp, Arabidopsis thaliana columbia
  unsure (1)..(481): unsure at all n locations
nnnnnnnnnnnnnnnnnnnnnnnnnnnnnnnnnnnnnnnnnnnnnnnnnnnnnnnnnnnnnnnnnnnnnnnnnnnnnnnnnnnccacgcgtccgtaaaaataaaaataagtggagaaatcaaaatcatcgattctcctttgtttcgcctaacccaattcctaaatctcagcatctttcatcaatccaatctctcaaataagcgagagagaaacaaagattatcgaatccttggagacgaaaacatactccaatttgtaattttctcgtctttttttttacctgattttgttatacgtttgatcgaaatcatttgctctgatggatctctgttttgttaacccttttgagatttggtagatatggttttgaggattgatatatttgccgctgattgtcggtgaaaaattgtgaaatttgatttggtgggttacgggttaaatgaaatttatgatgaggatatagaatctgattttttttata

SEQ ID NO: 97153 - DNA, 531 bp, Arabidopsis thaliana columbia
  unsure (1)..(531): unsure at all n locations
nnnnnnnnnnnnnnnnnnnnnnnnnnnnnnnnnnnnnnnnnnnnnnnnnnnnnnnnnnnnnnnnnnnnnnnnnnnnnnnnnccacgcgtccgggctggtgtaaagcgaaaattaagtaccgagtcagatgttcatgctcttcacaaagaactggatgaggtttcatgtcctgtttgcatggatcacccacataatgctgttctactgctgtgcagctctcatgacaaaggttgcaggtcctacatctgtgataccagttaccgacattccaattgccttgaccggtttaagaaattgcattctgaatccgcaaatgaccctactcccgaggcgaacttggcttcaagggaacataataacgaatctctatacgagcatggtacagccagtcgaagcagttttcaccgtgagtctggaaaccgaggctcttcttgggattccgaatcactgaggaggaggaggagagttgaggaagaagttgagtcagaagatatcacaaatttgaaatgtcctctatgccggggtactgtt

SEQ ID NO: 97154 - DNA, 584 bp, Arabidopsis thaliana columbia
  unsure (1)..(584): unsure at all n locations
gatttgtccggcgtcaacggtccattgaccttgtcgcagattttcctcgctagtctccgtcttctattaccagatcgagctttgttcttcgagcttctcatctctttgttcaatctcaaaggtagaaattcgcgttaatttacttgtgatttcgctgttttttggttactgtttccgtgttgatcgatctagttctgggtttttcgatcatatgaaatgttattttccttattagggtttttgttgaccaaaacgaatttttctattttctttcgaattttgatcttcgaatatcgaattcggtttttctcagcaaaccctaattacattcatccgtaaaaaactgtttaatttctggttaaaccagtttccttgagcaaattttgttggatcgagaagaatatttgtatgancggagagatccgtatctgaaaacctggtttaaccgggtttgaacccttttngtgnatttgnctttgnaatgaatctctgcaggaatccgtagggggatattaattgnttggnngaattncccttcggtnncggtaattgttnaggaccaangaagggaccttnaaccaggt

SEQ ID NO: 97155 - DNA, 551 bp, Arabidopsis thaliana columbia
  unsure (1)..(551): unsure at all n locations
cttaaaaaaggaacgcagttttcttctccgccggcgcgtgggcggcgtcaacgggcattgaccttgtcgcagattttcctctctagtctccgtcttctattaccagatcgagctttgttcttcgagcttctcatctctttgttcaatctcaaaggtttttgagtatcagcaaagatgggtgacaatcttatggacaaagttaccgcatttggtgagcgcctgaagatcggaggttcggaagtgagcaacaagatcagtgctggtgtgagctcaatgagctttaaagtgaaggaactttttcaaggtccaaacccaactgataaaatagtcgaagatgctactactgagaatctagaggaacctgactgggatatgaatttggaaatttgtgatatgataaatcaagagacaattaatagcgttgaggttgatccctgggtattaaagaaagagggtttattatgatgaagccagcccgaggagttccagtccctttgccctgggcttttgctccgaagacggtgtgnttagaacctttnngnaaggcgttt

SEQ ID NO: 97156 - DNA, 515 bp, Arabidopsis thaliana columbia
  unsure (1)..(515): unsure at all n locations
gggtggcccaagttnccttnaaancaanggncatnnnccccttggccccagnggaatttttaangnantcccagcccctgatttaattggataaacccaccagtcgaaacctcgaggaaaaaaagtaaacccgagtccggtttcccgggggaaagcccttcaaatgctattcgatttccgtttttgctccccgagaaaacctgcaaataccaacgaagagccataattttccagttaatggaacagagtctttgtgttgtgttgccatttactttgcccctccagttttaccagattcgagccattcattttcagccctttctctttttgttctgatttttggtataaaaacttttatttgaacatgaaattgaattgtatagttgtgacctttgtagaaaaactactctctgcctttatgttcttttgaaataatccatgttccttcatcttcaaaaaaaaaaaaagaaaaaaaaaaaagggcgagccgctctagaggatccaagcttacgtac

SEQ ID NO: 97157 - DNA, 517 bp, Arabidopsis thaliana columbia
cgtccgcttttgtactctggatttacagaattttttcaaagagatttcactctttgggggaaggacagaagatttccttgtgccgcttatcatggtcccttaagctgttactttaattggagcttcgatgctttcaattcggtgcaaaacataagagtcttcgttcgattccttatcggcgaggatttcttaccggaatcggcgctcaacggtggaggttgttgccggaaaaacttgtgattactcatcaggcgtgggacgtggtttaaccggttgtcgacacgtttccatggatggagtttagattgaaattcttctacagaagtcggttatctatttggtctttgttggctatttctgtaaacctgctgtttgggcttttgttaaagcctatgtatgatattgtgaaagcttaataaattctatcacttgtgagaaaaaaaaaaaaaaaagggcggacgctctagaggatccaagcttacgtacgcgtgcatgcgacgtcataactcttctatag

SEQ ID NO: 97158 - DNA, 367 bp, Arabidopsis thaliana columbia
gcgtataaatgtttatatatttatgtatctcaaacatcatgagtcaaaaacggggatatataatttttaagatacgaagtatcaaatgtatttaactatattcaagaaatcccccgacctcgtacaatggtactattgaagcttttttgaacatgaataactccatttggtattctacctacattttatgtgaaccattacttgtatttttactcaaaccaaaattttaaccacaagtagaaatttaattaacctaaatcacacgatcatttttttaataagtgacgcattctccatttgacatgtgacataacttttaaattctacgtttttacttctccttttctgaataaaatctttctttccg

SEQ ID NO: 97159 - DNA, 369 bp, Arabidopsis thaliana columbia
gtcattacgacatgaatggtccttcatgatcaaaaccattgccgccggcgggattgttatccatccgggcaaaaacaattctgattaggtattcggtaccggctcaacttggtctaattagctttactattcttgattatgtataattgatccggttatgctaaaccaaaatctgatattatatgggctactcgtgtggattaaaaatccgattgggggaactcgtgcaaagcccaattaaagagaggcggtttgttttgtttttaacttttaactcggtccaaagtcccacatcgctaacaacatatgagttgaagacaagaggagttgtataaataacgagaccacttcacagatcaattcatacct

SEQ ID NO: 97160 - DNA, 667 bp, Arabidopsis thaliana columbia
  unsure (1)..(667): unsure at all n locations
gacgaaagaagattttntttccctctctaatgatgatgtgtttctatcagcagagtcttctagtggcgaggagtctcctatgggagagcttttggacccgcttgatcctgatgattcttacagtccatgcactgagaaagaatcagattcttgtttagccattgaaagagctaccattcgtgatgatttttttcctctgctcctggatcaaaatcaagagtcgtcgacgtcgtctccaaaactgcaagaaagaacttttgaaatgcagctcttgcaaatggaagaaaccacaaagagccaagaaccttggaagcagccattatcatcaataagcaatatcgcagattccatgggagcagaatttgtgtatggaggcctcatgaagaaaccttcacctcggtgctagagcagttgttggttcaagccatttctacaaatgggtctcctcccaaaaggttaaacacaacatgaaaatgtgatcttgcttctgggcacaggggggtatcatgtcggctttcttgctcgcgagctacaaacttcttcttggtggtataattgcctttgatttaggctaaatcaggctttaatcggttttgtttcggcaactagagcttggggtttacttggtagaagggtaggctnaaaggtnggntttaaaaaaaaaagc

SEQ ID NO: 97161 - DNA, 485 bp, Arabidopsis thaliana columbia
agccatttgttctagttcgtttgtttctgataatattttcatctccaagaactgaatttaagctgggtttggtttaaatcgattgtccaaaatctaaacaaatagaaacgtcaaattgttatttgagtggtgaaagattgaaatttttggaacagagaagcaatagagaagcaacgattctttttacaaccgtaaggaaaataaataaaaggaaaggctgtaaataaaaatatatacttaagagcaaatatatgctctacactagttatgcaataaagaacaacttgttgcctgctaatttagacgaggatccatccctgatatcctctcatcctccaacagagcatatggatcgatgtaaggtggtggtgaaaccggagttctacttccatcatgaatgaaatctgctccaaagtaaaggtaaagagcagagaaggcgccgagagttaagacttatcaatggccaaaaagcccaagaagaaagt

SEQ ID NO: 97162 - DNA, 406 bp, Arabidopsis thaliana columbia
gagaaattccaggagtgagttttgacaatcggagagaaatggggtcgacagaaaaagagcagacgacgcaacatcacccgccgcacatcagcagtctcgtcgtacgtccctccggaagcaacgacagagaagacggccgcaacgccgccggggaactatgaccccggagaagtctctcctgaaccggccttcgtttaatcgctcggatcggtataagggtgacaatggtggacatagaactcgggcaagttctagctcaccaggccgtcgtggatatgaagatcacaagcatggctctgatcttaatcattcaggcgttccacctcgtggccgtgagttaagcagcagaagggaagcacctgggagacacagagactattccccacccttagctagaggtggagct

SEQ ID NO: 97163 - DNA, 801 bp, Arabidopsis thaliana columbia
  unsure (1)..(801): unsure at all n locations
nnnnnnnnnnnnnnnnnnnnnnnnnnnnnnnnnnnnnnnnnnnnnnnnnnnnnnnnnnnnnnnnnnnnnnnnnccacgcgtccgtctcgccccagcggatccatctgatgaagcacagcattggtacaaagacgagaagtatagtactaaagtgaaggacgcagacggtcatccttgttttgctcttgtaaacaaagctactggtgaagcaatgaagcattctgtgggagctactcatcccgtgcatctgattcgatatgtgcctgataagcttgacgagtcagtactatggacagagagcaaggattttggcgatggatatcgcacaataagaatggtaaacaatacgaggctaaacgtggatgcatatcatggtgacagcaaatctggtggtgtacgtgatggcacgactatcgtcctctgggactggaacaaaggcgacaaccagctctggaagatctttcctttctgaaaaatgggcgtctggagtggtaaaaagttcctttgtgtgtgctgtatgaataagaaagaaacaaaactcagatttattcattgtttgtgtcttgtaaagacttgagtttgtgctgttggcatctgtaatctatcttacttgtattccaagtatgtttttacagatacattacatacactgtctatatgtgtatacttttttcctaatctattttgagatctttcttaaaaaaaaaaaaaaaaaaaaggggcgaccgctctagaggatccaagcttacgtacgcgtgcatgcgacgtcataaatcttctagtatgctacctaatacaatt

SEQ ID NO: 97164 - DNA, 564 bp, Arabidopsis thaliana columbia
  unsure (1)..(564): unsure at all n locations
ttccagggcngcccactgcgtccncataaacctgtgagtaaaaaagagaagaaagaaaaatggtgctaaaggtgtacggacctcactttgcttcaccaaagagagctttggtcacactgatcgagaagggcgttgccttcgagaccatccccgtcgatctcatgaaaggagaacacaagcagcctgcttatctcgctctacagccttttggtactgttcctgctgttgttgacggtgactacaaaatcttcgagtcccgtgcggtgatgaggtacgtagctgagaagtacaggtcacaaggacctgatcttttgggggaaaacccgttgaaggccaggggtcaagttgaacaatggctttgatgttgggaagcgccccctttaccaccccccccggctatttgaactttaacggttcacataatgttcggaatcagtcattgggnttcccatctgttggaggaagcttgttcaaggggggttaagggaagntttcgggggttccctttaatggtttcgggggacatttttaaaaggggaagtnctttggccggttacttcnttg

SEQ ID NO: 97165 - DNA, 921 bp, Arabidopsis thaliana columbia
accaagcgtccgcccacgcgtccgcccacgcgtccgcccacgcgtcggccgacgcgaaccataaactgtgagtaaaaaagagaagaaagaaaaatggtgctaaaggtgtacggacctcactttgcttcaccaaagagagctttggtcacactgatcgagaagggcgttgccttcgagaccatccccgtcgatctcatgaaaggagaacacaagcagcctgcttatctcgctctacagccttttggtactgttcctgctgttgttgacggtgactacaaaatcttcgagtcccgtgcggtgatgaggtacgtagctgagaagtacaggtcacaaggacctgatcttttggggaaaaccgttgaagacagaggtcaagttgaacaatggcttgatgtggaagcgaccacttaccacccaccgctattgaacttaacgcttcacataatgttcgcatcagtcatgggattcccatctgatgagaagctgatcaaggagagtgaagagaagcttgcgggtgttcttgatgtctacgaggcacatctctcaaagagcaagtacttggccggtgacttcgtgagcttggctgatttggctcacctcccgttcactgattacttggttggtccgattgggaaagcttacatgatcaaagataggaaacacgtgagcgcgtggtgggatgatattagcagccgtcctgcgtggaaggagactgttgccaagtattcattcccagcttaagatgtgttcatcttcttggtgatgtggtttgtgttttatgagaggtttaataaaagtggaactaaatgtacctcttaatgtaatgttgccacctctgtgttctctttccttttgtagtttaataagtatctttatggctttgtgaggctttcaattttaaggaaatgatcttttcccctt

SEQ ID NO: 97166 - DNA, 534 bp, Arabidopsis thaliana columbia
atctatttctgctctatctctctctctctctctctctctctctctctctctctctctggtattatttctatctcccccgccgtcgaaagagaaacgtcgatcggagaacctttgaaatgtcgactggattagatatgtctctcgacgacatgatcgccaagaaccgtaagtctcgtggtggagccggccccgctcgtggaaccggatccggatccggaccgggtccgactcgccgcaacaaccctaatcggaaatcaacccgatctgctccataccaatcagccaaggcgccggagtccacctggggtcacgacatgttctccgatagatctgaagatcaccgatcgggacgttcctccgccggaatcgaaactggaaccaagctctacatttccaatttggattacggtgtcatgaacgaagacatcaaggaactgtttgctgaagttggagaacttaaacgctacacaggtcattttgatagaagtggaagatcaaagaggaactgctgaagtagtgttttcttcgcgtggc

SEQ ID NO: 97167 - DNA, 777 bp, Arabidopsis thaliana columbia
  unsure (1)..(777): unsure at all n locations
tttccttggggggngncttacccggggncnatgnaactttttgncccctttnnntttcattggnaaaccccngaccnctccaaangggatnttcggaaatcccatcccccataaggcantntctggaatcgnccttttttagccttttattcccngaattnactgcttacaatgttggccagtggtggctatcttatgaccncagattancngttcaaggctttgtgtggggtatcaaattcgtttgaccaattggggcgttgagctaggaaaagttctggctactcaggtcaggaaacagcttcattcatcacgcactcaaggaaccgctcccgagggattcaattacagtaccaccacacttttgaaacgatatctcgagacaagttccgagccccagatgtgatgaccaagcccaagtttctctccttcgaccaaacgtgaaccatttgagcatttttcacccttgttcttctttttttcactgtccctgatcagagtatactttatcggcactcataaattatctaaaaatgggtactaataatccaaaccccataaaatcagaattgggagcataatatcagaaggaccgagagacaacattcttgagttctttgagagctttggggtcaagtgtcctgnagagaaaagggncagnctggattcctgcaaganggttacttccangaaaggtcaagaanagtcnnggggggancccgnnaggccttttcacaaaattcngggtccanngtttccngnaggnacaaagttccc

SEQ ID NO: 97168 - DNA, 709 bp, Arabidopsis thaliana columbia
  unsure (1)..(709): unsure at all n locations
ctctacttccagcatgtaaagaatatgatatatcctccgggatttcctttaaagctgatgcaattattgccaaccctccagcgtatggacatacccatgtggcagaagcactgaagataccgattcacgtatttttcaccatgccatggacaccaacaagtgaatttccacacccattgtcacgtgtcaaacaaccagcaggatacagactttcatatcaaatcgtcgattcattgatctggcttggaataagagatatggtaaatgaccttaggaaaaagaaattgaaactacggcctgttacatatctaagtggaacacaaggatctggatctaatatcccacatggatatatgtggagtcctcaccttgtaccaaagccaaaagactgggggcctcaaattgatgtagtgggattttgctatcttgatcttgcatccaactatgaacctcctgcagagcttgtggaatggctagaagctggtgacaagcccatatatatcggcttttggtagtctccctgtgcaagaccccgagaaaatggccagaaatcattgttgggaggcacttcaaaggccctaaaccggggggggttnntccacaaaaggttgggggggnccttgggancttaaannncccgnggcctttttttncttttggggaaattccccnatgnctggctttcccggggtaaaattgggggccannt

SEQ ID NO: 97169 - DNA, 372 bp, Arabidopsis thaliana columbia
ctcaaatttctccagaagagattcagccatcacataaacatctcctttggcgtcattgtatctcatcgcgggcttgaaaactagtcttacatcggcatatatctccctgacattgctatactccgaactctccattttttttttaattgttcccaagtccattggcttctctataacctgtttagtaatgaacagaagctatgaacatttttcaaaatcgctcatttcagcaaaattccatgtaaacatggaatatttaacccacagtttattagcaacagtttgaatctttaccttgtaataatcatgtagtccaagtcctttaacatcaacaggctccaagaacggccatgcccatttatgttgagcaat

SEQ ID NO: 97170 - DNA, 371 bp, Arabidopsis thaliana columbia
atcctattaatatagagattgatctagacagcttgatgtttgcaaagctaccacagcttagtgatgcaatcaacgagaatcagggcgcagattatatctatcgctatagatacgatggtggaggagcatcccaagtttggcttgcatcaggcagatatgttgtcatagatttgtctgcggggccttgtacatatgggaagattgaaactgacgagggcagtgttagtcccagaacagtgccaaggatacgatacattgtgcttccaggaaatgttagccctgttggtcatcagtctacccatgatatcttttctggtcagttagcagcgttggtagctactacaattgagcatgtcatagctcctgatgtc

SEQ ID NO: 97171 - DNA, 350 bp, Arabidopsis thaliana columbia
taaaaataaaagacagtaaacttacaaattaccaggtggtctgaactcgatcttatgaaaaaaaatattgaatcgaattcttaaatgtcatatatattgatgtcggaacaatatttttttattgaaacactaaattcattgaacatgttgggttcagtccggttcagaaatttactactgtgtctttataaaaccaaattactattgtgcccccattttccgatcgctataaaaaaaacctaattcctcaactctaattcaccatgtcttcagatcaactaagcaaattccttgatagaaacaaaatggaagacaataaaagaaaagtattagatgaagaagcgaaagct

SEQ ID NO: 97172 - DNA, 379 bp, Arabidopsis thaliana columbia
cccacgcgtccggtttcattaataatcttctctcgctttctctctttacgttaggtctgaagatggttgttgtgaccagaagcatgcgtggcgactatcctctcatttacaactccggctgacacaatctcgtcggcggctgtctcatcagttttccgagtcgccggagactctgactttgtgtgggagaagtttttaccgaccgattactgccacgtcatctctagatcgactgatcctcaccgaattttctcttctaaaaaggagctttatcgatgtctctgtgaatcaattctcatcgataatggcagaaagattttcaagatcgagaagctttcagggaaaatatcgtatattttgtcgtcaagagatctttcca

SEQ ID NO: 97173 - DNA, 353 bp, Arabidopsis thaliana columbia
attacggataaaagcataaaccttctcgcccgtctcaagatcctctagcgtagcacaagccgttatcagcgacacaccattgtaaccgaattaggagtcacctcttcatctctcaccatccgcaaaaacaaatcaacagcgtcttttgcaaaatcccgcctcgcgtaaccacaaatcatactcgtccaagaaacaacatttctctcagacatttcatcaaacaccttacgtgcactatcaagctctccacactcggcgtaaaaatgaaccagcgagctctgcacaaacaaatctttcgcataacccatcttcacaatcaacccatgaatctgaatcccattacctttcgctct

SEQ ID NO: 97174 - DNA, 381 bp, Arabidopsis thaliana columbia
ctcaatttctctccgttatctcaatcgcgaccaaagatctcttcgatcaaaaccctagctctaaattcccccaaatctgattcttctcctccgataagcttttgttgaattcacaaagcagcgtaaatggtgttggcggagctaggcgggcggattacccgcgcgatacagcagatgagcaatgtgacaattatcgatgagaaggctttgaatgaatgcttgaacgagatcactcgtgctttgcttcaatccgatgtttcatttccccttgtgaaagagatgcagagtaatattaagaaaatcgtcaatcttgaagatctagcagctggtcacaacaagcgccggatcattgaacaggctatctttagtgaactctgtaag

SEQ ID NO: 97175 - DNA, 441 bp, Arabidopsis thaliana columbia
aagctcaaaaactccatcttctttcccccaggaactcacaaaccctagatgaattgttaatcatcaatcatcgatttcaagatttagtctcgaaaggttttattttttttgtgcttgcgtcttaaatggagaatcgtaaaggaggaaactttagcgtacctagctccgaagctttgaccacgacgcttcgtaatgcgatccaagctttgggtcgtggtttcgatgttacatctgatgttcggcttctttattgcaaaggagctcctgggtcaagacttgttcgtatagaagaaggacaaaacagagatcttgagttgtctcatgggtttcttcttcctaatgtccctgctgatattgactgttcacgcggcaacagtggcacacaaagaatctctgtttgcagcttccatgagatggcagaagaattcaatgtgagatcag

SEQ ID NO: 97176 - DNA, 354 bp, Arabidopsis thaliana columbia
gcgtgcggtaacacctcttgtttttttcgattgttaatatcactttccaaaagaggtcaaaagtgaaatgtgttagtttcgaatttgatcttatgaatataaactacccattcttcgtaatatttatgacgcaaaagaggtgtgacgttagacaatgcgtaagcaatgttaaggtgtcgaaaaaacttgacctagattagattttgtcatggtgaaacaaagattgatgataatgatgttaatatgtggttgtcactagcgaatataattcatatctacttatcgtgtgatagatatcaaaagaattgtttatatcaatatgggtgatatctttgcgtcatgttatgttgagat

SEQ ID NO: 97177 - DNA, 892 bp, Arabidopsis thaliana columbia
cccaagcgtccgcggacgcgtgggcagctttgaatccatctgtcttctcctctctctctcttctccatttgcaattatgataatgtgaaagcaattcgaagaagaaaagttatcttcgcacctcagcaaagatccaatcgattcgattcttaagctttttcgtcttctccgataaggtcactacttagaagccgcgttgtggtttagttgactcctccaggttttatcttcaagctttttcgtctatcagatctggtgtcactgtcttctcataggattacatagagatggggaaaaaagctaaatggttttcaagtgttaagaaagcattcagcccagattcaaagaagtcgaagcaaaaattggctgagggacaaaatggtgttatctctaatcctcctgttgtggataatgttagacaatcttcttcttctcctcctcctgctcttgctcctcgtgaagtgagagtagctgaagtgattgttgaacggaacagggatctttcacctccttctacagcagatgctgtgaatgttacagctactgatgttcctgtagttccatcttcatctgctcctggtgtcgttcgtcgcgctacacctactcgatttgctggaaagtcaaacgaagaagccgctgctatcttgatccagactatatctagaggttctttggccaggagagcgttgcgggcaatgaggggcttggtcacacttaagttattgatggaaggatctgttgctaagcggcaggctgcatatactctcacatgtatgcagactctctctcgtgtacagtcgcagatccgagctaggagaatcaggatgtcagaagagcatcaggctcgccagaaacaactccttcagaaacatgctaaaaaacttgctggctt

SEQ ID NO: 97178 - DNA, 671 bp, Arabidopsis thaliana columbia
  unsure (1)..(671): unsure at all n locations
tatcgaaccaatctcctgatatggctgctcgtnttcattctaccagagttttgggaaccntcggttaccacgcaccagagtatgcgatgactggtcaactgacacagaagagtgatgtttatagttttggtgtggtgcttttggagctcttgactggtaggaaacccgtcgatcatacgatgcctcgtggtcaacaaagtcttgttacttgggctactccaaggctaagtgaagacaaagtgaagcaatgtgttgatccaaaactaaagggagaatatcctcctaaagctgttgcaaagctcgctgcagtagcagcattttgtgtgcaatatggagcagagtttaggccaaacatgagcattgtggtaaaagctcttcaacccttgttgagggcatcaacagcagcagctgttacccagtccacggaagcctgattcttctgtgcaatagcaacaatggaagattgggttcggtttcagttgttgccataccgtataaatgtgttcttaaagagagtctttttgtcgaggcttttcttcagttgggatgtatatgttttattaaggtgatgagtagtgatttggtgtgtcttttcaaatgctttgtggagtctgtttttccttataaaaatttattctaaatctggtttgtattttgggggtcttctttgc

SEQ ID NO: 97179 - DNA, 600 bp, Arabidopsis thaliana columbia
  unsure (1)..(600): unsure at all n locations
gncccccccccccagggggntttaagtnggnggccttggccctgnngtggacccncgtntcgnccccgggcacaagcttntcctggctccccaggctagggagccaaggaaccaatgttgatccaaaactaaagggagaatatcctcctaaagctgttgcaaagctcgctgcagtagcagcattgtgtgtgcaatatgaatcagagtttaggccaaacatgagcattgtggtaaaagctcttcaaccattgttgaggtcatcaacagcagcagctgtaccagtccaggaagcctgattcttctgtgcaatagcaacaatggaagattgggttcggtttcagttgttgccataccgtataaatgtgttcttaaagagagtctttttgtcgaggcttttcttcagttgggatgtatatgttttattaaggtgatgagtagtgatttggtgtgtcttttcaaatgctttgtggagtctgtttttccttataaaaatttattctaaatctggtttgtattttgggggtcttctttgctctttcttcattaacagaatactaattataagctttaaatatacaaaccttgaaaggaattttcatc

SEQ ID NO: 97180 - DNA, 1105 bp, Arabidopsis thaliana columbia
  unsure (1)..(1105): unsure at all n locations
nnnnnnnnnnnnnnnnnnnnnnnnnnnnnnnnnnnnnnnnnnnnnnnnnnnnnnnnnnnnnnnnnaccgcccgaatttccactcgtccggaggagaaggacgatcgatctaaggagacgatgaagatcttccacgttccttgtctgcaagacaactactcttatctgataatcgatgagagcaccggagacgcggcggttgtggatccagttgatccggagaaggtgatcgcatcggctgagaagcaccaagctaagatcaagttcgtactcactacgcatcatcactgggatcatgccggtggaaacgagaagattaagcagttggttcctgatatcaaagtatatggaggttctctggataaggtgaagggttgcactgatgcggttgataatggtgacaagctgactttgggtcaggatattaacatattggctctccacactccttgtcacaccaagggtcacattagttattatgtgaaccggaaaagaaggagaaaacccagccgtgttcaccggagatacactttttgttgctggatgtgggaagttttttgaagggacagctgagcagatgtatcagtcgttgtgtgtgactctggctgcattacctaaaccgacacaggtttactgcggccatgagtacaccgttaagaacttggaatttgctctaactgtggaaccaaacaacgggaagatacaacagaagttagcatgggcccgtcaacagcgccaagcagatcttcccacaatcccttcaacactggaggaagagctcgaaacaaatccatttatgcgtgttgataagccagagatacaggagaaactcggttgcaagtcgccaattgatacaatgagggaagttcggaacaagaaggatcagtggaggggatgatgataaatggagagcttcttgcctatgttttgtgtacttgtgttgaatgatcctgtaaaaggtgtatgaaccagtaatgttgatattctgtgtgaaactgtgaaccggtttggtaaaccgaaatcagaccgacctgtaagccgtactccctttttgaattttcagtttactatggataataatttcagtgtcaaaaaaaaaaaaaaaa

SEQ ID NO: 97181 - DNA, 704 bp, Arabidopsis thaliana columbia
tcgaagcaaccttgtcttcaacattctccatccgcctccgcacttaatccccaagttcacacttcaaatccactctttctatttctctccttcttcttctatgtctcgactcctccctcctcatctctccgtcaaccttcctaccatggagaaaactacttcttccgagttaaccccaactcgactcggtttccctaacgagtttccttacgagttcgactctccttccttctcccctggtttcacttctcccggtgactccactgagacggaagacgaaagcagtgatgacgaggaagacttcctcgctgggttaactcgccgactcgctccttcgactcagcgtcttccttcccctctcttcaagtctgaggagaaacgtcaagttgcagctacttcaccacagtcaacactgagtggactcggaagcttttcaaactcaggaagtagaagccctatccttccatctccaccgggtcctacggcatcatttcgttagggccacgcgggggatgtgatttctgcggctgctggagaagtcgctagacttaagctcggaagctacgagcctcatcaccttcctcttcaaacccctgagtctcttctccgccgtcaaaacgctgccatacatgctgaactccaacacccgcgtctcatcgaacagatgtggctctgctctgctcaatcaagattcaagctctcag

SEQ ID NO: 97182 - DNA, 803 bp, Arabidopsis thaliana columbia
  unsure (1)..(803): unsure at all n locations
ccccccccgaggctttaacacttttaaagctttcccgggttcggtaattttggtgtggaaattgtgaagcgggattaccaattttcaccccagggaaccaagtnnnnnnnnnnnnnnnnnnnnnnnnnnnnnnnnnnnnnnnnnnnnnnnnnnnnnnnnnnnnnnnnnnnnnnnnnnnnnnnnnnnnnnnnnnnccacgcgtccgcttcaggttgagtttcctcaacattatcctatggaagctcctcaggtgatttttgttccaccagctccgttacatcctcatatttacagcaatggacatatttgtttagatattctgtatgactcatggtctccagcaatgacagtgagttcagtctgtatcagcattctctcgatgctatcaagttcacccgaaaagcaacgccccactgataatgatcgatatgtgaagaactgcaagaacgggaggtctcctaaagagacaaggtggtggttccatgacgacaaggtttaatgatgacgaccttaagatgtctctcctttcagttacaaaagaggtttatataatttcccaagactgataatactaattgaaattcctcatggcctcccacttttttttctgtaacggatcattatgtataaatgacatctgaaatgtttcagtgtctgaattaacaccttgtgcttttgtcctttctgaagtgaaaacccatggagattttaggcaaaaaaaaaaaaaaagggcggccgctctagaggatccaagcttacgtacgcgtgcatgcgaagtcatagctagagctgttctatagtgt

SEQ ID NO: 97183 - DNA, 912 bp, Arabidopsis thaliana columbia
  unsure (1)..(912): unsure at all n locations
ctgcggtaccggtccggaattcccgggtcgacccacgcgtccggtgtcttgctgctcagaaataagtatcacattgtaatatatcgtgggaaggacttccttccttcaagtgtggcagctactttagcagaaagacaagaattaacgaacgagattcaagatgtcgaagagagggtaagaaatcgtgagattgaggctgttcagcctgttggtgacaaagtaccagcagaagctggcactctggccgagttttatgaggctcaagcccgatgggggaaggaaataactccagaccatcgtgaaaagatgattgaagaagcttcaagggttgcaaatgctagagttgttaaacgaatacaacacaaactaaaccttgcccaatcgaagtttcaaagagcagagaaactgttgtccacaatagaagcctctatgattccaaatggacctgattatgatcaacaggtcatctccgaggaagaaagagctatgttccggaaagtgggactgaaaatgaaggcatacttacccataggtatccgtggtgtatttgatggagtcattgagaacatgcatctgcattggaaacacagagaattggtgaagcttatatcaaaacagaagaaccaagcatttgttgaggagacagcccggttactagaatacgagagtggtggagttcttgtggcaatagaaaaggttcctaaaggatttgcgcttatttattaccgtgggaagaattacaggagacccattagcttgagaacaaggaatcttctgacanaagcaaaagcattgaaacgttccattgcaatgcaacgccacgaggcacttagttagcatatttctgaactggagagaacaatagagcaaatgcaaagccaactcacttcgaaaaaaccgtcatacagtgaa

SEQ ID NO: 97184 - DNA, 352 bp, Arabidopsis thaliana columbia
gtagccttactggatttatgcttttacctgtatttgctcgggttccatggggtgtctaagtgcttgcatgggttccacttttcaattttcttttgttttgcaaatctttcaaacttttagggacatggaacctatgaagatcggatggaaatgcttcgcaatattgttgatttagtggaggcgagcctcttctcagataatcaagaatggaggtagacatgtcacttgtatctgatatcttccaccagtttttatcattagtgtggcatttttgtagtctttcatctttcttattcccgtcgactttattatgtgtttcgttctttgagcataagactgcataacaatgatt

SEQ ID NO: 97185 - DNA, 361 bp, Arabidopsis thaliana columbia
  unsure (1)..(361): unsure at all n locations
gaggngtctttgttcttccttctcgacgacggtgtcacttgcgatgaatctctccacgaggctcgctgaaaaacttcccggaatcttaccggcgccgtcttctcctctcctgcgtaaaggagtctccgagttaagatgcttttcaattgctaaccaaagtagaagattgagatggggattacaaaagaagatggtttggagtttggagagagctgagacctgtgtagtgagcaaatcatgtttagttcatcctgcaactgaagcctatgcacaagaagctattgaagctatcaaatccgaaaaagttattgcttgtgcctaccgatacggtttatggcttcggttgtgatgcttgttcttt

SEQ ID NO: 97186 - DNA, 546 bp, Arabidopsis thaliana columbia
tgttgtctcttcaagcttctctctctgttcctcttattaccttttatctgtcacttttaaactgtgtcaatctaaactcagctttggattcaaacgctggtttttgcactccttacccatgtaaccaaccgcctcaaccaccgtcctctacaggctactctccatatggtaaccctcctccaccgtctccacagtattcaccacccccaccgccttcacagtcttcaccgccacgttctcgctgccctcctgttccgacgacaggctgttgcaaccaaccaccaggtccaccaccttcgacgatgtattctcctccgtatccttacttttatactcctccttatccttacggtactattggcggagggggacaaggcggtggcggccaaggaggaggaggaggaggagccgaaggcggtacaaccggttcagcgatggcttactattcctcttccattcccgtatatgttttgatgcttgtgttagctaatgcttttattgtcttttaggtcatacataggtttcagataaatattaaaagcctat

SEQ ID NO: 97187 - DNA, 359 bp, Arabidopsis thaliana columbia
cggagtcacttctcaacaaagcttcaagaatcggtgaaggggccttgggggcagtctacagggctcctgtagcagaacagcggagaaacttggctgttaagaaacttgtcccgtcgccgattcttcaaaacctagaagattttgatcgcgaagttcggatattggcgaaagcaaagcaccctaatctagtatcgatcaaagggtatttctggacaccggagttgcatcttctggtgtcagaatacatccccaacggaaacttgcagtccaagttacacgaacgagaaccctcaacaccgcctctttcttgggacgtaagatacagaatcatcctcggtacagccaaaggactcgcttat

SEQ ID NO: 97188 - DNA, 455 bp, Arabidopsis thaliana columbia
  unsure (1)..(455): unsure at all n locations
aaaagatcagatagagatagagagacagaggtagagatatggaattgctctttctcctctgttcaatcatctacacttcaatcacttccatcttcttctctcttctcctcccgtttcgcttccttctccaccgtctccttccttcacgcgccgccgtcgatcctaatgtctctttctacgaaggcacagtctggcacgaccgtctccgtcctgtccgccactctttccgttattccgttcgttacgcactctttgacctcgccaaagctattcccacaccgccggatcatttctccgccgccggacctcgccgggtttctcgtcccaccggcccattttttctattggccattcccaccaggggttggttatgaacaaaancccttggggtttaaantnttggcaatgnctttgggaggggnaagaaagggttaagnaaatgcattnntnaggnt

SEQ ID NO: 97189 - DNA, 396 bp, Arabidopsis thaliana columbia
ctcccactttcctagtgtgtctgccctgctaagtttactttaaacaaatgcccattattgattggtaagtttacgtactttaccctagttcatatagttacctcatatttctaagtaactacactatagccaaacataaatgtgaaacggaagcactcaatcgtcagcgaacttgagagcaaaatacaatacgacggtacggtatcagcataaacgtgaattaatggaaccgcatatttaaaaaaatcataactggataaggtttcaaaaaaagaattgttgcgcaataaacgagtttttttgtttattacaataaacgagtatcaattccttccatcgtcaaaaaccaaagagctttttgtaccgagcgaacgacattataatcacgaacaagat

SEQ ID NO: 97190 - DNA, 1127 bp, Arabidopsis thaliana columbia
cacattttgtagtttagttttatcctcaacaaccatcttcttcgttatattccttgagataacaacaaagcatcgttcttcacctttaccaaaaagataaaaaaaaagaaaaatggcaaaagaaaatggatttataggatcaatcgatcaaggaaccaccagcaccagattcatcatttacgaccacgatgctcgtcctgttgcttctcatcaagtcgagttcactcagttctatcccgaagctggatgggtggaacacgatccaatggagatactggaaagtgtgaaagtgtgcattgcaaaggctctcgacaaagccactgccgatggacacaacgtcgacggtggcttgaaggccattgggcttacagatcagagagagactactgttgtttggagcaaatccactggccttcctctccacaaggctattgtctggatggatgctcgtaccagctccatctgcaggagactagagaaagaactctcgggaggaagatcccattttgtggagtcttgcggcttgccaataagcacatacttctctgccatgaagctgctttggctcatggagaatgtggatgatgtcaaagacgctatcaagaaaggggatgccatctttggcactatcgacacatggttgatctggaacatgactggcggtatcaatggcggccttcatgtcactgatgtcaccaatgcttcacggacaatgctcatgaacctcaaaaccttgagctgggaccaggacactttgaagacacttggcataccggctgaaatcttgcccaagattgtcagcaattcagaagtgattggagagatctgcaaaggctggcctattcccggtatcaagattgctggatgtcttggtgatcagcatgctgcgatgttggggcaagcttgcagaaaaggcgaggcgaagagtacttatggcacaggtgctttcattcttctcaacaccggagaagtgccaatcaaatcaggtcatggtcttctgaccacgttggcctacaagctcggtcctcaagcaccagcaaactatgcattgggggttcgattgccatagcaaggggctgctgttcagtggcttaaagaaaacctttgggtattaaaaagcccttttt

SEQ ID NO: 97191 - DNA, 631 bp, Arabidopsis thaliana columbia
  unsure (1)..(631): unsure at all n locations
nnnnnnnnnnnnnnnnnnnnnnnnnnnnnnnnnnnnnnnnnnnnnnnnnnnnnnnnnnnnnnnnnnnnnnnnnnnnnnnnnnnccacgcgtccgcttatcttccatagtataaaacagtcagaagatgtcactgatgcaacaaagtcaaagaactcacatgcgatctgtgagcttgggctgtcaataatcaatcacttaactcagaaagagcctgatctacaaggggaaatcacacctgtatcgctgcctccgacgctgtacaaaccttctgaaaaagttgaaggagacaagtctcaggtaggtgaagaaaaattgtggctagctgatgagactgtcctgttacacttcagggctctcaagttggagagtcatgctgatgcatctgtgatcccccaaacttcagaaaatgaggttatgattgatggggaaagtgatggaaatgaaattcctctgggtaaaatagtacagcgtttgagagctcagggaaccaagactagaaagggcaaatagaataaatctgtaccagctgaagatgagaatggtaaaaatgatgtcgatgtttggagatggtgagggagataaatctagatcacttacaaatgctggataaattcgaatccagaatggaca

SEQ ID NO: 97192 - DNA, 565 bp, Arabidopsis thaliana columbia
  unsure (1)..(565): unsure at all n locations
catagttgtggcggtcttgttcacagttgttgctgcacttttcatttggaatatttcttgtgaaagacgtggtatcacagatttcatcgctcgttatccggatgctgatcttagaactgccaaaaacggtcaatatgtgaaggtcactggggtggtcacctgtggtaacgtgcctcttgaatcatccttccatagagttcctaggtgtgtttacacgtctacttgtctatatgagtaccgtggatggggttcaaagccagccaatgcttcacatcgtcgctttacatggggactgagatcagcagagaggcatgtggtagacttctacatttctgatttccaatctggggtcagggcattggtcaaaacctggaaacgggtgcaaaggtaacaccgcttgtcgatgattctgttgtcatcggttttaagccaggaaatgagcaagcctctccagactttgtaaggtggttgggtaaaaagaatctaaccaatgatttatccggataattcgncttaaagaaggnattttcaaagaggngnnnattaaggttnnttnnngtgggca

SEQ ID NO: 97193 - DNA, 707 bp, Arabidopsis thaliana columbia
accacacaaaattaaacacagcctctgcctaactctccgttgttccggccactgcgccatctccggggtcgagttcgtcgtacttcatcgaactatgaactctcatgatatcgatgatcagttagaagcagatgtttacagtaactggccttctcgaaatgattcttcaacagggaggagaaatcgaaactcgtgtagatcgaaacactcagagactgagcaacgaagaagaagcagaatcaatgaaagatttcagagtttaatggatattatacctcagaatcagaatgatcagaaacgagataaagcttctttcttgttggaggttatagagtatattcactttcttcaagaaaaagttcacatgtatgaagattctcaccaaatgtggtatcaatccccaaccaaattgattccttggagaaatagtcatgggtctgttgcggaggaaaatgaccatcctcaaatcgttaaaagcttttcaagtaatgataaagttgctgcttcttcgggttttctcttggatacgtacaattcagtaaatcctgatattgactcagcagttagcaccaagattcctgaacacagtcctgtttcagcagtttcatcgtatctacgtaccgagccttcgctgcagtttgttcagcatgacttttggcaaccaaaaacaagttgtggaacaattaactgttttacaaatgaattgt

SEQ ID NO: 97194 - DNA, 900 bp, Arabidopsis thaliana columbia
ctcacttagggaaagcacgtacgcctgcaggtaccggtccggaattcccgggtcgacccacgcgtccgagcaaagatagagatggagaatcacacgaccatgaaagtttcatctcttaattgtatcgatctagccaacgacgatcttaatcattctgttgtttccctcaaacaggcatgtttggattgtggatttttctatgtgatcaatcatgggataagcgaagagttcatggacgatgttttcgagcagagcaagaagctttttgctcttcctttagaagaaaagatgaaagtgttgagaaacgaaaagcatcgaggctatacacctgttcttgatgaacttttagatcccaagaatcaaatcaatggggatcacaaagagggttattacattggaattgaagttcctaaagatgatcctcattgggataagccattctatggtcctaacccttggcctgatgctgatgttttacctggttggcgagaaacaatggagaaatatcatcaagaagcattgagggtttctatggctattgcaagacttttggcgttagcacttgacttggatgtgggatactttgataggacggagatgcttggaaaacctattgcaactatgcgactgttgcggtatcaagggatttctgatccttcgaaaggaatatatgcatgtggagcacattctgacttcggaatgatgactctgttagccactgatggtgtaatgggactccagatatgcaaagataagaacgcgatgccgcagaagtgggaatatgtaccgccgattaaaggagcatttatagtgaatcttggcgatatgctggaacgttggagcaatggcttttttaaatccacgttgcatcgggttcttggaaacggtcaggaacgatat

SEQ ID NO: 97195 - DNA, 435 bp, Arabidopsis thaliana columbia
cccacgcgtccgttcagacttaaacaagagtaaccaaaccgggcttgtccttagttgcaggggttttagagctatggctaaacctattgttggtgctgacaaagaccttctcaaacaaggcattgtcgacatcgaataccaaagagtttcttgcgattacggcaacaagaacatgaacgtgagagtagaagaagcaagcaagaaaccaaactactttaggagataacgcttttataccaaggaggtcaaacagaagtagtatccatcgacattgctcaagtcggttcatcgccaaattggggttacatgacaagaagccacggagctgtttgggtaactgacaaagtacccaccggagctatccagttcaggttcgtagtaaccggtggatacgacggtaaatgatttggtcacagagtgttcttccatccaatt

SEQ ID NO: 97196 - DNA, 633 bp, Arabidopsis thaliana columbia
cactatagatagactatgacgccgcatgcacgcgtacgtaagcttggatcctctagagcggccgccctttttttttttttttttgcaaaagtggctttggttgacaacaaaaaacacacaagcgacttacagaagccggcaaaagatttgctcaaaaacaattaaaaaaacacaaactgaaagatatttggtttccaaagatggagcattcaaccaaatctgagaaacttatgtacagacaaaagatcagatttgaggtagaaccgagatttcatgatcacaccaaaaaggttatgttgctcaggcaacatgtcttaactagaatccgttggtgcattgctatcttgcgacgaggagaacaaggtgctaaacggccacgggatcgagaatccgcttccgtcattgttctcgttctcctcctcttcctcctcttcttcttcttcttcttggcgccggtttccatcgctgttctcagctccatggctggttgtagcagaagcactactgcttccattgttatcgctcgttgttgttactgaatcagtcttggcttcatctgcaggtaactgatatctgcaaaccgggcatgaactgtgaagctcaagccatggtaacaagcagtcactatgaaac

SEQ ID NO: 97197 - DNA, 410 bp, Arabidopsis thaliana columbia
aggaagtgtaagagactgattaaacaaaatcgagactttatagtactcaggtttgtcggaatcgactgagtatcgaaattattgtggtgttttgtgaacagaaaccaagcaggattaaagatggttcaatctgtgttaatttcgcgtaacaagggtttggcggagcaagatctaactaagcttgatgtaacaaagttacatcctctgtctcctgaagtcatttctcgccaagcaaccataaatatcggaaccattggtcatgtcgctcacggtaaatcgactatagtgaaagctatctctggtgttcagactgtgcgttttaagaatgaattagagcgtaacatcaccattaagcttggttatgcaaatgcaaagatttacaagtgtgaggatgacaagtgccctagaac

SEQ ID NO: 97198 - DNA, 1425 bp, Arabidopsis thaliana columbia
  unsure (1)..(1425): unsure at all n locations
acaaaaaccccaaaactctcaagaaaaaaaaaagaaaagaaatggcgatactatgcacaacaacatctccggcagagaaagaacacgaaccaaaacaagatcttgaaaaagaccaaacttctccactaatctttaacccttctcttcttaacctccaatcccaaatcccaaaccaattcatttggccagacgaagagaaaccttccattgacattccagagctcaacgtcccgttcatcgatctctcaagccaagactcgactcttgaagctcctagagtcatcgcagaagcttgcaccaaacacggcttcttcctcgtcgtcaatcatggcgtcagcgagtcactaatagcggatgctcaccgtttgatggaaagtttcttcgacatgcctctcgccggcaaacagaaagctcagagaaaacccggtgagagttgtggctatgcaagtagcttcaccggcagattctccactaagctgccatggaaggagactctctcttttcagttttccaacgataatagtggctcgagaaccgttcaagattacttttccgatacattaggacaagagttcgagcagtttgggaaggtgtatcaagactattgtgaagcaatgagttctctatcactcaagatcatggagcttctgggcttaagtttaggcgtaaaccgagactatttccgaggatttttcgaagagaacgattcgataatgaggctcaatcattatcctccatgccaaacaccagatctcacgttaggtacaggacctcattgtgatccaagttctttgaccatccttcatcaagaccatgtcaatggccttcaagtctttgtcgacaatcaatggcaatccattcgtcccaatcccaaggctttcgttgtcaatattggtgacactttcatggctctatcgaacgggatattcaagagctgtttgcatagagcggttgtgaatagagagagcgcgagaaaatcgatggcgtttttcttgtgtccgaagaaagacaaagtggtgaaaccaccaagtgatattttggagaagatgaaaacaagaaaataccctgacttcacttggtctatgttccttgagttcactcaaaaacattaccgagcagatgtgaatactctcgattccttttctaattgggttattaccaacaacaatcccatctaagaaacaaaattatttactatctcaatcttttgtttttctttggttactttgtgtcctttgttctcatggtgaaatgcattaaattgcatttcaaagttttaaacgtttgtatattgattgttccaagctttagaccaatccctaccgtatgagctcgttcaatgaataatttgaatgaaaaattcaaagaaatttttcttnnnnnnnnnnnnnnnnnnnnnnnnnnnnnnnnnnnnnnnnnnnnnnn

SEQ ID NO: 97199 - DNA, 411 bp, Arabidopsis thaliana columbia
cgggggggacccacgcgtccgtggcgatatgtatatagttagtatttaaacagcgcgggaacaacgaggggcagttggtttgtgtgaagggagagacaagggctttaatgggtcattagaaaaacgcccatgggccttaatgtcatatgtgggcattatggagaatagtcaagagaattccgaataaggccgaagaagaaagaaagatctctcactcactcagctctttggatccgccatagcaactctctcctcatttctcccggccatggagtctccaaagagctatgtaaatccgttctagcttttattctctcgctaattgccaaacagagatgtactatttctttcctctctaactcctcctgaaatggtgatatttgtttctccgtctacaacaagtttcatttg

SEQ ID NO: 97200 - DNA, 534 bp, Arabidopsis thaliana columbia
  unsure (1)..(534): unsure at all n locations
ggacatttgagtcggaactgttgtgatttcaaattttcatttctggagtgataatttcagtttttgatctgtgcgttcatcaatggaggtttcttctttacccagatactgtaactcacgctcctttgttccagaattgtctcgtttcaggggattcaaagttcacttatgggaccaatctcttgttcctcttcatttcagcattcgaaaacgaaagaacacccctcgttatttgatttcttgcagtcagaagaaagatgtcactgttgttgatggaagttgtatggatgagatctatgataagttggcggaacgtcttgtccctacagcagcggcaatgtttagccccaatcttaaacgtttggtcggtttggctggtcctcctggtgccgggaaaagtacagtagcaaatgaagttgtgcgtcgtgtaaataagctatgggctcagaaagctgcttcttttgatgctgaggnttaatccnccggntntttcctantagganctttncccanggatgggttncnnatttntna

SEQ ID NO: 97201 - DNA, 612 bp, Arabidopsis thaliana columbia
tctctacgactcactattgggaaagctggtcacgcctgcaggtaccggtccggaattcccgggtcgacccacgcgtggcgataaaacaaattgatcccttaaccttcttcaccaacatctctcttacactcaacaagagatcatatcatgtcctctccaagagaaagaggaaagagtttgatggaatcatcaggatcagagccaccggtgacaccaagccgttacgagtcgcagaagagacgtgactggaacactttcggacagtacttgaagaatcagagaccgcctgtgccgatgtctcactgcagctgtaaccacgtgcttgatttcctcaggtacttagaccagttcggtaagacaaaggtgcacgtgcctggctgtatgttctacggccagcctgagccaccagctccttgcacgtgccctctcagacaagcttggggaagtcttgacgctttgatcggacggctgagagcggcttacgaggagaacggtggacctccggagactaaccctttcgctagcggagcgataagggtttatctgagggaggttagggagtgtcaggctaaggctagagggattccttacaagaagaagaagaagaagaag

SEQ ID NO: 97202 - DNA, 397 bp, Arabidopsis thaliana columbia
cggccgccagtgtgctggaattcgcccttgttttcttgctgtccaactcccacggacagagcccgccggtgccgttggcccgccccggccccgccgccgcagcccccgcggcagttcccgcagttccacgtcaagtccggcctgcagatcaagaagaacgccttcatcgatgactacaaggtcaccacccaggtcctggggctgggcatcaacggcaaaggcttgcagatcttctacaagaggacccaggagaaattcgccctcaaaatgcttcaggactgccccaaggcccgcagggaggtggagctgcactggcgggcctcccagggcccgcccatcgtacggatcgtggttgtgtccgataatctgtccgcacggaggaaagtcctgcttattg

SEQ ID NO: 97203 - DNA, 996 bp, Arabidopsis thaliana columbia
atacgactcacttagggaaagccggtacgcctgcaggtaccggtccggaattcccgggtcgacccacgcgtccgcgaagcttgacactctcaagagtaaagctcgagcttgcgagaagaagcatgtctgcaacatccgtaccttcaatggcggattttctcaccaaaaaaccttactctcctccttcttgggcttctcatcttcgtccgcttccttctcacactttctccctcgctcaccttcctactccgatccatcgatggaatcttcctggtcttcctaatggcacagaactctggatcaagcgagatgatttcaccggaatggaattgagtggaaacaaagtacgaaaactcgaattcttaatggcggaagctgttgatcaacacgctgatactgtaatcactatcggcggtattcagagcaatcattgtcgtgctacagccactgcatctaactatcttaatctcaattctcatcttattctccgtacttccaagcttcttgctgatgaagatcctggattgggtgggaatctccttgtcgagcgtctcgttggagctaatgttcatctaatctctaaagaagagtattcttccattgggagtgaggctcttactaatgctctgaaagagaaactggaaagagaaggaaagaaaccctatgttattccagtcggtggatcgaactctttgggaacttggggttatatagaagcagcaagggaaattgaggagcagctgaattatagacccgatgacctgaaatttgatgatattgtggtagcatgtggcagtggtggtacaattgctggtatttcattggggtcttggttgggagctctaaaagccaaggttcatgctttctcggtttgcgatgatcctgattacttctatgactttgtccaagggcttctggatggacttcacgctggtgttaactctcgtgatatcgtcaacatccacaatgccaaaggaaaaggatatgccatgaaca

SEQ ID NO: 97204 - DNA, 529 bp, Arabidopsis thaliana columbia
agaactcgctctactcactcatatgggaaagctggccgcctgcaggtaccggtccggattcccgggtcggcccacgttcttcctctacacagatctttggattcagaagaaagagatctaaaatgggtgctgctgaaaacaaccttgaaatggagggtaccctggagatcggcatggagtatagaactgtttctggtgttgcgggacctctcgtcatccttgaaaaagtcaaggggcctaaataccaagaaattgtcaatatccgtcttggggatggaactacccgacgtggtcaagttctcgaagttgatggagagaaagctgttgttcaggtatttgagggaacatctggaatcgacaacaagtacacaactgtgcaatttacaggagaggttttgaaaactcctgtttctttggatatgcttggtcgcatcttcaatggttcagggaagcccattgacaacggtccacctatattgcctgaggcgtacttggatatttctggaagttctatcaatcccagggagag

SEQ ID NO: 97205 - DNA, 795 bp, Arabidopsis thaliana columbia
  unsure (1)..(795): unsure at all n locations
cagctttttactcgataaanncgncttttggtagattctgtataaaatctagcttatcgagggttatcctcaaagtttattaaatcaataataaaaatctctgaagaaaagtttgggtttttgccatttgggttttcttcgggctcatctggttttcgagagagatagagaaagtgagacaaggttaaggaggaagaagatgactgagaatcgggtggttttggctctgcttatactctgcattgttgggtttgagccaagtttcatccatggagctacggattcatcagatacttcggcgttaaacatcatgttcagctccatgaattctccaggacagctctcacaatggacagcatcaggaggtgatccttgtggccaaaactggaaaggcataacttgctctggctctcgagttacacaaataaagttaccaagtcttggactttctggatcacttggattcatgcttgataaattgacttctgttactgagtttgatatgagcaacaataaccttggaggcgatttgccttatcagcttcctccaaacttggagcgattgaatcttgctaataaccagttcactggatctgctcaatattccatttctatgatggctcctcttaagtacctcaaccttgctcacaaccagttgaagcagctagctattgacttcacaaaactcacctctctctctatattggacctctcttccaatgcttttatagggtctctcccaaacacttgtagctctcttacgagtgcaaaatcaatttatcttcagaacaatca

SEQ ID NO: 97206 - DNA, 573 bp, Arabidopsis thaliana columbia
ctttatatttttaacattcttttatcagatcatattttttggatttcttgttaagtgacaccaacctggtatcagtgttttcaggttaataaaaaagaataatgatgttttcggtgacggttgcgatccttgtttgtcttattggctacatttaccgatcatttaagcctccaccaccgcgaatctgcggccatcctaacggtcctccggttacttctccgagaatcaagctcagtgatggaagatatcttgcttatagagaatctggggttgatagagacaatgctaactacaagatcattgtcgttcatggcttcaacagctccaaagacactgaatttcccatccctaaggatgtaattgaggagcttgggatatactttgtgttctacgatagagcaggatatggagaaagtgatccacacccatcacgcactgttaagagtgaagcatacgacattcaagaactcgccgataaactcaagatcggaccaaagttctacgttcttggtatatcactcggtgcttactcggtttatagttgcctcaaatacattccccacagactagctg

SEQ ID NO: 97207 - DNA, 1000 bp, Arabidopsis thaliana columbia
ggaaaaccgggggcgacccacgcgtgcgggaaattcgaaactcgattggttggttgacttctctctcttctctccctaatatttttcagagagagaggttcttatatgttatctccgtccggtttgtttttaccggagtttatactcggatgaagtccggttctgctgttagttagccgtcaacacgacttctccgttgtcgtgttcttgccgtcaacacagctttttcgttgctgtgttcttaccgttaacatggctttctattgccatgtccttttgctcatacaaaagcttgatgttgaagactatggcttctaggattgttgaatcgggagagtttcgtatgcgccaaatctattctcttttgccataatatacttcatccattgagattttgcttttggatctgatggttttctaacgatgtgtggttttcacttccacacaaaaacgttggatccatcggatttacgacagcttatgttacctgcgtctaaggtttggttaaaaactcatttccatcttaaatttcgattcccttttgctgcttataaaaatattcagagattcacttatattatcaagggtggattacttcaatctctacatcttatttcatgattacgatggttttcttatgaatctatcaatcatttgagattagtagattgatttgttctgtaatccattattatcattatcagtgagaaaaaaagaagaattcgtaatcggttgtagttccggcaacgtattctgattcactggatttggaatctctgcatgcggtgaaggatgtgaaataaacacgtatcctcaacttatccccatcgatgagacacgttcttgagtttatcctttcttgggcctcttgtttgggcttcgttgaaagttgtctttgatgtttatgtaattgggtgtgatgttatgtattattatttcaataaaactgcagtttcagaggtaaaaagaaaaaaaaaaaaaaaaaaaaaaaagggcggcc

SEQ ID NO: 97208 - DNA, 428 bp, Arabidopsis thaliana columbia
  unsure (1)..(428): unsure at all n locations
cacagcaatggcgtcgacgaagcccgattccgcaatcaaccttgaagaagtggctgaaggcgacggtgtagccgtagacgatccgattttgataccggggaccacgaacttactcgtccgttactcgccattcgacgacagggacatcgattgcaatccttatttccctttcacaggcccgatttcagattctggatcaggttcttactcggattctgagcccgatcccaacagctgtcccatcgatttcttcgatcgagaattctttccgatgttgacgtggctgagtacttggaatcaaggagggcttgaccgccgggtgattaataaatatttgggggcttttattgaccccaaggaaggccgaggaagaggggggagttagttttggggacttccccgggncggattnttnaacccgggtgttt

SEQ ID NO: 97209 - DNA, 523 bp, Arabidopsis thaliana columbia
ttagaagataatgacgtcgcctgcacgcgtacgtaagcttggatcctctagagcggtcgcccttttttttttttttttttaacaaaaagcaagcttcgttattattataacttcattcatcttacaacactatagtccagtcaccaacatcaaacatcgaacatcgggtttgataatttgaacttggaaagggcttggggatcgagcaacaggagtgctcttagggggaggagccaatgtcaggttcagtcctccaatggcctctttcatgtcaaccttgtctcctttgattttccaggcaaagcattgcaccatcattccaatcggccggtcctacaaagatatacgctatatttggtccaggacatcctctccttcccctaccaaatgcaatgtacttgagggctggctctcttatcccttcttcttcccttaagcttgaagaagctagaaacctctcccgcttaaactcctcaggctcttcccagacatttggatctctcatcacagcataaccattaac

SEQ ID NO: 97210 - DNA, 1454 bp, Arabidopsis thaliana columbia
ccggccggaattccgtttttttttcgactgaatctttaagcctctcaacgtgttttttatatatattttgaaaatcttttacgccttaaaaggatctacgataattaaaaaaaaaatggcaacggaatgcattgcaacggtccctcaaatattcagtgaaaacaaaaccaaagaggattcttcgatcttcgatgcaaagctccttaatcagcactcacaccacatacctcaacagttcgtatggcccgaccacgagaaaccttctacggatgttcaacctctccaagtcccactcatagacctagccggtttcctctccggcgactcgtgcttggcatcggaggctactagactcgtctcaaaggctgcaacgaaacatggcttcttcctaatcactaaccatggtgtcgatgagagcctcttgtctcgtgcctatctgcatatggactctttctttaaggccccggcttgtgagaagcagaaggctcagaggaagtggggtgagagctccggttacgctagtagtttcgtcgggagattctcctcaaagctcccgtggaaggagactctgtcgtttaagttctctcccgaggagaagatccattcccaaaccgttaaagactttgtttctaagaaaatgggcgatggatacgaagatttcgggaaggtttatcaagaatacgcggaggccatgaacactctctcactaaagatcatggagcttcttggaatgagtcttggggtcgagaggagatattttaaagagtttttcgaagacagcgattcaatattccggttgaattactacccgcagtgcaagcaaccggagcttgcactagggacaggaccccactgcgacccaacatctctaaccatacttcatcaagaccaagttggcggtctgcaagttttcgtggacaacaaatggcaatccattcctcctaaccctcacgctttcgtggtgaacataggcgacaccttcatggctctaacgaatggaagatacaagagttgtttgcatcgggcggtggtgaacagcgagagagaaaggaagacgtttgcattcttcctatgtccgaaaggggaaaaagtggtgaagccaccagaagaactagtaaacggagtgaagtctggtgaaagaaagtatcctgattttacgtggtctatgtttcttgagttcacacagaagcattatagggcagacatgaacactcttgacgagttctcaatttggcttaagaacagaagaagtttctaaaattgaggagacaatgttgtggtccagaaggtcacttgtagttatgtatagagctttcactgtttttcttaagatgttcaagacttgttaaggatcggagacttttttgttcttttattatcttgctctaggttgtctggtgttaaataaaagtagcaaaaaataaaaatatatgtactccaaaaaaaaaaaaaaa

SEQ ID NO: 97211 - DNA, 690 bp, Arabidopsis thaliana columbia
  unsure (1)..(690): unsure at all n locations
atgatcctgccagctannnnnnnnnnnnnnnnnnnactcactatagggaaagctggtacgcctgcaggtaccggtccggaattccccgcgcccctttcgcaacttgtcaaagcaccacgaccttctctctacggagttgagatcaatccccccaaatctcggtgtggttcctctagggtttttgatcggaatcggaatcgataatctaaccggcatgaggccaatcctattgccggatccacccagtctatctaccggcgtccctgatattttcgaacaaggcggttcccataacgtcgtcagacgcgccgtcgtcatcggaaacggtttccctggctccgagaatcagtgtatcggtctcgttcgtgcgctcggcttatctgataatcaccttctctaccgagtgacaaggcctaaaggaggactaaatgagtggctgcactggctcccagttggttttcacaagaagttggactttatcctcaggcatatttacctctactccagattgatgcttggatccaaacaaagtaaatacatctcatctgtaccctcagagaatggtggtaatgtaggtttggcctctattctagaggctgatgtgaagggcattgtaaatttggcccgtcagacctatgaaaaggatggcccgttgatcgtgattgcatgtggaagagatactatttctat

SEQ ID NO: 97212 - DNA, 578 bp, Arabidopsis thaliana columbia
  unsure (1)..(578): unsure at all n locations
tgaaatggtcatagtttagtgtagtagaaaggttggaatttgtgctcagtatcggtcagaggtgtcagggttcgctacttttccagtctctagaatgatgtcaacaagatcactcatttccatggagtcaacttgaagaagagctttttcgatcaaatccttgaattcgattgatgggtatcctcggctgcgacgcccatggcgatttgaacgatgcagagttcagcaaacccttaccttcgattggtatctacgttgccgtagcttcactcatctgtggtctagccatggccgccgatcttatacacggcttccgacaccgcaaattctggtttccctgtaagttcttctctctcaacgccacttctctgactttcatcgctgtcggaatcaaaactctctgtgggtctcaacacttncatgccgagtcgtcaggatcagttagctaaactcagcagcaccgtctttgtatgtactgtgatggggaattcgntgccttctctngggatntnggcaanatntntccnatgaatcttatggtttaggggtnttgnatnctgangtgtaaaactgattna

SEQ ID NO: 97213 - DNA, 987 bp, Arabidopsis thaliana columbia
  unsure (1)..(987): unsure at all n locations
gtcctcttcttcgacttccagataaaatcgcttcctctgtttttttccgatctaaattcacagctcatcgaaaatgggctcacggcaaggaccaccgaagcatcagaacaaattcgcctgggttcccaaagccggcgtcaagatcaacgaaacggaagtcggcgggagatttagaccattatccgagattaccggagtttgctaccgatgtcgagagcagatcgcctggaaacgcaaatacggcaaatacaaaaccctaactgaagccaccaaatgtcagaagtgtacaaagcgaaatgttcgtcaagcataccataagttatgccctggttgtgccaaggagcaaaaggtgtgtgcaaagtgttgtcaaagtgttgatcaaatccttggaagagatatttacgaagtagaggctgaacagaagctgcttgatgagactatcaagaatgctagggaaagagatcgaaggaccctattacgtgctatgaacaaagataacaaaccaaataaatcagatgaagaagcgtcaaggagtgatagcagcaaggttggtgatgtgtttccctcaacttcccttgaagaatatgcaaacaagtccggaagagttagcgggattattggtcatggtagtgtgcctgatcatgcccatgatgatgctagtggacctgaatcagatgaggatgacaatgttggtgatgatgagcatgatttgcgcgaagacagtgatgaaaatgagcaatctcaactgcagaaataaactcatgtttggttgtactactgtcaatttggtaggattgtgagattttgcaagactgtttattcctgttgttttgataaaacttttacttggtcacctgcaatgcaagactagcaaagaatactataaattttgttctgttttaaaaaaaaaaaaaaagnnnnnnnnnnnnnnnnnnnnnnnnnnnnnnnnnnnnnnnnnnnnnnnnnnnnnnnnnnnnnnnnnnnaac

SEQ ID NO: 97214 - DNA, 1268 bp, Arabidopsis thaliana columbia
  unsure (1)..(1268): unsure at all n locations
ctcactattgggaaagctggctcgcctgcaggtaccggtccggaattcccgggtcgacccacgccgtccggaacggctcaacaattatcggtggcacctgactcagggcgttattcctatacaccgacggtgtacagtagcagtggatggggacctttacgcagtgggctgttccaagccgagagtaacccgtggcagagaaatcgtgattcataatcctggtgaggaggtagtatcctgcttgtggaccactcattgatggtgtggcaatcaaagctctataccctcctcggcccaccaataagaatatattgaagaacggaggatttgaagaaggtccctacgtactcccaaacgcaacaaccggcgttctggttcctccctttatagaagatgaccactctcctttacccgcgtggatggtcgaatcactcaaagccatcaaatacgttgatgtcgagcatttctcggtcccacaaggncgtcgagccgtggagctagtggcaggcaaagaaagcgcaatcgctcaggtagctaggcccgtttgtggggaaaccttacggtgctttcgtttgcggttggagatgctaacaatgcttgccaaggatcgatggtggtcgaggcatttgcgggaaaagccactctaaaggtaccttatgagtctcgaggcaaaggagggttcaaacgcgcttctctacggtttgtggcggtttcgacccgcacaagagttatgttttacagcacattttactcgatgagaagcgatgatttctcatcactgtgtgggcccgtgatcgatgatgttaagctcctcagtgctcgtaagccgtaagatggccattgttttatttctaaggttcttcgtataagccagtgtggttttttatataaatatgattttcttaatctctaatgcttttgaaatgagatgagtaatactgaaagggtgtttgtggtgtagggttttatataaggcaaaaaggtcttgcttatatatattttcttgtatgagaaggctaaagaaatgttgtctgtttttactaaattgggttctttcaaggagatcgggtgattgtgagaataaaaatgtaatacagatatatatggtagagaggaatgaggataataatttaactttaaaaaaaaaaaaaaaaaaggnnnnnnnnnnnnnnnnnnnnnnnnnnnnnnnnnnnnnnnnnnnnnnnnnnnnnnnnnnnnnnnnnnnnnnnnnnnnnnnnnnnnnnnnnnnnnnnnnnnnnnaatatcat

SEQ ID NO: 97215 - DNA, 505 bp, Arabidopsis thaliana columbia
  unsure (1)..(505): unsure at all n locations
cagctannnnnnnnnnnnnnnnnnnnnnnnnnnnnnnnnnnnnnnnnnnnnnnnnnnnnnnnnnnnnnnnnnnccacgcgtccgaaagacttaacgttacaaaaggaatgtattactcactgacgttcagtgccgcaaggacatgtgcccaagacgaacggctcaacatatcggtggcacctgactcaggcgttattcctatacagacggtgtacagtagcagtggatgggacctttacgcatgggcgttccaagccgagagtaacgtggcagagatcgtgattcataatcctggtgaggaggaagatcctgcttgtggaccactcattgatggtgtggcaatcaaagctctataccctcctcggcccaccaatagtaagtattcatttattatatgaattgagtttgtataatcaaatcttttttcagatatcacgcaatgtgatccatcatgttacaactatatgtagttatgtattaactcgttatcgttaggccttagggg

SEQ ID NO: 97216 - DNA, 626 bp, Arabidopsis thaliana columbia
ttaggtacacactatagaagagttatgacgtcgcatgcacgcgtacgtaagctcggaattcggctcgagcgagcatttctcggtcccacaaggccgtcgagccgtggagctagtggcaggcaaagaaagcgcaatcgctcaggtagctaggaccgttgtgggaaaaacttacgtgctttcgtttgcggttggagatgctaacaatgcttgccaaggatcgatggtggtcgaggcatttgcgggaaaagacactctaaaggtaccttatgagtctcgaggcaaaggagggttcaaacgcgcttctctacggtttgtggcggtttcgacccgcacaagagttatgttttacagcacattttactcgatgagaagcgatgatttctcatcactgtgtgggcccgtgatcgatgatgttaagctcctcagtgctcgtaagccgtaagatggccattgttttatttctaaggttcttcgtataagccagtgtggttttttatataaatatgattttcttaatctctaatgcttttgaaaaaaaaaaaaaaagggcggccgctttagaggatcccagcttacggacgggtgcatgcgacgtcataagtcttctataattcccctaaatccat

SEQ ID NO: 97217 - DNA, 743 bp, Arabidopsis thaliana columbia
  unsure (1)..(743): unsure at all n locations
taggtgcactatagaagagctatgacgtcgcacgcacgcgtacgtaagctcggaattcggctcgagctttctagtctcttctctttactttggtcgtccacaatgaaaggaggcagcctctcgtttctcttcgttctcctaatcgccaccatcacttccgtcatttgcttcagtgacgggatgttaccaaacggcgactttgaactaggaccaaaaccatcggacatgaaaggaacgcaagtaataaacaagaaggcgattcctagctgggagctttcaggcttcgtcgaatacataaagtccggtcaaaaacaaggagacatgcttctcgtagtcccggccggaaagttcgcaatccggctaggcaacgaggcatcgatcaaacaaagacttaacgttacaaaaggaatgtattactcactgacgttcagtgccgcaaggacatgtgcccaagacgaacggctcaacatatcggtggcacctgactcaggcgttattcctatacagacggtgtacagtagcagtggatgggacctttacgcatgggcgttccaagccgagagtaacgtggcagagatcgtgattcataatcctggtgaggaggaagatcctgcttgtggccactcattnatggtgtggcaatcaaagntctntaccctccttggnccaccantaagattttntttaggacgggggntttangagggccntcgtctccaanggaaaaccgggttttttgttcc

SEQ ID NO: 97218 - DNA, 744 bp, Arabidopsis thaliana columbia
aatctcatggagcgtggaacacacgcgatgctgtggtgaggaatgggcgcgtgggtggtggtttgtcgctggcgtttgagcacgcgtcatcttcgccgaggatcgtgcaccagatacgtggcggaggagaaggaggaggaggtggtgtgaggaggaggaagagttgagaggcagttggcgtcgtcggctccggtgaacgtgccggattggagtaagatataccgagtcaactcggttgagtcgatacacgagtctgatgaagaggaggaggaagattccgggatgatgatgccgccgcatgagtacttggcgaagagccaacagcgacggagcagaaaatctggcggcggtggctcggtgtttgaaggagttggaagaactcttaaaggacgagaattaaggcgcgttcgagacgcgatttggagccaaacagggttctacggctaagttagtaatataaaatttgaaagaaaaaaaaaccaatataaaacttcaacataaaaactttggaaaatattttgcttattttgtcagtttagagttaattttgcaactttcttgaatcccaagcttgagatgtataagatttatatattgcttcccatgcaaacgctttttcttttcttatttttagatccataaattaattgtgggaaaattttcaagaacctgctaagtgaacaattttctctctttttgctgttgtattgataaaatagagaaaaaaatcaatattttagtgtc

SEQ ID NO: 97219 - DNA, 831 bp, Arabidopsis thaliana columbia
  unsure (1)..(831): unsure at all n locations
gtagacccacgcgtccgctgaatgcttaagataataactataatctaagagtaattaattaaacgataagtggttaaatttgttgaggttaaaagtgaagcttcaatggcaagaggtcgaaagctgacgatgagccagagcgagaggtacctaggaagcagctatagttacggtgacagtaacggaaactccgccaccgacgaatcagagctcacggaggaggacatctggtcacacgccgtcgatcacagcccggagatgctggaatctcatggagcgtggaacacacgcgatgctgtggtgaggaatgggcgcgtgggtggtggtttgtcgctggcgtttgaggacgcgtcatcttcgccgaggatcgtgcaccagatacgtggcggaggagaaggaggaggaggtggtggaggaggaggaagnatttttntgtnttttttttttttttttttntttttccgtgtcggtttggagtttgattttcctggttganttcggttggggcggttcctcgaattctttcgaaccacgattatgctctatttctttgatatcattatagccctgcctcatgtagaccttttgcgcgatattacttctccttcagattttactctgttaactaaaattataatcttctagctctgccgactaccatttttaattcataacttccctgatttatctacagtattgtttctctgacaacatcgcctttctataacagggtctccggttccgtaacctatcttctatgtggcctctcgggtttctctagaacactcttcggtggtctatcatattccatctcaagctcctctacatcac

SEQ ID NO: 97220 - DNA, 185 bp, Arabidopsis thaliana columbia
cctaaattgaagaaagagatgttttccatttaagaagaagagaatttcatgaagaatggaaggaagaaagatttgtgcctcgagtaactagtaatttagaatatccttaaaccgtcataagattgtataaatagaggggtttgtcctctatttgaaccatctgtaacttaatactcaaaccaaaa

SEQ ID NO: 97221 - DNA, 985 bp, Arabidopsis thaliana columbia
  unsure (1)..(985): unsure at all n locations
tacgactcactatttggaaagctggtacgcctgcaggtaccggtccggaattcccgnggtcgacccacgcgtccggcaatacctacagcattgggaaattgcacagcattggaggaaattcacttgcagagtaactacttcactggaccaatcccagctgaaatgggagacctgcctggccttcaaaagctggacatgtcaagcaacactctcagtggacctatccctgcttcgcttgggcagttaaaaaagcttagtaacttcaatgtctcgaacaacttcctggtggggcaaataccttcagacggagtgctctctggattttctaagaactccttcattggaaatcttaacttgtgtggaaagcatgttgatgtcgtgtgccaagatgatagtggaaaccttcatcacattctcaatcaggtcaaaatcaaaagaaaaactctggtaagctgctgattagcgcatcagcaactgtaggtgcgctactcctagttgcactcatgtgtttctggggatgctttctatataaaaagctcggtaaagtcgagattaaaagccttgcaaaggatgttggtggaggtgcgtctattgtgatgttccacggagatttaccttactcttccaaagatatcattaagaagctggaaatgttgaatgaagagcacataatcggatgtggaggctttggaacggtgtataagctggccatggatgatggcaaagtctttgcattgaagagaattctaaagttaaacgaagggtttgatcggttttttgagcgggagcttgagattcttgggagcatcaaacaccgatacctcgtgaatctacgtggatattgcaattcaccaacatcaaagctactgttatatgattacttgcccggtggtagccttgatgaagcacttcatgagagaggcgagcaattggactgggattcacgcgtaaatatcatcataggagctgcaaaagggttatcata

SEQ ID NO: 97222 - DNA, 730 bp, Arabidopsis thaliana columbia
  unsure (1)..(730): unsure at all n locations
tcgaaagttttctctgctatggatttttattaccaagcttgggttcatggaggtgctctgcttgctgttggagctgatgtaccggcggcggttagagaatttagccggactttgtttaatatgcgtccggatatatctctgcttgtttcgaggacggntttcaacagcgatctgagaggtgtgcttgggttagttagagttccgacgtgtgtgattcagaccgcgaacgatgtttctgtgccggcttcggtggcggagtatcttaggtctcatctcggtggagatactactgtggagactcttaaaactgaaggacatttgccgcagcttagtgctccggcgcagcttgctcagtttctccggcgagctcttcctcggtgacttttttttatagatataaaaagagaacaataaaatataattggtggaatatgggtttagtggggtccacgtatcgaagaaaagaagggcctctatttgtggaggacagtttggcattgtcacaaatctagtaagataagattgttcacttgacacgtgactttcgcttttttatcactttttttcttgctctcttcattagtttataatcacaagtttatttcataaaataattggagaataaccnnnnnnnnnnnnnnnnnnnnnnnnnnnnnnnnnnnnnnnnnnnnnnnnnnnnnnnnnnnnnnnnnnnnnnnnnnnnnnnnnnnnnnnnnnnnnnnnnnnnnnn

SEQ ID NO: 97223 - DNA, 479 bp, Arabidopsis thaliana columbia
  unsure (1)..(479): unsure at all n locations
ngaaaaaccactttttaaacttttctatacacatttcccgagaaaatagctgttctcaaagcgtacccgttggcttttgtctcttgtttttagataaaatgatactctattgagaaaaataaaacgaacgtaacaaagcagacaattataagctgacattgtcttccttcttattctaaacaaagcagacaattataagctgacattgtcttccttaattcttattctaaacaaaataatagatagtaaagcataaataaagaaaatgaaaatatcatatcattgtacaacaactctgcttaatgatcagtgttgtggtatagtagagcaactaaacccaaaatttggctcaagagttgtgttcttggtccagagaagttgagtatcaatcaaagaatgattcttatcatcgagccgtttccaagttttgattgtatcaacagctccccaacgtccatacatagtcttttcaagctgag

SEQ ID NO: 97224 - DNA, 1470 bp, Arabidopsis thaliana columbia
aaatcattgggctgggctaaagaagtgcactacgaggagtcgttcaaaagacacgacttgacccgaccgatccgacccggtaagaggttagcccaccacgcaacgtccgtcggggaagataccacgcgacggaaacgacgaacacgaacagcggaaatcgtcaattcaatctcgcagatcagttttggaatcacatataacaatgtcggcggttctcacagccggcggaggcttaactgccggggatcgcagcattattacggcgattaacaccggcgcttcgagtctctcattcgtcggctcagccttcatcgttctctgctactgcctcttcaaagaacttcgaaaattctctttcaagctcgtcttctaccttgctctctctgatatgctttgcagtttcttcctaatcgttggggatccttcaaaggggttcatttgttacgcacaaggctacactactcatttcttctgcgttgcttcgttcttgtggacaactacaattgctttcactcttcatcgtactgttgtcaagcataaaactgatgtggaggatttggaagcaatgtttcatttgtatgtatgggggacttccttggttgtgactgtcatacgttcttttggtaacaaccactcacatttggggccatggtgctggacgcaaactggtcttaagggaaaggctgttcattttttaactttctacgctcctctttggggagccattctttacaatgggtttacttacttccaagtgatacggatgctaagaaatgctagacgtatggcagttggaatgtcagaccgagtcgatcaatttgataatagagcagagttaaaggtgttgaacagatggggatactatccactcattctaataggatcatgggcattcggcactattaaccgtatccatgatttcatcgagccagggcataagatcttctggctctcagttcttgacgttgggacagctgcactaatgggcttgttcaattcaatagcctatggtttcaacagctcagtgcgtcgagcaatccatgagagactggagctattcttgccagaacggctatatcgatggcttccaagcaatttcagaccaaaaaaccatctgattctacatcagcaacaacaacagcgaagcgaaatggtatcactcaagaccgaggaccagcaatgacactaactttcaactaatacattggaccgataacaagaaggcggcgatgataatagcgtttggatggagagattgatatggtgaaggggggtgcacaacaggttgtcaatgtatatgaaacattctttgggaacacgaacttaacaatttatttatttttgtatgaacttttttattgtgaggtcttctgatcttgatttgaaattaacgaacttggagttcttggacgacaatgttgaagagttttgttacgtaagtcatatgaaaatactatcaaaaaaaaaaaa

SEQ ID NO: 97225 - DNA, 424 bp, Arabidopsis thaliana columbia
gattttaactttgagctctctgagaaaccaaagcttcactctgattcgctctcgaatcaaaagagacgacagagaaagaagaagaagaaacgcgaagaacagaaacagctctcttaagcttttcttaattattattataattttctcttcttaatccccaaatctcctgatggattcatgaaccagatcggctgatttgagtttccgggtttgatttttttccctttttgtgaaattgggttggaatctggagatctggatcttataaagctggaaactttacgtgtgcttgatgaaccgattttgattaggtgattggttagattcggaaatttgaagacttgttaatttgggtttgggattgggattgatctgaaaatttgtagtttttggaagatatgttggaagatcgatcaccagattc

SEQ ID NO: 97226 - DNA, 650 bp, Arabidopsis thaliana columbia
  unsure (1)..(650): unsure at all n locations
ggaaagacggtacgcctgcaggtaccggtccggaattcccggttcgacccacgcgtacgccgacgcgtgggcaattttacagaagaaagtgaaaagaaagagagaaaggggaagaagaaaaatgtataaatcaccattaacgttgctcacacttcttactatttgttttggattcttcgatctcagcagtgctctttatggatcttcgtcacctgtggttcagctcactgcttctaactttaagtccaaggttcttaattcaaatggagttgttttggtagagttctttgcaccatggtgtggtcattgcaaagctctaacacctacatgggagaaagtggctaatattctgaaaggagttgctactgtggctgcaattgatgcagatgctcatcagtctgccgcgcaggattatggtattaaaggtttcccaacaattaaggtttttgttcctggaaaggctccaatcgattaccaaggagcaagagatgccaaatccattgctaattttccttataagcagatcaagggtcttttgagtgaccgtttggaaggcaaaagtaaaccaactggaggaggatctaaagaaaagaaatctgaacctagtgcatctgtggaactgaacgctagcaattttnatgatttggtca

SEQ ID NO: 97227 - DNA, 535 bp, Arabidopsis thaliana columbia
  unsure (1)..(535): unsure at all n locations
gcggcaccggnnccgaaaacccgggnncccacgcgtccgcttcgcttaattctccggcgtatacaagtcgccggcaaaaatgtcgatgtcgaagagctccaagatgcttcagttcataaactacaggatgcgagtaacaatccaagacggaagacagctaatcggaaaaatcatgggggtcgatccgcccaatgaatcttgttctcggcgactgcgaagagtttcgaaaacttcctccggcgaagggtaataagaagacgaacgaagaaagagaagagcgtcgtacgcttggtttggttttacttagaggagaagaagggatttcgatgactgtcgaaggtccaccgccacctgaagaatctcgcgccaaatctggatctgtaaccgctgtggctggtcccggaatcggtcgtgctgctggacgtggagtacctactggtccattggttcaagctcagcctggtttatctggtcctgttcgtggaattggtggacctgctcctggaatgatgcagcctcagatctctagaccacc

SEQ ID NO: 97228 - DNA, 633 bp, Arabidopsis thaliana columbia
  unsure (1)..(633): unsure at all n locations
nnnnnnnnnnnnnnnnnnnnnnnnnnnnnnnnnnnnnnnnnnnnnnnnnnnnnnnnnnnnnnnnnnnnnnnnnnnnnnnnnnnnnnnnnnnnnnnnnnnnnnnnnnnnnatctcaaagaaaacaatatctttaaaggctaaactacgagtacaatcataatggttttatcactactcttaaacaagaaatctttagatatttaaaaacaaaagccaaaggataggggtattcaacattactacatatgagagtgacgtaacagcaaggaaacaacccttagtttgctcattggctccaagccacattgtgtacaacctaataagaattcagattacctacaacccttggtttgctcgttcgtcgtaacacatattcagcagagtcgcagacccaaacaagttctgactacagtcatctaataacgattgtaggcttttccatattcttcacgtctctggcgttggaacccaccataattgttgtcttgatgccttgaagaatagttatctccatgatttggatatcttcccttggaatccattggcacattgtttccaccatagggaggaggatttgaagagttgccatcatcaaactcagcataaggaggaaactgtctatagttaccataa

SEQ ID NO: 97229 - DNA, 330 bp, Arabidopsis thaliana columbia
cgtatcgttaatcttcttcgggtcagacgatctgaagccgatcgctgtagaatcagtttcgtgctccgcagtttctcgagtttcctctcacttcagatcttcataagagaattcacttacggagagggactttttcgtagacgattctcactggatatctatcacccggtaagatcgtcttgctcgaaaagaattgaaaagtttttaagtaattgaataaggaactgtgaatcggagaggcttacttttttgaaaagatctaaaccatcgtagaaggatcgtcctcaaatatctcacagaagttaccaattttgaaagatcactagagat

SEQ ID NO: 97230 - DNA, 434 bp, Arabidopsis thaliana columbia
acggacgcgtggggaagaagaaaaaaaatcatggagatgaccgaagcttccaaacagacaacagcagaaggatcagcaaatccagaaccagaccaaatcttgagtccgagaagatcgttggagctaaaacaaaagaaatggtggatctctgtttctttatgtattttcttagtcttgctcggagattctctagtcatgcttctcttgaacttcttctatgttcaagacaatcgagaagatagtgaccaagatctacaataccgaggaacatggttgcaagctctggtccaaaacgctgcgtttccactactcattcctctgtttttcattttcccttcaccaaaacaaaaccaagaaaccaccaatactcgtttcctctcttttcgtctcatcttactttacatctctcttggtgttcttgttgctgctcacag

SEQ ID NO: 97231 - DNA, 869 bp, Arabidopsis thaliana columbia
taagcttcctcatgaactaaatgtctatcaggatatcttcaaagagttgtatttaagcaagtacagtggtaggaggttaatgtggcaaaattcattaggccactgtgttttaaaggcagatcgccccacgcgtccgaaggagctggctgtttccctgtttcaggctgttgtgttaatgttatttaacgatgcaatgaaacttagctttgaagacattaaagattccaccagcatagaggacaaggagctgaggaggactttgcagtcgcttgcttgtgggaaagtccgtgtcctgcagaagaatcctaagggaagagatgtagaagacggtgatgaatttgaatttaatgatgagtttgcagctccgctgtatcgcattaaggtaaatgcgatccagatgaaagagacagtagaggagaacacaagtacaacggaaagagtattccaggaccgacaataccagatcgatgcagccattgttcgtattatgaagacaagaaaagtcttgagccatactcttctaatcactgagctcttccaacagctcaaattcccgataaagcctgctgatctgaagaagaggattgagagcttgatcgatcgagaatatttggagagggaaaaaagcaaccctcagatatacaattatcttgcttagaatctctttggtaaacacaccttttgaatattttcctttttgtatatttattgacaaacaaacgatgaccgaaattttcttatcagtttgaaaaaaaaaaaagaactctcgattttccaatcaagaaaaaaaatgtgttggtatcttgataaccgaattaattagggggcggccgtttttaagggatccaagctttacttccccgggcatg

SEQ ID NO: 97232 - DNA, 771 bp, Arabidopsis thaliana columbia
  unsure (1)..(771): unsure at all n locations
tttccttcgacgagggcaacaagaaagcttgggtagataaacgaacaggtgggctctgtttatgcacatcagccaagggcttatccataaccggaattgatgatcggagatactggagtcatattccgtctgatgattctcgatttgcttcagtagcttatgttcaacagatctggtggtttcaagttgatggagaaattgatttcccatttccagctggaacctacagtgtttacttcaggcttcagctaggcaaaccaggcaagcggtttggttggaaggttgttgacaccgaacaggttcatggctggaacattaaacctgttcgttttcaactctcgactgaagatggtcaacattcttcatctcaatgtatgttaaccgnagcaggnaactggagtcattaccatgctggagactttgtggtcggtaaatcgaaaagttcatcgacgaagattaagttctcgatgactcagattgattgcacgcatactaaaggcgggctatgtgtagattctgtagttgtgtatccgagctcgtgtaaggaccggttgatgcagatttaagttgcaaaccggagtttgggtgtagtttagaggtttaaaaaagctgttttttttttttaaagtggttttaaaaccttttgtagaatctttgagggggtaattagaaaactcagtgtaaagagaaaaagagggtaattactaattagggttggtgtttccccgtttagctccaatgtaaactttaagtttgaagttattaaagctc

SEQ ID NO: 97233 - DNA, 841 bp, Arabidopsis thaliana columbia
  unsure (1)..(841): unsure at all n locations
tttattagcaggaacatatcactctctccaatatgggagttggagtcaacatcaaggccaaacattggtgggggaggatacattaaaaacatcaaaatatcagacgtttatgtaggacaccgcaaagtatgggatcaagatcgccggcgacacgggagatcattcggacgagaattataacccgaacgctcttccagttgttaagggaatacatatcaagaacgtttggggagttaacgttcgaaacgctggctctattcaaggtcttaagggctcaccatttacgggtatatgtttgagtgagattaatctacatggaagcttgaattcgtataagacgtggaagtgttcggatgtcagtggaacttcactaaaggttagtccttggccgtgttcggagctgagaactaccggcgggtctaatttgtgttcttccacattctaaaaacttctgagcaagttcttacctctttggttcaatttttttttgaaataatttatctccagtttgcagttcctccatttatatatatggttgtactttgtatgttttaaaaaaattatgtaatgaattgtaatagtggaaaaaaaaaaaaaagggcggccgctgtagaggatccaagcttacgtacgcgtgcatgcggaagtcataggtgcggcaatagtgtaaaagagtgttacagcnctttccaacgcgtntgggcgagtggatgaatggaatgatgagagggaatgaattatatgtaaaagaagtgataggtgagttaataatatgaagagagttgaatgagagagagtatggagtggaatgataaggagtagtacagtgaggtagagatgt

SEQ ID NO: 97234 - DNA, 387 bp, Arabidopsis thaliana columbia
cgcgtccgatttaaaagctaattttcttagtttcgtgcaaactttatttttaggcgacatagaaagttaccggggggggggaaaacttaaaaaaaaaatgacgaaaatgttatataagttacacaaaagattacgatgatttgatcaacaaagtacatgccaagttgcatctcacgcagaaacgttggatttgaatttttgtttattttattacttgtacgattcgaaatatttgataaaattgtcgtatctagtaagaaattagtcaaagttatccgttctttgcaatcattttttctttcacatctcttactacctagtattatatctagcatacgaaaatgctatcgtgcttcaatggtttaaagtttgttgtataagtctaaa

SEQ ID NO: 97235 - DNA, 479 bp, Arabidopsis thaliana columbia
atcatgcctgcaactggctcttcccttttttgcgagaggtgctccaagcagcaggtttcttatctatttgaacaaacatatcatacctgtttttgacaagctcccagaagagaggatacttgatttgctcaaagcacttgctggtatttctccatacacaactgctggggaagcaaggcagctgcttccttcaatcgttgagcttttaaagatatacatgcctgctagaaagactggagaggaaatgaacttcacatacgtcgagtgtttgttgtatgcgtttcatcaccttgcccacaaggttccaaatgctacaaacagcttgtgtgggtacaagattgtgaccggccagccattcagacaagattgggggaggacttctcagagttgaacaaacactttactgagagattaaccattgttgaggatctaactaaggcatccatgaagaaattaactcaaggaatgactggtcacaa

SEQ ID NO: 97236 - DNA, 1141 bp, Arabidopsis thaliana columbia
  unsure (1)..(1141): unsure at all n locations
gatacttccnnnnnnnnnnnnnnnnnnnnnnnnnnnnnnnnnnnnnaccggtccggaattcccgggtcgacccacgcgtcccgtgagttcgatttacacttttttttgtccttttttattaataaatcactgacccgaaaataaaaatagaagcaaaacttcatgtcgtggtttctaatagcggtggcgacaatcgccgccgtcgtatcctacaagctaatccaacggctaagatacaagttcccaccaggcccaagccccaagccgatcgtcggtaacctctacgacataaaaccggtccggttcagatgttactacgagtgggctcaatcttatggaccaatcatatcggtctggatcggttcaattctaaacgtggtcgtatctagcgccgagctagcaaaagaagttctgaaagaacacgaccagaaactcgccgaccggcaccggaacagatcgacggaagcatttagccgcaacggtcaggatcttatatgggccgattatgggcctcattacgtgaaggtgagaaaagtttgcacgcttgagctcttcacaccgaaacgactcgagtctctcagacctatccgtgaagatgaagtcaccgccatggttgaatccgtcttcagagactgtaaccttcctgaaaacagagcaaaaggtttacaactgaggaagtacttaggagcggttgcgttcaacaacataacgcggctagcctttgggaagcgttttatgaacgctgaaggtgttgtggacgagcaagggcttgagttcaaggccatagtatccaacggtctgaagctaggtgcttcactgtcaatagctgaacacatcccgtggctcaggtggatgtttccggctgatgagaaggcgtttnctgagcacggggctcgtcgtgaccgcctcattcgagctatcatggaggagcatactttggcccgtcaaaagtctagtngagcgaaacagcatttcgttgatgcgtttgctaacgnttgaagggtccagtatgatcttagtgaggntactatcatttgggccttctatggggntattgatcacggcaagggntgggcacggcagccnttaacaagcgggantgtggcgattgcggaaatatccaanatccaagagtcanaaa

SEQ ID NO: 97237 - DNA, 930 bp, Arabidopsis thaliana columbia
ggttaggattgatggctgccattttcacagattttctgaagttcatgaatttgagaagccaaatgatgagcaagctctgaaacttatgaattcatgtgcagtggctgttcttgaggagtttcaggatattgcctttgcctacggcgttagtgatgagttcagctttgttcttaagaataaatctgagctttacaaaagacagtccagtaagataatatctgcagtagtatccttcttcacatcgacttacatgatgagatggggagattttttcccgccccaaaaattgaagtaccctccatcattcgatggacgagctgtttgctatccaacatcagatattctcctggattatctagcttggagacaagtcgactgccatatcaacaatcagtataatacatgtttctggatgcttgttaagtctggaaaaagcaaaattcaagcccaggattacttaaagggtacccagacacgagaaaaaaacgagttacttagccagcaatttggaattgagtacaattcattacctgtaatcttccgcatgggttcttccgttttccgcctaaagacgcaggaaggtgtttcagaggagaatggagaagtttcaggaaagcaagtggaagcagaagtgggcgtagactattcaaacattatcgaccaatgtttctggcaacaacatcctcacattcttagcttctcctaagacaggtattcattgctaccaaaaaaaaattccaaaccgaaaaccgaatgagattcagctcttattttgataaaccgaagctaaagtacaaaacaatcgaaccgaatggtttacttttttctttcactatttttttttttttccattattttaaattaacctttttcaatttggtagttatttttttccttcaatgagagatttgggttgttaattttcctttg

SEQ ID NO: 97238 - DNA, 599 bp, Arabidopsis thaliana columbia
  unsure (1)..(599): unsure at all n locations
ggntnttnttccacnccgntttccccgggtttnttgcttggggnccagccggncccattccancaccnggacatccaggttcaggcgtggtaagcctggaaaaagcaaaattcaagcccgggattacttaaagggtccccagccccgggaaaaaaacgagttactttgccagcaatttgggattgagtacaattcattacctgtaatctcccgcatgggttctcccgtttcccgcctaaagacgcaggaaggtgttacagaggagaatggagaagtttcaggaaagcaagtggaagcagaagtgggcgtagactattcaaacattatcgaccaatgtttctggcaacaacatcctcacattcttagcttctcctaagacaggtattcattgctaccaaaaaaaaattccaaaccgaaaaccgaatgagattcagctcttattttgataaaccgaagctaaagtacaaaacaatcgaaccgaatggtttacttttttctttcactattttttgtttttttccattattttaaattaaccttttgcggccgcgaattcgatatcaagcttatcgataccgtcgacatcgagggggggcgcg

SEQ ID NO: 97239 - DNA, 363 bp, Arabidopsis thaliana columbia
tcgacaaatctgaataagccctatttgctccagtggagcaatatattcgaggctccgatcactactccgacgggacactaatcccgaattgcatcgctgccgcttccttgctactaaccagaaaatttatctattgatgtaataaaaaacctgataatgtctctcccccattggcctcggccagaagagaaaggagacggctcatagggtccatggagaaagaggtggatcgctccgagaaacaagggccgcgttcagttgtggagtgaaacccattggtattaagggttttcaagaaatgaaatgggtcccaatttaaggagctgtgaattgcaagattgaattgcattttcatgatgattc

SEQ ID NO: 97240 - DNA, 936 bp, Arabidopsis thaliana columbia
agaacagctctgacgtcgcatgcacgcgtacgtaagcttggatcctctaaagcggccgccctttttttttttttttttatataaatagatgtcgctcagcttaaccattaatctagttataataattgggaatttgggatccatacaacaacaactttaatatacatttcacattaattgtcaaacagataagaaaagatcatacgaaaatagagcagctgattttagcaatcaaatttagaacaatcaatctgcagaacattagacaacaaacaaacaaacaaactttaaacttgttctttcactctaaaacctgttcttctccttgcagttgcttctcaccatttttcttgtttttctcattcaccaaagttagtcaaaacgaaactacaactacgcgaagcttcactcctccacaacaccaacgccattctcaccagtctctccatcatggccactattaaacatttcatgtacttcttcagactttggtgttccctttttggactttctcatctgatctttgctgctgctatttggtgtccttgggacactgttcgttttgacttcatccttgcaaccacctacactgtgacgatgtcgagcacaatgcttccccttcacttcctgatatgatgcgttaactgtgtcgctgcagctctttctacggttaaggtttggtgacttaggccgagtcaatggaaactttttcaatggttgtttcggtggaggaccctcttggtagaaacttggtaccggattagctttgtaagccatgttcttcctaagttgcttagtgactgcttcttgctcttccttaagccttttctcgttttctaatttctctgcttcaagtgctttctgtttttcctctaacttctggtaaaactctcttcgtctctccagtcgcgatgtgctactaaatgttggagcaac

SEQ ID NO: 97241 - DNA, 585 bp, Arabidopsis thaliana columbia
ggttctgatgggatcggtggtcttgcatcatcagcaaatcaactgctgcaggatgacatggaccagtttggagatgtgggagctctagaagataatgtagaatcatttttgtccaagatgatggagacggaggaagcttgtttggcaccctaaagccggaactcttctgtgcataccgaaacctcaagcctttcagtttcaacgcggtcggttgtataagaaaaagtgcctgtttggtcatttgctgtagcttctcatatgatgggaagttgttggctggcgctggacatgataagaaggtatttatatggaacatggaaacactacaagttgagagcactccggaagaacatgctcatatcatcacagatgttcgcttcagaccgaattcaactcaactggcaacgtcatcattcgacaaaacaatcaaaatctgggatgcttctgatcctggttacttcctacgaacaatttctggtcatgctgcacctgttatgtccattgatttttatcctaagaaaaccgagcttttatgcttctgtgatagcaacaatgatattcttttttgggacataaacgcctttt

SEQ ID NO: 97242 - DNA, 666 bp, Arabidopsis thaliana columbia
  unsure (1)..(666): unsure at all n locations
gatgannnnnnnnnnnnnnnnnnnnnnnnnnnnnnnnnnnnnnnnnnnnnnnnnnnnnnnnnnnnnnnnnnnnnnnnncttttttgtgtttttttttaaccatctaaagttgatttattttattttgaagataatatatgagaagtaatgtaagattaaacggaaaatgaagatccctcacacacacaaaaaaagaaaaggaaaacctatgatgtacattctcaactcattacacaaacacaaagagaaaaacaaacacaaggacaaagacagacatacacattagctatatagatagtaaaatgatgtagtttagaaacatcaaaggcctcagcttttctttatcagatgatcagtcatctcttccactctaccggagttgccttaccgtttccttctcgggacgaaagaagagttttctctgtcttgttcccgcttttgccactcgagtttgagactcttgttttaggagaatgagaagtgatttttgcactattacctgaagatggtagagagtaacgtctactggctttctcagtggccctaattgcctagggnagaagagccttggagcccagctttgcttagggntttaggcgnctgcanananncgggatcccgggnacaagccggtnccatancacnccctgaaccgggggtngnggc

SEQ ID NO: 97243 - DNA, 1013 bp, Arabidopsis thaliana columbia
ttcccgggccgtaccgtgcacgtaaaccacacaactcttttcataaaagccctctatctttcaacaaacatccgattagagtagcaacaatagagatcaaacgtaactcacaaaatgctctcgtttcttatcccagttgtacagttttttcaggtggttatcgctgccgtagcatctgtagtcttcttagtgttcgccggtataaccttcggtgcctcaattgtgggactaaccatagccacaccgctttttgtcatcttcagtccgattctcgtaccagccactatagccactactttcctagtcggaggggctaccgctgcagttgccctaggagtgacggcatttgctctcatactttggctctttaaacataggattggagtaaaaccgaagaacaatccagctccgaaaggagccccaaccaaagcagatcaaccgggagcgtcgggaggagcgtctggagataaaccgggagaaatgtcaggagcaggaggaccgtcgggagataaaccaggaggagcgtctggaggaggagataaaccgggaggagcgtcgggaggaggacctggaggagcgtcgggaggaggacctggaggagcgtcgggaggagcgtcgggaggaggacctggaggagcgtcgggaggaggacctggaggagcgtcgggaggagcttcgggagataaaccggaaggagcaccgggagataaacccgggggagcatcggggggtaaaccggggaaaaagccaggacataaaccggcgggagcgcgaggaggtaaacggcttgcgtggtggtaaggatgatcatatggagcaacttgaaaattaattattaggtttcataaattaaacctcatgtatccatctctttttagtaaatattaattaccgtagaagaaactacatgtttcaaatatcatttctattaatttatagcatggtacaaagaaattaactatgaaacaatgctttgtttaaatgaagtaattaatcggtactatagcctatat

SEQ ID NO: 97244 - DNA, 528 bp, Arabidopsis thaliana columbia
  unsure (1)..(528): unsure at all n locations
caagcttcttcaccagcctatccgctcatcgtcaccttctccaatcaacaccagtgactcagcctccagctttaacattcccacctctgcccaaaaccactatgccaccggttccttctctaccaactccaggacaacaaacgttgccacagccacaaccaactctgccacagcccactgggttgccaccgatgccgagcacacagataccatcattgcccaaccaggtgcagcccacaatccctaacattccacagatcaacttccctagcaactttcccttcaactttcctttcaacattcctttccttactccaccaccttcaaagtaagagaagtgaaagctagctcattagctgtcacagatcattatccttctttcctgagacagctttggttcacacactctgctttgtgtcagtttgtatacacatatatgtattcttttgctgttgtttggggtcatcggcctctttgttgttgcttccataagtcaaggtccctttggtaatnttcaaaaannnagnt

SEQ ID NO: 97245 - DNA, 537 bp, Arabidopsis thaliana columbia
  unsure (1)..(537): unsure at all n locations
aaccaacaagaagtagtcaaagcacaatacagcagtagtagtagcaccatggctcctctcaagaactcctttgtaacatctctggtcattgcactaacattcacaagcttcttcaccagcctatccgctcatcgtcaccttctccaatcaacaccagtgactcagcctccagctttaacattcccacctctgcccaaaaccactatgccaccggttccttctctaccaactccaggacaacaaacgttgccacagccacaaccaactctgccacagcccactgggttgccaccgatgccgagcacacagataccatcattgcccaaccaggtgcagcccacaatccctaacatttcacaggtcaacttccctaggaactttcccttcaactttccttttaacattccttttcttacttcaccacctttttaaagtaggggaggtgaaaggtgggtnttttgggtgtaaaaggttattatccttttttcctggggcaggttttgggtaaaantttgntttggggaggttgtttanata

SEQ ID NO: 97246 - DNA, 488 bp, Arabidopsis thaliana columbia
  unsure (1)..(488): unsure at all n locations
catgacccaactgacacaatgtcagacatgtgcagcaacgttggaccaagcattgattggaccaatgcatcgaataagaagggaaagggcgagtgtgagggtgtgatgatgaccgtaggatgttgtagagaatctggtctgatagggttttgggttgcgcattgatagtggtgtgttttctatttttttcttttcaatctatccttattttatttcgtgcttcaatactttgtgttaatatctggaatgtgtgaagaccattgcacatgcaatttttattttccaaaaaaagaatatggaagcccttcgcttggattcgggagcgcggtttggctttcagagtttatagaataccgaaacatttgtaattttagagattgtggtttaagaagatttttgactaaaaaaaaaaaaaaaaagnnnnnnnnnnnnnnnnnnnnnnnnnnnnnnnnnnnnnnnnnnnnnnnnnnnnnnnnnnnnnnnnnnnn

SEQ ID NO: 97247 - DNA, 1363 bp, Arabidopsis thaliana columbia
  unsure (1)..(1363): unsure at all n locations
nagacagctggtccggtttcgtgctctttaaaaacctaaagaagatgagtttggtgtggagttgtcgaagcagcgacacttatgacgatgttgtggagaaagtggctgagaagcttggtcttgacgatccatccaaacttaggcttacatctgacaattgctattcccagcaacccaagccttagcctatcaagtaccgtggagtagaccatttgtcagatatgttagttcattacaatcagacgtctgacattttgtattatgaagttctggacatccctcttccagaattacaaggtcttaaaaccttaaaagttgctttccatcatgccacgaaggaagaagtggtaatccacaatatcagactacctaaacaaagcacggtcggagatgttattaatgaacttaaaacaaaggtggagctttcgcatccagatgcagaactgagattgctcgaggtgttttaccacaagatctacaagattttcccatcaactgaaagaattgagaatataaatgaccagtactggactttacgagctgaggagattccggaagaagagaagaatattggtccaaatgatcgcttaattcttgtgtaccattttgccaaggagactggacaaaaccatgcaagtgcaaaactttggcgcgcccttcttcttggtaatccatgaaggtgaaactcttgaagagaccacgaaccgtatccaaaagaagcttcatgtatctgatgaagattttgccaagtggaagtttgcgttcatgtcaatggggcgtccagagtacttgcaggacacagatgttgtttataatcgcttccagagaagagatgtctatggtgcttttgagcagtacctcgggttggagcatgctgacactactcctaagagggcttatgctgcaaaccagaaccgccatgcttacgagaagccggtaaaaatatacaattagccccaaaacatgaacacaaatgtcaggagacattgtggcagcaacgttggaccaaggcattgattggaccaatgcatcgaataagaagggaaagggcgagtgtgagggtgtgatgatgaccgtaggatgttgtagagaatctggtctgatagggttttgggttgcgcattgatagtggggtgttttcaatttttttcttttcaatctatccttattttatttcgggcttcaatactttgtgttaatatctggaatgtgtgaagaccattgcacatgcaatttttattttccaaaaaaagaatatgggagcccttcgcttgggaaaaaaaaaaaaaaaaaaaaaaaaaaaaanaaagggcggccgctctagaggatccaagcttacgtacgcgtgcatgcgacgtcagag

SEQ ID NO: 97248 - DNA, 632 bp, Arabidopsis thaliana columbia
  unsure (1)..(632): unsure at all n locations
cgaaaaggagatttnccatgtcaattgagactacagaggaaaaagttacgattgtcgaggtaataacacaagaattgtctgatgctctttctcagatataccagtttgttacctatctttcaaaggaagcaacggtgtgttctgagaacagaactttctcccaaaaagttcaagaattatctgtcacattcgagggagtcttgagcaaggaaaagacattggtcgattttctgtttgatctttcgcgagttttagtcgaagctagtgagctaaagatcgatgtgctagggttccacacatccacagtagagattcacagcccggattgcattgataaagtcgctctaccggaaaacaaagcacttcagaaagattcatcaggtgaacattaccagaatggttgttctcagagctcagattccgagattccggatgattgcaacggaacatctggctatgaaccaaagcttgcaacttgtaaatttacatcagaagagtttgaaggtttgaaactcgagaaagaaaaagcagagagcaaccttgcaagctgtgaagcagatcttgaagcaactaagaccaaactacaagaaacagagaaacttcttgctgaagtcaaatcagacttggaatct

SEQ ID NO: 97249 - DNA, 658 bp, Arabidopsis thaliana columbia
  unsure (1)..(658): unsure at all n locations
ggataaagtaaactccgctttagctatgtntttgattgcaggtccaagggattatttactcgtggaaagagcctttgaatatgtncttagaccgcatgctttagaacacctggcctgctgtatcaagtcaaacaaaaaaaacatatcgtttgaatgggaatgcagcgaaggggactatcatcgtatgagcagtatgcttgcttctcacttcagacatagatggttacagcaaaagggaagatcgatagccgaggaaggggtcagtggggtaaggaagggcacagttggtctggagactattcatgaggacggtgaaatgtcaaatagttcatctcaggataaaaaatcagactcctcgaccatagagtgggctcaccagagaatgcccctacctccacactggtttctcagcgccatctcagcagtccacagtggtaaaacctcaacagggccaccagaatccacagagttgcttgaagttgcaaaagctggagttttctttcttgcaggacttgagtcatcgtctggttttggatcgcttccctctcctgttgtgagtgtaccgttggtttggaagtttcacgctttgtctaccgtattgcttgttggaatggacatcatcgaagacaagaacactaggaacttgtacaattatctg

SEQ ID NO: 97250 - DNA, 413 bp, Arabidopsis thaliana columbia
  unsure (1)..(413): unsure at all n locations
gtgaacctctcctccttcactctctctaatggcgcttccaagcactgtctcatctccttccttcaaatcaactccaccttatctctccgccttcaaccctaaacctctacatcttccagctacttaccggagcatcaaccgtcgaagctgtaaactcctctccttccgttgctcatcctcttccttctccgagaaacaccacaacaacgcgaatccacccaaatcagatgacttagtcgagcttcctctatttccactacctctcgttctcttcccaggcgcaacaatcccgcttcagatcttcgagtttcgttaccgagtcatgatgcaaacgcttctccaatccgatctcagattcggcgttgtctactccgacggtgtttcaggctncgagctgggaatcggatgcgtcg

SEQ ID NO: 97251 - DNA, 555 bp, Arabidopsis thaliana columbia
gttggataacaaaattagttgccgacaattaaatgaagggaatggtttgtcaaatttggcaagtagagtgtttttacattatacccagtgggctaaacagaaaaggatgggcctatggatcaagagaaaagcccaattgtaacgagacattacaatatcaagatatgatgggttgggtatttgcgatgatcatatctctctccaacacattacttttggtcgagctttcttcttcaatgggcccattagcgatctcgacggagctttcttcatctggttgttcttcacctgcctgaaaaaggtcgagaaaaaacccataaatgaatgggaagaaagaaggaaagggagagtagtgttgaaacatttattacgaaggtgaagcgtctcatcttctcctgctgctccttggctctcagagatcggattggagaaatcttctgttgtccaaatcaaacggcaaattactttaaatactcttcataactaaaagaaagaagctactatatatgtttgctgcttacagaggaataggcgtggagctccttcaatcgaaag

SEQ ID NO: 97252 - DNA, 317 bp, Arabidopsis thaliana columbia
  unsure (1)..(317): unsure at all n locations
tgatgaaggatcagtttgcaaattacgtggtccagaaagtcttggagatcagtaaagatcagccaagggagattctggtgcagaggatgaaaattcatctcccaagtttgcggaaatacccatccgggaaacccatagtagcccgattcgaacaactgtttggtgaaaagagtgaagtctcagaaaagggaacagaaggttacacagaagattttcctttgggttgcagatttgtacaatgtttgtcttagccaaatatgtatttgaaaacgcctatggatataaacttgcccccatgcnnnnnnnnntnnntggnt

SEQ ID NO: 97253 - DNA, 657 bp, Arabidopsis thaliana columbia
  unsure (1)..(657): unsure at all n locations
gaaggcgggcccccctgcaggaaccggcccggaattcccgggtcgacccacgcgtccgtacggttgcgaaaggacaacagaggggggactcagagaggcagagagagagagagagagagatatagaagagaagtgagtggcgtttggttaatcattttcagaagatggatccgacggcgccgttgcttacacacggtggcgaagtagaggaggattatgctccggcgaggagctggaccgatgtgaaacgagtcttatctacagagtcggccaagttgtggatgatagctgctcctgtggggttcaacatcatctgccaatacggagttagctcagtcactaatatctttgtcggtcacatcggcgaagtcgagctctccgccgtctctatctctctttccgtcatcggtaccttctccttcggtttcttgcttggtatgggaagtgctcttgaaacattatgtggtcaagcatatggagctggtcaagtcaatatgttaggaggttatatgcagagatcttggattatcttgttccgttcttggtttcttcctccttcctatttacatcttttnccacgcgggttcttagctactcggcaagaangggntccctntcccctgncagtaantntttaccanncaaggtttttanggt

SEQ ID NO: 97254 - DNA, 377 bp, Arabidopsis thaliana columbia
cgggggcgtcccacgcgtgcggctctctcatgtcttatcccttagactaccagtcgactcagccgaacggggaatgcagtttttattttgtttcccttaggatcttagttatggctacttgcttgcgtggaatcacgaagagagttaatcttctacagagacgagtttatccatcgtgtggtcatctaattcgtgatgatagagatgaaactaaatctggttcttcggatacaatgattcgtgaagtcttagcacgtaatgggactaataagcttagctctatgtttgcggataggcattatcagtcgtttgctactggtccgttgggtcttggattgtcttcgtgtcggcatatgagttctacaccaccagaatgg

SEQ ID NO: 97255 - DNA, 530 bp, Arabidopsis thaliana columbia
  unsure (1)..(530): unsure at all n locations
gttcacttcctgatgtatttgttgaactcgaggtgaacttctttcttctacgacgtttgttgggagtgagaacaaagggatcagagaaacaagggaaagtgtcattgctaacgaaaggagagattctgatgcgcaacggtggttcgatgtcctctggagccaaagttgtaggagttaaagtcgatctggctaaactgcaactgactgcgcctgtttgtaccagcaaaggagagaaagtggctctaagcagacgtgtggaaaagcattggcgtttgattggttggggtcagattcaagctggaaccaccatcgaagttcctccttcacctttctaagctatgtgttatttttgtcctttttgtttgtgtttctgaaaaaaagattgttaaacccctcaaaaagataataaaactctttttctcgttgggggatnnnnnnnnnnnnnnnnnnnnnnnnnnnnnnnnnnnnnnnnnnnnnnnnnnnnnnnnnnnnnnnnnnnnnnnnnnnnnnnnnnnnnnnnnnnnnnnnnn

SEQ ID NO: 97256 - DNA, 913 bp, Arabidopsis thaliana columbia
  unsure (1)..(913): unsure at all n locations
ccggaattgctttcaacaagatcactgacaatggagccaccactccttccccggcctcgtccgccgctgccttagctcatgctttcggtctctttgtcgctgtctctgttggcgctaacatttccggtggccacgttaaccctgccgttaccttcggtgtcttactcggtgggtaacatcactctcctccgcggtattctctactggattgctcagcttcttggctccgtcgccgcttgtttcctccttagctttgccaccggtggcgagcccaatcccagcgttcgggtctctcctgccggagtccggatcattaaaacgctatgggctcttggaagatccgtaaactgccttcgggctctggtctaaaacccggtaccccaaaaacccgttnccccaaaaacggtaaccccggaaaaaaccgnaccaaccnccaanaggtttcaccgttggagctaaaanccncgccggtggnactttnaancggagcttccaatgaacccancccgtttgctttcggaccaanccgccgtaagctggacgtggaccaaccactgggtttactgggctggncctcttattggtggtggactcgccggaattatctacgactttgtcttcatcgatgaaaatgcccacgagcaattgcctaccaccgattactgaagacgtcaaattcaacgttgttaatctgatgaatttttcgtgatttgcttttttaatttgcatcgtaatgggtttctggccgttggatcatttttagatgaatctttgtctattgattgatcatttatgtgtctttgggtttgttgttggagttgtaatatctctggaaggcttttgtgcaattgtagcggccggcgaattncgatgatgcaagacttnattcgatgaccgtacgtaccttcgtagg

SEQ ID NO: 97257 - DNA, 697 bp, Arabidopsis thaliana columbia
  unsure (1)..(697): unsure at all n locations
nnnnnnnnnnnnnnnnnnnnnnnnnnnnnnnnnnnnnnnnnnnnnnnnnnnnnnnnnnnnnnnnnnnccgtttggccacgcgtccgcggacgcctgggccgacgcgtgggttctagcatcttgaagcttaaatctcagccgtccgatcatgccgatcagaaacatcgccattggccgtccagatgaagccacccgtcccgatgccttaaaggcggcgttggctgagttcatttcaactttgatctttgtcgtcgccggttcaggctctggcatggctttcaacaagctcactgaaaacggagccaccactccttctggtctcgtagctgctgcagtggctcatgcctttggactcttcgtcgctgtctcagttggtgccaacatctctggtggacacgttaaccctgccgtcactttcggtgctttcattggtggtaacatcactctcctccgtggtatcctctactggattgctcagcttctcggctccgtcgtcgcttgcctcatccttaaattcgccaccggtggcttggctgcgccggctgttggtctctctgctggagtaggagtgttgaacgcttctcgttttcgagatcgtgatgacattcgggcttgtttacaccgtctaccgctacagccattgaccccaaaaacgggagtcttggaacaattgctcccatcgcaattgggttcattc

SEQ ID NO: 97258 - DNA, 624 bp, Arabidopsis thaliana columbia
  unsure (1)..(624): unsure at all n locations
cttcactctctctaatcaaaaagcttttaacctcagccgttaaatctttctccgatcatgccgaccagaaacatcgccattggtggagtccaagaagaggtctaccaccccaacgcacttagggcggcgctcgctgagtttatctcgactttaatcttcgtcttcgccggatcaggctccggaattgctttcaacaagatcactgacaatggagccaccactccttccggcctcgtcgccgctgccttagctcatgctttcggtctctttgtcgctgtctctgttggcgctaacatttccggtggccacgttaaccctgccgttaacttcggtgtcttactcggtggtaacatcaattctcctccgtgggattctctactggattgctcaagcttctttggtccgtcggccggttgtttcctccttaggttttccaaccggtgggggggcaatccaagggttcggttttttttccgggggtagataattaaaacggtttggcttctganatcggaaatacctttgggttgggttacaacggctttggaaaagccgttntccaagaacggaagttnggacaattgaccaatgcataggttaangtngggaaaacnnntgggntta

SEQ ID NO: 97259 - DNA, 764 bp, Arabidopsis thaliana columbia
  unsure (1)..(764): unsure at all n locations
tttggccgggatcaattttccccnggnnnccnnntttcccanggttccnnaangcnaaaattcccccttcnaaanggggccaaaannntgggcncccaccccggntgcgcccgttaaaganctagngncccccccgggnttccagggaattccggcccncccgggtttttgggccnccctgctgggantagggagtnttaaacgcttccgttttccgaaatcggtgatgccattcgggcttggttacacccgtctacggtacagccattgcccccaaaaacgggagtcttggaacaattgctcccatcgcaatcggtttcattgttggagccaacatcttagctggaggagctttctctggagcctccatgaatcccgccgtggctttcggaccagcggtggtgagctggacatggaccaaccactgggtctactgggccggacctctcgtcggcggtggaatcgctggactcatctacgaagttttcttcatcaacaccacacacgagcagctcccaaccacagactactgaattaatctctctttttctctcttgtgtaattttattcgactttgaatttgaattttaatgtctttttaatttccgtttgtgtaatttcgaatcatcaaggggtttatgatcgttcgatcttttagatgaaaaaaaaaaaaaacaaaagaanaaagggcggccgctctagaggatccaagcttacgtacgcgtgcatgcgacgtcatnnnnnnnnnnnnnnnnnnnnnnncg

SEQ ID NO: 97260 - DNA, 1155 bp, Arabidopsis thaliana columbia
  unsure (1)..(1155): unsure at all n locations
aaaaacccggccggaccgacgcgtccgcggacgcgtgctctctaatcaaaaagcttttaacctcagccgttaaatctttctccgatcatgccgaccagaaacatcgccattggtggagtccaagaagaggtctaccaccccaacgcacttagggcggcgctcgctgagtttatctcgactttaatcttcgtcttcgccggatcaggctccggaattgctttcaacaagatcactgacaatggagccaccactccttccggcctcgtcgccgctgccttagctcatgctttcggtctctttgtcgctgtctctgttggcgctaacatttccggtggccacgttaaccctgccgttaacttcggtgtcttactcggtggtaacatcaattttcctccgtggggattctctactggtattggctcaagcttcttgggttccgtcggccggttgttttcctccttaaggttttccaaccggtgggggggccaatccaaggggttcgggtttttttgccgggggtaggatacattaaaagggttttggttttggagatcggaaatgaccttgggggttgtctaaacgtttgcggaaaagccgttgatccaagaacggtagttcggaaaattgaccattccgccataggtttcatcgttggagctaacatcctcgctggtggagctttcagcggagcttccatgaacccagccgttgctttcggaccagccgtcgtaagctggacgtggaccaaccactgggtttactgggctggtcctcttattggtggtggactcgccggaattatctacgactttgtcttcatcgatgaaaatgcccacgagcaattgcctaccaccgattactgaagacgtcaaattcaacgttgttaatctgatgaatttttcgtgatttgcttttttaatttgcatcgtaatgggtttctggccgttggatcatttttagatgaatctttgtctattgattgatcatttatgtgtctttgggtttgttgttggagttgtaatatctctggaaggcttttgtgcaattgtattgtacggtttaataactaaaaaaaaaaaaaaaaaaaannaagggcggccgctctagaggatccaagcttacgtacgcgtgcatgcgacgtcatagctcgtctat

SEQ ID NO: 97261 - DNA, 1482 bp, Arabidopsis thaliana columbia
agaaaacactcgatcggctatatatatacgtacaacacataagaaaaccaaaccaatcacttcactctctctaatcaaaaagcttttaacctcagccgttaaatctttctccgatcatgccgaccagaaacatcgccattggtggagtccaagaagaggtctatcaccccaacgcacttagggcggcgctcgctgagtttatctcgactttgatcttcgtcttcgccggctcaggctccggaattgctttcaacaagatcactgacaatggagccaccactccttccggcctcgtcgccgctgccttagctcatgctttcggtctctttgtcgctgtctctgttggcgctaacattgccgctgccttagctcatgctttcggtctctttgtcgctgtctctgttggcgctaacatttccggtggccacgttaaccctgccgttaccttcggtgttttactcggtgggaacatcactctcctccgtggtattctctactggattgctcagcttcttggctccgtcgccgcttgtttcctccttagctttgccaccggtggcgagccaattccagcgttcggtctctctgccggagtcggatcattaaacgctctcgtcttcgagatcgtgatgaccttcgggctcgtctacaccgtctacgccacagccgttgaccccaagaacggtagtctcggaacaatcgcaccaatcgccataggtttcatcgttggagctaacatcctcgccggtggagctttcagcggagcttccatgaacccagccgttgctttcggaccagccgtcgtaagctggacgtggaccaaccactgggtttactgggctggtcctcttattggtggtggactcgccggaattatctacgactttgtcttcatcgatgaaaatgcccacgagcaattgcctaccaccgattactgaagacgtcaaattcaacgttgttaatctgatgaatttttcgtgatttgcttttttaatttgcatcgtaatgggtttctggccgttggatcatttttagatgaatctttgtctattgattgatcatttatgtgtctttgggtttgttgttggagttgtaatatctctggaaggcttttgtgcaattgtattgtacggtttaataactataattgagaaaaccagggaatgtgaattatgaaaatgaatttttttgttaaaaaaaaaaaaaaaaaaaagaaagaaaaaaaaaaaaaaaaaaaaagaaaaacaaaagggaggaacctataaaaaaatccaaatttaaaaaaaagggccggcggggttggggggtccaatataataaaccctaaattccctgcttttggcacttttttaacttgtatcttagactgacaataaacctctagcttttttcttcccccctttttcccaacactgggagaaaacaacccgggggaatattcccccccaagatttgttaccccaggttttttttataaagcca

SEQ ID NO: 97262 - DNA, 1211 bp, Arabidopsis thaliana columbia
  unsure (1)..(1211): unsure at all n locations
nnnnnnnnnnnnnnnnnnacgactcactatagggaaagctggcacgcctgcaggtaccggtccggaattcccgggtcgacccacgcgtccccactcttctagcatcttgaagcttaaatctcagccgtccgatcatgccgatcagaaacatcgccattggccgtccagatgaagccacccgtcccgatgccttaaaggcggcgttggctgagttcatttcaactttgatctttgtcgtcgccggttcaggctctggcatggctttcaacaagctcactgaaaacggagccaccactccttctggtctcgtagctgctgcagtggctcatgcctttggactcttcgtcgctgtctcagttggtgccaacatctctggtggacacgttaaccctgccgtcactttcggtgctttcattggtggtaacatcactctcctccgtggtatcctctactggattgctcagcttctcggctccgtcgtcgcttgcctcatccttaaattcgccaccggtggcttggctgtgccggcttttggtctctctgctggagtaggagtgttgaacgctttcgttttcgagatcgtgatgacattcgggcttgtttacaccgtctacgctacagccattgaccccaaaaacgggagtcttggaacaattgctcccatcgcaatcggtttcattgttggagccaacatcttagctggaggagctttctctggagcctccatgaatcccgccgtggctttcggaccagcggtggtgagctggacatggaccaaccactgggtctactgggccggacctctcgtcggcggtggaatcgctggactcatctacgaagttttcttcatcaacaccacacacgagcagctcccaaccacagactactgaattaatctctctttttctctcttgtgtaattttattcgactttgaatttgaattttaatgtctttttaatttccgtttgtgtaatttcgaatcatcaaggggtttatgatcgttcgatcttttagatgaatccttgtccgttggtttcaagagtggccattgcaatttcgactatataatgtgaattatgtatcaatctcatcttaagttttcaagtgttgcaataccccccccccccaaaaaaaaaaaaaaaaagggcggccgctctagaggatccaagcttacgtacgcgtgcatgcgacgtcatagctcagctatagt

SEQ ID NO: 97263 - DNA, 1195 bp, Arabidopsis thaliana columbia
  unsure (1)..(1195): unsure at all n locations
atgannnnnnnnnnnagaaaacactcgatcggctatatatatacgtacaacacataagaaacccgagccaaccccttcactctctctaatcaaaaagcttttaacctcagccgttaaatctttctccgatcatgccgaccagaaacatcgccattggtggagtccaagaagaggtctatcaccccaacgcacttagggcggcgctcgctgagtttatctcgactttgatcttcgtcttcgccggctcaggctccggaattgctttcaacaagatcactgacaatggagcaaccactccttccggcctcgtcgccgctgccttagctcatgctttcggtctctttgtcgctgtctctgttggcgctaacatttccggtggccacgttaaccctgccgttaccttcggtgtcttactcggtggtaacatcactctcctccgtggtattctctactggattgctcagcttcttggctccgtcgccgcttgtttcctccttagctttgccaccggtggcgagccaattccagcgttcggtctctctgccggagtcggatcattaaacgctctcgtcttcgagatcgtgatgaccttcgggctcgtctacaccgtctacgccacagccgttgaccccaagaacggtagtctcggaacaatcgcaccaatcgccataggtttcatcgttggagctaacatcctcgccggtggagctttcagcggagcttccatgaacccagccgttgctttcggaccagccgtcgtaagctggacgtggaccaaccactgggtttactgggctggtcctcttattggtggtggactcgccggaattatctacgactttgtcttcatcgatgaaaatgcccacgagcaattgcctaccaccgattactgaagacgtcaaattcaacgttgttaatctgatgaatttttcgtgatttgcttttttaatttgcatcgtaatgggtttctggccgttggatcatttttagatgaatctttgtctattgattgatcatttatgtgtctttgggtttgttgttggagttgtaatatctctggaaggcttttgtgcaattgtattgtacggtttaataactataattgagaaaaccagggaatgtgaattatgaaaatgaattatataatcatgcgaagtcatagctcgtctatagtcaacgaaattcatccattttc

SEQ ID NO: 97264 - DNA, 760 bp, Arabidopsis thaliana columbia
  unsure (1)..(760): unsure at all n locations
antaaataaacccccgggttaanccccggggncnccccgaaaaaancncgggnncccccncagtnaaacncncgggntttcccnccagtnaaacccnccaggnctttccccccaatcattacccccccccggtcaaaagtcccaccaccatggtccggctatcccccatatggtcccccttccggtggaggaggaggaggcggcggcaaacaaccaacgtgtccgatcaatgcattgaagcttggagcctgtgttgatgttttgggaggattgatccatataggacttggaaatccggtggagaatgtgtgttgtccagtgttacaagggttacttgagctagaagcagccgtttgtctttgcacaaccataagacttaagcttctcaacttaaacatcttcattcctcttgcacttcaagctcttatcacttgtgggatcaatcctccttctggttttgtctgccctcctctcacttgatctaaaaacatccccttgatttaacaaatgtacgtatgatcaagggtggttttcgaggcttttgtaataattcaaatatatatgtggtacttttgattatcaggtttgttgattatctagggttttaattaacaagtgttgttttctgttattgtcgttgttgttataattaagctagggtttttgcatggccttctttaaatttcttttgcgtgtaatctttcgtacgttttgtattgttccagcttctcgctgtctatcaatttgactctttagtctc

SEQ ID NO: 97265 - DNA, 540 bp, Arabidopsis thaliana columbia
  unsure (1)..(540): unsure at all n locations
attgcctgttttcttcttgggagatcagttaactagccagggtcaagcgattcgaagcatcgagttctatatatgttactatggttggggagacttcagacacagaaaaagcacttgcaaagaatctgatgtctacaacactttcttcttcattgttgctgtcatcccttatgtctctcgcctccttcagtgcctgcgacggctgtttgaggaaaaaaacccggaacaagggtacaacggactcaagtatttcttgactatagtggcggtttgcttgagaacggcttacagtatccaaaaaggtcaagtcgcttggagggttntagctgctgtcttctcatttatagctgcaatattctgtacttactgggactttgtccatgattggngtcttctaaaccggacatccaaaaaccgtgcttcgagataaactccttgttcctcaaaagaaagtatacttcatagcgatggttttgaatgtcctgttgagatttgcgtggatccagacagttttagatttcaacttttctttcatgcata

SEQ ID NO: 97266 - DNA, 444 bp, Arabidopsis thaliana columbia
  unsure (1)..(444): unsure at all n locations
gttgagtacagtgtcggagttgatttgtggagtgctggttgcatttnagctgagttattagctggtagagcgataatgccaggncgtaacgnggtcgagcagttgcataggatatataagttatgtggatcgccttcagaagaatattggaagaagattaaactttcttgtactcataaacatgctcatcacaagcctttaccacagtataagagaagaataagagaggtttacaaagatttctctcctgaggcgctttctctactcgatacgcttctagcgctcgatccagctgaacgccagacagctacagatgtgttgatgagtgatttctttcacggacggagccattggcatgtcaaccttctgatctcccgaaatatcctccaagtaaaggggttttttnccaagagncgngncgtgannttncggggacaagnngag

SEQ ID NO: 97267 - DNA, 645 bp, Arabidopsis thaliana columbia
  unsure (1)..(645): unsure at all n locations
tcgatcccggtgcccccggcnttntcaangcgtccntcccttcngggatttgaaagatgcctggaattnccnatctcaaggacccgaggaaatggtttccaaggggatagatttgaccaggagaccttgagggataacgagtccaacctggagcagtctgttgatgctctttgtggagttagcgagtgggatccaatcctagaggagcttcagcagatgggcttctgtgatgatgtgacgaacaagagtctgctgaagaagaacaatggcagcatcaaaggcgtggtaatggatctcctcacaggggagaaggaggcttgatgagctctttggtttctggcaactcttctctatctctcttatctatcaggaataattatgttttataaataaaacctgatctcttagtttggtttcgtgctgcgtcacatggtctgttcctttgctttgtgttgggatgatgttactatgttaactctatctaagacatggatggtttctttcttatttcagtttagtttatgtcgttctgctcctcgggtcaaatgaatggctgagtcttttttattgatttcatcactcttcggccgtgttggtctccacttctcaagctgtatttggcttaatgtgagtttgtgagaaaaa

SEQ ID NO: 97268 - DNA, 1381 bp, Arabidopsis thaliana columbia
  unsure (1)..(1381): unsure at all n locations
tatagggacagctggtacgcctgcaggtaccggtccggaattcccgggtggacccacgcgtccgcccacgcgtccggatggaaccgttgttgctccatccgccccatttactaagatttggaaaatgaggaacagtggttcgctggtgtggccacagggcacacagattgtctggatcggtggggacaggttctgcaactccttgtcagttgatttacagattccaaaggagggtgtgcctatctatagtgaacttgacgtcaaagttgattttgttgcaccagagttacctggtcgatacatttcttattggaggatggctacctctgacggtgctaagtttgggcaacgtgtttgggtgttgatacatgttgatgcatctctgaagaattctgttgtgaatgagtttcatggactgaaccttaatgcctccccctcccttgatgagaattttccaagcgaatttctagggattatgaattatgagtcagctcaacctggcagctccagtgtcaatcctgggaccgtgaaaggtactgatctagagggcgaagttggtgaaacacaggccgtggaaaaagaaaaccttttggttggtgaagctcatcctgctatccctcacggtcattctccttcatcttcatcttcttcatttaacatggtcgacttcccaagcatgcctgctgttgaggtcttgtctggtggttcttcatctactacaaaagacgtgccagttcctcttcaggaggatatagaaaagaatgacgtggagataaccatgctcaaggagctcgaggaaatgggtttcaaggagatagatttgaacaaggagatcttgagggataacgagtacaacctggagcagtctgttgatgctctttgtggagttagcgagtgggatccaatcctagaggagcttcaggagatgggcttctgtgatgatgtgacgaacaagagactgctgaagaagaacaatggaagcatcaaaggcgtggtaatggatctcctcacaggggagaaggaggcttgatgagctctttggtttctggcaactcttctctatctctcttatctatcaggaataattatgttttataaataaaacctgatctcttagtttggtttcgtgctgcgtcacatggtctgttcctttgctttgtgttgggatgatgttactatgttaactctatctaagacatggatggtttctttcttatttaagtttagtttatgtcgttctgctcctcgggtcaaatgaatggttgagtcttttttattgatttcaaaaaaaaaaaaaaaagacnnnnnnnnnnnnnnnnnnnnnnnnnnnnnnnnnnnnnnnnnnnnnnnnnnnnnnnnnnnnnnnnnnnnnnnnnnnntt

SEQ ID NO: 97269 - DNA, 426 bp, Arabidopsis thaliana columbia
ccgtccgggaatccttgcaattggatgtgtcgattcatcgaagagaccaggaagagagcgttagtgaaggtgggttgttgatggatcccatcaaccctaatcaaacttttttaaaccctttattctcccgattttcttaaaaaaggagcctcaacgcgaacaagaacccagctcatgatccatttcaaagaaggcgtgggatcttttaccggaatgaagctcttactaaaaccgaaatgaacattaatgagaatataaaaacagaggatgtgaaagacctcgtatataaccgtgatatacaaattttatctacctcttctctttcacttccatcatatttattttgatttattataatttctatttattattagtattcctcctaaggtacgaatactaaaaaataccttgctaacaactactatg

SEQ ID NO: 97270 - DNA, 523 bp, Arabidopsis thaliana columbia
  unsure (1)..(523): unsure at all n locations
nnnnnnnnnnnnnnnnnnnnnnnnnnnnnnnnnnnnnnnnnnnnnnnnnnnnnnnnnnnnnnnnnnnnnnnnnnnnnnnnnnnccacgcgtccggagatttatacaacaaatcgacatagcaacaagcgagcatctcaaatctgtctccttccaaggcgttgtagacgtcaaagatactagtggaagagtataattaataagacctaagtccatctagttgacgcgatcaaatgtctaccttaatcacttttcttttttgataagggttatatcttgtttttattaatgcagttgatattggaacaaatgatcctgatgatcataagtaacatcaaacctgagactaagagcaaactgattgagagttttagagatttcagctttgatttgggtaggtccccttttgatccttctttttggaacgctctttacaatgggcttatggcacgcagcaatgtgatgaagatgctaaaaagaatgttcaaggagaggagagaaagaagccacttcgggtgacttcaa

SEQ ID NO: 97271 - DNA, 758 bp, Arabidopsis thaliana columbia
ttgcagtaccggtccggcaattcccgggtcgacccacgcgtccgctctataaacctcttttgctttctctcttcgtctctgaccactttggctccggcgttagttttttccctctctgctactgctgcggctccggctcctgctacggtatttgacaagtgtgttgacattctctcataacaattcaaatgggtgactcggaaaacgttcagcaaccttcaaaaaagagaggtgccttgaagcagctgtctcgtgataatccaggtcttgatgatgatgatgattcagctgaacttgagagtggaactttcaagaaggccagtgatgaggttttggctagtagaagaattgtcagagttaagcgcaaagagccatctgctgctccagttgcagcatccaatccatttgctggaattcagttggtccctacgactgcacctgcttcaacccctgtgggaacaaatgcacctctggctgagtcaaaattggctccagctgaagcagtagttgaggacaatcaaaaagcaagtgatattgaggagggcgatgaaattgacagtaagaaagttgatgtcaaagatgctgttggggaagagactgaaaagacctaagataaggatgataatcattgtggaaagaatgctgatgtccaagttgccgctacagaagtagctcaaaatgtctcatgtgacacaaacgtttgcaacaacccttgtgaaggaacagacccaactgatttttctcttgagaaaggatca

SEQ ID NO: 97272 - DNA, 464 bp, Arabidopsis thaliana columbia
aaactttgaagcttcttactttctttacttcacgatccttcttttgcctaatttctcggtttcatttccaaaattctcttttgattctttcttactctgttcgctagagaagatttagactgggttttgagtatttctcggaaattttcgtgtgttttttttctgggagagtttccgagatctcggtggagtacgttttttggcgacgaaccagtatggtttggtactcaagctgtagaatttcgtttctgggtctgcttattttgctagcttcgagctgggttttggatagatgcgaaggatttggtgaatttgggtttgaatttcatcatcgtttctccgatcaggttgttggggttttgcctggagatggtttacctaatcgagattcttctaagtattatagagtgatggctcatcgtgatcggttaattagaggtcgtcgacttgcaaatgaagatcaa

SEQ ID NO: 97273 - DNA, 498 bp, Arabidopsis thaliana columbia
aatacgactcactttagggaaagctcgtacgcctgcaggtaccggtccggaattcccgggtcgacccacgcgtccgggtatgtctggtggtggaggaagtaaatccaaaagtaaaaaaagtaaactcaaagctaaattgggaaagaaaaaaggtatgtccggaggcatgtcaggaagtgaagaaggtatgtctggaagtgaaggaggtatgtccagtggtggaggaagtaaatccaaaagtaaaaaagtaaactcaaagctaaattgggaaagaaaaaaagtatgtccggaggcatgtcaggaagtgaagaaggtatgtctggaagtgaaggaggtaaacacggaggtcttggaggtaaattcggaaagaaaagaggcatgtccggaagtggaggaggcatgtcaggaagtgaaggaggtgtgtctggaagtgaaggaagtatgtccggaggtggtatgtctgggggtagcggaagtaaacacataattggaggaggt

SEQ ID NO: 97274 - DNA, 1868 bp, Arabidopsis thaliana columbia
accacgcgtcagatccgatcagaaaatatgagcgaagaactaagtcaaaagccatcatcagctcagtctctgtcactgagagagggcagaaataggtttccttttctgtccctgtcacagagagagggcagattttttccttctctatctctttcagagagagatggaagaaagttttcttttctcagtatgttctcttttctcatgccactgttggaggttattaagattattattgcttctgtggcctccgtaatcttcgtcggtttcgcctgtgtaaccctcgctggttctgccgcagcattagtcgtaagcaccccggttttcatcatatttagtcctgttctcgtaccagctacgatagccacggttgtcttggcgacaggattcacggccggtggctcttttggagcgacggcacttggtctcatcatgtggcttgttaaacgtaggatgggagtaaagccgaaggataatccacctccggcaggacttccaccgaattcgggagcaggagcaggaggagctcaaagtctgatcaaaaagtcaaaggcaaagtctaaaggtgggcttaaggcttggtgtaagaagatgttaaaaagtaaattcggtggtaaaaaaggcaagtccgggggtggaaaaagtaaatttggaggtaaaggcggtaagtccgaaggtgaagaaggtatgtcgtctggggatgaaggtatgtctggaagtgaaggaggtatgtccggaggtgaaggaggtaaatccaaaagtggaaaaggtaaactcaaagctaaactcgaaaagaaaaaaggtatgtccggagggtccgagagtgaagaaggtatgtctggaagtgaaggaggtatgtctggtggtggaggaagtaaatccaaaagtaaaaaaagtaaactcaaagctaaattgggaaagaaaaaaggtatgtccggaggcatgtcaggaagtgaagaaggtatgtctggaagtgaaggaggtatgtccagtggtggaggaagtaaatccaaaagtaaaaaaagtaaactcaaagctaaattgggaaagaaaaaaggtatgtccggaggcatgtcaggaagtgaagaaggtatgtctggaagtgaaggaggtatgtccggaggtggaggaggtaaatccaaaagtagaaaaagtaaactcaaagctaaattgggaaagaaaaaatgtatgtccggaggcatgtcaggaagtgaaggaggtatgtctggaagtgaaggaggtatatccggaggtggtatgtctgggggcagtggaagtaaacacaaaattggaggaggtaaacacggaggtcttggaggtaaattcggaaagaaaagaggcatgtccggaagtggaggaggcatgtcaggaagtgaaggaggtgtgtctggaagtgaaggaagtatgtctggaggtggtatgtctgggggtagcggaagtaaacacaaaattggaggaggtaaacacggaggtcttagaggtaaattcggaaagaaaagaggtatgtcaggaagtgaaggaggtatgtctggaagtgaaggaggtatgtcggaaagtggtatgtccgggagtggagggggtaaacacaaaatcggaggaggtaaacacaaatttggaggaggtaaacacggaggtggaggtggccacatggcggagtaaagaacaatggtcaagttgttccaacattaagcagatcattgtgcattagttcaagattgtatgattgggaaagtaaaagaaagaaaaaatattttctaataagttttatgtttatatgtaatgttgaatctgattattatgataaaaagacataaatgtgatacaatgtttattttaagaacaataataatgtggcaacagttttagtc

SEQ ID NO: 97275 - DNA, 407 bp, Arabidopsis thaliana columbia
gctaacgtggaacaagaaccctaagaaacgatctcgtttggttttatcgaatttcccggatcttcctttcgagaaggatgattctctagagtctcaatctcatcttcattttcgtgaagatgatattgatcgtagacaaactaccgatcaattggactcgtcggaggttggagggaatcatcctcgtgagaatttcgatgtcgaagctaagaaactcgcagagtccattagagcccaaggagacaagttcgctgaggaaggaaaataccaggaggctctagggaaatgggaagctgctcttaatcttgttcccgaagatgcaatccccgcatgaacagaaagcacaagtgttacttgagcttggtgatgcatggaaagcactcaaagctgcaacacgagctactgag

SEQ ID NO: 97276 - DNA, 543 bp, Arabidopsis thaliana columbia
ttcgggaaaagtatttggtgtgataaattccctctccagcttctcggtgacacagatattttgcttccaaataaaacgagtccggtcactggcgctcactgacttcgtcttcctccatctccgatccattggtttaacaagcgcgtgagggccagatagaccgagaatcatgggaaacggaaactcaacggagacgaaagagtcgcgccgatcaaagatgcgtaagaagattcaaaactttcgcagccgccgccgtcttagtcgtccaggatccggaagcgtctctggattggctagtcagagatctgtgagcgcagatgatttcgccggcattgctcttctcactcttatcggcgcggagatgaagttcaaggacaagtggctcgcctgtgtttccttcggggaacaaactttccgttcggaaatttcagattccacagagaagccgatttggaactcggaaaagaagcttctcctggagaaaaatggaccaagtctggctagaatctctgtatttgagaacaatagactcttgaagaacaa

SEQ ID NO: 97277 - DNA, 373 bp, Arabidopsis thaliana columbia
cccacgcgtccgcccacgcgtccgaattgtctcacccgagcttcctctccagctagggtttgtttgtttgattgaagaaagaaaacaagaatggtgtatttcaatttcaataggattaagacgaagaagactctaattggatttggattgggacagatcctctcgcttctctcgacttctcttagctttacatcgtctgagatcgctagaaaagattttagctttttttttttttcaaaccatcccatttttaaacattctcatgaacttacaaaatttgaaatctttatagggattaatgctccaacatcacagtcgtttctgggttatgtgttactggcaatcgtctatggagtatgagaatgagcattga

SEQ ID NO: 97278 - DNA, 478 bp, Arabidopsis thaliana columbia
agcatttccagtgcagttcttatgatccattcaacgacttaaccggtcctatccaaaccatcctttgtgaagacagcaaccaaagcatgtactgtcagttactagccggtctgattcaccgtcacaaggtgatgcgtttaggagcagtctttgcttcagcgggtctccgcgcaatctcgtatcgcgagaagaaatggagtcagctctgtgaagacatccgcaccggtggtctcaaccccatgatcaccgatccaggttgccaaatggcaatgtcttgtcttttaatgtcgccgaatccagagttagctagcgagatcgaagagatctgtgggcggtcggcgtggaaagggattctgtgtcagctctggcctaaggcaaagttcatcgaagcagtagtgacgggctcaatggctcaatacatacctgcacttgagtgctttagccaggggaagattccattggtttgtccaatgtatgc

SEQ ID NO: 97279 - DNA, 577 bp, Arabidopsis thaliana columbia
  unsure (1)..(577): unsure at all n locations
atnccncagggngttttntccccaccncccnnaaaaggttngaggtcttaagggggcatagnaaccagcnccggnccaagccttggngncaaccaacaccaccgtcttttgccntatgggagtggatcccctttctacacaaggcttggcncctttcaaacngccctacggctcacttacccgncggattttccantacgctctttctcctgatcacgattgtagcccttgttgcagccatctacatcacatgggtcctttcagagaagaaagaactaagccgaaaaatggaggtgattggaaccgtaaggtttaaaatccttcctctctttgggctttttcacattgtagaatgtttatgaaccatttttcgcactcttagaagaaaaaaccattgtcttagctaaattcttgatgttaggctttggaaatcgagtacactttacagactcttgctttgtgacctttgtcacattctagagttgagctgcaccttctgaatttaaagtttatagaagcctctgtttaccctcnnnnnnnnnnnnnnnnnnnnnnnnnnnnnnnnnnnnnnnnnnnn

SEQ ID NO: 97280 - DNA, 584 bp, Arabidopsis thaliana columbia
  unsure (1)..(584): unsure at all n locations
aaccaaaattgggnttcggtntcnnatggagggancttggtcctgnccctttccccaaaaaccccttttttcatgggaactcgggttttttgccaaaaaggccgaggaattagattcctcattcccattccaatcgattcaaggagcaagagaaaggattcataccgcagtcaggtatctccggttgaaataccccataaatggtattttccgtagaaatagtatttttgctttttttgatgatcctagataccgaagaaagagctccggaattcttaaatatgggactctaaaggcggattcaatcatccaaaaagaggatatgattgagtatcgaggagtccaaaaaattaagacaaaatacgaaatgaaagtagatcgcttttttttcattcctgaggaagtgcatcttttacccgaatcctctgccataatggtacagaactatagtatcattggagtggatacacgactcactttaaatataagaagccaagtcggcgggttgatccgagtagagaaaaaaaaaaaaaggattgaactcaaaatattttcaggggatatccattttccggacaagacag

SEQ ID NO: 97281 - DNA, 721 bp, Arabidopsis thaliana columbia
ggtgcgcctgcaggtacccggtccggaattcccgggtcgacccacgcgtccggcactggagtactgatgtgtcccatgcacccgaatttacatatagtaatgtccacctcttaccaaaaacaagtcatttatggatattatccggaggttcatgtggatctagtctaattcgtttttcgatccataaagatcaagatcaaatgaatataccttttctttccgccgaaagaaaatctatttctagcctctcagtgaataatgatcaagtgagccaaaaattttttagttccgattttgccgatccaaaaaaattagggatttacgattattcagaattgaatggaaacttaggtactagtcattataatttaatatattctgctatttttcatgagaactcggatttattagcaaaaagacgaagaaatagatttctcattccattccaatcgattcaagagcaagagaaagaattcataccgcagtcaggtatctcggttgaaatacccataaatggtattttccgtagaaatagtatttttgctttttttgatgatcctagataccgaagaaagagcttccggaattcttaaaatatggggacttctaaagggcggatttcaaatcattcccaaaaaagaaggattatggaactggaagtatttcggaggggaaggtccccacacaaataaatttcaaggaaccacaaaaaattacctgc

SEQ ID NO: 97282 - DNA, 394 bp, Arabidopsis thaliana columbia
  unsure (1)..(394): unsure at all n locations
ggcagaacanagttaatagccttacaccaccaccgttgcagcttaatggtagcagattgaagtcgactttaagtgctaganatatggatatggagatggaacttaggtttcgcggtttggataaccggagacttggtgatctcaagccatccaacctcgaagagactttcggatcatatgactcagcttctgtgatgcaacttcaatcaccaagcaggcattctcagatgaaccactatccgtcttcacctgtgaggcagcctcctcctcatggattcgaatcttcagcagccatggcagctgcagtgatgaatgcaagatcctcagcgtttgcggaacgcagctttcgagtttcaaaccagctccagtagcttcctaatgtctccgattgggg

SEQ ID NO: 97283 - DNA, 394 bp, Arabidopsis thaliana columbia
ggggcgtcccacgcgtccggctgggcagaaccagatccaatcaaggagcttacactcattaggtacgggtaggcattttgttttttctgacccatctctgaagtcatctgatttttggggtacggctcttggatcagccgaacgtgtgagtgattcttgtgttaaatctaaatctggtagacctggtaactcctctctgcatttctcctttggctctggctcctctagagacacctcagctgctaaagtttctgagcagaggagtagcattttaaaagaagctcctagggggactggttatatatctgatggagtaaacttaagagaaagaaatgctaaaagatttgatgaagctgaaattgcattaccaatttcctcttctactgatacgctg

SEQ ID NO: 97284 - DNA, 926 bp, Arabidopsis thaliana columbia
  unsure (1)..(926): unsure at all n locations
cacagagatccttaaattcttcatttttcccaatttgcgccgccattaaaaaagcttagctaatcgctatcgtcatccgcaactaacaagacccatcctctctcttcgctacacttttccccgcatcttcttcttccaatctctcctattaatcggtactgtgttttcttctgtgatcgtgagattagaaaatctacccaaatttttgattttgcgataagggtttttcttaatttcgtctacggatatagaaaatgtcttccatcaatttatcctcatcatctccttccaccatctctctttcccgctcaagactaagccaaagctctactacattactccatggactacatcgtgttactttaccatctaaccatccattgtcaaccttttccattaacaccaatactggaaaagttaaggctgcagtgatctctagagaagatgatctgctctcattcaccaacggaaacactcctctctcaaatgggtctctcattgatgatcggaccgaagagccattagaggctgattcggtttcacttggaacacttgctgctgattctcctcctgcaccagccaatgggtttgttgctgaagatgatgactttgagttggatttaccaactcctggtttctcttctatccccgaggccattgaagatatacgccaaggaaagcttgtggtggttgtggatgatgaagatagggaaaatgaaggggatttggtgatggctgctcagttagcaacacctnaagctatggcttttattgtgagacatggaactgggatagtttgtgtnagcatgaaagaagatgatctcgagaggtttcaccttcctctaatggtgantcaganggaaaacgnagaaaagctctctactgcatttacaagtgactttnggtgcaaaacaatggnncaacaa

SEQ ID NO: 97285 - DNA, 446 bp, Arabidopsis thaliana columbia
tacggctgcgagatgacgacagaaggggactagagataaccctagaaagatctctctcgatctctggttcgaagaaaatccaccatttccgattgttctttctctttgacaaaacccagatagataaaaattcgttccaattccagtgagctccggaaatggcgtccttcaagttgatgccttcttccaattccgacttgtctcgccgtaattcttcttctgcttcattttccccttctataagatcatcgcaccatctccgaccaaatcctcacgccgatcactccagaatcagtttcgcttacggcggaggagtcaacgattatactttcgcgtctgattcaaagcccttcgagatggcgattgatgttgatcggagtatcggagatcggaacagcgttaacaacggaaagagtgttgacgatgtttggaaagagattgtatct

SEQ ID NO: 97286 - DNA, 471 bp, Arabidopsis thaliana columbia
  unsure (1)..(471): unsure at all n locations
acgggnttaannccggncntnaaccaaaangnttaanactaaccgttaaaaaagaaccccgtggcttcgtcgagcagcaacacctttggatctttgacgatggctctggctatagctactcgttgcttttgtccgcctgataattgaattcctctttctcccaccatcgtatcataaccctgttgcagaccactgatgaatccatgggcgtttgataattcagctgaagatacgatttcggattcactcgcgtctcctcctttgccataagcaatgttggctctaattgtctcgttgaacaagattggttcttggctcacaagtcccgtttgttgtcttagccattttagtcttaggctcttgatctctacaccgtcaagagtgatctcacctgaatctggatcgtaaaacctctgcaacaatgcaatcaccgttgatttccgcataactacaccaaccaaagccggacgc

SEQ ID NO: 97287 - DNA, 664 bp, Arabidopsis thaliana columbia
  unsure (1)..(664): unsure at all n locations
nnnnnnnnnnnnnnnnnnnnnnnnnnnnnnnnnnnnnnnnnnnnnntctctctctctctctctctctctctctctctctctctccccctgtccagatctctccctccctctttctccgatctcagatccattcaacaatctacaaagaagatggaaccagtctcttcatggggtaacacctctctcgtctccgtagatccagagatccacgacctaatcgagaaggagaaacgtcggcaatgtcgaggaatcgaacttatcgcttccgagaatttcacttccttcgccgtcatcgaagctctcggaagtgccttaaccaacaaatactccgaaggtattcctggtaatcgttattacggaggtaacgaattcatcgatgagatcgagaatctttgccgttcaagagctctcgaagctttccattgtgatccagcagcgtggggcgttaatgttcagccgtattctggatctccggcaaatttcgctgcttacacggctttgcttcagcctcacgatcgtatcatggggcttatttgccttcaggtggncattttgactcaatggtanctatacatctggtggnagaagntctttncggcttcgntcncctttaggnggctccccataaggnnatttacccctggtaaattgtnangnaggttgc

SEQ ID NO: 97288 - DNA, 924 bp, Arabidopsis thaliana columbia
  unsure (1)..(924): unsure at all n locations
actcactatatgggaaagctggtacgcctgcaggtaccggtccggaattcccgggtcgacccacgcgtccgacaaatactccgaaggtattcctggtaatcgttattacggaggtaacgaattcatcgatgagatcgagaatctttgccgttcaagagctctcgaagctttccattgtgatccagcagcgtggggcgttaatgttcagccgtattctggatctccggcaaatttcgctgcttacacggctttgcttcagcctcacgatcgtatcatggggcttgatttgccttcaggtggtcatttgactcatggttactatacatctggtggtaagaagatctctgcgacttcgatctactttgagagtcttccgtataaggtgaatttcaccactggttacattgattacgataagcttgaagagaaggcgttggatttcaggcctaagttgcttatctgtggtggtagtgcgtatcctagggattgggattacgctagatttagagctattgctgataaggttggagctcttttgctttgtgacatggctcacatcagtggtctcgttgctgctcaggaagctgcaaacccatttgagtactgtgacgttgtgacaaccacaacccacaagagtttgaggggtccaagggctggtatgattttctacaggaagggtccaaaaccaccaaagaagggtcaacccgagggtgcagtctatgattttgaggacaaaatcaactttgctgtattccctgcgcttcaaggtggtcctcacaatcaccagattggtgctctagctgttgcgttgaagcagggctaatactcctgggttcaaggtctacgcaaaacaagtgaaagccaatgcttttgcccttggaacctccctttggggcaagtttccaattttacccattganntng

SEQ ID NO: 97289 - DNA, 645 bp, Arabidopsis thaliana columbia
  unsure (1)..(645): unsure at all n locations
gcgatcatcatcattactttctctatctatctctcttcttaaagcggccatgggtgctctccaagtttcatgtcaagctttggttctngntttggtattttcttaattgaaatacaagatcttgaacaaaaagaaatggaaactgaagacgatttgtgtaacaacaactggggaagctcttcttcgaaatcgcgagagccgggttcatcagacggtggaaattcgacattcgcaggttttacatcccagcagaagtgggaagatgcttcaatcttggattatgagatgggtgtggagcctggattgcaagagagcattcaagcaaatgttgatttcctacaaggtgttagggctcaagcgtgggatccaaggacgatgttgagtaacctttcttttatggagcagaagattcaccagctgcaggatcttgttcatcttcttgttggtcgtggtgggcagcttcaaggtcgtcaagacgagctcgcggctcagcagcagcagctttataacgacggttcttacttcccattattcatacagcttatttcaactgcaggtagtcttcttcccatctgtttaggcttaatatgtccaacagttccggggtccctttcactggggcgcccggttcagccgtgttccctt

SEQ ID NO: 97290 - DNA, 962 bp, Arabidopsis thaliana columbia
tcatcatcatcatttcgccgttaagtttctctctctctctgtttccacccattatagaattcagtgaatcaacaacaacaagattcattacttttctccaaaaaactttcttcaagatctgttcttttaaataattatggcggaagaacatcgatgcgagacgcctgaaggtcaccgtctctgcgttaacaactgcggtttcttcggaagctcagcgacaatgaatctatgttcaaactgttacggcgatctctgtctcaaacaacaacaacaagcttccatgaaatcaaccgtcgaatcatctctctctccggtgatcgcacctgttctcgaaaactacgcggcggagttagagatcccgacgacgaagaagacagaggagaaaaaaccgattcaaattccgacggagcaaccgtctccgccgcaacggccgaatcgatgcaccgtatgtaggaaacgggtcgggttaaccgggtttatgtgtcggtgtgggacgactttttgtgggagtcataggtatccggaggttcatggttgtacgtttgatttcaaatcggcgggacgtgaagagatcgcgaaagctaatccgttggttattgcggcgaagcttcagaaaatatgaatcggagccgttgaccgatttctatctttaccctgagaaaatttcgattgtctcggtggatctcacccgttcattatgttattgtattacggacacgtgtcgcaagattaaggttgagatggtttcgtaactttttaattattttctttgtttatttccgaagaaattaaagtttttatgattgtgtggcttttgcttgtaaaaaaaaaaaagggtttctctttgggaaaaagaaaacggtatatttctagaaaagcttgttgttacgaacaaaaagggcgaccgctctagaggatccaagcttacgcacgcgtgcatgccacgtcatactcttctaagt

SEQ ID NO: 97291 - DNA, 751 bp, Arabidopsis thaliana columbia
  unsure (1)..(751): unsure at all n locations
caacaaggtaacacatctctctctctctctctctctttctctctttttatatttttgtgtcccaatctcttcttcatttctgtttggttgccgagaaaacgcaggaaacttttctgcaaaaaaactcggtgaccatattcaaaactttcccacgttaattctctcttctttgttttgtttcagattcattacttttctccaaaaaactttcttcaagatctgttcttttaaataattatggcggaagaacatcgatgcgagacgcctgaaggtcaccgtctctgcgttaacaactgcggtttcttcggaagctcagcgacaatgaatctatgttcaaactgttacggcgatctctgtctcaaacaacaacaacaagcttccatgaaatcaaccgtcgaatcatctctctctccggtgatcgcacctgttctcgaaaactacgcggcggagttagagatcccgacgacgaagaagacagagggggaaaaaaaccgattcaaattccgacggagcaacccgtctccggcgggaacgggcggaatcgttgcaccggatgtagggaacggggtcgggttaaccgggtttatgtgtcggtgtgggacgactttttgtgggngccaagggatcgggggtcatggttaacgttggttcaaacggggggcgnaaaaanncgaaanaaaccgtggttttgggacgtcngaaattaacgnccgttncnntnatcttccnggaaatcntncgggggcacgga

SEQ ID NO: 97292 - DNA, 485 bp, Arabidopsis thaliana columbia
  unsure (1)..(485): unsure at all n locations
nnnnnnnnnnnnnnnnnnnnnnnnnnnnnnnnnnnnnnnnnnnnnnnnnnnnnnnnnnnnnnnnnnnnnnnnnnnnnnnnnnnccacgcgtccgattttttttccctctttattttccgagaaaaaataaataaaattatcctctagttttcgatctcgatcatctggatccaagaaattactacgattgctataatgtcgatgtctcggctcggattgttgttgttcgtcgctatattgctcgtcttgcttcagtcttccacttgtctgattagttctccaagttctatcatcaatccttctaaagtcaaacaggtttcgtcgaagcccagggcatttgtgtatgaaggttttttgacggacttggaatgtgatcatctaatctctcttgcgaaagagaatctgcagagatctgcggttgctgataacgataatggcgagagtcaagtcagtgatgttcgtaccagctccggcacttttatctc

SEQ ID NO: 97293 - DNA, 392 bp, Arabidopsis thaliana columbia
atctttatctccagagaattgaatattgttggggtttttaatattttcgtcattgtgtcgtgttattactctcgtttgttaaaattactatcaaacttttacacgtaattttgaaggttattccaatattttaccttttaaaatctcttgtaaaatcctatttaaaatgtctgtttaaatccttttaaaataccttgtaaatctttcgttatgccacttacatatactttaaacgattgtaaatcaagttaaacacttttacaagcttttaacttgaatcttttaaaatgtcttgtaagtcgcttactaaaattactatcaaactttacaagtaatcttaatagtaattccaataatttacctttttaaatatcttgtaaaagcctgtttaa

SEQ ID NO: 97294 - DNA, 507 bp, Arabidopsis thaliana columbia
  unsure (1)..(507): unsure at all n locations
gccacgccccccctcnggtgtcgcggtatcgataagcttgatatcgaattcgcggccgcctctgttaatggaatctagctgtttcgagttttattgtatatatttttttatccttttgcccaaacttttttctgggttttgctttattttttcatccccctttctgataattaatttgcttttttcatgtagtaaaaaaagattctttttttaagctattaaattcacatcttccaattccaggaagacctaaatttcctcttttttttgccgttatctgcagagatgcgaagtttctggataattattcagatataggttccaagtttttagctttcatttctaacttctcttttccgtgttttttaatttccataatctggaaactcagatttgagctcatttcggccattgtttatattgcagatctggtgatagtttggttagttgttgtgcatctgagttagaaaaaagtcttttaaggaagtgagagaaaacatgtcttct

SEQ ID NO: 97295 - DNA, 672 bp, Arabidopsis thaliana columbia
  unsure (1)..(672): unsure at all n locations
nnnnnnnnnnnnnnnnnnnnatgatcctnnnnnnnnnnnnnnnnnnnnnnnnnnnnnnnnnnnnnnnnnnnnnnnnnnnnnnnnnnnncggccgctctttatgccccgcggccggtttggttagttgttgtgcatctgagttagaaaaaagtcttttaaggaagtgagagaaaacatgtcttctcttagtagagagctcgttttcttgatcttacagtttctcgatgaagagaagtttaaagagactgttcacaagcttgaacaagaatctgggtttttcttcaatatgaagtattttgaggatgaggttcacaatggaaattgggatgaggttgagaagtatctctctggtttcactaaagtagatgataatagatactctatgaagatattcttcgagataagaaagcagaagtatctcgaggctttggataagcatgatcgtcccaaggctgtggatatactagtgaaggatttgaaagtgttttcaacttttaatgaggagcttttcaaggaaataacacagctcttgacattggagaacttccgggagaatgaacagttatccaagtatggggacaccaagtctgcaagagcgatcatgttggtggaactcaaaaagctgattgaggcgaatcctttattccgtgataaattgcagttccctactct

SEQ ID NO: 97296 - DNA, 448 bp, Arabidopsis thaliana columbia
  unsure (1)..(448): unsure at all n locations
gagaagaaggagcaaaaaggttttnccgaagttgagagatcaatcaaagatttgaagggccgatgaattcaggaggcggcatcgctgctgcagcagctccttcaagcggccgtggtaatgttgaatggcatgtccgaccaccgaaccctaaaaacccagttgtcttcttcgacgtctctattggtggtatccccgccggtcgtatcaagatggagctcttcgccgacattgctcccaaaaccgctgaaaacttcaggcagttctgtactggtgaactcagaaaagctggaaagccgcttggctacaaagaatgtcagtttcacagagtcatcaaaggtttttantgggtccaaagtgggggatttttttaagaattatnggtaggnggttncantgncaatntncgggccncaannttttgggggtggggaatttttncnnnttaaaa

SEQ ID NO: 97297 - DNA, 472 bp, Arabidopsis thaliana columbia
  unsure (1)..(472): unsure at all n locations
ctctcatccatggcggatttcttctatcttcattaaatatttccctctttattaaaatctcatgantttcaacggttttttcgacgacggtgctggagcctcatagctactctctgatgctccgtacaacaaccacttctctttctccgccgtagacaccatgctcggaagcgccgccattgctccttctcagtctcttcctttctcttcttcaggcctctctctcggactccaaacaaatggagaaatgagtagaaacggagagattatggagtcaaacgtaagtcgtaagagtagtagaggagaagatgtagaaagcagatctgaaagtggttaacgctggaagctgtctccggtgacgatttagatacctccgatagacctttaaagaagaagaaacgttaccatcgtcacactcctaaacaaattcaagacctcgaatcggtttttaaagagtgtgcacatccagacg

SEQ ID NO: 97298 - DNA, 389 bp, Arabidopsis thaliana columbia
tactccttggctctttgccaagaccacctgctgctgctgcactctaccgtgcgcttggcgatctgtatcagaagctgggaaggtgattttaacagttgaagggaatttgtaattctgactccaatgatggaaaagttcttgacctggaaattttcttgttggtgtgcagtgaaactgttcggtctccagcaatttctccattgtctgaagactaaacttgtggaattggcttcatgtctttggaagaataacaacagtattcttgtatagattcatgcaattcttgaatgtacatagtttggtagtttgtggtttgtaaataaacatacattattatctgaagttataaattgtttcaaacttaaacccctgcatttttttctattttt

SEQ ID NO: 97299 - DNA, 406 bp, Arabidopsis thaliana columbia
gacctgttttgtacgccattagattgaaccctaaaaactctattattggattggatcatcatcgttaaagctccacgccttgtcccaatttcctctttggttctttccttctgggcttgttattgttgtttctcgaaaaagaagaagaagcgatggtattgggattttagggattattgcggtttgttgtatatatatatatagaagctgagggattttgtgttgtgaagaacatcgaatcctgtttttttccgtaagaaagttcttagatttctccaagtgaaagaagatgtcatcagctggtgttgcgttaagtccggttcgtagcgagccattgattatgcctctggttcgtgccaattcttgtcttgattcttatcctgacgacaccatcatgatttacctt

SEQ ID NO: 97300 - DNA, 772 bp, Arabidopsis thaliana columbia
  unsure (1)..(772): unsure at all n locations
atgatactgccagcactaatacngactcactttagggaaagncggtacgcctgcaggtaccggtccggaattcccgggtcgtccctcgcgcccgaaaaactctattattggattggatcatcatcgttaaagctccacgccttgtcccaatttcctctttggttctttccttctggtaagaatccgctctctttctctctttcttttttcttcatatggtacgtcatcggcgacatcaattggctcgatttgattcacctgtagctatcaatcaatccctgatctgtttaggtttgatctcctctgttttttcctagggcttgttattgttgtttctcgaaaaagaagaagaagcgatggtattgggattttagggattattgcggtttgttgtatatatatatatagaagctgagggattttgtgttgtgaagaacatcgaatcctgtttttttccgtaagaaagttcttagatttctccaagtgaaagaagatgtcatcagctggtgttgcgttaagtccggttcgtagcgagccattgattatgcctctggttcgggccaattcttgtcttgattcttatcctgacgacaccatcatgatttaccttacgacttctggatcggtgataccaatgccagtgcttgagtctgattccattgagtctgttaagcttcggattcaggcttacccgcggctgtggtgtgaggaatcagaagcgtgtttgtcgcggtcgagagctacgtagaagcaattctaatatgcgtgatca

SEQ ID NO: 97301 - DNA, 495 bp, Arabidopsis thaliana columbia
  unsure (1)..(495): unsure at all n locations
ttttagtccgaaaactcccgatggacctacgggtcctgattaagatacctatgaatactggtttaccgtccgtcgattgggtcccagccttttcccttccccaattcatcgctgtaatgtatgaggaaaatcggcaggagcttcttgagctagctaagaatttgttggaacgagaggaggaaccagaattgcctgtaatatcccagaaaacgttaatcgtttggggagacaaggacaaggtgtttcccttggagcatgcttatcggctgnaaaggcatttacagagttcaagattagagataataaaggaaactggacacgctgttaacattgaagcaccaactactcttaataattttattacttcgtttgtctttagtgcttgatttctagttttgtatatacttcttcttcatataaatacctatatgcatttgatctaagtgtatatatagttgacatcatttaacatatcatcaactgctgagtcaaaaa

SEQ ID NO: 97302 - DNA, 545 bp, Arabidopsis thaliana columbia
  unsure (1)..(545): unsure at all n locations
cagtaccggttcggtaggcccgacgtcgacccacgcgtccggaaaagcataatatagttgtcatcaggaagactctagcagaagtcgaaaaagaagggagtgtacaagaggatgaaacccttattgttggcggccaagcagtcgcagtggtttatttcagatctggctatactcctaatgatcatccgtctgaatcagaatggaatgctaggctgcttattgaggagtcttcagctgtcaaatgcccgagcatagcttaccatttaactggctccaagaaaatccagcaagaactggctaaaccaggtgttctcgagaggtttctggacaacaaagaggacattgctaagctgagggaaatgctttgctgggcttttggagcttggatgactcagaaattgtcaaagcaaggcttatccgtaaaaaccccggattgtttgtctattgaagccctcagacgagcaaggcggggggaaacaacctctctggtggcgattgattgttaaggggtaaaccttttttgaggccttccagaaagnacngga

SEQ ID NO: 97303 - DNA, 911 bp, Arabidopsis thaliana columbia
  unsure (1)..(911): unsure at all n locations
acgactcactatttggaaagctggtccgcctgcaggtaccggtccggaattcccgggtcgacccacgcgtgcgcaagaaaatccagcaagaactggctaaaccaggtgttctcgagaggtttctggacaacaaagaggacattgctaagctgaggaaatgctttgctgggctttggagcttggatgactcagaaattgtcaagcaggctatcgaaaaacccggattgtttgttatgaagcctcagagagaaggcggaggaaacaacatctatggagatgatgtgagggaaaatcttttgagactgcagaaagaaggagaggaaggaaacgctgcgtatatcctgatgcagaggatattcccaaaagtctcaaacatgttcttggtgcgagaaggcgtttaccataagcatcaagctatatcagaactcggtgtctatggtgcttacctcaggagcaaagacgaagttatagtaaacgagcagagtggttatctaatgcgcacgaagatcgcatcatcagatgaaggcggcgttgcagctggttttggagtcttggacagcatatatctgatttgagatggataacattcacaaccatcttgatcagtttttcttctggtttattccttcttcttctcttcttgcttgttaaagatttgtgtattaatcatgaaggtcaataagactaggcaaagctctttacaattctttccacaggaccgcaaagcctacattgcttattgttatttttagaccgtgtgagatgattactcgtttataaagatcatgaattgaataagataagatcaatcatggaaaaaaaaaaaaaaaaaagnnnnnnnnnnnnnnnnnnnnnnnnnnnnnnnnnnnnnnnnnnnnnnnnnnnnnnnnnnnnnnnnnnnnnnnnntcat

SEQ ID NO: 97304 - DNA, 1838 bp, Arabidopsis thaliana columbia
  unsure (1)..(1838): unsure at all n locations
gggcagtggctgctcttctctctcttactcatcatcttccacttgcaatgccactgttttctctatttcttcttctccatcatcttcttcttcgctgaaactcaatccaagtagcttccttttccagaaccctaaaactctgagaaatcagccacctttgaggtgtgggagatcatttaagatggaatcacagaaacccattttcgatttggagaagttagatgatgagtttgttcagaaactggtttacgatgctctcgtttggtcttctcttcacggactcgtcgttggtgacaaaagttatcagaaatcaggaaatgttccaggggttggattgatgcacgcacctattgcattgctaccaactgcattcccagaagcttattggaagcaagcttgtaatgttactcctcttttcaatgaattgattgatcgtgttagcttggatggcaaattcttacaggatagtctctctagaacgaagaaagttgatgtctttacatctagacttcttgacattcactccaagatgctagaaagaaataagaaagaggacattcgtttgggtttacaccggtttgattatatgcttgacgaagaaacaaattcacttcttcagattgagatgaatactatctcgtgttcgtttcctgcccttagtcgtcttgttagccagctacatcagtcattgcttcgatcttatggggatcagattggcatagactctgaacgtgtacctataaacacatccacaatccaatttgctgatgcattggctaaagcttggttggagtacagtaacccaagagcggtagtcatggtaattgtacagccagaagaacgcaacatgtacgatcaacatttgctgagcagtatattgagagaaaagcataatatagttgtcatcaggaagactctagcagaagtcgaaaaagaagggagtgtacaagaggatgaaacccttattgttggcggccaagcagtcgcagtggtttatttcagatctggctatactcctaatgatcatccgtctgaatcagaatggaatgctaggctgcttatcgaggagtcttcagctgtcaaatgcccgagcatagcttaccatttaactggctccaagaaaatccagcaagaactggctaaaccaggtgttctcgagaggtttctggacaacaaagaggacattgctaagctgaggaaatgctttgctgggctttggagcttggatgactcagaaattgtcaagcaggctatcgaaaaacccggattgtttgttatgaagcctcagagagaaggcggaggaaacaacatctatggagatgatgtgagggaaaatcttttgagactgcagaaagaaggagaggaaggaaacgctgcgtatatcctgatgcagaggatattcccaaaagtctcaaacatgttcttggtgcgagaaggcgtttaccataagcatcaagctatatcagaactcggtgtctatggtgcttacctcaggagcaaagacaaagttatagtaaacgagcagagtggttatctaatgcgcacgaagatcgcatcatcagatgaaggcggcgttgcagctggttttggagtcttggacagcatttatctgaattgagatggataactttcacaaccatactgatcaattttactggtttattccttcttcttctcttcttgcttgttaaagatttgtgtattaatcatgaagatcaataagactaggcaaagctctttcacctttaaaaaaaaaacacaaaggtcggccgctctataggatcccagcttacgtacgcgtgcataccacgtnnnnnnnnnnnnnnnnnnnnnnnnnn

SEQ ID NO: 97305 - DNA, 457 bp, Arabidopsis thaliana columbia
gcggcggctcttactcaactctggccgctccggtccttcgattccagctccaatcagtaattctctctccaaagctcaaaagacaaagaaactcaataatgtctatgagaagctctcttgcgaaggtttcgttgatgatcagattgaactcgctctctcctctcttagagatggagctacgtttgaggctgcacttgattggctttgtttgaatttgccgagtcatgagttgcctgtgaagttttctactggagcttctcgttttccttccacaggaggttctgtgggtgtgatatcgacctcacgggacgattggaatgattctactgactcttcagtcagggtagaggaagaggaacctgcagtttttgttcgtgtgaagggaaagcaagatgaagaagatactcttagttctgacaagtcatctcaagctgattggatcggcagtatatgatga

SEQ ID NO: 97306 - DNA, 632 bp, Arabidopsis thaliana columbia
  unsure (1)..(632): unsure at all n locations
cctaattcaagaaaccatataatcttttcctctgtatttttttacaaatccctcaaagaaacaaaatttacaagatcaagaatgtataacgaatgcagctctccctccaccgcaagatcaacaacgagagtcacaaatcacagaatgagatctccgatctgttgtataggagccaacgcggtggttgagccagaagccatgatgatcggaggagaacaaagaacaccaagatctccttacgaatggctcaaatctacggcgcaggagctagagttaagagatcggtgccggcgtgtgaagtcacgtatcaaggttacgtgtcgtaacaacaattgtgcttataataattgtgttcatcatcatcatcatagccagagttatcctggagatttcagttacgatccgttgagttacgcgctcaatttcgaggataatgtgagagctgatgacgatggtccttttcccaatttcacggcgaggttgcctcagtcgccggtggccaagccgagatcggcgacggttgatttgacctctttctgacggaataattaattcaaaaggtccttaaaaaaacctttcgttctggggganggggatgaactttcccggnatgccgaaaaatgccnnggatt

SEQ ID NO: 97307 - DNA, 447 bp, Arabidopsis thaliana columbia
  unsure (1)..(447): unsure at all n locations
cttgttaccaagatgagcttctacaaaagaagctttcactctttccttggccaaaccaacaccaaagggatgccgtttgaatccggtcttggccatgatgagacacaatcacatggcttaatgttgtgcacagagtatctagggtttgagagttacgacatgaggatgtccgataacgaggtggagaacaagatgacttgtcatgcggaggtggagaccgaaagggttgaagcaaagaggaggaagacgaaggagaatgtggtggtgcaagcgcagaaaaaacagtttcctccgcctctctcgtcattaaacagccgtggacagcgatatttttatctccgtccggtgagaaaagacggtagattggaacttacgcaagttatggtcgatcgnccagagattttccacgnttctagagtagatngacggttnaaaattacatttttt

SEQ ID NO: 97308 - DNA, 454 bp, Arabidopsis thaliana columbia
ctcaattttgctcagacaaaaaatcaatggctttgcaagtgcagcaaacttcagcagccttcacaatctcctcaccatccaccgccgctgcacgcatcaaactctcccctttcagaaccgtggcggttaaccgcggagttagatgcagcggcggtggagtcggagtacgaggcggagatgccgggaagaaaaaagcagttcctaattctaattatgtagttcctattgataaattctcatcttcttcgtcgattactaggcctttgattgagatacttcgtgaccttaataagaagattcctgataacattgttaagagtcatgatcctccttctacttctgctgctacttctggttttatcccttggtaccatgcaaatcggatgcttagcttctatgctcctggttggtgtggtgaagttagagatgttattttctctgagaatggaaatgt

SEQ ID NO: 97309 - DNA, 702 bp, Arabidopsis thaliana columbia
ctaagagattcttttccaccgtctgacaaatctttaagtaaattgcttggagattctccacatctgccgaaatcagttctgaagttgttggaatcgttttgctgtcctggaagtggtgaagttgaaaaggatttacaacatggagaccgtgttactcaaggtctcagtgctgtttggagcctgattttaatgagacctggaatccggaatgactgcctgaatatcgctttgcagagtgctgttcatcacttggaagagattcgcatgaaagcaatccgcctggtggcaaacaaactctattctttatcattcattacagaacagattgaggaatttgcaaaggataggctattttctgtcgtaagtgatgattgtgataagatggatcttgatctgaaaagtccaccaaacaaaccgcaacacagtattagtggtatgagtatggagacgccctccgaagcaacatcatcatcaacttcagttactggagctcaacgctgcttgtcactctattttgctctctgtaccaagaagcactccctttttgttcatgtattcagcatatacaagaatgcatcagatcccgttaagcaagctattcatcttcaaatccctattctagttcgtactatgggctcatcctctgagcttcttaaaattatagcagacccaccaagtgggagtgacaaccttcttatacag

SEQ ID NO: 97310 - DNA, 425 bp, Arabidopsis thaliana columbia
  unsure (1)..(425): unsure at all n locations
cacacgcgtccgtttctcactcactgttacttcgctaaaaccctaatttcgccattcccttctctaagccctgcgcgtagacatttagaaatggctttctgcaacaaacttagcggtatcttgagacaaggggtttctcagagctcaaatggtccagttacatctatgcttggctctcttcgttacatgtcctctaagctttttgttggtggtctctcttggggaactgatgacagctccttaaagcaagctttcactagctttggtgaagtcacagaagcaacggtgattgcagacagagagacagggaggtcgaggggattcggatttgttagcttcagctgtgaggattctgctaacaatgccataaaagaaatggatggaaaggagctgaatggtangcaaatccgtgtgaatcttgcaac

SEQ ID NO: 97311 - DNA, 479 bp, Arabidopsis thaliana columbia
gcgtccgcccgtttatatctctatacatttctctttctgcaatggcgagattagtgcgtgtggctagatcctcctccctctttggctttggtaaccgtttctactctacttcagccgaagctagccacgcgtcgtcgccttcgccgtttcttcacggcggcggagctagcagggttgctccgaaagatagaaatgttcagtgggtgtttttgggatgtcctggtgttggaaaaggaacttacgctagtagactatcaacccttctcggcgttcctcacatcgccaccggcgatctcgtccgtgaagagcttgcatcttctggacctctctctcaaaagctatcggagattgtaaatcagggaaaattggtttctgatgagatcattgtagacttattgtccaaaagacttgaggctggtgaagctagaggtgaatcagggtttatccttgatggcttttctcgtaccatgagacaagct

SEQ ID NO: 97312 - DNA, 886 bp, Arabidopsis thaliana columbia
  unsure (1)..(886): unsure at all n locations
ttaggtacacactatagaagatctatgacgtcgcctgcacgcgtacgtaagctcggaattcggctcgagcacgcgtcgtcgccttcgccgtttcttcacggcggcggagctagcagggtttgctccgggaagatagaaatgttcagggggtgtttttgggatgtcctggtgttggaaaaggaacttacgctagtagactatcaacccttctcggcgttcctcacatcgccaccggcgatcttcgtccgtgaagagcttgcatcttctggacctctctctcaaaagctatcggagattgtaaatcagggaaaattggtttctgatgagatcattgtagacttattgtccaaaagacttgaggctggtgaagctagaggtgaatcagggtttatccttgatggctttcctcgtaccatgagacaagctgaaatactgggagatgtaactgacatcgatttggtggtgaatttgaagcttcctgaggaagttttggttgacaaatgccttggaaggagaacatgtagtcaatgtggcaagggttttaatgtagctcacatcaacttaaagggtgagaatggaagacctggaattagtatgggtccacttctccctccacatcaatgtatgtcaaagcttgtcactcgagctgatgatactgaagaggtggtgaaagcaaggcttcgtttatacaatgaaacgagccagcctcttggaagaatacttccgtaccaagggaaagcttatggaggttgacttacctggaggcatcccagagtcatggccaaggctnttggaagctttaaggctttacggtttccggggggaaaaagcttccgcaggaagtcnctccaaaccccggtttaaaattttttcatngggnnnattc

SEQ ID NO: 97313 - DNA, 360 bp, Arabidopsis thaliana columbia
ctctctatttcactaaaatggcatgcaactgcagtttagcgaatgttctaggggtagttttagtattcactctgttccacgacccgatcaccgtggcgcggacaaaatattccggcggtggcattgttcacgttcggcgattccaacttcgacgccggaaacagaatgttcctcgcaggtacaagatttcctcaaaacttctggccttacggtaaatcccgagatgaccccagtggcaagttttcggatggcagaatcgtccctgactttatcgcaaaattcatggggattccacacgatttaccgccggcgtttgaacctggcgccaatgtctcacgaggagctagctttgctgtagac

SEQ ID NO: 97314 - DNA, 770 bp, Arabidopsis thaliana columbia
gaccaagtccctaggatgttccaaatagcagggagcaagacgcaagaacaacaacaacgagttgacttggccatcatggaaaaacgctttcagcggtttcgacccgaacataatcgcagaagcattcaagatcgaccccgggacagctaagaaactacagaaccagaaagacaacagaggaaacatagtccgagcagacggtccgctacatttcatcagctccccgtcacgtcaatggcaacaagatgggaatggtaatggcatcgaagagacgtattgcacggcgaggctgcacgagaacatagacgatccagaacgtagcgactttttcagcacacgagccggcagaatcagcactcttaacagcctcaatctccctgtcctacgtttagtaaggcttaacgccattagaggcgttctctacagcggaggaatgatgttgccgcattggaccgcaaacgcacacacggtgctatacgttacaggcggtcaagccatgatacaagtagtggacgacaacggtcagtccgtgttcaatgcgcaagtgcaacaaggagagcttcttgtggttccacaaggctttgcggttgtcaaaaccgctggtgaaacagggttcgagtggatagcgttcaagacgaacgacaatgcttacatgaacacactcagcggtggaacatcgtacttgagagcggttcccgtggatgtgatcaaagcggcgtatggagtgaccgaggaagatgccaagcgggtcaagtttagtcagcaagaga

SEQ ID NO: 97315 - DNA, 842 bp, Arabidopsis thaliana columbia
  unsure (1)..(842): unsure at all n locations
ccggacgagagaccctctcaaatctcaagctcctttccttccttccttcgatctacactctcagattctctctctctctctttcctctctctttgtcttctctcaggttttgtaatggcggaatcttccaaagtcgttcatgttcgtaatgttggtcatgagatttctgaaaatgatttgcttcagctttttcaaccatttggtgttataactaagcttgtgatgctcagggcaaagaatcaggctcttctccaaatgcaagatgtttcttctgcagttagtgctcttcagttttttactaatgttcagccaactataagaggtaggaatgtgtatgtccaattctcttctcaccaagaattgacaacgatagagcagaatattcatggaagggaagatgagccgaaccgtattctcttagtcacaatccatcacatgctgtatccaattactgttgacgtcctgcatcaagttttttctccctatggatttgtcgagaagctcgtcactttccagaagtctgctggttttaaagctcttatacagtatcaggtacaacagtgtgctgcctctgctagaactgctctacagggtcgtaacatatatgacgggtgttgtcagttggatatccagttctcaaaccttgaggagctgcaagtaaattacaacaatgatcggtctaggggttttacaaatccaaacctggcctgcagggccaaaaggccgttcatcgcttcctggctatggtgatacaggagtggcatatcctcagatggcaaacacatcagcggttncagctgcctttggagggaggcttncntccgggtttanccggcacaaat

SEQ ID NO: 97316 - DNA, 758 bp, Arabidopsis thaliana columbia
cggacgcatggggtcgtcgtagtctctctctctctccgcaaaatatcatcggagaaaagaaacagagacacgaaacagagaaaaccatgcagagattcgcggcgaaaagatcggtgcaaaacatttccgtctctctatggcgtcgatgtatctcatcgacgtctcaggcagcgacagcttccgttaaggattccgacgagtttcaggcgaggcttcctccttttgcttacactcctccgccgtatactggtccttccgccgatgttatccttagcaaaaggaaggagtttctcagtccttccatgttctgtctctatcggaaaccgttaaacattgtggatgggaaaatgcagtatctatttgatgagagtggtcggagatatttagatgcatttgcctgggattgctgttgtgaattgtggacattgtcatccagatgtggttgagccagtgattaatcaaatcaagaggcttcagcatcccaactgttctttaccctaaccatgccattgctgatttctctgaggctcttgcttctaaacttccccggggccctaaagggggggtttttcactaactcagggacaggggctaatgaattggcgcttatgatggctaagtggtatactgggtgtcaagatattgtggcggttcgaaacgggtatcatggtaatgcagctgcaactatgggggctactggtcagagtatgtggaagtttaatgtttcagaatagtgttcatcatgctttgaaccctga

SEQ ID NO: 97317 - DNA, 457 bp, Arabidopsis thaliana columbia
  unsure (1)..(457): unsure at all n locations
nnnnnnnnnnnnnnnnnnnnnnnnnnnnnnnnnnnnnnnnnnnnnnnnnnnnnnnnnnnnnnnnnnnnnccacgcgtccggctgacttactgagttgcattggcaccgatgcgacaatgcacgaccacataaagaaactccttgatcggggttatgcaacaaaggatgctaatacacggttttctccaaccaacctgggtgaggcgcttgtgatgggatatgatgacatgggggatggactttggaaaccaaatctcagagcccttatggaacatgatttgaatgaagttagcgttggcaggaagaccaaagctgaagttcttggaacatgtttgcagcagatgaaagcttggtttttatatgccagagtaaaaaatcaaagttctaaaagaatgacaatttttcttgaaagaactaataacacttgtgaaaggaaacgcacacagcttggtgaagt

SEQ ID NO: 97318 - DNA, 507 bp, Arabidopsis thaliana columbia
  unsure (1)..(507): unsure at all n locations
cnnnnnnnnnnnnnnnnnnnnnnnnnnnnnnnnnnnnnnnnnnnnnnnnnnnnnnnnnnnnnnnnnnnnnnnccacgcgtccgacctccccgacaattggtttctcggctgtatcgttttggccggcgctgttttttctgtctccctgttcaatgttgttcagacagggacggtaaaacaagtatccacatgtgatgaaagtggcttcgttttacagcatagtcgggacgatccaatggctactattctcgttacttatggaaagagaccttagtgcatggaagatccaacctaacttcgatctttatctcattatcgccacgggaacattcggaagtgtaatacgaacaagtgtacacgtaaagggcacccaaatgaaaggaccttattacgtgccattgttcaaaccctttggtatcttttggccacactctttggtaccagcttcttcgtcaacagtcttcactacggcagtgtgttaggagcacccatagctggtgtggggaa

SEQ ID NO: 97319 - DNA, 586 bp, Arabidopsis thaliana columbia
cggtgcaggaatccgccggcggcgattccacggcgtgcgctatctcttcaacaagatcataatggcggatactgctagaacccatcacgacataaccagccgtgaccagtacccgatattgggccgagaccgagaccagtatccttacggacgatcagactaccagacgtcgggccaagactactccaagactaggcagattgctaaagctgctaccgcagtcaccgccggagggtcccttcttgtcctctccagtctcacccttgtcggaacagtcattgctttgactgttgccactcctctgcttgttatctttagcccaatcctcgtgccggctctcatcaccgtagcacttctcatcactggctttctctcctctggtgggtttggcattgcagctataaccgtcttctcctggatctataagtacgcaacgggagagcacccacaggggtcagataagttggacagtgcaaggatgaagctgggaaccaaagctcaggatattaaagacagagctcaatactacggacagcaacatacaggtggtgagcatgaccgtgaccgtacccgtggaacccatcac

SEQ ID NO: 97320 - DNA, 521 bp, Arabidopsis thaliana columbia
  unsure (1)..(521): unsure at all n locations
tacgactcanatagggagagctggtacgcctgcaggtaccggtccggaattcccgggtcgacccacgcgtccgttcttatttcgccaccgtcctccgccgccgtggtggacttatatctctgcgtttcacgacctgccgccaccgccggcgataggtttcaatgatgaattaaggcgttggccagagagagaagagagattgagatctgtcgatatgctagcgaagaatcggctgccgggaagcggccacactactccgtctcctccggcatctcctcgccgttctcctcgttatcgtcacggtcggtctaaagccgccgccggtagcagatttcctacgagttcaaccaagtcggaccctcgctcatcgcctctcgtggatcctcttatcggctcttctgccgtcgtcaggggattctcttattcgctcctctaatctatatctcttgaatgctgctatacatgggaaccgtctgcttcgacggtgctccaatcattcatcgtctacctgctgcaggatc

SEQ ID NO: 97321 - DNA, 576 bp, Arabidopsis thaliana columbia
atccttttcgtttttagggtttttttttcttagcacagctctctcttctcaatttccccaaatgaaataaattcctccgaaagtttatagatttcactctcccccgaactatacaaaattccctcaaaaggaaaaactaaaaagccgatcttggcttttttgtttctgagtgcatctcgatacttggaagcattctttggtgaggctgattcattctcatctgtgaaagtctttggcttttgaagcaatactatggaaggaattcagcatcctatacctcgcactgtcgaagaggtttttagcgactttcgtggtcgtagagctggtctcatcaaggctctctctactgatgtacagaagttttaccatcagtgtgaccctgagaaggaaaacttgtgtctttatggacttccaaatgagacatgggaggttaatcttcccgttgaggaggtccctcctgagcttcctgaaccagcgttaggcatcaatttcgcaagggacggaatgcaagaaaaagactggatttctttggttgcagttcacagtgattcatggcttatctctgttgcattttac

SEQ ID NO: 97322 - DNA, 636 bp, Arabidopsis thaliana columbia
ctcgattccttgagaataggattcatggagagagtggttattccttcacgtcatccacctcctagatttctacttgattttgtgaagaaacaaattaaaaacctaagtatttcaagcctatataaaaaggtcatgcttcaagtcttggagagacacagtgaagtctttgatagttacacacaaatagcaatagcaaaagctccgacaatctctttctgttaaaagtaagtctcgagagtatcgtagtaactattttcgttagagttgagtttcgagtgatgcaaaatcagtttatagaggttgtatcctgagatccttaaatcacacagaaactgttacactacggggtgatttaaaaggttaagggaagaattcatcaactcgtctcatctcatgttctttccttaatgtttgtgattttgatttcaattgcctttacgtaatgtttgctaattttacctcctacaaaatcaagacgaattagttgagtattgatgtaaaaaccagatcaggagactaattgaagtattgaactccattttgagccttttgcatagaaaccttgttccgaacgcacaagtccgcttcaaattgaccaaggatgaacatacaaaagtgatttcaattattcatcac

SEQ ID NO: 97323 - DNA, 486 bp, Arabidopsis thaliana columbia
  unsure (1)..(486): unsure at all n locations
ggaaacaaaagagactctgtctgaagaaagctaaagacttgttttgattcttgacaaaagaaactgtgtctttggagaactctgaagtaagagagacagagaaagacaaagagagagacatggtgggctcaggagttggaggaggagatagaagcaaagatgctgtaggaatgatggcacttcatgaagcacttagaagcgtctgttttaactccgactggatttactctgtcttctggaccattcgtccccgaccgagggtccgtggtggtaatggctgcaagattggtgatgaaagtggcagcttgatgttgatgtgggaagatgggttttgttggtggaggaaggaagtgaagatcttttgctgggaacagacatttgaaggtcatgaacgaagatcttttcaaaaaagctttcannangtnnccctncggcatataattttggggaaggttttttgggnaaagtncctnctnanaatnncca

SEQ ID NO: 97324 - DNA, 853 bp, Arabidopsis thaliana columbia
caacaaatcaagagtttcctgaggaaagcggaggtgaattatgaaattcaacagctaaaatcgaaaatgcgtgattcccagctccaaaagtttcgagatgagcttaagaaccgatctcgggtattaaagaaacttggacacattgatgctgatggtgtcgtccaggtaaagggacgagctgcgtgcttgatagacacaggggatgaattgcttgtcactgaactgatgtttaatggtacttttaatgatctggatcatcaccaagtagcagcccttgcaagctgtttcattcctgttgataaatcaaacgaacaggtaaatttaaggaatgaacttaccaaaccattgcagcagctccaagatagtgcacggaaaatagcagagatacaacatgaatgcaaactggaaattgacgtggaagagtatgtggaatccaccatcaggcctttcctgatggatgttatctactcttggtcaaagggcgcaagctttgcagagattatacaaatgactgacatattcgaaggtagtatcatcagaagtgctagaagactcgacgagtttttgaaccagcttcgagctgcagcagaggcagttggtgaaagcagtttagagagcaagtttgcagctgctagcgagagcttgcgacgaggtattatgtttgcaaattcgctttacttgtaagtactctcttgcagaatacagcttgctgtattgggtaaccatgggacacagcatgttgaaacataacttcatagagaaatgcttgtttgtactttcctatgtatctcgaatcgcgacgatagctctttgtttgccaacaagttagataatgaagaaatttgcagagctc

SEQ ID NO: 97325 - DNA, 502 bp, Arabidopsis thaliana columbia
aggagatcatgtcaggagctcaacgtatccatgacccagaactcttggagaagcgcgcaagagaatgcggcattgatgtcaagacaatatccacgtacattgatgcattcaggtacggtgcaccacctcacggtggattcggagtggggctggagcgtgtggtaatgctcttatgtgccctcaataacatccgcaaaacttcgctattccctcgtgactctcaaaggctcactccctaatatcattgctcttccctggcgactctcaaaggctcgctcccttaatatctatctttgataattgtccccgctcccgatttttaagttatttttttggtgcagttcgttaggtggttagttatcttttaactatgtatgtgttggaaccctttaattatttaggagccgttctttttgggctttttcgggaataataaagggcggccgccggcttgttagcttgttggacaggggatttattcgggccgggtccttgcgggggg

SEQ ID NO: 97326 - DNA, 787 bp, Arabidopsis thaliana columbia
  unsure (1)..(787): unsure at all n locations
atgatctnccagcatctatactgactcactatagggaaagctggtacgcctgcaggtaccggtccggaattcccgggtcgacccacgcgtccgcggacgcgtgggcggacgcgtgggtgaataacccgttaatctctctctgtccctttcttcttcttttttcaagaacaataaaaaaatgtctcaagattctgcaactactactccgccgccacctttaacctccgacgtttcaatgccttccggtgaagaagatgagccaaagcatgtaacatcggaagaagaggcaccggtgacttcggagacaaatctgaagctacctttgatgccggagctagaggagtcaaatcatacggcggaggttgtttcagagaaggtgacgccggagacgatgactttggagtcagaaggtctcaaccacgcggcggaggattcagagcagacacatgaagtgacgccggagacagagactgcgaagctagaggttctcaaccacacggcggaggattcagagcagacacatgaagtgacgccggagaaagagactgtgaaatcagagtttctcaaccacgtggcggaggattcagagcagacacatgaagtgacgccggagacagagactgtgaagtcagaggttctcaaaccatgcggcggaggattcagagcagccacgtggaggtgacaccgacgccggagacagaatacatcggaagcagacacgtcattgcttgtaacttccgagacagaagagcctaaccatgcggcggaggattatncagagacagag

SEQ ID NO: 97327 - DNA, 478 bp, Arabidopsis thaliana columbia
atcattggaggatgataagaatacgcatgtatacgcgattgccaattcgttaatcataaatgctgggttactatatataataagttacgggatatgaaaacaactatatgcacaaatatgagggattgctgtaaattaaatctttatacatgagattaatttaatcaatcacatagataccaattatagcggattcatagataaattaacagagtccttctttgtgagatctacattgagatttttttctaaaatgaagaattaagaggttgataattaaattaagatccttgtacaaaaaaactaccattattattactgatcagtaaaattaatatctttcaattcatattaaaaggggaaggatttctttttatgataaaaaatatagtcatttcatttgaagaacaaaaagaagaaagcaggggatccgttgaatttcaagtatttagtttcactaataagatacgaagactta

SEQ ID NO: 97328 - DNA, 560 bp, Arabidopsis thaliana columbia
gaagcagccatggttcgggccatatccgcccgtgccgagttgactaattccggcaagagctgcacggatagcaagaaacaagcagttttggcggattgcattgacctctatggagacacgatcatgcagttaaaccggacattgcatggcgtgtctcctaaagccggtgccgcgaaaagttgcactgacttcgacgctcaaacgtggctgagcaccgcgcttacaaacaccgagacctgccgacgtggctcatccgatttaaacggtcacaggctttcatcacacccatcgtttcaaacaccaaaatctcccacctcattagcaactgcttagccgtcaacggggccctcttgccccctgggaacaaaggcaacaccagtgctaatcaaaagggctttccgacgtggctttcccgtaaagataagagactcctgcgtgccgttcgagccaccctcgtggtggccaaggacggatcaggacatttcaacacggtacaagcggctattgacgtggcgggacggaaaaaggtgacgtcagggaggttcgttatatacgtaaaa

SEQ ID NO: 97329 - DNA, 617 bp, Arabidopsis thaliana columbia
  unsure (1)..(617): unsure at all n locations
actctgaagcaatatatgangctttatacgactatctacaacatgtgcacccagaaacctcctcatgattactcacagcagctttatgacaagtatcgggaagcatttgaggaatatattaactcaacagttttncctgcnttgagggagaagcatgatgagtttatgctgcgggagctatttaaaagatggtcaaaccataaagtaatggtcagatggctatcccgcttcttctactaccttgaccgttacttcattgctcggagatcacttccaccactgaatgaagttggcctgacatgcttccgtgacctggtttataatgagctacattctaaggtcaaacaagctgtaatagctcttgttgataaagaacgggagggcgagcagattgatagggccctgctgaaaaacgtattagatatctatgtagagattggaatggggcagatggagaggtatgaagaagattttgaaagcttcatgcttcaagatacttcttcgtattattctcgcaaggcatcaagctggattcaggaagaattcttgccctgatacatgttgaagtctgaagaatgtctaaagaaggagaggggnagagtggctcactacctaca

SEQ ID NO: 97330 - DNA, 569 bp, Arabidopsis thaliana columbia
  unsure (1)..(569): unsure at all n locations
gagatatcttttcaccgcccttctcataggtctcgtctctctttctctctattttacgcttttttcctgaacgattcttagggttttgattctctctctctctcgcttccgcccttctcatagcagctctcgccgatcctgtgtaatcgggaatcggtaatcgtcagggtctgtttggggtacggcgacgcgattttctgattattagggtttaagatctcgaggttgaggagagcttgaaaagttgtttgtcaacatggagcgcaagactattgacttggagcaaggatgggactatatgcagactggaattactaagctgaaacggattctggaaggattgaatgagccagcatttgactctgagcaatatatgatgctttatacgactatctacaacatgtgcacccagaaacctcctcatgattactcacagcagctttatgacaagtatcgggaagcatttgaggaatatattaactcaacagttttgcctgcgttgagggagaagcatgatgggtttttcccgggggggatttaaaagggggcancccaaaagaanggcgngg

SEQ ID NO: 97331 - DNA, 616 bp, Arabidopsis thaliana columbia
ttttggtgaagagactcacggcggtgaatgtttcaagaactcctgggggagatttctccggttatgctctccgacaagctacaagcggaatcaaccacttctcaaccggatttaagcaaacggagggctctactcatgacgataagtccacgacgagttacgtggcagacaaggcaaaggaaggggtgaagaaagcgaccgacgcagccgtcagcacgggtgataacatgaaggatgcgatggatggtgcgtggaaagcggctaaggaaacgggtcaaaacattagcgatgcggttacgggcgatgatgatgacggcagaattcaagaggataaggtcgcagtggaattgaaggatgtgcaacagcctgtggatacgacggagtatagaggtgtggaggatctacatcagcaaaccggcggagaagttaagtcaccctaagctaatgtgttagggtgtctatcctttctttcattgttgtttcagtgagaggttgcttgtgcctcgtggttcaaattaaaggtttatgaatggaccgtggcttagatcgcattacaatttactcttattactagttgaactaaagcaaaataaacaactactccgattctccgaac

SEQ ID NO: 97332 - DNA, 386 bp, Arabidopsis thaliana columbia
gaaagaaaaaaaaatgacatgggcttatatttctttacgcggtccctggattcgagaattaaataatgaaatttctatctttcttggtgtctttgttcagactaaattgtgatatagtgagcatagcaaatgaagtaatggaaatttgaatatagcattagcaggaacgtttccacataactagttgcatatttcaatgcaaagaaaagaaacatgttatttaagaatataacaagaggatgtatgagttatgtgggtaaaattgaagttttttgctattttgggaaactttactatttttatttaaatttaaagagataaatgatagggtaacatactaacatgattttgtatcatgttgacatttaaattgtctttataggatg

SEQ ID NO: 97333 - DNA, 479 bp, Arabidopsis thaliana columbia
  unsure (1)..(479): unsure at all n locations
gaattcttattgggcgaaacttccggcggttaaagcggcgatgattgctcagcctgaggcggagtggatctggtgggttgattctgatgctttgtttacggatatggattttacgccgccgtggcgacggtataaggagcataatcttgttgttcatggttggccgggagtgatttataatgatcggagctggacggcgttaaacgccggagtttttctcattaggaattgtcagtggtctatggaactcattgacacgtggacaggtatgggaccagtgagtccagagtacgcaaaatggggacaaatccaacggtcaatattcaaaggcaaacttctttcccagagtcagatgatcaaaacggctctcgctttacttaactcttacaaacacagagaagtgtattnttccaaggttttncctcgaagggggacttttnttttcgaagggatattggttanngatcganccgggttnt

SEQ ID NO: 97334 - DNA, 400 bp, Arabidopsis thaliana columbia
tgacaagaaggaagccgtgacgcttgggacatttttggatggatcgcagccaaaatagagtgggggctgttgtacttgctaccaagggatgaagaagggtttttgtcaaaagaagctattaggcggtgtttcgatggaagcttgttcgagtactgtgccaaaatctacgctggtatcagtgaagacaagacagcatactactaaaagtatcctttatgttaagtaattgatcgagccattttaagctaattaatcgatcaatgtgaagcttgtgcctatacggtaaatgaaggttcgggtagtagtatggacttttggtctaagagatctatgtttgtttttgtttttccagttctgtatggttatactataagttgcagctctaaagaaaagcttctgt

SEQ ID NO: 97335 - DNA, 364 bp, Arabidopsis thaliana columbia
  unsure (1)..(364): unsure at all n locations
cccnganacccggggaagttttccantaccttctccaggtaggtggttgccccccatgctgttacctgggaagtcccgtggaaggaggggaaagtgcctaagggtgttgggaagttagtaaagggaaagtggtgaaggcagtgagtgaagtggaggagaaagatgggaagctttggatgggaagtgtattgatgtccttcattgccgtatatgacttgccttagttcgtttctttttctattcaaatttgtatatttctagtttggctatgggattgcaatatgcatctcgttatcaaactatatttgacgtaatcaattcaaacacaaacaattactaaatacagtatcctttttgccntgtc

SEQ ID NO: 97336 - DNA, 977 bp, Arabidopsis thaliana columbia
gaaacaagtatctaattcataacactgttttattttgtttaaactaacttaaacaacaccgcactttttatttattatccaggggcttaatattaccctaatagtctcgacatgcaatctctttaccaagaatccatttaccttaacgaacaacaacaacaacaacaacaagcttcttcttcctctgctgcatctttctccgatattgtttccagtgatgttcgaaacaacgagatggtatttattccaccaacaagcgacgtagccgtcaacggaaacgtaacggtgtcaagtaacgatctaagctttcacggtggaggactttctttaagtcttggtaatcagatccagtcagctgtctctgtttctccctttcagtatcattaccagaatctttcgaaccaattgagttacaataatcttaatccttctactatgtctgatgagaatgggaagagcttgagtgttcatcagcatcactctgatcaaattttaccttcctctgtttacaacaacaatggtaataatggtgttggattctacaacaattaccgttacggggcatcagggtttgtgagtaggtgtactgagatctcgttaccttaaaccaacacaacaattgcttgatgaagttgttagtgtaaggaaagatttgaaattggggaataagaagatgaagaatgataaaggtcaagactttcacaatgggtctagtgataacattacagaagatgataaatctcaatcgcaggagttgtctccttcagaacgtcatgagctacagagcacgaagagcaagcttttaacaatggtggatgaggtagataaaaggtataaccaataccatcatcaaatggaagctttagcatcgtctttcgagatggtaacaggtcttggagcagctaagccttacacatccgtagctctgaatagaatctctcgccatttccgctgtgtacgcgacgcgataaaagaac

SEQ ID NO: 97337 - DNA, 721 bp, Arabidopsis thaliana columbia
agatggtgttgtcagttttctcccttctccaaatgaagtcaataactatgctcttgaccagaataataatgaagagagggtaaccttgactggatctccagatggacctcttgtggcgctggctttcaaattagaggagggtcgttttggtcaattgacatatttgagagtttacgaaggtgtgattaagaaaggtgattttatcataaatgtcaacactgggaagagaattaaggttccacgcttggtccgtatgcattcgaatgatatggaggatattcaagaggcacacgctggacaaattgtagctgtgtttggtattgagtgtgcatcaggtgatacatttacggatggatcagtcaagtacacaatgacatcgatgaacgttcctgaacctgttatgtccttagctgttcaaccagtttcaaaagattctggaggacagttctcgaaagcattgaatcgattccagaaagaggatcctactttccgtgtggggtttggatcccgagagtggccagacggttatttctggtatggggggaattgcatttggacatctatgttgaacgcatgcgaaggggatttaagggttgatgcgcctgtggggcaaaccccgtgtcaattttaggggggctatttccccgcgggcagagtttgattatttacataagaagcaaagtggaggagcaggtcaatacgtagagtacagggtacgtgg

SEQ ID NO: 97338 - DNA, 2285 bp, Arabidopsis thaliana columbia
acccacgcatgcgcatcttctctacattcgtctttcatcgcagacaacaaatcttcaatcttcgtcaattccaaaccaccacaatccttcgcaacccaatctccatcgctccgatccagattccgatggacgccaccgagcagtctctccgtcaatctctttccgagaaatcctcatccgtcgaagctcagggtaacgccgtccgagctctcaaggcttcccgtgcagctaaaccagaaatcgatgctgccattgagcaactcaacaaattgaagctcgagaaatctaccgtcgagaaggagcttcagtctattatcagtagctccggtaatggttcgcttaaccgtgaggcttttcgaaaagctgttgtcaatactctcgagcggcgtttgttctatatcccttcgtttaagatctacagtggcgtcgctggactttttgattatggtcctcctggctgtgctattaaatccaatgttctcagcttttggcgtcaacatttcattcttgaggagaacatgctagaagttgattgtccatgtgtgacaccagaggttgttctcaaggcatctgggcatgtagataagttcactgatcttatggttaaggatgagaaaactggaacatgttaccgtgctgaccacttgctcaaggattattgtaccgagaagctggagaaagatcttaccatctctgctgagaaagctgctgaattgaaggatgttcttgctgttatggaagatttttctcctgaacagctaggtgccaagatcagggagtatgggatcactgctccagacacgaagaatccactctctgatccttacccgtttaatttgatgtttcaaacatccattggcccatctggtttgattcctggttacatgcgtcctgaaactgctcaaggtatttttgtcaactttaaggacttgtactattacaatgggaagaaacttccttttgccgcggctcaaattggtcaagcctttagaaatgagatatctcctcgacaagggcttcttagagttcgtgaattcacgctggcagagattgagcacttcgttgatcctgagaataagtcacatcctaagttctctgacgtagcaaaattggaattccttatgttcccaagggaagaacaaatgtctggccaatctgccaaaaaactttgccttggtgaagctgttgctaaaggtactgtgaacaatgaaactctaggatacttcattgggagagtgtatcttttccttactcgtcttggcattgacaaggaacggctgcgcttccgtcagcatctagcaaatgaaatggcccactatgcagcagattgttgggatgctgaaattgaaagttcatatgggtggattgaatgtgttgggattgcagataggtctgcttacgacttacgtgctcactctgacaaaagtggtactcctcttgtggctgaagagaaatttgcagaacctaaagaagtagagaaacttgtgataactcctgtgaagaaagaactgggtcttgcattcaagggaaatcaaaagaatgtggttgaatctttggaggcgatgaatgaggaagaagctatggagatgaaagcaaccctggaatccaaaggggaagtggagttttacgtgtgtaccctaaagaaaagcgtgaacatcaagaaaaacatggtgtctatatcaaaggagaagaagaaagagcaccagcgggttttcactccatcagtgattgaaccatcgtttgggattggtcggatcatatattgtctgtatgagcattgtttcagcacaaggccaagcaaagcaggggatgagcagttgaacttgttccgtttccctcctcttgtagctcccatcaagtgcacggttttcccgcttgttcagaaccaacaattcgaggaagtagccaaagttatttccaaggaactcgcctctgtcggtatctcccataagattgacatcactggtacatcgatagggaagagatatgcgagaaccgatgagcttggagtgccatttgcaataacagtggactcggatacatcagtgacaatcagagaaagagacagcaaagatcaagtccgagtcaccttgaaggaggcagcttccgttgtgagctcagtctcagaggggaaaatgacgtggcaagacgtctgggcaaccttccctcaccattcttctgctgctgcagacgagtagctagccccttgtttttttccgaattaaaaaccaaagtgttaaattaattgttgctgaatctactcattttcggtgttttgtttagag

SEQ ID NO: 97339 - DNA, 493 bp, Arabidopsis thaliana columbia
ccgctcttctcctcagagcttccagcaccaggtaattcctctgaaacaagtccatcctgaggctgtgtaacggacatgttacacggatatccacctgctactggtgacaaagggtacccattctgtgttatttctgcaccatttggggatgctaaatagccatttggtgacactggatacccattagaaacccaaggttgacccggtatgaactcagcagcatgggggttcattattcttgggccattgaattgattaccctcaccattggactcggtgctattggggaagcttggtttgttacgcggaaccctgtttccagatcggttgtaaccaccaccagagagtctaggcccataaggaactcgagctgttacagactgatgaggagttgatctgcggacatggttaataggaagcattggtggcatattcaatggagaggttgatgatgatgatgatgaatcagtgagtcagaacttaggaaaagctc

SEQ ID NO: 97340 - DNA, 409 bp, Arabidopsis thaliana columbia
  unsure (1)..(409): unsure at all n locations
gcgtccgaactccaaggaaagcatcaatggtgggagaagatgcttgcttgtgataatatattcagctacgtcgagtgaagaaccagtgaagcataagtagcagagacagagagagatacgtgagtgtgtgtctgtgtttttcgctttttggctttcttccgctgattccacgaacggcgtgaatcgacttttctccagatctcatctctttcagtgtttgattctgtcaaaatctgcaagccgaactcgagatcttctcagatctccgttttcgcttgcacgacgattcagcatctgatacgtgtcggtgttcacattttctcaaatccaaatggagaaaccggagagcgagaagaaatcggcggtgtctgatgtcggtgcatgggctatgaatgtaatnnnnnnnnnn

SEQ ID NO: 97341 - DNA, 691 bp, Arabidopsis thaliana columbia
  unsure (1)..(691): unsure at all n locations
gccnnnnnnnnnnnnnnnnnnnnnnnnnnnnnnnnnnnnnnnnnnnnnnnnnnnnnnnnnnnnnnnnnnnnnnnccacgcgtccgcggacgcgtgggttcagctacgtcgagtgaagaaccagtgaagcataagtagcagagacagagagagatacgtgagtgtgtgtctgtgtttttcgctttttggctttcttcgctgattccacgaacggcgtgaatcgacttttctccagatctcatctctttcagtgtttgattctgtcaaaatctgcaagcgaatcgagatttctcagatctcgttttcgcttgcacgagattcagatctgatagtgtcggtgttcaattttctcaaatccaaatggagaaaccggagagcgagaagaaatcggcggtgtctgatgtcggtgcatgggctatgaatgtaatcagctccgttggaatcatcatggctaataaacagctcatgtcttcctctggtttcggttttggctttgctacaacgttaacgggatttcactttgcattcactgctcttgttggtatggtgtcaaacgcaaagtcaacgccacacggcanacacagtatgaccgaagatgagattaagctactcaaagaaggagttgagcatatcgacttgaaagacgttgacctcggtgacactaaaccataagtgggtgcttataacccatt

SEQ ID NO: 97342 - DNA, 478 bp, Arabidopsis thaliana columbia
  unsure (1)..(478): unsure at all n locations
aacataagccaatatctctgcatcggaagattctcagcgacatctttccaagttctaggccacatgaaaacagtatgcgtcctcacattaggatggcttctctttgagtccgagatgacattcaagaacatcgccgggatggccatagccattgttggaatggtgatctatagttgggctgttgatatagagaaacagaggaacgcaaagtcaacgccacacggcaaacacagtatgaccgaagatgagattaagctactcaaagaaggagttgagcatatcgacgtgaaagacgttgaactcggtgacactaaaccataagtgggtgcttataacccntttgnaattactcggtcgntactgnttcgnattcntttatacaaatatttcctttgnggtgccatttntttgtnctttccncttncnntatatgtnttngacnattttnggttnaaaaaaanaaataaaagggggggcc

SEQ ID NO: 97343 - DNA, 607 bp, Arabidopsis thaliana columbia
  unsure (1)..(607): unsure at all n locations
acacggagttccncgctntccagtatggcccatgaacgcgtccccacctttggatggctcctctttgattccgagatgacattcaagaacatcgccgggatggccatagccattgttggaatggtgatctatagttgggctgttgatatagagaaacagaggaccgcaaagtcaacgccacacggcaaacacagtatgaccgaagatgagattaagctactcaaagaaggagttgagcatatcgacttgaaagacgttgaactcggtgacactaaaccataagtgggtgcttataacccatttgaaattactcgtcgctactgattcgaattctttatacaaatatttcctttgtgtgccatttactttgttctttccacttcctatatatgtcttagaacattttgggcttttcagaaagcccataaatccttctttgcttgagaagaaggcccgtccttgaatagtaagtgtcctatatagtaaagtaaacagaaatgtcaactgaagcatgtgattttattcaaaaaaaaaaaaaaaagnnnnnnnnnnnnnnnnnnnnnnnnnnnnnnnnnnnnnnnnnnnnnnnnnnnnnnnnnnnnnnnng

SEQ ID NO: 97344 - DNA, 682 bp, Arabidopsis thaliana columbia
  unsure (1)..(682): unsure at all n locations
nnnnnnttcttgtttcagtaaaaaaaaaaaaggatcattttcattatcagagtaaattacagaagaaacaggggattgtttctaacaaaagataaaacaggattctcacaactgcgtaaagaaatgattcaagagtctagagttagactcatgttgatacataagaaaaaaggaagaaaacacacaaatcattactcttacaagatcatatttactcgtcgaaaacatatctttacttacgatgataggtaagaaggaagagaaacacaatcatatcttacacatactttttggtatgtatatgttaaagaaagggcatcactgttgcttggagtttgattccacgatcttgcttgccggagctttctcttgtttctctacgtacgcagacggaaaccatccagctttgcctttgtattctccttctgaccagcctgtaccagccacctgtcgcacaattacataatcatcgacagcgagactgagttcccctggggcttgagcatcaaaacgggtgcacaaccttcgggaagaaagctaggaatcattctggctgagaaggttggtgattgtgatgatcancagncccanngggacttcttggtcttcttccccggggggctnganttacttcttncntgatganngggttgggnctcttccttgggggacttgncttcnc

SEQ ID NO: 97345 - DNA, 518 bp, Arabidopsis thaliana columbia
  unsure (1)..(518): unsure at all n locations
tgaacgtccctggtttgacagtgggcaccttcaaactcctcagcaaacttattgacaacaaaggattgtcagggacaagacgttactttggtgatcttgggaaaactctaagaacagcaggatccaatgtcgtctttgttgctctcactgaaatctccgattcttttctgaggggtgcagaaatgaaaggtgttgatggactggttagcggtttccaccatggaatccttaaactggcaatggaaccgtctgtgataggaacagctttgatggaaggtggccctgatagaacaattaagcttgatcgtaaccccggtattgatgagttatacatcgaagggtaccttcaagctatgttgggtacaaatgtattaggcaagagtatctcagagtcaaagtcattgacggtcacggttttcctgaaaaacctccccccaaggaaattttttcaaaaggtgtggtggttgagccctgttaaaagtttttcttnaancagggggtttctcaaagggggtncc

SEQ ID NO: 97346 - DNA, 463 bp, Arabidopsis thaliana columbia
ctgagagcaaagacttgacctttttcacttccttctcactgatcgtcgaacaataaggccgtcgcatctcccagttatggctatggccggagaatcttccggcaaaaaaattggagactgtgacggtaaagtcgcggggaacagacagcgaaaggtgggtcttatttacgacgagacgatgtgcaaacacgacacacctgacggcgaggatcaccctgagtgtcccgaccgcatcagagttatctgggagaagcttcagctcgccggagtttctcaaagatgtgtggttcttggtagtagcaaagcacaagataagcatctccaattggttcacacaaaggaccatgttaatttagttaagagtattagcacaaaacagaaagattatcggagaaacaggattgcttcacagttgaattcgatttatctgagtggaggttcatctgaagccgcatatcttgca

SEQ ID NO: 97347 - DNA, 448 bp, Arabidopsis thaliana columbia
gcgaaaagacgacagaaggggaaattaaattcgatttttgagacaaagctcgacaagtcgtcggcggcggtgtaaaaatagtcggagctatggcgatgcaggccggagttggcttatccaggatctttctcttagccggagcaggttacactggtacgatcatgatgaagaatggaaaattgtcggatttgttgggtgaattgcagagtttggtgaagggaatggagaaatctggagaagggtctgagggagattctgatgtttctgatgctatagctgcacaggttcgccggttggctatggagattcgacagctagcttcgcagcaacacataacggtcatgaatggagtttctggtgcaaacctacaagcccttgctgttcctgctgcggcattgggagctctcggatatgggtatatgtggtggaagggactctcattcactga

SEQ ID NO: 97348 - DNA, 517 bp, Arabidopsis thaliana columbia
  unsure (1)..(517): unsure at all n locations
nnnnnnnnnnnnnnnnnnnnnnnnnnnnnnnnnnnnnnnnnnnnnnnnnnnnnnnnnnnnnnnnnnnnnnccacgcgtccgcccacgcgtccgggaagagctcaggacgccaccggtaagtctggtggctctcttcggatacgcggagctacacgcgtccattactaagtatctccactcccagcagcctcccatcaacgctctggccttccccgacttctctcaaatctctctcctccttgctcatgatgatcagatcagccgaacctcctccttcagagatcctctcagcgtctccgattctgcttctcccattccttccagatgcggcggtattttgaaacgggactggttgcttaagcatcgcaccaaggtccctgcacttgtcgccgccttctttccctcacatcacatcttgggcgatccaactcaatggctacaggtctgctcctccgaatctcaacaggcccaaaatccggaattccggcccaaaaacaacaaatgggggggtggcggg

SEQ ID NO: 97349 - DNA, 767 bp, Arabidopsis thaliana columbia
  unsure (1)..(767): unsure at all n locations
ctcttggtactttgggaatgtatatccatcaccaccatgcctgtgccagggatttgtatctagccacatggtatctgcaggccagattcatatttcttggtcgaatggatgatactatctgaggtcagctcttgactacctggagatgcagccatgatctgtcagcccatgttcncggtgcacatacctacaagtgcccaaattgtggaatcacaagctgggttagattacctatatatgatgcagactttggttggggtcgtcctatctttatgggacctggtggaattccatacgagggtttgtcttttgtgctaccaagtcctactaatgatggcagcttatccgttgccattgccctccaatctgaacacatgaaactgtttgagaagtttttgtttgagatatgagagcgttaagccctcgtttttccctcagtaaatttgggcaaatttgcttcttgtcatcatcctgtgttttagagggtacaacaaatcataaggtgtgcttatggtctgtaactttggactatgtcgtataggaacttttgctttatgttaatacagatgataagtgttgttctataacacatgccgtgattgttttgtgtctcattggttatatccaccatgcatgtatgattttcagcttccatgcaataactctgtttctatctttcaaaaaaaaaaaaaaaagggcgaccgctctagaggatccaagcttacgtacgcgtgcgtgcgacgtcatagtcttctatagtgcaccta

SEQ ID NO: 97350 - DNA, 798 bp, Arabidopsis thaliana columbia
  unsure (1)..(798): unsure at all n locations
nnnnnnnnnnnnnnnnnnnnnnnnnnnnnnnnnnnnnnnnnnnnnnnnnnnnnnnnnnnnnnnnnnnnnnnnnnnnnnnnnnnnnnnnnnnnnnnnnnnnnnnnnnnnnnnnnnnggatgcaaaccttagtaatatatcagaaaaaaagattcaaaattacaatttaaagttacttttccaaaccggattgcttttaaagtctaatatcaaggtttcaaatctccaaaaataaaaggaaaatccttctgatctatgatgatacacgacctctggtgtaaatagtcatcaactcaagcaccagctccttgtcaccatggttcctcacatacctttttaagaacaactcatcagtacataccaaaacagacgacattggagggagttcacttcctgtgtctccgagaagtctttttgacatgagagctctaataacattacaccttgggacagtcctcttctccaggttgtgtccaagtaccgtaggatttgaaaccacatccttcagtggccaattcatcttcttcaccacaaactcaatcttcttcttcaccggctctgcagataaaataagacactgaggaaagcgcttaacccttgttatgaactcatctctgctgaagcctaggcctagaaatatttcaatggagttcaatttcttctgctctgaagtaccaatgcactgcggatactttttcaacactgagatgacctcgtcttcgagtagtccacacttcttcagggtttcaattgtctgacctttcttcttctccgaactattcaaaaagtaaggacacttt

SEQ ID NO: 97351 - DNA, 405 bp, Arabidopsis thaliana columbia
attagatccgaccagattctctatttggagacagacattactcggatctttatttcattttgtatgagtctgtattgtagattttgagatcaggtagtgtggatttgagatcaggtacatttacttgcaaggtgttttgaattttggttgtggacataatgggaaagcctgcaaggtggttaaaaagtgtactacttggaaagaaaccatctaaatctagtggttctaaagataaggcgagaattgtgaatggaaaagaagtggtggttatatcaaagattgaagaatccgatgttgtttcggatcttccatcaattggaaatgcagcagtctataccagtggtattgtagagacgcagaatctaaaacatgaagatgtttcggacgacgagatacaagtttctg

SEQ ID NO: 97352 - DNA, 743 bp, Arabidopsis thaliana columbia
  unsure (1)..(743): unsure at all n locations
tattcgactcttatagggaaagctggtacgcctgcaggtaccggtccggaattcccgggtcgacccaggcgtgcgccacgcgtccgcccacgcgtncagagacgcgtgggctgctagaagactacagaagggggagtcaaggagagggatagagcgatccaacggttgagatgtttctacgggcaaatcggacggccgtttattggctaaatgtgtagcagacgacggggatcgtccggcttgacgttgttcccaacgcgagagcggtgctgatcgatctctacagcaaaaccctaagggacatccatgctgtgccggagagatgaagggtaccgtaaagcggtggaatcattcacgcgccaacgtctcaatgtgtgcaaggaagaagaagattgggagatgattgagaagcggcttggttgtggtcaagtcgaagagcttatcgaagaggctcgcgatgagctcacactcattgggaaaatgattgagcagttctataaaacgcttgaaggtctaattgcagagtctaaaacagagatcccagctgctacacccagcgatccgcagttgaaggagtaacttccagtttttacatattgtgtgcttgttgcttttttggctagagttgtttccaaatcagtggtcaagcctctgaataaattgcttaataattttcataacgataacaatgtctgttcacaaatgttttatcactcttattaaacaaatgatgtttcttcccc

SEQ ID NO: 97353 - DNA, 766 bp, Arabidopsis thaliana columbia
ggccgtctgcagtaccggtccggaattcccgggtcgacccacgcgtccggcgccggagtcaaggagagggagagagcgatccaacggttgagatgtttctacgggcaatcggacggccattattggctaaagtgaagcagacgacggggatcgtcgggcttgacgttgttcccaacgcgagagcggtgctgatcgatctctacagcaaaaccctaaaggagatccaagctgtgccggaggatgaagggtaccgtaaagcggtggaatcattcacgcgccaacgtctcaatgtgtgcaaggaagaagaagattgggagatgattgagaagcggcttggttgtggtcaagtcgaagagcttatcgaagaggctcgcgatgagctcacactcattgggaaaatgattgagtgggatccttggggtgtaccagatgattacgagtgtgaagtgattgagaatgatgcgccgattccaaagcatgttcctcagcaccgacctggtcctcttcctgagcagttctataaaacgcttgaaggtctaattgcagagtctaaaacagagatcccagctgctacacccagcgatccgcagttgaaggagtaacttccagtttttacatattgtgtgcttgttgcttttttggctagagttgtttccgaatcagtggtcaagcctctggattaaattgcttaataattttcataacgataacaatgtctgttcacaaatgttttatccctcttattaaacaaatgatgtttctaccc

SEQ ID NO: 97354 - DNA, 376 bp, Arabidopsis thaliana columbia
ggtctatccaacgtataaaccaaatataaacacacaaatttattgggagtgtcatagtttaatctaagagtgcgaagagatgcagattgagatggaagagaagtttgaagattggagaggcaaagaggcaatttctggcaaacatggtgggattaaagctgctttcattgcttgtgttgtagagacgatggagaatatggtgttcttagcatgttcaaccaacttcatgatgtactttacgaaatcaatgaattactcaacacccaaagcagcaaccatggtgactaatttcgtagggacatcgtttttgctcactattttcggtggttttgtcgcggactcttttctcactcgcttcgctgctttcgtcctcttt

SEQ ID NO: 97355 - DNA, 780 bp, Arabidopsis thaliana columbia
  unsure (1)..(780): unsure at all n locations
tctaaagggcacaaaagctggagcttcaccggggtggggggcgctttatgaacttatggatatccccccggctgtgaagatatattcgctttcgctttcgtaatcgncccaaaaccaaccaaaacggttctgtgatcggaaccgccgtatacatcaattcaactacgtatgtgccttcgtcccttagcttagccagattcatcactggggatttcatcagcagccgtacaattatgccctctggttgcagtatcagagctctctggatcatcaacaatcaagacactgttgttttctccaggaggtttccggtcgtcgagaagcaatggtgctccgcttacaagacggagaacgaaaacactggattagatcttcctagacttcccactgatcaacaaatctccgattcttttactcgaagaaagagacgggaaggctctactcgtggatatggtatacgtgttgctcaatccaccaaaggatcggattcttgggttgatgatcccatcactcgtcatattatcagcctttgcttaaccgaagaagatgatgatgatgatgatgaaaggaacattctctggcctattgctctgcataccaaagcgctttactctatcctcgtcttgcctttggttgagcccaaggagatgaaagattacgtcaagctttggtagagatctggatgtgggaccagctggttggtgaaagatttgaagtttatcaatctttctttgcttaacaatttcaattcctttaccagggcctttttaatggggggct

SEQ ID NO: 97356 - DNA, 896 bp, Arabidopsis thaliana columbia
  unsure (1)..(896): unsure at all n locations
nnnnnnnnctnnnnnnnnnnnnnnnnnnnnnnnnnnnnnnnnnnnnnnnnnnnnnnnnnnnnnnaacaaaactaaccacgcgtccggggttttcttcttccttcttcttcatcctctttgctgctatgattgagctccatggatctgcaatcatagttcttcgatttaggattcgtttagatcgcggtttttgagctcggttggtgaagacatatgcttgaaaacagaagtcttgtactgaagcatggctcttcggctaccagcttctaaagcagctgaagttgcgattggatctattggctgtggttatgatctagctattgatttacggttgaagtattgcaaaggaggttccaaagattctagattacttgacattaaaaaaggtgatgataattgtgagattggtttaccctggtggaatctccattcctaatgtttgcacagtctatcaaatgcgattaagggggagcgtatggcggttagggcccgattttcttcctttcccacagattggaagacccagtcaacccaggaactttctgtgggtggggaaaatcccggcagggttcttcaaaggccttgtttgaattttcagacctgtggcagaagacgcagcctccccaaaaaccttgctttgaggggggtttatcccatattcttggaggcttggacaatttaaagggtactcccggagcttgtaaccgggggttcatcacaagggccctcgtgtttggagggtttaaatttattgggcgctttattttttgtaaaagggggaaaaagtttttccaaaacaccttctaattcaccgggattgaaagggaaaaagggcataaatgcggagctccttcgattcggtccaaaacacctgttggggaaaggagccccgattg

SEQ ID NO: 97357 - DNA, 643 bp, Arabidopsis thaliana columbia
  unsure (1)..(643): unsure at all n locations
catttggcaagcactacaaaccgtttgggngtaatggggcngttcaaggatctcggggtgaattttccccccnngngngtatgaagtccttgataacccnccaacatcttaccattctccagcagactccaaggaagtttatttatttttctcccacttcacgacgtcttacatcaaacttgtttcaaagtagaggtaattcataagttcttatcattttttcttttcatttttttttgtccatttgtgatcactctgtgctttggtatttcaaaaatgagtagaactaactaccagagacagtagctttattacgtctgttgaaatgttgagtcggttaggaagagagggtaaggaagatatgcaagtatgtgtgcaattatttcaatgtataaaccgaagacaaattcttgatagaaatcaaatcatttttcatgtaactttaattatatctcgtcttctacgctcataaatttgatgtgcctctctctcttccagagttatgtcttcaaagataagaggacttatattgtttaaggaaccctcagaatttacatctcaaaatgtaagatggagattgtagtaacgtagataagaaaaagtaacctgtctagatttgttcttacaatctagaaacatgtcg

SEQ ID NO: 97358 - DNA, 420 bp, Arabidopsis thaliana columbia
  unsure (1)..(420): unsure at all n locations
gnccggnttgtttttcctttcttttngctaatnatcatcggtttcttctaatcaaaaaaaaaaacaaaaaaaaaagagggacaacgttcgtacaatcccatccttggtatggatttctggccggagtttatggcgaccagctggggaagagagttcgtcgccggtggtttcggtggcgtcgccggcatcatctccggctaccccttggacaccctcagaattcgccagcaacagagctcgaaatctggatctgccttctccattctccggcggatgctcgccgttgagggtcccacctctctctacagagggcatgggctgcgccttttgggcctccggcactttttcaagaatgctatggtattccagattttcgccggattctctcgctcttttgattcctctgttcctctggtagag

SEQ ID NO: 97359 - DNA, 560 bp, Arabidopsis thaliana columbia
cggtctgaatttaggcgcactatagaattactatgacgtcgcatgcacgcgtacgtaagctcggaattcggctcgagtgcgagaacaaggacgataatcacagaggaatcatctccacagatagagatatcaagagctctgctgttgttgttgatcctcctctcactcctactcgtggtggtacacctcgttgcagtcgtgaattcgctggagcttcttctgctttctctgggtgtgactctgattctaccgagaagaaaggtcaccctcttcctcgtcctttgctctctcctgtttcgatccatcatcaagatcatgtaagcggatccacttctggatctacatctgtttctagcgttagctcatctggatcagctgatgatcagagtcaacttgttgcttctaggggtcggggtgatgtgaaattcaatgtaccagcagcaccacgtagtcctgagagagtttctccaaaggcagctactattactactaggcccacgtctccacggcatcagcgtttgtctggagttgtgagcttagagtcttctacagggaggaat

SEQ ID NO: 97360 - DNA, 2396 bp, Arabidopsis thaliana columbia
  unsure (1)..(2396): unsure at all n locations
ctcactatagggctcgagcggccgcccgggcaggtaagtctcacctttcaattcaaaaccccttccatttttgtgattaatatgcctacttggtggggaagaaagtcctgcaagaacaaggacgataatcacagaggaatcatctccacagatagagatatcaagagctctgctgttgttgttgatcctcctctcactcctactcgtggtggtacacctcgttgcagtcgtgaattcgctggagcttcttctgctttctctggttttgactctgattctaccgagaagaaaggtcaccctcttcctcgtcctttgctctctcctgtttcgatccatcatcaagatcatgtaagcggatccacttctggatctacatctgtttctagcgttagctcatctggatcagctgatgatcagagtcaacttgttgcttctaggggtcgtggtgatgtgaaattcaatgtagcagcagcaccacgtagtcctgagagagtttctccaaaggcagctactattactactaggcccacgtctccacggcatcagcgtttgtctggagttgtgagcttagagtcttctacagggaggaatgatgatggaaggtcctcctctgagtgtcatcctttgcctcgaccacctacttctcctacaagcccttctgctgtgcatggttccaggattggaggaggctacgagacctctccttcggggttttccacgtggaaaaaagggaaatttcttgggagtggcacctttggtcaagtctatcttggtttcaacagtgagaaagggaaaatgtgtgctattaaagaggtcaaggtaatttctgacgatcaaacatcaaaagaatgtctgaagcaactaaatcaggagataaatttgcttaaccagctttgtcatccgaatattgtccagtattacggaagtgaactgagtgaagaaaccttgtccgtctacttggagtacgtgtcaggtggttcaatccataaactacttaaggattatggttctttcactgaacccgttatccaaaactacacgcggcagattcttgctgggcttgcctatttacatggacgaaatacagtacatagggacatcaaaggagcaaatatattagtggatccgaatggtgaaatcaagttggcagactttgggatggccaaacatgtaacagccttttctactatgctttcttttaaagggagtccttactggatggcacccgaggttgtgatgagccaaaatggctacactcatgcagtcgatatctggagtttgggttgtactattctggaaatggcaacatcaaagccaccttggagccagtttgaaggggttgctgcgattttcaaaatcggaaacagtaaagacaccccggaaatacctgatcacctttcaaatgatgcaaagaattttataaggctttgtctgcaacgaaatccgacagtacgtcctacagcttctcagcttctagaacacccttttctacgtaacacaacaagagtggctagtactagtttgcccaaagacttccccccacgttcctatgatggaaacttctcactgcagcctacaagggaaccctatccagggagactgagccatgataattatgcaaaacagccattgtctagaactataaagagcccgagcagagaaaacgtaagacctatcacatccttaccagtatctccatgttcaagccctttacgccaacttgggccagcatacaaaagttgtttcctgtcacctcctcacccgtcttacgcatttcctgggcaagacagtgggtacaacctagcagagtttgctgcaagccctttcaggatgaagaaagacgcaatgatggaaccatctagtttcaggactcaaacaccgaattcaccattgagatcaagactggtgtagaaatggagcaaagattgagagactgaaagccacatactataaacaaggcccaatgaccatgtataaaacagtgtctacccctagttttggccttctccttctcaacacccagggaaatatgaagttatgagaccttagttgtgtgtgtgtggagcatctcctagaagtggagatttttggaacaagaaggagaaatttggggggaaaacagaaagatgtaaagagaaacatgaaaatgaatacaaagttagtgtgagaagtatagatagtaagttgtgttgtcacacaaagataatattcaaccatttgttttcaacctacagtgtgaatatacttttcagaaagtaaattagttactcaaaaaaaaaaaaaaaggnnnnnnnnnnnnnnnnnnnnnnnnnnnnnnnnnnnnnnnnnnnnnnnnnnnnnnnnnnnnnnnnnnnnnnnnnnnnnnnnnnnnnnnnnnnnnnnnnnnnnnnnnnnnn

SEQ ID NO: 97361 - DNA, 372 bp, Arabidopsis thaliana columbia
  unsure (1)..(372): unsure at all n locations
caaaaactcatcctccaaatttaatacctcttccctcacaatctccaacaatggctgacgataagaagaagcggcacaagaagaagaagcgtactactggtaacaagaggaagatgaccactgagcagtcagaagcctttaagtcaatcaccgattggctcatcttaggttcttctccatctctctcctcttcctctgatgactttgccgtcagcatcaattctggttctctaagatgtggagagaaagttggtgtttgagcttcattctcattcaagatcgcagcgatgggggttctagtcaccttcaaaaggtcgtggggggggcgggttgtaaccaatggggggtaaaagtcctttttttnnacggggt

SEQ ID NO: 97362 - DNA, 633 bp, Arabidopsis thaliana columbia
  unsure (1)..(633): unsure at all n locations
nngtccgccaggacttgattcatataatcatttcccaagtgccatttggattggtgaccgtggagcgcaaattcatttgcgtgaaatgtaccccannatgaattgccattctagatatctnnacgactgagcgactagtgctataccataattcccagtctnctggcttcaaggtggcatttacctctaggagctgtggtttgtccacttgctgagactcctgaaggggaggaggtaccacttattgattttggctcaactggcatcatccgctgcagaagatgccgtacctatgtgaatccttttgtgacttttacagattctggaagaaagtggcggtgtaatatatgttcgatgcttaatgaatgtgcctggtgaatacttctcacatttggatgctactggccgaagaatggatatggatcaacgacctgagctgactaaaggcagtgttgaaatcatagctccaactgaatacatggttcggcctccgatgccacctatctacatcgtcctcattcatgtttcgatttcggctactaagagtgcaatgcttaaagttgttgctcaaagcaataagtcctgtttggataacctgcctggttatccatgaacccaaattggatttattac

SEQ ID NO: 97363 - DNA, 773 bp, Arabidopsis thaliana columbia
  unsure (1)..(773): unsure at all n locations
cattccgttnnnnnnnnnnnnnnnnnnnnnnnnnnnnnnnnnnnnnnnnnnnnnnnnnnnnnnnnnnnnnnnnnnnctttttttttttttttttggtccaagtatgatcaatcaatatgaagttttgtaaacactgaaatgcctctttaaggaatatcatcgacattcaatacaaatttccaaaagataacatgtcactagagtcgcaagcttgtaccaagtgaaattgaaatgcaaataggctagagaaactaagaaatgtttatagacactaagaataagtaccaaaccagaccattactggatttactctctcactgctatagaggtcattgggctgaatcacagaggaagaaggtgaaattcatgggacatgaagtcttcactgggtctgtaatacttgtctggtgagtacaagcgtaggtttgagacttggcttgtgtacaggcatgcgaatctttcccacctgatgagcaaatcgagaactctggtagccagttttcatcagttgcccccagaccttgtgaaacttttggtgacattctctttgagcttgttgatgactctgtcgtactttatctcttttagactctaagtccttgagcgctgataacatttcgagcttattattctcggtgatatcctcaaacctaatttaaagaacactcactttagagaccaattcaagtgatgaattttgtcttcaactgaaatacgcttatttctcatcaaaataagaaccttacgcatattcctcagttcccataaaagtt

SEQ ID NO: 97364 - DNA, 842 bp, Arabidopsis thaliana columbia
aaaacggcctcgataagctagatatccaattcgcggccgcttttttttttttttataagaaaaccctcatagctataaaagacgctgttaaatagattccaaaattccaaggaacatgattattacagaacacaactacagtttaatcaatggaaactcctaatgtgagttggctcagaacattgaacacacgacggtgaataagtgtcaaaagatttttccacttacgagttaaagcgtctcactctaccagatccagacccaaaagctcgaggtggtgcaaccatatccatctgcaatctctgtgaaggtaaaaactttcgagcttccatatacttgtacattcttctcgcatctttttcaaacccacccccttttcaacgcacttttagctttgtcaaactccgttagggtcccatttggtctctcttagcttcccaaaccccaagagcttgaagagtcttcttctcattcctcacacccgaatacatacagcacaagctcacctggagttcaaatggtggagcttctcctaactgagagatcttaaccagaagctgctcagcttcctcgataagcccaagattagccatccaattcaacaagaacggtgtaagtgatcacaccaatttcaatcccttctttctccagctgcaacaaaagtctcagtgccttatctaatgagttctctcccttataagctcggaccaaatttgcaatgcacttgtcatcgggtttgtggccaagctttctcatttcatcaaaattacttttcgctttatccacctgacctgctttcccatatgcttccacaaataaactatatgcttcaaagctcagtg

SEQ ID NO: 97365 - DNA, 363 bp, Arabidopsis thaliana columbia
gttgatatggttaccttcaacattaactctagtttatgagtcaaatagactctaatatttcatttgtgtaatacaggtttgggatttcaaaaagcgggaattaaagtcccagtgggatgtcggatgttcgttggttaaaattgtctaccaccgtgtaaatggtaaattttcctaatctaaccctacattttcacttgtacgatctcacaaatgtatcagtttccgtcattttctcctagggtaccaccgtattgactctgactttgctaatttcttatcaattggtaggtctcttggctacagtgccggccccccctgttatccgtttatatgatgttgtgacactaaagatggttcgtgaat

SEQ ID NO: 97366 - DNA, 918 bp, Arabidopsis thaliana columbia
  unsure (1)..(918): unsure at all n locations
tcaggttctactctaatggacggcacattttgtctgctggccaggatcgtgccttccgcctgttctctgtcatccaggagcaacaaagtatagagctttctcaaagacacatttgtaggcgagccagaaaactccgactgaaggaggaagagttgaaagtgaagcctgttgtttcatgtgattgcgctgaaattagggagcgtgattggtgcaatgttgttacttgccatatggctacagcagaagcatatgtatggagacttcagaactttgtacttggagagcatatcctcaaaccatgccctgagaatccaacaccaattaaggcatgtgcaatcagtgcctgtggaaactttgcagtagtcggaacagctggtggatggattgagagattcaacctccaatctggaatcagccggggtagttacttcgatatgtcagagaaaagaaggtacgcccctcgcggccgagttattggagttgcttgcgactccacaaacacactcatgattagtgcaggatatcatggggacttaaaggtttgggatttcaaaaagcgggaattaaagtcccagtgggatgtcggatgttcgttggttaaaattgtctaccaccgtgtaaatggtcttttggctacagtggcggatgattttgttatccgtttatatgatgttgtgacactaaagatggttcgtgaatttagaggtcatacagaccgtataacggatttgtgctttagtgaggatggcaaatgggtcatctcatctagcatggatggaagtcttagaatatgggatgtcatattggctaagcagattgatggtgtgcatgtcgatgtgccaataacagcattgtctttatcaccaaatatggacgttttggcaactgcccactctgatcagaacggngtctacttgt

SEQ ID NO: 97367 - DNA, 701 bp, Arabidopsis thaliana columbia
acaaactcgatttcccgatttcgtcgcctcttctcgtctctccgctctcctcgccgcgagtctgtttcgccgccgtctatctcccaattccgtgaccgttgttgtttagtgaatcgatgatttacactgctatcgacaatttttacctatccgacgagcagctgaaggcttcaccttcgaggaaagatgggatagatgaaacaactgaaatctctcttagaatctatggatgtgatctcatccaagagggtggaatattgctcaaactgcagttatggctactgggcaggttctgtttcagcgattctattgcaagaagtctttggctaaatttgatgtcaagatagttgctgccagctgtgtatggcttgcatcaaaactggaagaaaaccctaaaaaagctagacaggtcatcatcgtattccacaggatggagtgtcgcagggagaacttgccattagaacatctggatatgtatgccaagaagttctctgagttgaaagttgaattaagcagaactgaggagacatatactgaaagagatcgggttttcgttttgtcaatgttgaacatcctcacaaagttccatatcaaactacccttgccacatttaggaacaccctccagaatttgaggcaagaagctttggaatttggccaatgatagtctgcgtacaaccctctgtgtaaggttcagaagtg

SEQ ID NO: 97368 - DNA, 655 bp, Arabidopsis thaliana columbia
  unsure (1)..(655): unsure at all n locations
cnnanccangaacncgttcctccggcccgttacaaaanaccaattnagttncttttnaaccttcttgggcctngaaaccgccncagggcataaacttcncgggctcatcccaaaggncttgggccnctatggatggnccaagcgtttactagcacgatagtgccacgtggtatgccgtatccaccaatcttgagatcttcagatggagaacgtggaacaagaagtggtgcagctgganacaaccgaaaagtctcggaaactatgttttggagataaggtagattcgcaatgtcaggttcatcgaccaatctctcttctccaatcttctcgtctatctcagcttttgcctttttcaacacttcaggtttttttaataaatttgccatcgcccattccaatgttacggccgcagtatccgttccagctagcatcatactctatatacattaaattcacacacaagttgttagttcatctacacatgtacacatataatatctttataatataaatgtaaaaacataaaccatctttcttctttcagttttatgtttgcatttagtgagtccaaggaaaaaaaattatatttaaggtttatatgtatgagaatacttacgagcatgagccctttgatgatgacgtcactgtaatactt

SEQ ID NO: 97369 - DNA, 408 bp, Arabidopsis thaliana columbia
  unsure (1)..(408): unsure at all n locations
aaagcatataaaaaagagagtataaagagaataaagagaggattttttctatagttgccaaagcacaaaaaatccctgacgaaggctggacaatgcaggatggtactccctggcctggtaacaacactagagatcatcctggagtgatacaggtgctcttaggccatagtgggggtctggataccgatggaaatgagctgcctagactcatctatgtttctcgtgaaaagcggcctggatttcaacaccacacaaaggctggagctatgaatgcattgatccgtgtatctgctgttcttacccaattggagcatatcttttgaaacgcggattgtgatcattaacttttaaattaaccagttanggctnattaaanggnaggcttatggttgttttcaattgaatggg

SEQ ID NO: 97370 - DNA, 832 bp, Arabidopsis thaliana columbia
cttggccctcctcgaggtcgacggtatcgataagcttgatatcgaattcgcggccgcggtctggataccgatggaaatgagctgcctagactcatctatgtttctcgtgaaaagcggcctggatttcaacaccacaaaaaggctggagctatgaatgcattgatccgtgtatctgctgttcttaccaatggagcatatcttttgaacgtggattgtgatcattactttaataacagtaaggctattaaagaagctatgtgtttcatgatggacccggctattggaaagaagtgctgctatgtccagttccctcaacgttttgacggtattgatttgcacgatcgatatgccaacaggaatatagtctttttcgatattaacatgaaggggttggatggtatccagggtccagtatatgtgggtactggttgttgttttaataggcaggctctatatgggtatgatcctgttttgacggaagaagatttagaaccaaatattattgtcaagagctgttgcgggtcaaggaagaaaggtaaaagtagcaagaagtataactacgaaaagaggagaggcatcaacagaagtgactccaatgctccacttttcaatatggaggacatcgatgagggttttgaaggttatgatgatgagaggtctattctaatgtcccagaggagtgtagagaagcgttttggtcagtcgccggtatttattgccgcaaccttcatggaacaaggcggcattccaccaacaaccaatcccgctactcttcttgaagaggctattcatgttataagctgtggttacgaagacaagactgaatggggca

SEQ ID NO: 97371 - DNA, 377 bp, Arabidopsis thaliana columbia
gcctcactaatcatatcatcagcctcattgaggccatgcaacacggggtgattttattgatgtttcctcaatataacattgaaacaatgagtatcaacaacgcacttagtgttaggatacttagttgaaagattccttggaatatacatgcaaatgtcttcataatctattaataatgtggaaatttgcttatatattgttcgtatattcaattattttcagtaccaattactccgtgaagaaattgagaagttgaaggcagaggtaaaacacaattcatacttaaacttttttttgctttctctaaatgtaattacatatatatagagtcatcctgtatctcgttattaatacttcatataactgttccttgtcaa

SEQ ID NO: 97372 - DNA, 504 bp, Arabidopsis thaliana columbia
  unsure (1)..(504): unsure at all n locations
cnnnnnnnnnnnnnnnnnnnnnnnnnnnnnncagaaancagaaagcaaaaacagaanggggnattantncctcctcgcctccgaattgatccaacaaatgaaagattactcgaagatcggcgataaacttgtgatgcagagacctagacgacgtttggaaggcaccgccatgggcgccaccgtgttcgatctccgtcccggcgtcggcatcggacctttctctatcggaatgccgatttgtgaagcatttgctcaaatagagcagcagcctaacatatatgatgttgttcatgttaaatactacgacgaggatcctttgaaactggatgttgttattagctttccagatcatgggtttcatcttcgatttgatccctggtctcagaggttacggcttgttgaaatatttgatgtcaagcggcttcagatgcgctacgccacttctatgattgggggtccatcaactctggcaacgtttgtggctgtttatgcactgtttggacc

SEQ ID NO: 97373 - DNA, 1080 bp, Arabidopsis thaliana columbia
  unsure (1)..(1080): unsure at all n locations
acgaaaacctagcagccgctgagctctatctactcaacttcaccatggaccggaggctcaagaaatgctcgacatccaccgatgttgaatcagttcatgatgttagtaaggtcacggatcctttgcagaaagctaagagagagttggataatgtggaaatcaaagaaaaacagaagaagcagaagaaccaaaatgaaacatctgagaaggaaactaaaaaattcagcaccgtttacgaaaagtttaatgatactattaaagaactagacagggtttctggaacatgtcccatacgacctgccattccattcacgcccccaaaggaaaaggtggaaccgatatatcacaatgagtgcaatttcgatgataaagctcatctgggagtatctgacagcgccctttttgtacaaggatttgatacttcccatccaaggcatgaaatcaagacagcattgtggaatcatttctcttcatgtggggttgacactcaatggaagtcatttgggaggacggaagatcgatgttatgttcgccatagatagagaagagttttacttctcctctaacttaaaacactgtcaacgctgccgtaattataggccatggcttgttttaaaagccatgtcagatgcctgctttgaatatcaccagaggattaaaccgcggatcgttggcactccccatagcaagattggtcgttttacagccattattggtcgtcgctcttacagctagtatttggtcctttttaccgttgctgctaccttgttactccaccagctacatgattttaggtctaagtagagttgtgtctttatgattttaggagttttaaagtctttttcttacatgactggcgtgattagcaagcatgttctctattggtgattgatctcaaacgtaaagaaaatagtaaccgaatactcaatttatatctgtttgactttaatgacatccgtattttcaaaaaaaaaaaaaaagnnnnnnnnnnnnnnnnnnnnnnnnnnnnnnnnnnnnnnnnnnnnnnnnnnnnnnnnnnnnnnnnntcaacggaaatgcacctcaatttttttctttttc

SEQ ID NO: 97374 - DNA, 464 bp, Arabidopsis thaliana columbia
  unsure (1)..(464): unsure at all n locations
aaattggtgaaaattattacttgtgtccaaagttactgcatttttagggtgtggttatatcatattcattgtaagagagttgctgaatcaccccaaaaggagttggattgaacaaatagtatatcaaggtcctacatttatttttctaaacatattatcacaagtgatttagacaagagagtttaacgaccctaaagaatatattatgagatcacaagttccttgcaagagaagattacatgacagatcctaagtgtccagagatctgatccaccaagaatctaattgagtgtgcaatgaaacacactgctaagcatctgctcgttgctgattcagtcatcactttaagagcaactgcgntttgaggttaaaacgagcatatctacgatgaaggatcacagaaactggggaaattcccngaccggcatagcaaataggaaaggtcttgacgtaactcggggttt

SEQ ID NO: 97375 - DNA, 496 bp, Arabidopsis thaliana columbia
cgaccacgcgtccgaaggaacaaaggtgaggtttcagacacagacagaacaaacaacgaagaaaattcaaaatcttatttcaattcaacgtatactttccttaaattaggaatttggttttcgagaaaattgagatccgaataactatggtgagactcaagacgagtctctgggttcttctccttgccctcgtttcaattcagttaaatggttcgtttggatctgaatcaagtaaagtagcttatgtcacacttttgtatggagatgagttcttattaggagttagggtattgggtaaatcgattcgtgacactggatccactaaggatatggtcgctttggtttctgatggtgtctcagactactctaagaagttactcaaggctgatggatggaaagtagagaagattagtttactggcaaatccaaatcaagttcatccgactaggttctggggtgtttatacaaagcttaagatctttaacatgactgatta

SEQ ID NO: 97376 - DNA, 599 bp, Arabidopsis thaliana columbia
tgggccccccctgggtcgaggtatcgaaagcttgaatcgaattcgggccgcgtgcctcaagcttctcctagatttgagatttctaatggaaccggttctggtttggtggctacggttaaccgtcaacaaccggttagtgttagtgattttgatcagagatcgaggtatttggatttagctcttgcggctatggatgagcttgtgaagatggctcagacacgtgagccgctctgggttcgaagctcggattctggttttgaagtgctgaaccaggaagagtacgacacaagtttctctcggtgtgttggaccaaaacaagatgggtttgtctcagaagcttctaaagaagctgggactgttatcatcaatagcttagcgctcgttgaaaccttaatggactcggaaccggtgggcggaaatgtttcctagcatggtctcaagaacttcaaccacagcgattatctctagttggcatgggagggcgaaatggtgcacttcacctgatgcacgcagagcttcaactgctgtctccactcgggccggtaagacaagtgtcgttcttgcggttctgtaaaaagcacgcggaaggtgtctgggca

SEQ ID NO: 97377 - DNA, 611 bp, Arabidopsis thaliana columbia
  unsure (1)..(611): unsure at all n locations
tcagaaggagagagacgccatcactgaatgagtttcggtcaggtgatagtcgtgttttgataacaacagatgtatgggcacgtgggattgatgtgcaacaagtttctcttgttatcaattatgatctccccaacaaccgtgagctctacatccatcgtattgggcggtctggtcgattcgggcgtaagggtgttgcaatcaactttgttaaaagcgacgacatcaagattctcagagacattgagcagtactacagtacccagattgatgagatgccaatgaatgtagctgatcttatctaaaagagcttgtctgagatttttgtgctttcagcgggggaagtgtctggcatgaaaaagtatttggttgagcgcttctggcaaaattattgcacctatccttaccgggggaatttcccttgatggttctgtggggccctttgacaaaccttaacccncggggggggaaaggttaaaggccttgagaaccgactttgggttaggggttgncccgctcgggttccggtcccccgaattactccccgggggttaattggggtttggggaaaccccccaccccctgaaaccttccccagtgangggcctttacng

SEQ ID NO: 97378 - DNA, 1797 bp, Arabidopsis thaliana columbia
  unsure (1)..(1797): unsure at all n locations
tacgacccactatagggttagctggtacgcctgcaggtaccggtccggaattcccgggtcgacccacgcgtccgaatcgaaaaccctaggagagataaaaacaaaaatctagacggagatttatggcgacagcgaatcctggccgtggaggtggtagaagaggcggtggagctatggatgacgataagttggtcttcgagactaccgatggaattgagcccatcacgagcttcaatgatatgggcattaaggaagatgtgcttcgcggtgtctacgaatatggattcgagaagccttccgcgattcagcagagggctgttatgccgattcttcaaggacgtgatgttattgctcaagctcagtccggtaccgggaagacatctatgattgctctctccgtttgtcaagtcgttgatacttcttctagagaggttcaggccttgatattatccccaacaagagagctggctacacaaacagagaagacgatacaagctattggattacatgccaatattcaggcacatgcttgcatcggtgggaatagtgttggagaagacatcaggaagctggagcatggtgttcatgttgtgtctgggacacctggtcgtgtctgtgacatgataaagaggagaagtcttcgtaccagagctattaaacttctgattcttgatgaatcagatgaaatgctgagcagagggttcaaggaccagatctatgatgtttacagatatcttccaccagatcttcaggtttgcttggtttctgcaactcttcctcacgagattttggagatgacatccaagtttatgacagaaccagtgaagatacttgtgaagcgtgatgagttgactcttgaaggaatcaaacaattttttgttgctgttgagaaggaagagtggaaatttgatacactctgtgatctttatgacacgcttactatcactcaagctgttatcttctgcaatactaaacgaaaggtggattatcttagtgagaaaatgagaagtcacaacttcactgtctcatcaatgcatggagacatgcctcagaaggagagagacgccatcatgaatgagtttcggtcaggtgatagtcgtgttttgataacaacagatgtatgggcacgtgggattgatgtgcaacaagtttctcttgttatcaattatgatctccccaacaaccgtgagctctacatccatcgtattgggcggtctggtcgattcgggcgtaagggtgttgcaatcaactttgttaaaagcgacgacatcaagattctcagagacattgagcagtactacagtacccagattgatgagatgccaatgaatgtagctgatcttatctaaaagagcttgtctgagatttttgtgctttcagcggggaagtgtctggatgaaaaagtattgttgagcgcttctgtcaaattattgcactatcttaacggtgtatttcctttgatgtttctgtgggctcttttgaacaaacttaaactcgcgtgtggtaaatgtttaatgacttgagaagcgatttaggtttagggtttggaccgtttggtttttcgtttcctcgtaattgattctgggggctttgattgtggtttgtgggtcaaaactctcaactatcactacttgtaagacttttgctcgacagttgaaacggttcattgttatcttatttcgtaaagcttggatcattgcnnnnnnnnnnnnnnnnnnnnnnnnnnnnnnnnnnnnnnnnnnnnnnnnnnnnnnnnnnnnnnnnnnnnnnnnnnnnnnnnnnnnnnnnnnnnnnnnn

SEQ ID NO: 97379 - DNA, 463 bp, Arabidopsis thaliana columbia
  unsure (1)..(463): unsure at all n locations
ggaatcatatagatctcttgaaactagatcatcggagctggaaatcgagnngacttctcttaaaggcaagatcgaaaacttagaagatgagcttcacgacgtgaaggaaaatcatcgagaagctgtagccaaatgccaagaactcgaggagcaattacaaaggaacaaccaaaactgcccgaattgttcagtaatcgaagatgatcctaaaagcaaacaggacaatgaactagcggctgctgcagagaagctagcagagtgtcaagagactatattacttctcggggagcaactcaaatccatgtgtcctcaaacagaaccacggttgcttcttcttccaaggccaaggacaacaagccctaaaccctgaagaagaggaatacgcaacttccacaaatcctcaagacagcaaattgagttcgccttcagacaaggatacaccatcgatgaatacaatgaaatt

SEQ ID NO: 97380 - DNA, 652 bp, Arabidopsis thaliana columbia
  unsure (1)..(652): unsure at all n locations
cccncccctcgnganttgggaagtggccgaagataaaaaaanccaagtacccccgntgttggannccctctcatggacggggnttgggttcaaaanncnaacaacctccttcagctgtgaaaaaaatggctctagttgtaacctgggtggggatgcgaagacgccttgttcactttgcttaacttcatttggccccaacaanttttgagacatctcctcacgtcattaacgcagtgatggaacccattgaaggaatgcgagtcgcattaggagcagctgtaattctgaactattgcttgcagggtttgtttcatccggcgcgcaaggtnccgcgaagtgtactggaaganatacaattctttatacantggtgctcaggacacccttgttgctgcttacccggttcttgaagacgagcagaacaatgtgtatagccgaccggagttgtcgatgtttgtgtgaaagaaagattctggattcgatgtgattctattactctctagtcacctgtagttgttggtattgttggctttattgcaaaggtttgctttgtatgaaacacagaaacgtttcttttctttttctgataactaggaaacctatgttcactnttggttatttcttattggcctaatttcttaaggctnagaac

SEQ ID NO: 97381 - DNA, 507 bp, Arabidopsis thaliana columbia
attcaatctacgttagccttccttcagatcaagacgacgacgttttaagcaacaagatgcagttaggtcagtttatctacgttgatcggcttgatccagggacacctgttccgatcatcaaaggtgctagaccgattcccggacgacatcctttacttggaactcctgagccattgatgagtacaagaggaaagattgagagttcgagacctagaagaggttcttggggtcaaaacggtgacgtttcgtctccgtttgtgttaaagcctgcacctttggattttgatcagtgtacgccggcgaaacataggcttggtacggggagatttatggcggcgtctccgaatgttatgactagagggaggtcacctggtggtgttagatgttcttatggtggagggcttttgtcgaaaatggcggagagtcctgctgcaatgatgaggaagagctgtgttgttccgccgagttcgaagtttccgagaagtaaaagtgtttgcgatagagaga

SEQ ID NO: 97382 - DNA, 419 bp, Arabidopsis thaliana columbia
  unsure (1)..(419): unsure at all n locations
attcaatgtagatgcggctttcgaatgcattaccaaaaatgctttcaagaatgaacctgaagaagaaccgtcccttcccgataccattgatgttgccggaggtcagcaacaaagatcaacagggtgtgaatgctaatcaagcaaaagtttgttgcagatacattgttttgtttggcacactcccattttgtaacaatatatttataacttccagaaatgtattttcagattcattttgagttacagattgtaatgaattgggttcctttttcttttggactctatactgataccaaaatccaacttaatttcgtttcaaaaaaaaaaaaaaaaaacaaacccaaaaagcggccgctctagaggatccaagcttacgtacgcgtgcaggcgacgtcaagatcttctatagttgtacctan

SEQ ID NO: 97383 - DNA, 416 bp, Arabidopsis thaliana columbia
attttcaattgcttctctcttctctcttctatagccccattgtcgtgggttcccactagcagctttcttgtcttcctccgttttcttttccttcattctactaaaacagaggtttttgcctcttcctctcttgtttcactctttagggtacacacaaattcactcttttttcttctttgtttgggaggggaaaagttacagttttttcctctgttttggatcaaaatttcgtttttttggttgtgttaagaaagcaacagagagagagagaaagattgaaactttggatgtgaatttagggttttgtgaattggggaaaaagcaatccagagatggctcaacagagacaatttcagatggaaggtggtaataataatacaacagataccaagttgacgaaaatctttgttggagga

SEQ ID NO: 97384 - DNA, 480 bp, Arabidopsis thaliana columbia
  unsure (1)..(480): unsure at all n locations
ctctttaattatcttcgatttaagagattctttcgccgtcggcgaagatgctacagcatcagatcgtacaatctccggcgagattagggttaacaggtcctggctctccttccgtacaaaatccgacgcctactcgtcatggccatccaacctcttcttcatcttcccaatctcagcaccaacagatccaacaacagcctaatctacttccttcctccaccgtcgccgccgcttcctcagcctcagcttcggcggctgtttcatcctccgccttgctatcgctccttcctccattaccgcgagctcaagctcttctccagcagatggcggttttannatctaagctcttcgacggctntcccaatcggagctatctgggtctnagnttttccgtggntttttcccttngtncttttcntaaaattggtaccacctncggcggnggttnaaaacctagtcctttattcanggaggngatct

SEQ ID NO: 97385 - DNA, 693 bp, Arabidopsis thaliana columbia
  unsure (1)..(693): unsure at all n locations
nnnnnnnnnnnnnnnnnnnnnnnnnnnnnnnnnnnnnnnnnnnngcacgcctgcagggacccggccggaattcccgggtctacccacgcgtccgattttctccctcaaaagtctctgttttttttcctttttccggcgaagctctatttagcttgattccggcgtttaacacgcgttttaatcgaaacagacatttgagatcgaattaattttgtagcgggctgtgtctttattatagatggagagagattttctcgggttgggttcgaaaaattctccgatcactgtcaaggaggaaaccagcgaaagctctagagattcagctcccaacagaggaatgaactggtctttctcaaacaaagtatcagcttcttcttctcagtttctatccttcaggccaactcaagaagatagacatagaaagtctggaaattatcatcttcctcactctggttccttcatgccatcatcagtagctgatgtttatgattcaacccgcaaagctccttacagttctgtacagggagtgagggatgttccctaattccatcaacacggggaacactacgcagtttcccatggcgatgccgggttccagtctcatcattatgcaccatgagggagaagcttcatgaacattaccattaactcacaacctttggtaggagttcctatcatggcaccctccaattt

SEQ ID NO: 97386 - DNA, 287 bp, Arabidopsis thaliana columbia
attaggtacaacttcatctttcgaggttgattagggtttttattcgaagctgttgtatagttctttaaattggtaatttatcttttattgtctccactttatggttatcttgacacattctcccatttacttgtcctaattttctttcatcgagcgtagggctttaatttgtccaagttgttattgaatttttaataagcaaagctcacatgtacgaaacactcaacgtgttacttcatgcacgttgccaaacagtacgatagaaaattgaaattcaccatccaaaa

SEQ ID NO: 97387 - DNA, 527 bp, Arabidopsis thaliana columbia
acgactcactatagggaaagctggcacgcctgcaggtaccggtccggaattcccgggtcgacccacgcgtgcggtaaagtgctctctccccaatggctaatcaccaccgacttttacgcggcggcggatctccggccataatcggtggcagaatcacactcacagctttcgcttccactatcgcactcttcctcttcactctctccttcttcttcgcttcagattctaacgattctcctgatctccttcttcccggtgttgagtactctaatggagtcggatctagaagatccatgttggatatcaaatcggatccgcttaagccacggttgattcagatccggaaacaagctgatgatcatcggtcattagcattagcttatgcttcttacgcgagaaagcttaagctcgagaattcgaaactcgtcaggatcttcgctgatctttcgaggaattacacggatctgattaacaaaccgacgtatcgagctttgtatgattctgatggagcctcgattgaagaatct

SEQ ID NO: 97388 - DNA, 575 bp, Arabidopsis thaliana columbia
atcatcatcaatcctcatccctccgattctcacccgtcgtaatctcctcctctccaccacaatcgccaccgtaactccaccaccaccagctaaaccaccttcccccgacatcacaataaccgatcgagtcttcctcgacttctccctctgccccacctacttccgctcagatccctccgcgacactctcctccaccacaccttgctccgattcaactcctctcggccgcgtcgttctcggattatacggccgtcacgttcccataaccgtctcaactttcaaacgtatgtgtacttcatcttccacatcttacaaaaacacacctgtccacaaaatcttccctggtcagtattttctcgccggaagacaaggaggaggacggcgagatacggcggaggtttggttattcactcaggggcttaccttgtaacaccggcgttgttaattccaagggttttttacttccccaaaggtgcgcggctggtgttgcttctctctggttatctgagaatgatgatgatgatgatattagactcgatcctgattatagaaatgttgaattcttaatcactact

SEQ ID NO: 97389 - DNA, 812 bp, Arabidopsis thaliana columbia
  unsure (1)..(812): unsure at all n locations
tgcaggtaccggttcggaattcccgggtcgacccacgcgtccgggtcaagaagaggaggcttcacggctatacgaggaaattgtgaaaaaccacaatagcacagatgctctggttggtcttgtgactacacttgctcgtgtcaatgttgagaaagcagaaagttatgagaaacagcttaagcccctaccaggtttgaaggctgttgatgtggataaactagaaaatacctatggtgcaaaacccattgaaggcgctgctgcttcatcgagtcaggaagaagtgaagaaagaaaaggcgaagaggaagaggaagagaaagccaaagtatcccaaaggatttgatccggcaaacccaggtccacccccagaccctgaaaggtggcttcccagaagggaaaggtcaagttacaaacccaagaggaaggacaagcgagcagctcaaatccgtggctcgcagggtgcggtgaccaaggataaacaagaagcagctccttcaacttcaaagtcaaaccaagtggccagttctaaagggaatgcacctgcgccttcctctaaggcctcaaaaaagaagtctagaagatgaacgaaacaaccctttaagattgtttcatctgttctgagaaaacaaaaacaaagagtacttagccccaaaatttccattgttctttttctttttggattcatcaagttttagttgtcttgacccatttaagattttggttaattttttgtttcacagccaaaccccaaagggcgaaggctttagaggatccaagcttagnnnnnnnnnnnnnnnnnnnnnnnnnnnnnnn

SEQ ID NO: 97390 - DNA, 1066 bp, Arabidopsis thaliana columbia
  unsure (1)..(1066): unsure at all n locations
acggacgcgtgggatcactttcgaaattacatttacgctttcttgcaatcaaattttccgatcttaagttcagaagacgatgtcagaggtggaaatagagaacgctgctacgatcgaaggaaacaccgctgcggatgcgccggtgacggatgcggccgttgagaagaagcctgcagcgaaaggacgaaagacgaagaatgttaaggaagtgaaggagaagaagactgttgctgccgctccgaagaagagaactgtttcatctcatcctacttacgaagagatgattaaggatgcgattgttacgttgaaagagagaactggatctagccaatacgcgattcagaagttcatcgaggagaagcgtaaggagcttcctccaacattcagaaagctgttgcttctcaatctgaagagactcgttgcttctgggaagcttgtgaaggtcaaagcctcgtttaaactcccatcggcgtcggctaaagcatcatcccctaaggcggcagcggagaaatctgctcctgcgaagaagaaaccggcgactgtggcggttaccaaggcgaagagaaaggtcgctgcggcttccaaggctaagaaaacaatcgccgttaaacctaagactgctgctgctaagaaagtgaccgcgaaggctaaggctaagcccgttcctcgtgccactgctgctgcaactaagaggaaagctgttgatgcgaagcccaaggctaaggctagaccagccaaggcagccaaaacggccaaggttacatctccggctaagaaagctgttgctgccacgaagaaagttgctacggtggccacaaagaagaagactccggttaagaaggttgtgaagccaaagacggttaagtctccagcaaagagggcttcttctagggttaagaagtgaagttagggtttgtaggtagaagaatggttaacgatagtttagacttgtataattcaatcatcttttatgcgacttttggttgcttttcttccctttcaagtgttccttgttattccacagttcctttggactacccccttaaacttaaattntnggtttttt

SEQ ID NO: 97391 - DNA, 655 bp, Arabidopsis thaliana columbia
  unsure (1)..(655): unsure at all n locations
ccggnaaantggngtcancncattgngggaatctggcccaggcacagatncctgatagngggatttagagttancgtancaatggttctgcnctgggagaaagancntgncctttttggtgtccttaatgcgaatctttcgtgcttgcttccaccggtttgtttcagacggtagagaagcaatcagggaggaggatacatgcttcggtcaaggtagagcagaaataaataagagagaggcaatagcaaaagtaaaggagaaggttttcctcaaattggcattttcagagtttgcgtgagaaacaagggaaagctgatggatctttttatgttagggttattataatagtcttaatgatcagtttccatgtttctaaggttttgtttgatttaagtggttattagtcagtctacttacactacttttattttcatttttgtacgttttctattgttatatgtgaattcggatcacatgtgtttggacagaagtaactatgtcattataatagaatcttatgccaagagacttggtgccggaaaaaaaaaaaaaaaaaataacgtacgcgtgggcggacgcgtggnnnnnnnnnnnnnnnnnnnnnnnnnnnnnnnnnnnnnnnnnnnnnnnnnnnnnnnnnnnnnnnnngtagctg

SEQ ID NO: 97392 - DNA, 2998 bp, Arabidopsis thaliana columbia
  unsure (1)..(2998): unsure at all n locations
nnnnnnnnnnnnnnnnnnnnnnnnnnnnnnnnnnnnnnnnnnnnnnnnnnnnnnnnnnnnnnnnnncttgtcgcgtgggcggacgcgtggggttacaaagcctttcaaaaacctcactctctcaactctcaaaccttatctccttccttctcttctcctctcctctccgtcgagcttactatctccacaaaatggcgtcgacggtaggagttccatcactataccaagttcctcaccttgaaatctccaaacccaattccaaaaagaggtctaattgtttatctttatctctcgataagcctttcttcactcccttatctcttgttcgtagaactcgtcgtatccattcctcttctcttcttgttccttctgctgttgctactcctaattctgttctcagtgaagaagctttcaaaagtcttggtctttctgaccatgacgaatatgaccttgacggcgacaacaacaacgttgaagctgatgatggtgaagaactcgctatctctaaacttagtttgcctcaacgtcttgaagagtctcttgagaaacgtggtatcactcatctcttccccattcagagagctgtgttggtacctgcactgcaaggaagagatattatagctcgtgcaaagacaggaactggaaagactttggcttttggtattcctatcattaaacgtctcactgaagaagctggagactacactgctttcaggaggtctggtcgtcttcctaagttccttgtccttgcgccgacccgagagctggctaagcaagtggagaaggagattaaggagtctgcaccttatttgagcactgtttgtgtgtatgggggagtttcttataccattcagcagagtgctttaactcgtggtgttgatgttgttgttggaactcctggaagaatcattgatttgattgaaggaaggagtcttaaattgggagaagttgagtatttggtacttgatgaagctgatcagatgcttgctgttgggtttgaggaggccgtggaatcgattcttgagaatcttccaactaagcgacaaagtatgcttttctcagcaactatgcctacttgggttaagaagttggcgaggaagtaccttgacaatcccttgaatattgatctggttggagaccaagatgagaagctcgcagagggtatcaaactttatgcaatcgcaaccacatcgacatcaaaacgcactattctaagcgaccttattacagtgtatgcgaagggtggcaagaccattgtttttacccaaactaaaagagatgcagacgaagtttctcttgcattgtcaaacagtatagctaccgaagcacttcatggagatatatctcagcatcaaagagagagaacactcaatgctttccgtcaagggaaattcaccgtattagttgccactgatgttgcatctcgtggacttgacatcccgaacgtagatctagttatccactatgaacttcctaatgacccagaaacttttgtgcaccgttctggtcgtactgggcgtgcagggaaagaaggctctgccattctcatgcacaccagcagccaaaagagaacagtgaggtctctggagcgtgacgtaggctgccattttgaattcattagcccaccaactgttggagacttgttggaatcgtcagcagaccaagtggtggccactctaaatggtgttcaccctgactccataaagtttttctcagcaactgctcaaaaactatatgaggagaaaggaacagatgctttagctgcagctctagctcacctgagtggtttctctcagccgccttcatcaagatctctcctcagccatgagaagggatgggtgactttgcaattgatccgagatccaacgaacgctagaggctttctgtctgcgaggtctgttactggttttctttccgatctttaccgtacagctgcagatgaagttggaaaaatcttcttgatcgccgatgacaggatccaaggagctgtatttgatctaccagaggagatcgcgaaagagctcctagagaaagatgtccccgaaggcaacagtttatccatgataacaaagttacctccacttcaagatgacggaccatctagtgataactacggacggttctctagcagagacaggatgcctagaggaggaggaggttctagagggtcaagaggcggtagaggaggatcatcacgaggccgtgatagttggggaggtgatgatgacagaggtagtagaaggagcattggtggaggaagcagctggtcccgaggtggtagtagttccagaggaagttctgatgattggttgatcggtggcagaagttcatcaagcagcagagctccttcgcgggagagaagttttggaggttcatgcttcatttgtgggaaatctggacacagggcaacagattgtcctgataagagaggattttagagttatcgtagcaaatggtttctgctcttgggagaaagatccttgtcctttttggtgttcttaatgcgaatcttttcgtgcttgcttcaacggtttgtttcagacggtagagaagcaatcagggaggaggatacatgcttcggacaaggtagagcagaaataaataagagagaggcaatagcaaaagtaaaggagaaggttttcctcaaattggcattttcagagtttgcgtgagaaacaagggaaagctgatggatctttttatgttagggttattataatagtcttaatgatcagtttccatgtttctaaggttttgtttgatttaagtggttattagtcagtctacttacactacttttattttcatttttgtacgttttctattgttatatgtgaattcggatcacatgtgtttggacagaagtaactatgtcattataatagaatcttatgccaagaaaaaaaaaaaaaaagggcggccgctctagaggatccaagcttacgtacgcgtgcagtcgacgtcatnnnnnnnnnnnnnnnnnnnnnntcgtcctaaa

SEQ ID NO: 97393 - DNA, 394 bp, Arabidopsis thaliana columbia
acttcatgttaattccagaacgatctgaaaaatattccataaatcaattttatttaacaaatgcaaaagccattagtacgtaaaattaacctataaaaaaccagaggttatttattgtcttgatttttgatctgcgataacatctgctgagttttgagttatacaaaccactcaagtctcaacattgagattttttcaggtccatttggataaaacaatagttgaaacccataaagatagtgcgcgtcaaaagtaaattatacattgagactcaaactgtgaaaacgatcggatacaaattacatgtcaattattattacttaaagttcattttatagcaggtataccaaaaagttaagtccaaattcgcagttttagaggaattttttactac

SEQ ID NO: 97394 - DNA, 390 bp, Arabidopsis thaliana columbia
gttaatggtgaaagggacaccttacgataatgtagatgacttaggtgatagggaggatgatgctggaccgttgatctctgagaatgtgattggagtcgttcatgatcatttcataacgtttcatctagacatggatattgatggaccgatgaataattctttggttaaggttcatctagagaagcagagagttccaacaggaaaatcgccaaggaagagttacttgaaggtcaagaagtatatagccaagactgagaaagatgctcagatcaagttgagcctatatgacccatatgaattccacattgtgaacccgaaccggaaatctcgggtaggaaacccggctggttacaggatcataccgggtggtaatgcagcgagtttgcttga

SEQ ID NO: 97395 - DNA, 823 bp, Arabidopsis thaliana columbia
  unsure (1)..(823): unsure at all n locations
aacttatcgaaatttttttaaaaagtatctaaccaaatgcaatagaaaacaaaatatgtgacgacaaatataaaaagtgtttttattaaagataacattaaagaaaacaaaaaggtatttaaagctaactaaaacacgtcattaaaaggcatgtaaatattgggaaattggatggccgtgacataaaattcctnaccaaaggaaaaaccggacaccgaatcttgttctcccaccgatcaccaccggagatatggaatcgccgattactcaaccccaaatgtttagattgcagtttcttcgtcttcttcatagtcgacgatcaccccaagttccattaatagccgattcttcaaatcctatcgagaatcctctctttcaagctgatgttccttctaccacagcaatagagtcttgtccaaaagaaaacattggtaagttaaaagatatgcttaaagaagaaaacattcatttgcacactgaggattcagagcaagggaaattacctttgcttattttaagcttgaaagagagaagtgaagaaaaaaggccagcgattgtgtttatgcatggcacaaacacaaacaaagnattggttaaggccatggcttgaagcatatgcttcgcggggatatgtagccatcggtttagnctctcggtaccncggtgaaccggcttgtttcaaaacttcatatcgnggtgntcttatatcancttngggnaatnggacactttgnctttagctttgancctnatggggttgtcnaacngntgattctncccaggggtnttngcccaaagntgggnccggntncctgggggntgc

SEQ ID NO: 97396 - DNA, 506 bp, Arabidopsis thaliana columbia
tatacgactcatatagggaaagctggtacgcctgcaggtaccggtccggaattcccgtgtcgacccacgcgtccgtacggctgcgagaagacgacagaaggggacacacgagaagttagttaagcagcaacaaaaaaaaaacatggagaaacagaacattatctcaaacacttcttcttcgtcttcttggattcgtggttcttgtgttggaagaggttgttttggtacagtaagcaaagctttgagtaaaatcgacggtggacttttcgccgtgaagtcgatagatctcgccacgtgtcttccttctcaagcagagtcgttagagaacgaaatcgttattctacggtcgatgaagtctcatccaaacatagtgaggtttctcggtgatgatgtgtctaaagaaggaacggcgtcgtttcgaaatcttcatttagagtattcaccggaaggcgacgctgctaacggtggaatcgttaaggacacgccttctcagggttacgtgtggt

SEQ ID NO: 97397 - DNA, 842 bp, Arabidopsis thaliana columbia
aaggcttatattcgtgatctaatctctccatctgaatacgaaaccgagtgccagaaactcattgttcacttcaagacattatctgcatctctcaaagatatggtcccaaacattgagagatttgcagagacgtacaagatggattgctcagctgcagtttatcgccttgtgacttctggtgttccagctactgtggagcatagagctgctgcttcggcttctacatcaagctctgcttctgtggttgctgagtgtgttcagaacttcatcacttccatgggttctttgaaactcaacatggttgctgttgatcaggtgtatccgttgttgtctgatctctcggcttctcttaacaaactaagtatattgccaccagatttcgaggggaagattaagatgaaggaatggcttttgaggctgtcaaagatgggagcttcagatgaactcactgtgcaccacgctcggcaacttcactttgatcttgagtcatcctataactcgttcatggctgctttgcctaatgctggtaattaaccgatgtgccactagagactgatgtgtgttcggtttattttgtttagtttggctttatgtagttataatgatggctttaggaacaaagatttttgtttcatgacaatttgctacatatattttggggatgaatggtcgtagaccaaacaagcttttccttttgttgtgtaaaagatgatgccaatccagaaattgtttttttcatgaagtgtaatgtatgaatctaactcttttgtgctgattattggctttatatcgttacatgggtggctttataaaaaaaaaaaaaaaaaaaaaaacggcacgag

SEQ ID NO: 97398 - DNA, 489 bp, Arabidopsis thaliana columbia
  unsure (1)..(489): unsure at all n locations
tcgtttttcctctctcttctctctcttctctctcttctctctacttagctgcctcgcttttgctccttttacctctttccatctttcaatctcctttgagagagagagcaaatgaaaaaaacccaaaaaactcttttctccaaccattaccatctcatgaacactctcacaggaggctctctcttctcagagagcctacccatctaatatttcttcatctgagtctcttttacttctctcaaagtatcgatctttattcttctttttgtaaaccctctctctctctctgatttctactgacctgtttggaagatatgatggctcatcactccatggacgatagagactctcctgataaaggatttgattccggcaagtacgttagatacacgccggaacaagttgaagctcttgagagagtttatgctgagtgtcctaaacctagctctctgagaagacaacagcttattcgtgaatgtcncattctct

SEQ ID NO: 97399 - DNA, 631 bp, Arabidopsis thaliana columbia
  unsure (1)..(631): unsure at all n locations
taaaangggaagcttttcccngcnaaaaaagnttnagcccttcgncnaaaccgcgcccccggantaccctttattacaggnaaaccttaacccccttanncgttttccganggttnattcccaaaanccntaatccnctaccgccgaanaaacctnnaggttccggtggcaatttccttaaccctcancgcncgaaaaattataaataccttctttgccaantttgaaaanctaattcccanggatcatcaccagcaagcatcaatatctccttcatcatcaagtgaagacaacgatccttttgtctcgggcaagaagctgtccttgaatctcaagcatctcctcaagctcatcaatcagttcatcgtaagatttcaacagtgttaaatcaaccgcacgaccaaccgcaatgccttgcatttgcactttagttcgacttcttgatgtttgttgcttcttctgctcactcattgaggttggagtgatgggttcttgacacttggcagctccacaagtatccatcggttgcttgtcttgagggattggagcaggagaattgcttgtgagatcaaatccaaacaacctatagctacaattcgttggaggaggaggagtctcgggtttgaagctg

SEQ ID NO: 97400 - DNA, 1460 bp, Arabidopsis thaliana columbia
  unsure (1)..(1460): unsure at all n locations
gttttagattgttgtaagactttcgagaagccgtctccgattcagtcacatacgtggccgtttttgttagatgggcgtgatcttatcgggattgcgaaaactgggtcaggtaagacattggcttttgggattcctgcgattatgcatgtgttgaagaaaaataagaagattggtggaggatcaaagaaggttaatcctacttgtttagttctttctcctacacgagaattggctgttcagatttctgatgttttgcgtgaagctggagaaccgtgtggtttgaaatcgatttgtgtgtatggtggaagctctaaagggcctcaaataagtgcaattcgatctggagttgatattgtcattggtacgcctggtcgtttgagagacttgattgagtctaatgtgcttcgtctctcggatgtttcctttgtcgtattggatgaagcagatcgaatgcttgatatgggtttcgaggaacctgtccggtttatattgagtaacacaaataaagttcgtcaaatggttatgttcagtgcaacttggcctttggatgttcacaaattggcccaggaattcatggatccaaatccaatcaaggtgatcataggttctgtagacttagctgccaaccacgacgttatgcaaatcattgaggtcttggatgaacgtgcgcgtgatcagcgtctcattgcattactagaaaaataccataaatctcaaaagaacagggttttggtatttgctttatacaaggtggaagctgaacgtctcgagcgttttcttcagcaaagaggttggaaagctgtatctatacacggaaacaaagcacagagcgaacgtaccaggtctttatcattgttcaaagaaggatcctgcccgttactggtggctactgatgttgcagcaagagggcttgatatcccggacgtggaagttgtgataaactacactttccctttaacaacagaggattatgtacacagaatcgggaggacaggaagagcgggtaaaaagggcgttgcacacaccttcttcacgccactgaacaagggtcttgcaggagaacttgtgaatgttcttagggaagcaggacaagtagtgccagctgatcttttgaagtttggcactcatgtaaagaaaaaggaatcaaaattgtatggagctcatttcaaagaaatagctgctgatgctcctaaagctacgaagatcacattcgataattctgatgacgaagactagcttagtttattattttaatggtatcattattttattatatttacttggacaatgaaacctgcatttgattttcgtttgtggtctggggcttggcccgaataacaaaaacaaatatatttcagaattttcattatatttgtatgcaattttgtgttactagttattaaacttttatttgtccacaaaaaaaaaaaaaannnnnnnnnnnnnnnnnnnnnnnnnnn

SEQ ID NO: 97401 - DNA, 403 bp, Arabidopsis thaliana columbia
  unsure (1)..(403): unsure at all n locations
atcacttacaagatgagagtcccactaatagatttcttgagagtgcttaggactcattctttctcttaggggtgcttcagttgctgcagatgcgagcggggaagcaaaactttaataagtatgagactgatagtggtcacgcacatccgccaccaatttatggtgccccacccagctacacaacaccaccaccaccaatttacagtcctcccatatatccaccaccaatacaaaagcctccgacttatagtcctcccatatatccaccaccagtacaagtacctcccaccccaacttatagccctcccatatatccaccaccgggaccagggccccccacaccaacttacagtccttccatttatccaccaccaatacaaaagcctncgaccccaacttatag

SEQ ID NO: 97402 - DNA, 484 bp, Arabidopsis thaliana columbia
  unsure (1)..(484): unsure at all n locations
agagaagcttgggaagcttagtgacattcagtgcacaccagaatctcagctcagggttatcgcagaggctgggctccagatcattgaatgcagacgggtactgaaatggacatatgcatatggatactatctacaagatcatgctaagaaaccattttttgagtatttgcaaggggaggctgagtcaggtttggagaggctccacaaatgcgtagagaaggatatagaggtgtttgaacttgctgagggccccttcagaggaattcaatcatttccggacaaaattaactggtttaaccagcataacaaaaaccttcttttgaaaatcttggtgaaagctcttggagaattggtccttcctgatgtgggttcacaagctggtagcagnaaancccggntaacnctnaacctttttgcaaggcaaaaggcggttggggaagggtaaaggaggtcccaaattgnggggtccncagnancccgnttg

SEQ ID NO: 97403 - DNA, 408 bp, Arabidopsis thaliana columbia
ttcttctccgtcgcggaaaagatggggaccaccaccaatctgagatcttggctgtatctcattcttctcttcatcgtcgtcgtcggcgtcaacgctcagaatcggagacctaagaatgttcaggtggctgttaaggctaagtggcagggtactcctcttctccttgaggctggtgagttgatttccaaagaatcgaagcagttgttctgggagtttactgatgcttggcttggttccgatggagatgattccgattgtaaatcagctagagattgtcttcttaagatatctaaacaggcttcgactctgttagctcaaccagtggcttctctcttccatttctcacttactctgagatctgcttcgcctaggcttgtgctttaccgtcaattggctgatgagtctcta

SEQ ID NO: 97404 - DNA, 843 bp, Arabidopsis thaliana columbia
  unsure (1)..(843): unsure at all n locations
aacgttgaaggntcagtatgatcttagtgaggatactatcattggncttctatgggatatnatcacggcagggatggacacgacagctataacagcgcaatgggccatggcggaggtgatcaagaatccttgagggcaacaaaaagtgcaagaagagttcgacagagtgggttggacttgaccggttcttaaccgaggcagatttctcccgcttaccttacttgcaatgcgtggtgaaagagtcattcaggctgcatcctccaacgcctctaatgctacctcaccgaagcaacgcagatgtcaagatcggaggctatgatatttcccaaaggttcaaacggtcatgtgaatgtgtgggctgcggctagagacccggctgtatggaaaaatccatttgagtttagaccagagagattcttggaagaagatgttgacatgaagggtcatgattttaggctgcttccgtttggagctggaagacgggtctgtcccggtgcacaacttggtatcaatttggtaacttcgatgatgagtcatttgcttcaccattttgtttggacacctcctcaagggactaaaccggagagattgacatgtctgaaaaccctggactcgttacttacatgcgtaaccctgtgcaaacagttgcaacgcctcnggtgccttccggatctgganaaacgcgtgccttacggatatggaaatggcacccnggatcnacnttttggttnctgctggcaaaacncttggtggtnggttgaanaatggtccttgngggtaacaccgaaaacttttgngnaatttgtgaacaaanccncaaggggaggnaaaaccanntntttg

SEQ ID NO: 97405 - DNA, 589 bp, Arabidopsis thaliana columbia
  unsure (1)..(589): unsure at all n locations
tcattnatttggcttgcnaacccngtttggaaacccattggtttgcccggnaattttggaaaaaattttacatgaaggccatgattttaggctgcttccgtttggagctggaagacgggtttgtcccggtgcacaacttggtatcaatttggtaacttcgatgatgagtcatttgcttcaccattttgtttggacacctcctcaagggactaaaccggaggagattgacatgtctgaaaaccctggactcgttacttacatgcgtacccctgtgcaagcggttgcaacgcctcggttgccttcggatctgtacaaacgcgtgccttacgatatgtaaatgtcactctgatctaccttttgttgctgctgctcatgctcttgttgttgtttgtagacatgtttcttgtggtttatcatcgaaaaacttttgatgagatttgttgtatcaattctctcaaggagaagtaaagaagccatcttctttgtcaaaaaaaaaaaaaaaaaaaagnnnnnnnnnnnnnnnnnnnnnnnnnnnnnnnnnnnnnnnnnnnnnnnnnnnnnnnnnnnnnnnnnnnnnnnnnnnacaatc

SEQ ID NO: 97406 - DNA, 397 bp, Arabidopsis thaliana columbia
cactctgattccaattcctcctctctctctttcgtctctctacttcgaattgattgttttaaccgccggtgatcggagcaaactctctgacggtgaccgccggtgatcattttttgtgaacttcacttttggtgtataaagcatagttcgttgggaacttttttttacagctttggagtaactacctttcatggtttttggttccaacaatggggtcaaaatcatttggaaatctattagacttggcctctggggatcttttggacattcctcagactccgagatatcttccaagagtgatgactgttcctggcattatctctgacgttgatggatatggaattagtgatggcgattcagatgtcatttcattaccttgccgtgagcggaaaatcat

SEQ ID NO: 97407 - DNA, 635 bp, Arabidopsis thaliana columbia
atttttaaaaaacaaattctgaaaattaacaattagagaaaaagaaaagaaaaggaaaaaacaaaaagatttctagtagaaagagagaagggcgtgaattcctgagcgagagattcttcgccggagtaatctctttgcgtgatcttaccggctgcttaattcgtcttcgcctgattcgttggtttcaaaattcgtctctctctttcaatcggaggttaattgtttttctgtttgggggtcaaagcgaagatggtgaacgctatggtggagagagcgacgagcgagatgctgatcgggcctgattgggctatgaacctcgagatctgtgatatgctcaatagcgatccagcgcaagcaaaagatgttgtgaaaggcattaaaaaacggattggtagcaggaatccaaaagctcagcttcttgccttaactctgcttgagacaatagtgaagaactgtggtgacatggttcatatgcatgtggctgagaaaggtgttattcatgagatggtccggatagttaagaagaagccggacttccatgtcaaagagaagattctggtccttatcgatacatggcaagaggcctttggtggccctaaggcaagatatccaccaacaataacagtccatatgct

SEQ ID NO: 97408 - DNA, 340 bp, Arabidopsis thaliana columbia
gctttgaattaaaaaatagaagcaatagtttttgggggacaagcccggccgacgaatcggcggcgagacgttctttgtcaccgattgacatattcaaaaacgacgaagctaggtaaaggaacggagagaagagtcgataatacaagcgtagagatgggaaatcagaagctcaaatggacggcggaggaagaggaggcgttactcgccggagttaggaagcatggccctggaaagtggaagaatattctccgcgatcctgaattagctgagcagctctctagtcgctctaacatcgacctcaaggataaatggcgtaatttaagtgttgctcctggtattc

SEQ ID NO: 97409 - DNA, 827 bp, Arabidopsis thaliana columbia
  unsure (1)..(827): unsure at all n locations
nnnnnnnnnnnnnnnnnnnnnnnnnnnnnnnnnnnnnnnnnnnnnnnnnnnnnnnnnnnnnnnnnnnnnnnnnngaccacgcgtccgcatgcttctatatccatgcaaagatggttcaagaccatcggaacagggttttccatgatttccgcaatggtgcatgcagaaatcttgtttgcactgatttgtttacacgtgggattgacattcaagctgtgaatgtggtgataaatttcgattttcctaggacttctgagtcgtatctacatagggtaggcagatcaggacgatttggacaccttgggttggctgtgaatttggtaacttatgaggaccgcttcaaaatgtatcagacagagcaagaacttggaactgaaatcaagcccataccttcacttatcgacaaggcaatctactgtcagtaacttctacctggtgtacattctctacccggcaaggcattgatggactaaccggtgtagtgaggaggcaaatcattcagctttggcagccactagctcgttctagagatgaaggcaacacatagagtactgtactgaggcaagaaagacagtataggtggtgatggcatgggaacggtgattgttctaacccttaagcataccggtgatttggttgaatgaaactctcttgtggtgattgacctaaagggctctctatcttattttaagtctagaacctttacctttatttgtgtctctttttaaactgagagatttccatgtgaacaaccggagacattactcatcgctgttttgtttaacccactggccgactgtaaggtttatggggggaagcaaaaaaaa

SEQ ID NO: 97410 - DNA, 1251 bp, Arabidopsis thaliana columbia
  unsure (1)..(1251): unsure at all n locations
atttcctgtcactgtgaagtctttcaaggatcggtatctcaagaagccttacattatcaatctcatggatcagctcacacttatgggtgttacccaatattatgcttttgttgaagagagacagaaggtgcactgccttaacacgctattctctaaggtcagagttttgttacagtcttaaaaccccaatgttttattttctggctacttgatgtatcttttaaaggaaatattgttttatctattgcagctccaaataaaccaatccattatcttttgcaactctgttaatcgtgttgagctgttggccaagaaaattacagaacttggttactcatgcttctatatccatgcaaagatggttcaagaccatcggaacagggttttccatgatttccgcaatggtgcatgcagaaatcttgtttgcactgatttgtttacacgtgggattgacattcaagctgtgaatgtggtgataaatttcgattttcctaggacttctgagtcgtatctacatagggtaggcagatcaggacgatttggacaccttgggttggctgtgaatttggtaacttatgaggaccgcttcaaaatgtatcagacagagcaagaacttggaactgaaatcaagcccataccttcacttatcgacaaggcaatctactgtcagtaacttctacctggtgtacattctctacccggcaaggcattgatggactaaccggtgtagtgaggaggcaaatcattcagctttggcagccactagctcgttctagagatgaaggcaacacatagagtactgtactgaggcaagaagagacagtataggtggttgatggcgatggaagcggttgattgtgtctaaacctttaaagcagtaccggcttgatttggtttgaattgaagacttcttctgctgcatgatatgaaccttaaagttgtcttctctcatctctaattttcatgttcttagaaaccttttcaccttttcattttgatgttctctcatcttgaagacttgagaggaatttccgagtagtgagatcaaaccgaagaagacattttaacttcattcgcttgtttattgcttttagatctccacctgtgcctgaactgtttaaggattatagttggtgtgtgtcaagtcaagtgtcttagcattttaaaaaaaaaaaaaaaaagnnnnnnnnnnnnnnnnnnnnnnnnnnnnnnnnnnnnnnnnnnnnnnntgtcctaannnnnnnnnnnnnn

SEQ ID NO: 97411 - DNA, 398 bp, Arabidopsis thaliana columbia
gcatatattacaaaacacatactaattgtttctccttctccttcttccttgcaaatggatactttagcttcaaactcttcggatctcacgaccaagtcaagtctcggaatgtcgtcgtttaccaacatgtatctcctcacaacgcttcaagcccttgcggccctttgcttcttgatgattctcaacaaaataaagtcatcttcacgaaacaagaagttgcatcctctcccgccaggacccaccggttttccaattgttggaatgattccggcgatgcttaaaaaccgtccagttttccggtggctccacagcctcatgaaggagcttaacacggagatagcttgtgtgcgtctaggaaacactcacgtgattcctgtgacatgtcctaagattgcacg

SEQ ID NO: 97412 - DNA, 510 bp, Arabidopsis thaliana columbia
  unsure (1)..(510): unsure at all n locations
nnnnnnnnnnnnnnnnnnnnnnnnnnnnnnnnnnnnnnnnnnnnnnnnnnnnnnnnnnnnnnnnnnnnnnnnnnccacgcgtccgaatattctctactctaaaactccttgtgaagactatgttgaagctgctgttaaacaggcaatgacgattcacataacaagcccacctggggacattctcatttttatgaccgggcaagatgagattgaggcagcgtgcttttcactaaaggagagaatggaacagctcgtatcatcttccagtagagaaataacgaacctactcattctcccaatatactctcagttacctgctgacttgcaagcaaagatattccagaaaccagaagatggagcccgtaaatgcattgttgccaccaatattgctgaaacatcattgacagtcgatggaatatattatgtgattgacactgggtatggaaagatgaaaggttttcaatcctagaatgggtatggatgctcttcaagttttccccataagtcgtg

SEQ ID NO: 97413 - DNA, 629 bp, Arabidopsis thaliana columbia
  unsure (1)..(629): unsure at all n locations
gcgaaaacaaaactcatttacgaaacttcatttggttaccaaaccaaacagtacatgtgataacattcaggctaccgcttctgccatantgtcctctagaaagccatcgattcttgctgatggaacttatgctacccaaagcgcagcccctcgcgccccattctcctcacctacagttgttcaaggatcactgacttctggaaatttgagagcactgctactaactggtgattttttcctcggagcagtggttgcttgcacgttgaccaaacttgttcttaggttagaagaggttcagtcttctaaaactgaagtaaataagacagtcacacaggctttgttgatcatggtttctatgttgcaacttgggcaatctcctgtttctccacaccctattgataatgattcgtatgagaggattgtgttgtgcataaaattgctttgccataggaatgatgagatgaaaaagatatggttagaatcctgccgccagagttttgtcaagatgatttctgaaaaacagcttagagagatggaggaactgaaggcgaagacccaaacaacgcatgctcaacctgatgatctaattgacttcttccatctaaagagtcggaagggaatgagtcaac

SEQ ID NO: 97414 - DNA, 682 bp, Arabidopsis thaliana columbia
cagctctctacgactcactatagggaaagctggcccccctgcaggtcccggtccggaattcccgggtcgacccaccgcgggcggagaaagatatggttggaatcctgccgccagagttttgtcaagatgatttctgaaaaacagcttaaagagatggaggaactgaaggcaaagacccaaacaactcatgctcaaccggatgatctaattgacttcttccatctaaagagtcggaagggaatgagtcaacttgagttggaagaccaggtacaagatgacctaaagcgtgcaactggagaattcaccaaggacgagaacgatgctaacaaacttaaccgcattcttcaactcacaggattcagtgacccagtctatgctgaagcatatgtaacggtacaccattatgatattgctcttgaagttacagtaatcaaccgaaccaaggaaacccttcagaacttgtgcttggagttagcaaccatgggtgatctcaaacttgttgagcgtcctcagaactacagtctggcacctgaaagaagcatgcagattaaagcaaacatcaaggtgtcgtccacagagacgggagtcatattcgggaacatcgtctatgagacatcaaatgtaatggagcgaaacgtcgttgttcttaatgacatacacattgatatcatggactatatct

SEQ ID NO: 97415 - DNA, 916 bp, Arabidopsis thaliana columbia
  unsure (1)..(916): unsure at all n locations
ctgtctgactacaagaatgcattatccatcttagagagactggttgagcccgacagtcgacgcacagctgaattaaacttccgcatctgcatttgtcttgagactggatgtcagcctaaggaagcaataccatattgtcaaaaagctttgttaatatgcaaagctcggatggagaggctcagtaatgaaatcaaaggtgcatctggttcagcaacttcctcaaccgtctctgaaatagatgaaggcatccaacaatcatccaatgttccttacattgataaatctgcttcagacaaagaagttcagatcggagacctagctgggtctcgctgaagatctagaaaagaagcttgaggatttaagctaacaagcaaagaacccaaagcaggttcttgctgagtaatggggcatggaatcagctaagccaaatgccagtgacaaggttgttcctgctgctgctgaaatgagctcttctaggatgggaactgtgaacaccaatttcgggaaagatttagagtcgcctacagtctcaaccgctcataccggtgcagcaggaggaggagcagcatcaggtgttactcacttgggtgttgttggaagaggagtgaagagagttttgatgaatacaacctcgattgaatcaagtgcatcaaagaaaccagctctagagttttcagacaaagcagatggcaactcctcttgaaaccggaaaaaggtataaaaattcctgttactagtgaagtatctaacctaagaaaactgagaaaaacatttggtatcttcctcatgaatcttccaagactagattttcaggttcatgttaaaaaaaaaaaaaaaaagnnnnnnnnnnnnnnnnnnnnnnnnnnnnnnnnnnnnnnnnnnnnnnnnnnnnnnnnnnnnnnnnnnnnnnnnnnnn

SEQ ID NO: 97416 - DNA, 834 bp, Arabidopsis thaliana columbia
  unsure (1)..(834): unsure at all n locations
cttgcttcagataaattctttgaggatcgtatacctcatatatgcaacatatgaaaattcgctgttcttaaaaaagatcattcgttcatggcgattggtggttcctgggatcccacagatggcatggacccatcagttgatcagtcttccttaattcagacaatgctgagacactcaaaggataagcttcatcttgatctgagtaactgccgtcactggaatccattcctagagatacattatgacagagttggtacagatggagtgtttagctacaaagagatcacagtactttttgtccccgatttatcagaatgtcttccttcatttgatgtttggagaacccaatggttggcacacaggaaggctcttactgaaagagatcgactactctctcaggaggttaagaaagatactgttgaagtaaccaaggatgcagagaaaaagtcaccaggagatacttccggcactccgacaactggaactaagaagactgttaaaaagatcattaaaagagttgttaagaggcctgtcaacgatggaaaagcaactggtatgaaaggtgagaagtcggatgttcctgaacatgttgccataccagagaccacagtcccaaaagaagagtccactggtacatcttctaacaaaaaaatagtgaaaaaggtagctgaaactggagatacctcagatcccagtgctaaggctaatgagcagactcctgcaaagacaattgtaaaaaaaaaaaaaaagnnnnnnnnnnnnnnnnnnnnnnnnnnnnnnnnnnnnnnnnnnnnnnnnnnnnnnnnnnnnnnnnnnnnnnnnnnnnnnataatc

SEQ ID NO: 97417 - DNA, 737 bp, Arabidopsis thaliana columbia
aagagatgggaaacatgctcaatatcatttgattgaatagttgacccagctccttgttgtttgcagaaaccctccacttcaattggtattttttcacgaaaagcaaacatgagataacaaatccagtctttcactaagatttcgaatagctgtcccgcattcaagtggattatgtttcgcctcttactcggagaaacgacgagcaaacaattcccaatcatggcccttgcggatcggatcatccatataatatacaaaaagaaactccagatatttgatatctgtctcttgcaatgagatatcaattccagcgacggtttcattagatatcttacaacaaaaacccctcttttttccgatccagtttcttcaccaccgcgaactccagtttgattcaggcatgatacacttttgagttattgggagaacccaagtactctctttcggatcccggaaacagactctcagagatcttttttccttttgtaagatacaggagcgaaacaatcaacctattgatattgcaagacccaaaagattcttccgatgtatcatttctgggtccaatggaattcataggtataggaagaagccctttcaaatagagatttttgctttcgaccatatttcgattgttaatacgatatagaagggccgctactacaaatagtactacacccttgatcgtgaaatatcgattgcttgttgaaccctgtgaattgcgcaaaagtaggata

SEQ ID NO: 97418 - DNA, 605 bp, Arabidopsis thaliana columbia
  unsure (1)..(605): unsure at all n locations
caaaataaaagcacacgaattttcaaatctttctcttctctcgctctctcgaattcttctctctgttcctcgtagatcccctctgtgtccgttttcgtcttttcgaattccgaagatctcaaatgggtgaggatgcaatctcaggtaatctcaagaatctaacgatcgacacaagagattcagaaactcttgtggtatgtttcggtgaaatgttgattgattttgttcctacggtgggaggtgtttcattggctgaagcaccagctttcaagaaagctcctggaggagctcctgctaatgtagctgttggtgtctctagacttggtggctcctctgctttcattggaaaggttggtgatgatgagtttggaagaatgttagctgatattctaaggctgaacaatgttgacaactctgggatgagattcgaccataatgcacggactgctttggcctttgtaacggtaagaggtgatggagaaagggagttttngtncttcaggatccgngtnctgaatncttctttggatctaagctttncaagacctcancaaaggccagntnttcacttcggtccttcattttattnggnnccttccgtttac

SEQ ID NO: 97419 - DNA, 778 bp, Arabidopsis thaliana columbia
  unsure (1)..(778): unsure at all n locations
ggagtgggaatggctggtccttatggtagtcaagatccaaatgacccttttaatcaacctccatctccaccaggcttctggatatcatttctccgtgtgatgcaaggtgctgtgaatttctttggccgtgtagcgatgcttatagatcaaaacacacaggcctttcacatgttcatgtctgcccttcttcagctatttgatcgtggcggtatgttatatggagaattagcaagatttgtactgcgtatgcttggggtgagaacaaggcctagaaagatgcagcagccaccacaagggcctaatgggctacctttaccacaccagccacatggaaaccagaactacctcgagggggcctaaaactgctgcaccaggtggtggcggtggttgggacaatgtatggggcaactaagttacttctttcattacccaaatccttcaacattgctttaaaacaccatgacaaccagttggttaccgatagaagataaaccgtgtagcagcctgcaacacagattgggatgtacgaaaaccagatgtttgtttgcaaattgagtctcttcttctcttctctctatctctcagtattctctgattgtgtggtaaaggatagatgtcgtactctacaaaatggaaagtgaagttttaagtgtttgttaaagacctttctattgatatatatttataataaaaaaaaaaaaaaagcnnnnnnnnnnnnnnnnnnnnnnnnnnnnnnnnnnnnnnnnnnnnnnnnnnnnnnnnnnnnnnnnnnnnnnnn

SEQ ID NO: 97420 - DNA, 378 bp, Arabidopsis thaliana columbia
agaaaccttaagaaactgttaaataaatccaaacaatttgttaacatatgcaatggatcattattgactgcttatctcaccattccacattcggctatatgcaaattatatactttaatgtctttatgaaaatagagttaaaatattcctttaagattcagcactaagcatatcctaagcacaaatccgactttattacatcatcgtattcataaatacaacacaatatattacaaatacactgatacacaacccaatactgtaacgtaaaagcccatgagaaagagaaacagtttaactatcaactgttgaattatccaaaaagtttaaactacatagagaaatctacctaaaattgtatatatactgattataaca

SEQ ID NO: 97421 - DNA, 1036 bp, Arabidopsis thaliana columbia
  unsure (1)..(1036): unsure at all n locations
nnnnnnnnnnnnnnnnnnnnnnnnnnnnnnnnnnnnnnnnnnnnnnnnnnnnnnnnnnnnnnnnnnnnnnnnnccacgcgtccgcccacgcgtccgtacggctgcgagaagaccacagaaggggaggacaagaagaattcaattttcattgtcagtggaagagggagggaaagtttaagcaggtggttcactccgtgcaaaaaaattggaattgcggcagagcatggatacttcttaaagtggtcaggcagtgaagaatgggagacatgtgggcagagctctgattttgggtggatgcagatcgtggaacctgtaatgaagcagtacactgaatcgactgatggctcttccattgaaatcaaagagagcgctttggtttggcaatatcgggatgcggatccaggctttggttctttacaagcgaaggaaatgctagagcatttagagagtgttctagctaatgagccagtggcagtcaaaagcggtcactacatagtagaagtcaagcctcagggagtgagcaaaggatccgtgtcagaaaagatattttcatcaatggccggaaagggaaaaccggttgatttcgtgttatgtattggagatgacagatctgatgaagacatgtttgaagcgattggtaatgcgatgtcgaaaaggttactctgtgataatgctctagtctttgcatgcacagttgggcaaaagccaagcaaggctaaatactacttggacgatactactgaagtgacatgcatgcttgaatctctagctgaagcatcagaggcttcaaacttttctatgcgtgaacttgatgaagccctttgatttggaaccagatcttttgccagatggctaaagaagaggttagacagacaaagacaaggaatagaagagactgggagtttgttggtctgtatgtgtttttgtcagattggaanggaaangnaaaaaatannnnnnnnnnnnnnnnnnnnnnnnnnnnnnnnnnnnnnnnnnnnnnnnnnnnnnnnnnnnnnnnnnnnnnnnnnnnnnnnnn

SEQ ID NO: 97422 - DNA, 639 bp, Arabidopsis thaliana columbia
ccggtccggatttcccgggtcgacccacgcgtccgacaagatagcggatcacacctcgcaccggttgatccctatctcgtcggtcctaaattggcgtccttcatattggacaagaaggctggtcctctccataaagcttctaagtatctagcagtccatctcaggtttgaaattgatatggtggctcattctctctgttacttcggaggaggcgatgcggaaaaggcagagcttgatgcttaccgagaaatgcatttcccaacgttggcaaatctaacaaagacgaaaaaaatgccatctccagacgatctgaggacagaaggactttgtcctttatcacctgaagaagccgtgcttatgcttgcgggtctgggttttagtcggaagacacgtgttttcgtcgctggtgcgaatatatatggtgggaataaaccgttatcagatgtaacgagtctctacccaaatctagtcaccaaagagaatgtcctctcacaaactgagctatagcctgtcaagaacttctcatctcacgcagcggttcttgatttcattgcatgcgctgcttctgacgcctttgcgatgacggattcacggagccaattgtcggctctggtctcgggttataggatattataacgg

SEQ ID NO: 97423 - DNA, 873 bp, Arabidopsis thaliana columbia
  unsure (1)..(873): unsure at all n locations
cggacgcgtgggctcacgcgagaactctggcttcgtctctatattattgacccttttgatctctctctgtctcgctttcttcctcgcgtggacctttttcgaaaaatatcaatcccagaatttcgcttcattttggattataaactcccagatctgctactctctatctccgattttgtgatttttcaaaccctagatttctccggaagagtttatttttttctctgtaactaaaccgagatttttttttcaaaattccgacattaccctaggttgtgtattaccgtagaaaaccctagttcctttttggtattcttggtgtacagatcccttccttagtcagagtttttggttattagtgtttagaggtttgtaatgaacaatcgaggaaggtaccctcctggaattggcgctggccgtggagcctttaaccctaaccctaattaccaatcacggtcgggttatcaacaacatccgccgccccaatacgttcaacgcggtaattacgctcagaatcaccaacaacagtttcaacaagcgccgtctcagccgcatcaataccaacagcaacagcagcancaacaacaatggcttcgaagaggtcagatccccggcggtaacagtaacggtgacgnttgttgtagaagttgggaaacttgtttcaaatccggagttatcggcccaaacttcggnagntttggnaagcaaggctnaaacntccttnacctgnttcttggtttcaggccaggggnttttncagcccccnaaggggccgggntttnaggttncttttttaacggggggttnttttgggnttttttggnggggttttnaagccctttccttttggggggggttccnttgctttnctgg

SEQ ID NO: 97424 - DNA, 2400 bp, Arabidopsis thaliana columbia
  unsure (1)..(2400): unsure at all n locations
cggacgcgtgggctcacgcgagaactaaatanagatttacaatatgacccaattggtcgctctctggcgcgctttcggcgctcgcgcggacctttgtcgaaaaatatcaatcccagaatttcgcttcattttggattagaaactcccagatctgctactctctatctccgattttgtgatttttcaaaccctacatttctccggaagagtttagttttttctctgtaactaaaccgagatttttttttcaaaattccgacattaccctaggttgtgtattaccgtagaagaccctagttcctttgtggtattcttggtgtacagatcccttccttagtcagagtttttggttattagtgtttagaggtttgtgatgaacaatcgaggaaggtaccctcctggaattggcgctggccgtggagcctttaaccctaaccctaattaccaatcacggtcgggttatcaacaacatccgccgccccaatacgttcaacgcggtaattacgctcagaatcaccaacaacagtttcaacaagcgccgtctcagccgcatcaataccaacagcaacagcagcaacaacaacaatggcttcgaagaggtcagatccccggcggtaacagtaacggtgacgctgttgtagaagttgagaaaactgttcaatccgaagttatcgacccaaactcggaagattggaaagcaaggctaaaactacctgcacctgatactcgatacagaacagaggatgtgacagccaccaaagggaacgagtttgaagattactttttgaaacgggagcttctcatgggaatatatgagaagggttttgaaagaccttctcctattcaggaagagagtattccaattgccttaactggtagagatatccttgccagagcaaagaacgggactggaaagaccgccgccttttgtattcctgtcttggaaaaaattgaccaagataacaacgttattcaagctgttataattgttccgactcgagagttagcccttcagacatcacaggtctgtaaagagctgggtaagcatttgaagattcaagtcatggtgaccactggtggcaccagtctgaaagacgatatcatgcgtttgtatcagcctgttcatttactggtaggaactcctgggagaattctggatcttaccaagaaaggtgtttgtgttttaaaagattgttcggtgcttgttatggatgaggctgacaagcttttgtctcaagagttccaaccttcagtggaacatttgattagctttcttccagaaagtcgtcagattttgatgttctcagccaccttccctgtcactgtcaaggattttaaggataggtttctgacgaatccttacgtcatcaatctcatggatgaacttacgctcaagggtattacccaattctatgctttcgttgaagaaagacagaaaattcattgcttgaatacactattctccaagctgcaaattaaccaatcaatcatattctgcaattctgtaaatcgtgtggagctcttagccaagaaaatcacagaacttgggtattcatgctcttacatccatgcaaagatgcttcaagaccaccgaaacagagtgttccatgacttccggaatggtgcatgccgtaatctcgtgtgtactgacttgttcacacgtggtattgacattcaagccgtcaatgtggtgataaactttgatttcccaaagaatgctgaaacttatctccatagggttggacgatcaggaaggtttggccatcttggtctagctgtgaatcttatcacctatgaagatcgatttaacctttaccggattgagcaagagcttggaacggagatcaagcaaattcctccacatatcgatcaggcaatttattgccaataaccaagggtaaaccaccttggtctgctgttaggtgaatcagtaataagtggttggttgaagccatggttagacagttgtcttatctagccatgcaggacaaggacaacccaaaaaggcttcacattctgcctcttacctccataatgtttttttctgcgtctttgggattcctttatttttaaagattaactatagtcaaggctaaaaggtttgaaataccgggtagtattacaaaagtgaagtcttttatttagttttaacaagtcgtttgagctattgtttctttctatgccgtagactgatcagtggttacagtgttgtgatgcgtcttcaaggagctgtggtttcatgactctttcatgatccttttccagctttccaacttcaataataagtctttgagacctttnnnnnnnnnnnnnnnnnnnnnnnnnnnnnnnnnnnnnnnnnnnnnnnnnnnnnnnnnnnnnnnnnnnnnnnnnnnnnnnnnnnnnnnnnnnnnnnnnnnn

SEQ ID NO: 97425 - DNA, 535 bp, Arabidopsis thaliana columbia
  unsure (1)..(535): unsure at all n locations
agttgatgatggtgatgatatctcttcacttctctactccgccgctagcttttctcaaatctgattccaattccagatttctcaagaaccctaatcctaattttatccaattcaccccaaaatcccaacttcttttcccccaacgtctcaatttcaacaccggaacaaatttaaaccggcgaactctgagttgctatgggattaaggattcaagtgagacaacgaagtctgcgccgtcattagactccggcgacggtggcggcggaggaggtgacggtggagatggtggtgatgatgataaaggtgaagtggaggaaaaaaacagactttttccggaatggttggattttacctcggatgatgcacagactgtgtttgtggctatagctgtatcgttggcgtttcgttatttnatcgcagaaccaagatatattcctcctttgnntatggatcctactttttaatgttggagacagnttaggttgcagagaaggtgagtttttatttcaaggnagncnttgtncaaatnanaatt

SEQ ID NO: 97426 - DNA, 608 bp, Arabidopsis thaliana columbia
  unsure (1)..(608): unsure at all n locations
atgatacgttnnnnnnnnnnnnnnnnnnnnnnnnnnnnnnnnnnnnnnnnnnnnnnnnnnnnnnnnnnnnnnnnnnnnnnnccacgcgtccgcccacgcgtccggggaatttgagtatcgtgagaagcctgacacatgttgccctaaatgcagtgagccacagacctctgatatgtccacaagtccaaatgagcttatattacttgtaaggtttgtgcaaacacttctatcagaccgatcgtcggaaagaaaaagtaacttagagtctggcaatgataagctgttgacgaaactgaaagctgatgatgatcaatggagacatgtcataggaacgatcatagatggcagtgcatcatcaacaagtacagttgattggcttctacaggaactgcttaaagacaagctggatacatggctgtcttcaagatcatgtgatgaagattacataacgtgttctttgtcaaagcaggaacaaggtattatccatatgggtgcaggccttggcttcgagtgggcattttatccaatccttgctcatggagtcaatgtagattttcgtgatattaagggatggagcgctcttcattgggctgcacaatttggaagtg

SEQ ID NO: 97427 - DNA, 707 bp, Arabidopsis thaliana columbia
aaaaagccacattaagttcttactctgctgcattaactgatggctagatgcatggcttacaatcaaaatccacaaatgttggctctatgcataacagtagcagtaatgttccttggtgtgagatcagaattgagtcaggatataaagggatgtcaggatgcgatgtctgatctctactcttgtcttccttttgtcactaacaaagctaaagcaccagactcaacatgttgcagcacactcaaggtaaaaatagacaaagggcagaccaggaaatgtctatgtactctagtcaaagacagggatgatcctggtttggggttcaaagttgatgccaaccgtgcaatgagcctcccttccgcttgtcatgtccctgcaaacatctctcaatgcccagatcttctacatctgcttccagattcaccagcctctcaaatatttaagcaattcactgaatcttcttctcagactgttggacataaagcggtctccacaagctcaagcatcaaaggaagagacaacaagcaatttggtttaatgatggctggtgctctctcaatatggtatataatgtaaaatcctctgtgatctaaagttgatgaacacaataaccaaaatcattatacgagtcatatctactagctgaagcagatgtatcatggctattatctaaggacttattaagaaaaaaaaaaaaaaaagggcggccg

SEQ ID NO: 97428 - DNA, 547 bp, Arabidopsis thaliana columbia
ccaaacattaagtagcactctttttcctctctatatctctcactcacactttttctctatatcttctcctcaacttggatatgggtgaagccgtagaggtcatgttcggaaatgggttcccggagattcacaaagccacatcacccactcaaaccctccactctaaccagcaagactgccattggtatgaagaaaccatcgatgatgatctcaagtggtcttttgccctcaacagtgttctccatcaaggaactagtgagtaccaagatattgctctgttggacaccaaacgttttggaaaggtgcttgtgattgatgggaaaatgcaaagtgctgagagagatgagtttatctaccatgaatgtttgatccatcccgctctccttttccatcccaaccccaagactgtgtttataatgggaggaggtgaaggctctgctgcaagagaaatactaaaacacacgacgatcgagaaagttgttatgtgtgatattgatcaggaagttgttgatttttgcagaagatttctgaccgttaacagcgatgc

SEQ ID NO: 97429 - DNA, 709 bp, Arabidopsis thaliana columbia
attccaaatggaagctatgctctcactgcaggccactgtgtacaatgcagctgtgttctcggaagccgaagtatgtattgtgagcctgcttctatatcagtctcttgttccagtatgagatgtagaaacagcaacttcatgcttggtaacattacttcgcagcagagtagctccgggggtaaacttactactggtagttacaacggttcccctagcggcactatcttgaccacgttgtccatgtctcttcaacctcgatgccctggaccgcaacaattagcaccgcttatagccccgcctgataatgttccaaaggaactgatgtatctaccttcaccttcaccttcgccatcaccagagtttgatgatattgctggtggaggatcatctatagccgcagtccccgcggcttcacctggaggagctacggtttcttcaagcaattcaatcccgggtaatccagctaatggtccaggcggaagtatttctatagcttcttgtccattgagctattactcattcattgcgttactcatccccattggttcttgcttttttgttttctaagtttgaatgcaagacaatctcatgaacactgctagtactttggtttgtcattgttaaatttgtattgaatgcctggccggttgacggtttaataacggtttaaaattgtccggttcacagtcaaaaaaaaaaaaaaacaggc

SEQ ID NO: 97430 - DNA, 367 bp, Arabidopsis thaliana columbia
  unsure (1)..(367): unsure at all n locations
gggatttcttctgggatgatgagtttcgacctaaatgggatttcatgcttgccaacttcaaaacgttggaggaggacactcagacaggaacaatgattgttcagtggagaaaaaagtttcctttttttctgtagtgaccgagagtatatcattggccggagaatatgggagtctgggaagaagtattattgtgtcacaaagggagttccttatccagctctaccaaagcgtgataagccaaggcgtgttgagctttatttctcaagttgggttatcagagcggttgaatcccgaaaaggagatggacagcaaacggcttgtgaagtttcccttgtccactacgaagacatgggcatcncaaaagacg

SEQ ID NO: 97431 - DNA, 1324 bp, Arabidopsis thaliana columbia
tcgtatcattgatctgatgaaaaggggagctttgaatctatcagaggttcagtttgtggttcttgatgaagctgatcagatgcttcaagttggatttgcggaagatgttgaaataatattgcagaagttgccagcgaagcgtcagagtatgatgttttctgcaacaatgccaagttggatcagatctctcaccaagaagtacctgaacaatcctttgacaattgatcttgttggagattcagatcagaaacttgcagatgggattactatgtattctatcgctgcagattcttatggaagagcatccatcattggtcctcttgtaaaggaacatggcaaaggaggaaaatgcattgtctttacccaaacaaaacgtgatgcagatcgccttgcatttggattggcaaaaagctataaatgtgaagctttacacggtgacatatctcaagctcagagagaaagaacacttgctggtttcagggatgggaatttcagtattcttgttgcaactgatgttgctgcccgtggacttgatgtacctaatgtcgatttagtaattcattatgagcttcctaataacacggagacgtttgttcaccgaacggggcgaactggtcgtgctggaaagaaaggaagcgcgattctcatccacggtcaagatcaaaccagggctgttaaaatgattgagaaagaagtcggaagcagattcaatgagctgcctagcattgctgtggaaagaggaagcgcaagcatgtttgaaggagtaggtgctagatctggtgggtcgttcggaggaggtcgatcaggcggtggtgggtatggtagttacggtagcagcagtggccgttcaggtggtggtagttatggaggttatggtggcagcagtggccgttcaggtggtggtggtggtagttatggaggttcagggggatcaagcagccgttactctggtggttcagaccgctcatctggtttcggaagctttggttcaggcggttcttcaggaggatttggttcagaccgttcttctcagtcaagtggaaggagcagctttggtgggtttggatcaaacgatggtaaaagatcttactgagagaagtgttgtgttggttttgacccgactcagcaataatggagttgacttaggagagaactcggtatctcgagttgagtagtttacaaggagtcgagctatatataaattctgtagctacttcttgtctcataaaccaacataagttatatcattatttcatatcctctaattcatttttatttctcaatttgagtgaaatgtgtttcccttaaaaaaaaaaaaaaaaaa

SEQ ID NO: 97432 - DNA, 657 bp, Arabidopsis thaliana columbia
  unsure (1)..(657): unsure at all n locations
ctcactatagggaaagctggtacgcctgcaggtaccggtccggaattcccgggtcgccccacgcgtccgcccacgcgtccgcggacgcgtgggaaatacctaaatctcaacttcacggaacaccgatacataaagacaatagagtggtaataatttgttgagaccaaaagtaattaaacacattacacatggggaaaaagaacggctcttcttcttggctcaccgctgtaaagcgagctttccgatctccgacgaagaaagatcatagtaatgacgtcgaagaagatgaagaaaagaagagagagaagagacggtggtttagaaaaccggcgactcaagaatctccggtgaagtcttccggtatctctccaccagcacctcaggaagattcacttaacgtaaactcaaaaccctctccggagacagcaccgagttacgcaactacgacgccgccatccaacgccggtaaacccccgtccgccgtagtccccatcgccacgtcagcatctaagacactcgcaccgaggcggatntattacgcaagaganaattacgctgctgttgtcatccagacttctttcagaggatatttggcaagaagagcattaagaagcattaaagggttagtgaagctacagcattggtgaggggacatat

SEQ ID NO: 97433 - DNA, 321 bp, Arabidopsis thaliana columbia
taatacgaccctctatagggatagctggtacgcctgcaggtaccggtccggaactcccgggtcgacccacagcctccgaattaggaaaggtgctgcaccatacaaccctgggggtaccaacctacagcttcctggaagagaataagttactcatcggttgattaataaaagcacaacagtcaagagtctggatctgaatgatgatcttcacttggtcgttgtttcttttaatgaatattttccggcttgttagagcaagattgacttgcttttgctggataatacaaacttgggatttttagtttgaagtatactcaatct

SEQ ID NO: 97434 - DNA, 403 bp, Arabidopsis thaliana columbia
aaaggaatatccgcaaagaagaaaaaaaaacatttttttggtaaaggactaatctttttgtttgcatcggccatctctaaccttacgattgtgtgttcttgctttgagcgaaaccctagaatcggtcttaacccatttgagcagagatgctgcgagtagcaggaaggaggcttttttctgtttcgcagagatcatcgacggcgacctccttcgtcctttcccgtgaccataccctttccgatggaggcaactcctcttccgcttctagatctgtcccctctgcagatctctcatctttcaattcttaccaccggagcgttataagaggtttttgcttctcaaagtcattactcagggcaaaatgagataggtttttggttcggaagtccagccacagtcgaag

SEQ ID NO: 97435 - DNA, 498 bp, Arabidopsis thaliana columbia
  unsure (1)..(498): unsure at all n locations
gttttgttttgcatcggccgtcccaaacctgaggatttctctgttcagctagagcgaaaccctagattcacatttgagctgagagatgctgcgtgtagcagggaggaggcttttctctgtctcgcagagatcttcgactgcgacctccttcgtcgtctcccgtgaccataccctttccgatggtggcggcgactcctcttcagctcccagatccctcccctctgcagatctctcatcttaccaccgtagccttatcagaggcttctcttctcaagtccttgctcaaggaaatgagataggttttggttcagaagtcccagccacagtcgaagctgtcaaaacgcctaactcaaagattgtctatgatgaccataaccatgagcggttacccaacctggtgaccctagcaagcgtgcattcgcctattttcgccttctccggggtggggagggtttgttnatgcctttgtcctcggctgnttttttttnaaggtttttg

SEQ ID NO: 97436 - DNA, 786 bp, Arabidopsis thaliana columbia
  unsure (1)..(786): unsure at all n locations
aggggttcgagtgtgagcatgtctgcaagtaaagatgtccttgcncttgcatccctcgaggttgacctatggagcatagaaccaggaacttccgtgacagtcaagtggcgtggaaagcccgtcttcatccggcgaagaacagaagatgacatcaagctggccaatagtgtggatgttggatccctgagggacccacaagaagactcggttagagtcaagaatccagaatggttgatcgtggttggagtatgcactcatttggggtgcatccccttgcctaatgctggtgattatggtggttggttttgtccgtgtcacggatcacattacgatatatctggaagaattaggaaaggtcctgcaccatacaacctggaagtaccgacctacagcttcttggaagagaataaattactcattggttaatgaataaagcacaacagtccgagtgtcatggtctggatgatcttaaatctgtttttgtttttatattttccggcattttagcgtgcaagttcgctttcctcacactttgggctcagcaaaaattggcttgttttgctgaataatacaaacttgtcattgtatgacttagtatctgtctcatctggtgaaaatacattgttcatacttcatagtctctgtttattatttgaaaagagttttgaatagtatcaaaaaaaaaaaaaaaaaaaaggnnnnnnnnnnnnnnnnnnnnnnnnnnnnnnnnnnnnnnnnnnnnnnnnnnnnnnnnnnnnnnnnnnnnnnnnnnnnnnnnnnnnnnnn

SEQ ID NO: 97437 - DNA, 1041 bp, Arabidopsis thaliana columbia
  unsure (1)..(1041): unsure at all n locations
nnnnnnnnnnnnnnnnnnnnnnnnnnnnnnnnnnnnnnnnnnnnnnnnnnnnnnnnnnnnnnnnnnnnnnnnnnnnccacgcgtccgcccacgcgtccgctttttgtttgcatcggccatctctaaccttacgattgtgtgttcttgctttgagcgaaaccctagaatcggtcttaacccatttgagcagagatgctgcgagtagcaggaaggaggcttttttctgtttcgcagagatcatcgacggcgacctccttcgtcctttcccgtgaccataccctttccgatggaggcaactcctcttccgcttctagatctgtcccctctgcagatctctcatctttcaattcttaccaccggagcgttataagaggttttgcttctcaagtcattactcagggaaatgagataggttttggttcggaagtcccagccacagtcgaagctgtcaaaacacctaactcaaagattgtctatgacgaccataaccatgagcgttacccacctggtgaccctagcaagcgggcattcgcctattttgtcttgtcgggtggaagggtttgtttatgcctctgttctccgcctgcttgttctgaagcttattgtgagcatgtctgcaagtaaagatgtccttgcccttgcatcccttgaggttgacctaggggagcatagaaccaggaactaccgtgacagtcaagtggcgtggaaagcccgtcttcatcaggcgaagaacagaagatgacatcaagctggccaatagtgtggatgttggatccctgagggacccacaagaagactcggttagggtcaagaatccagaatggttggtcgtggttggagtgtgcactcatttggggtgcatccccttgcctaatgctggtgattatggtggttggttttgtccgtggcacggatcacattacgatatatctggaaagaatttggaagggtcctgcaccaaacacctggagncccaccaaagctncctggaaanaaagtccccccggtggtaanaaacccacgcaaggcggncngntgnnc

SEQ ID NO: 97438 - DNA, 582 bp, Arabidopsis thaliana columbia
catggagtctttgtggcacatgtattaagcctataatgctgattgagaatattgctcaaggagataatgaagcggttaaggtggatttcgatgacaagcttagttgggagtatctattcaaggtatattggctttgcctgaaggaagagctgtctctaactgttgatgagcttactagagcaaataatccttggaaggaggttcctaacactgctcccaaagtggagtcacaaaatgatcataccaataacagagctttagatgtagcagtaaatggaacaaaaagaagaaggaccagtgattcccctaccttacccaacaagttggatggcaaaaatccaagtaatatcctaaagaaggctcctggagatacgagctgggcaacaaaagaactcctcgagtttgtgtcgttcatgaaaaatggcgatacatctgttctatctcagtttgacgtgcagggtcttctgcttgactatatcaagaaaaaaaatcttagggatcctcttcagaagtctcaagttctttgtgaccagatgcttgtgaagttgtttggaaaacagcgagtgggtcactttgaaatgc

SEQ ID NO: 97439 - DNA, 433 bp, Arabidopsis thaliana columbia
ataccgggggggactcacgcatgcgcgcaacaaaaaagagagaaagaaaaagtaaaccgaaagcgaaagcaagcgggaggtttcgtgggtttctaagttacaagttttgattacgaacacgcaagaataacgcgagatcttgattagagagagttcttgcaaaaagggtctctgtattttgttattaaattcttcaatcttgtttctgtaaatttcggatatttttgagaacaagcaaagatgtgtagtttggctacaaatctgttactaccatcgaagatgaaaccagtttttccagagaaactgagcactagctcactctgtgccacccctagaaggatccaagatgaagaaccgatctgttgttccctgttgcaagattgtttggaccggcgatttttggaagcctccaaattgaaagtgttattcttag

SEQ ID NO: 97440 - DNA, 624 bp, Arabidopsis thaliana columbia
  unsure (1)..(624): unsure at all n locations
nnnnnnnnnctctatacgactacgatagggaaagctggtacgcctgcaggtaccggtccggaattcccgggtcgacccacgcgtccgtacggctggagaagacgacagaaggggaacgcgagatcttgattagagagagttcttgcaaaaagggtctctgtatttagttattaaattcttcaatcttgtttctgtaaatttcggatatttttgagaacaagcaaagatgtgtagtttggctacaaatctgttactaccatcgaagatgaaaccagtttttccagagaaactgagcactagctcactctgtgtcaccactagaagatctaagatgaagaaccgatctattgttcctgttgcaagattgtttggaccggcgatttttgaagcctccaaattgaaagtgttattcttaggagttgatgagaagaagcatccagcaaaacttccaagatcttacactcttactcacagtgacatacccgctaaattaactttagctatatctcaatccattaataactcctcaggtgcagatggggccaataatggtcccggacgaagtgtgggcgagtggacaaagcgaaggtaaatgcncttcatgtcattgcacttagcgaagca

SEQ ID NO: 97441 - DNA, 841 bp, Arabidopsis thaliana columbia
  unsure (1)..(841): unsure at all n locations
nnnnnnnnnnnnnnnnnnnnnnnnnnnnnnnnnnnnnnnnnnnnnnnnnnnnnnnnnnnnnnnnnnnnnnnnnnnccacgcgtccgcttcgtaacgcattttcgttgattcactttccagctttatctcaaactctctctctgtcgtctcgatcgatctcccaaatctcaaattctgaattgattttttttgtttataaacaaagcaaacaaaacacataattttggttcggtcttcttcaattttcaccgacacaaacccgtcttttcctcttctctctcatttctatcaatttttctctacaattccccagtcgtcgaagaagctacagcttgcaatttgctcgtgttctcttccatcattccttggttaagagcctcttcatggcttctacggttgattccaatttcttctcatccgtcccagcttttacagtaccctcggacttttgtctcctgatcagatcgaactggcaaaaatctaattagaaaatggccagagtcatctcttccaacatggcctgaactcggtgttgatgataaagagaagctagcttttttcgatcagattgctcgcttaaattcaagctatcctgaaggtttagcagcatacattangactgcgaaagaccttctcgctgattcgaaagtagggaaaacccatttgatggtttctctccttctgtccctcaggagaaaattcacttttggtactgacaactcatcgaaatggaaaaaagaggtgtcgcgaagctaggaatgctgttttgtctggtgctggtgtcttggcaacctcttgttacaatgatcaaggggccctccaaggagaccactcagggact

SEQ ID NO: 97442 - DNA, 1829 bp, Arabidopsis thaliana columbia
  unsure (1)..(1829): unsure at all n locations
nnnnnnnnnnnnnnnnnnnnnnnnnnnnnnnnnnnnnnnnnnnnnnnnnnnnnnnnnnnnnnnnnnnnnnccacgcgtccgcaaacactagtctcttctgatttgtaccctaacgtttactcgacttatctaaagccgtgaacctcgccggaattcttaaagtcgcgatttttccttaacgccgtttgattcccttacggcctttgaggtccaggagatagcaaatttgttggtgagtactgaaaaatggaggaagagaacgaagtagtgaagacgtttgcagagcttggtgtgcgtgaggagcttgttaaagcttgcgagagattgggatggaagaacccttccaaaattcaagccgaagcccttccttttgctcttgaagggaaagatgtaattggacttgcgcaaaccggttctggtaaaaccggagcttttgcaattcctatattgcaagcactacttgagtatgtttatgattctgagcctaagaaaggacgtagaccggatcctgctttcttcgcttgtgttttatctccaactcgagaacttgcaatccagattgctgaacagtttgaagctcttggtgctgatataagtcttaggtgtgctgtgcttgttggaggtatagacaggatgcaacaaactattgctcttgggaaacggcctcatgttattgttgcaacacctggtcgtctttgggatcatatgtctgatacaaaaggcttttctctgaaatcattgaaatatctggttcttgatgaagcagatagactgttgaatgaagattttgagaaatctcttaaccagattttggaagagatccctcttgagcggaaaacatttcttttttcagcgactatgactaaaaaggttcgaaaacttcaaagggcatgtttgaggaatcctgtgaagattgaagctgcctccaaatattccactgtcgatactcttaagcagcagtatcggtttgttgccgctaaatacaaggattgctatctggtatacattctgagtgaaatgcctgaatcaacatctatgattttcacccgaacatgtgatggtactcgctttctggctttggtgcttcggagccttggttttagagctattcctatcagtggtcaaatgactcagtcaaagagactgggagctttaaataagttcaaagcaggggaatgtaatatcttggtttgtaccgatgtggctagtagagggctcgatatcccatcagttgatgtggttatcaattatgatattcccacaaattcaaaggattacatccatagagtaggaagaaccgctcgtgctggacgttctggtgttgggatatcacttgtaaaccagtatgagctcgaatggtatatacaaatagaaaaactcattggcaagaaactacctgaatatcccgctgaggaagatgaagtcttgtcattgttggagagagttgcagaagcgaaaaagctatctgcaatgaatatgaaagaatcaggaggtaggaagagaaggggagaagatgatgaagaaagtgagaggttcttgggaggtaacaaggacagaggcaacaaggaaagaggtggtaacaaagacaagaagtcttctaagaagttcaaacgataaaatagctctgtttttactgttttccgataactcaccaaagttttgaattgaagttttccatatgaactagggaaatttaatccattttgtactcgtaatttgtatgttcttttctttttgctttgtttctcaatgacagattatacaatttaagttgaaagatgtttaaaagctctggtgtccgttcttggtggctaaaacacccctttgtt

SEQ ID NO: 97443 - DNA, 716 bp, Arabidopsis thaliana columbia
  unsure (1)..(716): unsure at all n locations
caacgtagaagcttctacagattcgatttgggtgtttttggttttggatttggtaaagcttctcggtcacttgctcggtgattgaaactgaatcgattgtgattgtgattgtgattgtgattgtgattgtgagggaattatggctcaagccgtagaagagtggtacaagcagatgccgattataacccggtcgtatctcacggcggctgtagtcaccaccgtcgggtgttcgctcgagattatatctccttataatctctacctaaatcctacccttgtggtgaagcaataccagttctggcgtcttgtcacaaatttcctttatttccgaaagatggatttggactttttgttccatatgttttttctagctcgatactgcaaactgctcgaagaaaactccttcaggggaaagaccgcggatttcctttacatgctcttattcggggcaactgttctaactggtattgttctcattggcggaatgataccttatttgtctgtttcattctccaaaatcatcttcctcagcaattcattgactttcatgatggtctatgtatggggtaaacaaaatccttacatccacatgagtttccttggcctcttcactttcacagcagcttatttaccatgggtacttctgggattcnctatccttgtgggtgcaagtgcatgggggggntttctggggatnatagcgggcncggatacta

SEQ ID NO: 97444 - DNA, 511 bp, Arabidopsis thaliana columbia
  unsure (1)..(511): unsure at all n locations
nnnnnnnnnnnnnnnnnnnnnnnnnnnnnnnnnnnnnnnnnnnnnnnnnnnnnnnnnnnnnnnnnnccacgcgtccggtgactttagagtctccctcaagagcaatcaatggatcagaattcgtacaggagaagatcgtctccgatcagaaccaccaccggcgggtcaaagtccgttggttgctccgaactacttcaaatgaagtatctcagctccggtacgatgaagctcacgagaaccttcactacttgcttgatagtcttctctgtactagtagcattctcaatgatctttcaccaacacccatctgattcaaatcggattatgggtttcgccgaagctagagttctcgacgccggagttttcccaaatgttactaacatcaattctgataagcttctcggagggctacttgcttctggttttgatgaagattcttgccttagtaggtaccaatcagttcattaccgtaaaccttcaccttacaagccatcttcttatctcatctcta

SEQ ID NO: 97445 - DNA, 646 bp, Arabidopsis thaliana columbia
  unsure (1)..(646): unsure at all n locations
cgtccggctgaggaaagcagcttttgagtgtgtgtttactctggtggacagctgccttgatcaagttaatccgtcttctttcattgttcctttcctcaaatccggactagaagatcattatgacctgaagatgctttgtcatcttatactctccttactagcagataaatgcccatcagccgtacttgcagtactggattctcttgtggaaccactgcataaaacaataagcttcaagccaaagcaagatgcagtgaagcaagagcatgaccgtaatgaagacatgatcagaagcgctcttcgtgctatatcgtcactggatcgtatcaatggggtggactatagccacaagtttaagggcttaatgggtgacatgaagaggtctgtaccattgtgggagaagtttcagacaatccggaatgagtaagtttttgtgtatgttgtcttcattaaacagtgatcgatgatgattttctattccaaaaaagggtacaggcgaaagaaaaagaaagactcgataacttaaatttctcaatcggcgaagaagaatttttttaaaaaaaacaatcttcattggaccaaaaaaaaaaaaaaaaaggggggcccgcccnnnnggnnccaacnttccggccccggggcgtcctaa

SEQ ID NO: 97446 - DNA, 392 bp, Arabidopsis thaliana columbia
gaatctttttacagaaacacgaacaagtttcagaatctggtctgactctctgtagccttctcgtttaagagtcattgtacgtattcaaatctacatttctttgccattgttggaatctccgcctcgatcgtttcttatcaaaggatctggtattcgatttttgctatcgatcgtttcaaagcatggtctaatgatgatcctgatctccgactgatccaataacggttaagcaacgctgtttttgatcccccattgttgtttgccatcgatcaacactcagaaataagttggagttttgttcataaagaatggcgtttaatacggctatggcgtctacatctccagcggcggcaaatgacgttttaagagaacatattggcctccgtagatcg

SEQ ID NO: 97447 - DNA, 546 bp, Arabidopsis thaliana columbia
  unsure (1)..(546): unsure at all n locations
nnnnnnnnnnnnnnnnnnnnnnnnnnnnnnnnnnnnnnnnnnnnnnnnnnnnnnnnnnnnnnnnnnnnnnnacgggaaaagaacaaaatcaaatctagcaaataaaatggatcggccgccgcagttgcaacgtactcatggtcatcaccaagcacaggagccaataaggattcaccatccagaggaagaagggcatcatgaaaaaggaccatcaaaagttctgaagaaagtgaaggaaaaagtctagaagatcaagaatgttcttactaaacatggacatggtcatgagcacgatcgtggagaacacatccctgacgatcacgatctagaccaagaagacgatgaagatgactacaacgacaaccaactccacggcggtgcaccagcacgaggaaaagctcatattccggtgaaggaggagatagtccctccaggatcgaaagcttttccagttagtttctcctcacatacaaaaccctctgagccagtgagaggagttggccacgaagcaatgtctcgtcctataaaacactcccggtgtaccgg

SEQ ID NO: 97448 - DNA, 495 bp, Arabidopsis thaliana columbia
cggacgcgtgggctttcacttcttcttcgtctccgtagtttcagtttcgatctgtaaagtttcaaacttgtggtcgaatttttaaatgggaagtggaagagatagagacgaccctttatccttcaccagcaatccatctacggcgtcgtctccagtcactgtatctgactatctcgacaactttctcggcgaacccacttctcgctccggtagttttcaaagcgagagcttactcggtggaggcggtggagaaagcatcaacgacgctgattttggattcgctcgtcctgatttccgatcggaacaactagctggaaccgtacagttttacgagaggcatgtcttcttgtgctacaaaaagccatctgtttggcccgcaaggatcgaggctgctgagttcgatcgattgcctaggctactctctgctgctgtatcggccagaaagggtagcatgaagaaggagactcgactcacaatatgtgaggggcatgatgg

SEQ ID NO: 97449 - DNA, 567 bp, Arabidopsis thaliana columbia
  unsure (1)..(567): unsure at all n locations
nnnnnnnnnnnnnnnnnnnnnnnnnnnnnnnnnnnnnnnnnnnnnnnnnnnnnnnnnnnnnnnnnnnntgccctttttgttttttttttgcttgaaagtactaacgaaataaaaaggcctataatcacacaaatcagactgtacaaaaaaagggaaaaaaacttaaaagcatcaatgtttcttcttattcgatgatgctatgacataaatgcttataaactattcacaaagtcgttggtgcgggctatcacgagtttctaagtttttttacatgaaggcttactagagtcaggacctcgcttggcgtacaaggaaccagccgctgatatattagaaggcagagagaccgtcgcagagagaggttggaaattagtgtttccaacgaaccagtagagagcccatttgaggttgcagagagtatactttagtgctttggtccaactctcttgcttggtgaagctctgtgttattgaataccccaatactttgtccttttcgatcttgtatggaaggttgaggcaattatctggtggaatattgttctcttggtcctttgaatttgcaaaa

SEQ ID NO: 97450 - DNA, 724 bp, Arabidopsis thaliana columbia
  unsure (1)..(724): unsure at all n locations
nnnnnnnnnnnnnnnnnnnnnnnnnnnnnnnnnnnnnnnnnnnnnnnnnnnnnnnnnnnnnnnnnnnnnnnnnnnnnnnnnnnnnnnnncggccgccagagattgagctctcaaggcagctcggtgcttgggctaaggtgctacatgggatggaaggttactgtgtgaagtctttggctgaagctctcgaagttattccttacacactagccgagaatgcagggttaaaccctatcgccattgtgactgaactcaggaacaagcatgctcaaggggaaatcaacgcagggatcaatgtgaggaaaggacagatcactaacatcttggaggaaaatgttgttcagcccctgcttgtgagtaccagtgcgatcactttagcaactgaatgcgttaggatgattctgaagattgatgacatcgtaactgtgaggtagtgtggtagtttctttcaaaacaggtcccagaacacttctattgctctatctaagcttttgtttcgtttttttcatgtgttgtgcttgcacaatggttttgaacttagactcccttttccttaaaagcatcaatgtttcttattattcgatgatgctatgacataaatgcttataaactattcacaaagtcgttgattcagtctatcacgagtttctaagtttttttacatgaaggcttactagagtcaggacctcgcttggcgtacaagggacccacccgctgatatatt

SEQ ID NO: 97451 - DNA, 588 bp, Arabidopsis thaliana columbia
ctttccttccctctctctctcttactctcccaagacaataatgccggacgttggatctgagcgtgtttggttcactctcactgaaaaagcaagacaccgccaccttctccggtaagctaccgtcaaccaaacaacgtttttcgtcggtatcagctgcttgtccttcctttagaatctactactacgacggagccgccggtgccgtccctttcgaatgggaatctcatccaggcacacccaaacacccctcctctgagctacctactctgccacctctcactcctccgccgtctcatttctctttctccggcgaccaaatccgccgccgttccaaaaagtccaccaagaaaatcctcgcactaatcccgacaaggctcttctggctatcgggcgatcacaatggtaaggctaagaaactgtcggcttcatcaccaccatctctgtcggagagagtgttgatcgacgaaaatgagtacgatctgttcaagtttcaaacagaaaggaatgtcatgcgaagattttcatccttcgactcttctgcttgactacccaattcagagatcacaatccacttcctgcttcggaatc

SEQ ID NO: 97452 - DNA, 533 bp, Arabidopsis thaliana columbia
  unsure (1)..(533): unsure at all n locations
cgcttctgttgactcctacatgaacttgcagctaggaaacaccgaggaatacattgatgggcaattgacaggaaaccttggagagattttgatcagatgcaacaacgtcttgtatgttcgtggtgtgccagaagatgaagaactcgaagatgctgatcaagactaacatgtgctgatgacactgaattctcaagtttgtgtttttactttgaaagtaacaacaagccatttagttttatgccatactaaacaaaccttcctgttgttttttttaaccatcttcaatttacggcctgttataagccatgatatgttatgtgatcctcgagggatgttaccttcacgatcttcatattcttcttcgagttctggccttcatttgttcacttataatactctgtgatgtaatacttatatgttctaaaatcgaagtagtttccgcctgaaaaaaaaaaaaaaaaagnnnnnnnnnnnnnnnnnnnnnnnnnnnnnnnnnnnnnnnnnnnnnnnnnnnnnnnnnnnnnnnnnnnnnn

SEQ ID NO: 97453 - DNA, 379 bp, Arabidopsis thaliana columbia
tgaaaatacatttagaaactgataatatcggttgaggtctattcgggttgtggctggttctcgaaggtaggtgagacctgatattgaacctgaatttaccgacaaattatgtatacgtattatttcgagttacatgtatccgtttgagtttcgatatttcacgtatctgttcaggtttcagatcctacacgaaccaaaccaaaatcccaaaataaacactttagatccactcgaaccaaagcgaactaggtttttcgggcttcggattttatggtcatgcctagttttgtcctttgaaacattaaaattagaagtaaatctacatatacatttttgcagtcattttagcaaataaattttgtacttgtatttacaatgt

SEQ ID NO: 97454 - DNA, 1598 bp, Arabidopsis thaliana columbia
  unsure (1)..(1598): unsure at all n locations
gaaagacccagaggttcacgggcggtttacccttttgcagacatcccggggccgacaagggtatttgcgtgccacatacatgatgaaaccaaaaaattctgctaccaaactggtgtgaacgttgttgctgcttatggaggaacacccattcaccaccagatcacggaactcgagaggggatgtgatattcttgtggcaacttctggccggttaaatgattcgctcgaaagagctagagtctcaatgcagatgattacgtttttagctctatatgaggcagacaggatgctggacatgggttttgagccacagattagaaagattgttgagcagatggacatgcctccacgtggggtgagacagacaatgctgttcagtgctacatttccaagtcagattcagagacttgcagctgatttcatgtcaaactatatatttttggctgtgggaagagttggttcaagcactgatttaattacccaaagggttgagtttgtccaagagtctgacaagagaagccatctcatggacctgcttcacgcgcaaagagagacccaagacaagcaatcattgacattagtttttgtggagacaaagaggggagctgatactttggaaaattggctgtgcatgaatgagtttccagcaacctccattcatggcgatagaacacaacaggaaagagaagtggcactgaggtccttcaaaactgggaggacacctattttggttgcaacagacgtggcagcacgtggtcttgacattccccacgtggctcatgttgtaaacttcgatctaccaaatgacattgatgactatgtccaccgtatcggacgaacaggacgtgcaggcaaatctggaatagcaactgccttcttcaacgagaacaatgcacaactggctaggtcgcttgctgagctaatgcaagaagccaatcaagaggtccccgagtggctcacacgatatgcttcacgtgcttcatttggtggtggtaagaaacggtctggtggtcggtttggtggccgtgacttcagaagggaaggctcttacagtagaggaggaggcggcggcggcggaggaggcggcagtgattactatggcggaggaggctatggtggtggtggatacggtggtgctccaagcggtgggtatggtgctggagtgaccagtgcttgggattagccaattaggctccccaatttttcctctttttaacctgactacttatttcttctcttctacattcccaagagagcacgtgtatttgcccccacctttgagatctctcattcaagagatggatttaactaatcttgctattaggtggatctctctgttttttcaggctatttttaggatttgtcctaaaagatagacagtagtttttccgattttgatcttgttcttggtttcttctaacaatttcatttgttagtttgaaatccaatttgtctttttgtttccctttgttgttgacaatctttcttggtgaaatacaatctctctttatatcaaaaaaaaaaaaaaagggannnnnnnnnnnnnnnnnnnnnnnnnnnnnnnnnnnnnnnnnnnnnnnnnnnnnnnnnnnnnnnnnn

SEQ ID NO: 97455 - DNA, 206 bp, Arabidopsis thaliana columbia
acttgggtagtattaggctgtagtaagaaagtgaagtactgatatgtatgtgtaagctctctcagtgatgggaagttttgtacgtttgtgtggttttaacttaatgataaggtgtttgtttgtagtagtagtctccatgtaactagatgggggaaaagtaggtgtgactttaagtttcttaaaagctcaaagaaactttagccctt

SEQ ID NO: 97456 - DNA, 519 bp, Arabidopsis thaliana columbia
acccacgcgtccggaagaaagtccactcaagaaaagagaaatggcgtttgaagctcttacgggagtcaacggtgatctagtcaccatatcatggatggcgtcgaagggagctaaccaaacggagcactatctcaaagaaagaagtaggaggaaccgttgttttcgccttccgagcatctctctcgtcggaagatttgttcgctacggagaatacatctccctttggagaaataaagatgaagcgtaatcaatttccttgtatgagaagcatcggcaacgacgttgacactactgttaacgaagctttcctcaagtcacttgaagttctcattggtccaagaacctgatttcatgcttctgtgcaaagcgcggttgatagaaaacaacaggttgtgttcacaggacattctttcggaggcgcaactgcaattctagcaacagtttggtatttggagacatacttcatacgtgacgcctatgctgcccctgagcctcgttgtgtgacatttggagctcctt

SEQ ID NO: 97457 - DNA, 721 bp, Arabidopsis thaliana columbia
  unsure (1)..(721): unsure at all n locations
gcgcccaccaaagtctgtacttntgtgtgttgttgttcttctagctaactaacaaataacgtggagctccgagaatttgtttcaaaagatatgttccgggcagtcattcgtggcttgggcatggagtccaatgccattaacagccctgatttagttaatatatgccgtgaaatatatatctatctctctgacagagacccagctcctcgccaggttttggtttcgctcccgtgtctcactcccaacgacttgcatgcttttgaagaagctacagccaaaactagcagccccaaagaacaaaagcagcttatgaggagcttgttgttgctaggtactgggaacaacttaaaagcacttgctgctcaaaaaagtcagaatgttatcaccaatgtcacagcaagaacgcggctacccgcaagcgctccagaaacaattggagcgggtgttttgtgggatgaagagttcgtacaatgattaaagaatcgtacatagtataaacagaatttatttgagatgccatgtaatagtagagaagcagatttctgtttatgtccttacctttacttgttaaattcataggtagaaagaaagaacctctaaccaaagcttccatgtcataagcaaagtttttgtgattaaaaaaaaaaaaaaagggcggccgctctagaggatccaagcttacgtacgcgtgcatgcgacgtcatagttcaactatagtgca

SEQ ID NO: 97458 - DNA, 400 bp, Arabidopsis thaliana columbia
aggccgggggcgttccacgcgtccgatttcattgagcaaaagataaatttactaaaatagacggaaatgctgttgctctcacgatcctgtggatggatgttccctaagtccaagaatggatggatgtctaacaccatcatgttttgtaagaaattcttgaagcaaattcctcatctttaacgcttcctccatgtaattatcctgaataaaaatggcattataagaaacttaatatcaacttgaagtatcgaaataactagaaggctgagcaaaaagaacaagtgcatacctgattcatatcgattgtctgtaaaccttctccacgggaaaaaatgatagcatgattttggttttctggctttccttctccaagaatagcaggtccaggaagcctaatcct

SEQ ID NO: 97459 - DNA, 1673 bp, Arabidopsis thaliana columbia
  unsure (1)..(1673): unsure at all n locations
attccgggcgaccacgcgtccgacttgtcaagccgggggccaacatctgatggagatcttggtgtctgcataagtgcacctggtggggctgttgctcctgttcctacatggacgcttcaaagacgcatgctcatgaatggaacatcaatggcatctccttctgcctgtggggcaattgcgttacttctaagtgctatgaaggctgagggcatcccagttagcccgtacagtgtgagaagggcccttgaaaatacatctacaccagtaggtgatctacctgaagataaactaactactggacaagggcttatgcaagttgataaggcatatgaatacttaaaacagtttcaggactatccatgcgtattttatcagataaaggtcaatctctccggtaaaacaattccaacatcacgaggcatctacctgcgggagggtactgcttgcagacagtctactgagtggacaatacaagttgatccgaaattccatgaaggtgcaagtaatttaaaggaacttgtccctttcgaggaatgtcttgagttgcactccacagatgaaggagttgtacgggttcctgactatctccttctcactaataatggacgtggcttcaacgttgttgtggatcccacaaatcttggggatggtgtgcattactttgaagtttatgggattgattgcaaagcaccagagcgtggtccccttttcagaatcccagtaacaataataattcccaagactgtggcaaatcaacctccagttatttcatttcagcaaatgtctttcatctcaggccacattgaacgaagatatatcgaggtaccacatggagcaacatgggctgaggctacaatgcgaaccgcggggtttgatactacacgacgattttacattgatacacttcaggtttgcccattgcgaaggcctatcaagtgggagagcgcaccaactttcgcatctccgtctgctaaaagctttgtgttccctgtggttagtggtcaaacgatggaactagctatagctcaattttggtcaagtggcctcggaagtcgtgaaccaactatcgttgactttgagattgaattccatggagttggtgtcgataaagaagaattgttacttgatggaagtgaagcaccaataaaagttgaagctgaagcactattggcatctgaaaaacttgttcccatagctgtcctgaacaagatacgagttccatatcagcctattgatgcacaactgaagactctatcaactggccgtgatagactactgtcgggcaaacagatactagcattgaccttaacctacaagttcaaattagaagattcagctgaagtgaaaccgtatataccattattgaacaatcgcatatatgacacaaaatttgagtcccagttttttatgatctctgatactaacaagcgtgtatatgcaatgggtgacgtttatcctgagtcttcaaaacttcccaagggagagtataaacttcagctgtatctgaggcatgaaaatgtggagctgctggaaaagttgaagcagctcactgtgtttattgaaagaaatatgggggagattcggctgaattttcattctgaacccagatggtcccgttcacctgggtaaatgggtgcctttaagtcctctgttctaatgcaggggntgaaggg

SEQ ID NO: 97460 - DNA, 497 bp, Arabidopsis thaliana columbia
cgaacaagaaccctagaattcgcctcctctttccaaaattcccaatttttgtaatgacgggatagaaaaattcccaatgtccgctttatctttcattctcgattagaattcttcaaccaaaggtcactctctctccgttccattgcttctggatttcgtttttaagggttttacatttttcctgccttcttttacccatcagaggaagtttcaagccattttgttaatcagctctctcataagctaagatgtcgtcatcgccttttccagtcttggacaaccgaccaattgataagtggaaggttacggaattgaaagaagagcttaaaagacggagactaacaacaagaggcttgaaggaggaattggttaggcgtcttgatgaagcacttcgtgctgagcaagaagagtctgaaaggatcaatagtgctactgttgctgctgctgaaaaagccaatcaagagcctcagatgtttcctgttactgtaggtgatcgt

SEQ ID NO: 97461 - DNA, 1320 bp, Arabidopsis thaliana columbia
gaaagcacttcggatgatgtattatgcagaccatcacggttttccaatcgtgacatttatcgacactcctggagcctatgcagatcttaaatccgaggaacttggacagggtgaagcgattgccaacaatctgaggacgatgttcggcctgaaagtgccaattctttctattgtcattggggaaggtggttctggtggtgccctagccattggctgtgcgaataaaatgctgatgctcgaaaacgcagttttctatgttgccagtccagaggcatgtgcagcgatcttgtggaagacttctaaggctgctcctgaggctgctgaaaagcttagaattacctccaaggagctggtcaagcttaatgtagctgatggaatcattcctgaaccgcttggaggggcccatgccgatccttcatggacgtcgcagcaaataaagatcgctatcaatgaaaacacgaacgaattcggaaaaatgagtggggaggagctcctgaaacacaggatggctaagtaccgaaagattggagtgttcatagagggcgaaccaatagagccaagtaggaaaatcaacatgaagaaaagggaagccgtgttctcagatagccggaagctgcagggtgaggttgacaagctgaaggagcagattctgaaagccaaggagacgtctacggaagccgagccttcgagtgaagttcttaatgagatgattgagaaactcaaatccgagatagatgacgagtacactgaagctgcaatagcagtaggtttggaggagagactaacggcaatgcgcgaagagttctcgaaagcgagttcagaagagcaccttatgcacccggttctgatcgagaaaattgagaagctcaaggaagaattcaatacccgtttgactgacgcacctaactacgagagcctaaaatctaagcttaacatgcttagggacttttccagagccaaagcagcatcagaagctacttcattgaaaaaggagatcaataagcggttccaggaagctgtagaccgcccagaaattagagaaaaggtcgaggcaatcaaagctgaggttgcgagctcaggagcttcttcttttgacgagttacctgatgcactgaaagaaaaagttctgaagactaaaggggaggtcgaagcagagatggcgggtgtgttaaagtcaatgggtctggagcttgacgctgttaaacagaatcaggagggtacggctgagcagatcttatgccgcaaacgaaaccttcaaggaaactttaaagctgacccaggatttccccagcaagtttaggggggttgtgaggccacctg

SEQ ID NO: 97462 - DNA, 389 bp, Arabidopsis thaliana columbia
cactaagaagaagcagagaaaatgagaaaccttagcttcatcgtcttatttctattgaccctcttcttcattcatcatttgggtgatgcttctttgctagtgaagtctcttcctggttttgaaggtcctcttccttttgagctcgagactggatatgtgagtattggtgaatctggagatgttgagctcttttactactttgtgaaatcagagaggaatccagaaaatgatcctctcatgatttggctcactggtggacctggctgcagctccatctgtggattgctcttcgcaaacggtcctttagcttttaaaggggatgagtataatgggacagtacctcctctagagttgacatctttttcatggacaaaggtggctaacatttt

SEQ ID NO: 97463 - DNA, 382 bp, Arabidopsis thaliana columbia
gtaaataaaaaattagtgatgataaaataataaataaatatttaacccgtgttatatcaatccaaatgcgctccactatataacttgtctcatgatatttttattattatttgttttttgggcaaaatattttaattattttagaagtttaaatttggaaagatttaaatgattttaagttaattttaagttagtgtgtagtatattttagtttagatttgaaaagatttaaatgatttttgtgactatttttctttttgttttctaaattttaataacaaaattgatttatattcagatttgagaataaatttattaaaatattaaatgctaatagcattggattgtaaataagcctaatcttcaagatttatttcataaa

SEQ ID NO: 97464 - DNA, 425 bp, Arabidopsis thaliana columbia
aaaatccaacccaagaaccacagtgagatctttctcagaagacaaaaatcccaacagcgtcgtctaagtctaacatcaacctctcgcaggtcctcaacactgaggagccgtacagctccgtgatgctggccgtcgctgctctcttggccgttgtatgctacttatggattcaggggaagtccaagtccaaaaaggaacctccactgcctccgggaccttggccacttcctatcgtcggctaaacctcccgttcctaaactctgacgtcctccacacgcaattccaagccctaaccctaaaatatggccctctcatgaagatccacctcggttccaaacttgcgatcgtcgtctcttcccctgacatggctcgcgaggttctcaaaacccacgacatcactttcgccaaccacgatctccctgaag

SEQ ID NO: 97465 - DNA, 1169 bp, Arabidopsis thaliana columbia
  unsure (1)..(1169): unsure at all n locations
atgatcctnnnnnnnnnnnnnnnnnnnnnnnnnnnnnnnnnnnnnncggaattcccgggtcgacccacgcgtccgcaacacaaaacctccaaaccaataatcagaacacagtgagatatttctctctgaagccaaagatggaaacggcgtcttctaatttctctctctcgcagatcctcaatattgaggaaccctacagctccgtaatgctcggtgtcgccgctctcttggccgttgtttgctatttctggatacaggggaagtccaaatccaagaacggaccaccgttgcctccgggaccttggccacttccgatcgtcggcaacctcccgttcctaaactctgacgtcctccacacgcaattccaagccctaaccctaaaacatggccctctcatgaagatccacctcggttccaaacttgcgatcgtcgtctcttcccctgacatggctcgcgaggttctcaaaacccacgacatcactttcgccaaccacgatctccctgaagtcggaaagatcaacacttacggtggtgaagacatcctctggtctccttacggtacccattggaggagacttcgtaagctctgcgtcatgaagatgttcactaccccaactctcgaagcttcctactccactcgccgggaagaaacccgacaaaccattgtccacatgtcggaaatggctcgtgaaggatcaccagtcaacctcggagagcaaatatttctttccattttcaacgtcgtgacaagaatgatgtggggcgccactgttgaaggagacgagagaacgagcttaggaaacgggctcaaaaccctaatatctgatatctccgacatagaagggattcaaaactactcagatttctttccgttgttctcaagattcgatttccaaggattggttaagcagatgaaaggccatgtgaagaagcttgatctcttgttcgatagagttatggagagtcacgtcaaaatggtgggaaagaagagcgaagaagaagaagatttcttgcaatacttacttaaagttaaagatgatgatgagaaagctcctctgtccatgactcatgtcaagtctctcctcatggatatggttcttggtggtgtcgacacatcggttaacgcatccgaatttcccatggcagagattgtgagcagaccggaagtg

SEQ ID NO: 97466 - DNA, 771 bp, Arabidopsis thaliana columbia
  unsure (1)..(771): unsure at all n locations
gccganaaaaccncaccgnncctnnaccttgaaaatggtngcctncttgagactgcccgagtttgcnaattgagggaatgnnccagnaaagtgactgnaaccttttcaaatcctaacccgttncaggtttggnaatggagctgagacacgngaaattactcaancttgctggataaaaaccgtgatttgcgattgtcagaacctttagcttcttcatttcagcaatgaagcttggcaatgcatagtctaatgaggagatattaagaactaaagcctcaacattggggcaatccatttccaaccatttcgatgagnacaaatcatccgtatagatagacaaaagtcgagcattaataggttgatttaaacactcgtccggaaagttgtcctctcgtatctccaaatttagtttctttctttgcatgattggttccaattcactttgaaaaatagccaactccctcagaatattatgttgagtgactaacaactcattgtaaaaaccgtcttcgcgcttatttgtcctggtagtaagtaaaacaaataagttcatgatcaaatggtagatggcaagaaggtgcaatgaaacaaatgttgtaaaaaacaacaccaacgtacccgagatgaacaagtttaagcagattctgggaagcaagctcattaaggtataacatgaacttgttagtactagaactacctctaccatataattccatccatatgtcaattataagcgaagcacgtatcttttggtcctgaagaaatgaaccc

SEQ ID NO: 97467 - DNA, 376 bp, Arabidopsis thaliana columbia
gtggtggttctcaactattggaagcaaaagaaggattatgaagacaggttgaagattgagtaggcgggggcagatgaaaggaagaaaatgagggagttggaaagggagatggagggaattgaggaagaggatgaggaggttgaggaaggtacgggtgagaaaaatccttacttacagatggcgatgcagttcatgaagtcaggtgcacgtgtgagacgagcatcaaataagaggttacctgagtatcttgagagaggtgtggatgtcaaatttacagatgttgctggacttgggaagattcgtcttgaacttgaggaaatcgttaagttttttactcatggagagatgtaccgcaggagaggggtcaagattccag

SEQ ID NO: 97468 - DNA, 700 bp, Arabidopsis thaliana columbia
  unsure (1)..(700): unsure at all n locations
actatagaaaatttatgacgtcgcatgcacgcctacgtaagctcggaattcggctcgaggggaaaaaaatatcttccaaaataaaaggtctgcctttggcttcttcttcttcgtcatttcctctaaatttaaatacccattttttccgattaatttttggtgaagaataatttttggtggaaagagaggttaattaaattatgccttcaatagaatatgatctggttccggcaacgccgggtaaattcaaaattgaccggtcaaaccggcaggttcaacggtggtttggttttaacagcaacatggttttttggggtttttttcttattggttttaacggtttttacttgaatttccaaagctttgttgattcccggaggcggtattttaccggtttttggggccgcatccaaggggagaaaccgggtcgtacctccgctcagatccatcgctccggcggtatctccgtccttgttaccggcgctaccggattcgtcggtagccacgtgtcacttgccttgaggaaacgcggcgatggtgtcgttggacttgataattttaacaattactacggtcccgcttttnaacgngctcgtagntctnttgttngtcggtcgggnaggggatctttcgnccgtttnaagggnggtcttaaacgganggggaagtttntttaggaaaaagttttttcggatnttgg

SEQ ID NO: 97469 - DNA, 1580 bp, Arabidopsis thaliana columbia
acggacacgtcggtcttgggaaaaaaaatatataccaaaataaaagatctgcatctgtcttcttcttcttcttcatttcctctaaatttaattacccattttttccgataaatttttgttgaggaagaatttttgttgtaaagagagtttaattaaattatgccttcaatagaagatgagctgtttccgtcaacgccgggtaaattcaaaattgaccggtcaaaccgtcagctccaccgttgtttcgcttctacgagcaccatgtttctttgggctctcttcctcatcgctctcaccgcttcttacttgagtttccaaagcttcgtcgattccggtagccgttatctaaccgcttcttggggcggcatccagtgggagaaacaggttcgtacctccgctcagatccatcgctccggcggtatctccgtccttgttaccggcgctaccggattcgtcggtagccacgtgtcacttgccttgaggaaacgcggcgatggtgttgttggacttgataatttcaacaattactacgatccgtcgttgaaacgtgctcgtagatctctgttgtcgtcgagagggatcttcgtcgttgaaggagatctaaacgacgcgaagctgttagcaaagcttttcgatgtggttgctttcactcacgtgatgcatctcgctgctcaagctggtgttagatacgctttggagaatcctcaatcgtatgttcatagcaacatcgccggacttgtgaatcttctcgagatttgcaaagcggcgaatcctcagccggcgatagtttgggcttcatcgagctccgtttatggactcaacgagaaagttccattctctgaatctgaccggacggatcaaccggcgagtctctacgcccgcacgaaaaaagccggcgaagaatcacccacacttataacctatttacggtcttgcattaccggttaagatcttcacggttacggacctggggtgaccggattggctacttctctcccagaacatctacaagaaaccgattacaatttaccggggcaaaaaccgggtcgatttagcccgggatttcacatacatcgacgatatagtgaaaggatgtttaggatctctggattcatcgggtaaaagtaccgggtcgggtggtaaaaaacgtggagcagcaccgtaccggatatttaacctgggaaacacatctccggttacagtaccgattctggtggatatattggagaagcatttaaaggtgaaagcgaagaggaacttcgtggagatgccaggaaacggcgacgtaccgttcacacatgccaatattagctcagcccgaaatgaattcgggtataaaccgacaaccgatttggaaaccgggttgaagaagttcgttagatggtatctttcttattacggatacaatactaaagccaagcttgtacattaaccgtgactattattattatttttaatgaaattatttttttcttaaaaaaaaaaaaaaaaaggcggccgctctagaggatccaagcttacgtacgcgtgcatgcgacgtgatagctgtttaatggttaacgacttccaacggggggcgg

SEQ ID NO: 97470 - DNA, 2361 bp, Arabidopsis thaliana columbia
  unsure (1)..(2361): unsure at all n locations
cagnnnnnnnnnnnnnnnnnnnnnnaaaatccattgacgccctaacaaaagacgccggctagtgtattcgtcactttctctagtttcctgtaacccaacccactcaaacgaaattttttcttaatctctctttcgttcttcttcttcttcttcttctttagattgttgtaattccaatcggaactctcgattcgctttcttctccgttcttctgtggcggaccggttttgtggttttttatttgaacattcccgatcttgccctgagttccacgatcagtttctttaaaccctaggttttacacaagcattctgtttctccagattatcgcagactctttcgttctattctttgtagttttgtaaaaggtatttcggtagatttagggtttgtctgtgtctagttttcgagatcgagagagatttgtgatgaatactaacagaggaagatatccaccgggtgttggaacgggtcgtggtgcgcctccgaatccaaattatcatcagtcttatcggcagcaacaaccacctcaagatcagcagtatgttcaacgcggttattctcagaaccctcagcagatgcaactccagcaacaacatcaacaacaacagcagcagcaacagtggtcaaaacgccctcagcttcctgaaaacgctagtaacgctaatgaggtggttcagcaaacaacccagcccgaagctagcagcgatgctaatggtcaaaactggaaggctactttaaggctaccacctcctgatactcgttatcagacagcggatgtgacagctacaaagggaaatgaattcgaaaattactttctgaaaagagatctgttaaagggaatatatgagaagggttttgagaagccatctccaattcaagaagagagcattccaattgctttaactggtagtgatattcttgctagagctaaaaacggtacaggaaagactggtgccttctgcattccagtcctcgagaaaattgacccaaataacaatgttattcaagccatgattctagttccaacgcgagagctggcccttcagacatcacaagtttgcaaggagctttccaaatatttgaatatccaggttatggtcaccactggcggtaccagtctgagagatgatattatgcgattacatcaacctgtgcatctgctggttggaactcctggaagaatattggatcttacaaaaaagggtgtctgtgttttgaaagactgtgcgatgcttgtaatggatgaggccgacaagcttttgtctgcagaattccaaccttctctagaggaattgatacagtttctaccccaaaatcgtcagtttttgatgttttccgccacattccctgtcactgttaaggcttttaaggatcgacatctccggaagccctatgttatcaatctcatggatcaactcacgcttatgggtgtcacgcaatattatgcttttgtcgaagaaagacagaaggttcactgcctcaacacacttttctctaagctgcaaataaatcaatcgataatcttttgcaactctgtcaatcgcgtggagctgttggctaagaaaatcacagaacttggttattcatgcttctacattcatgcaaagatggttcaagaccacaggaacagagtattccacgagttccgcaatggtgcttgcaggaatctcgtttgcactgatctgtttactcgaggaattgacattcaagctgtgaatgtcgtgatcaactttgattttcctaggacttctgagtcatatctacacagggtgggtcgatcaggacggtttggacaccttggattggctgtgaatttggtaacttatgaggaccgtttcaaaatgtatcagactgagcaagaacttgggaccgaaatcaaaccaattccttctaatatcgatcaagcaatctactgtcagtaaacttgtaactgtgcatgaaacgtgtctccacccaatgagaggtacaagatggttaaaatggtgtttctcaagctcgaggggaggagatgaggcaactagtacttggcggttcatgtaaagactcgttactcagtggtttggttcctaatctctcttaaagacacttgttatctggttctatggaaacctctttacgctgcacttattatgagactccctttgacttggttagtaataaagatagaacgtatgactctcctcttttttattttcgtgttgggctctgtttggaattatgggctttatcctatttaggatctatttatcatgaaagttgcacttcttaatttttgcttccacgggattattttgatttttccnnnnnnnnnnnnnnnnnnnnnnnnnnnnnnnnnnnnnnnnnnnnnnnnnnnnnnnn

SEQ ID NO: 97471 - DNA, 633 bp, Arabidopsis thaliana columbia
aaaaaataaaaataaaaatgaagagaataagaataatggcaacgcttgtaatagcaaacatgttaatggcgactccaacgtctcgagcctctctcaatcttcttcgtcgatcgccaaaacccaaatatttctcatcttcttcttgtcattttcgtccctcaacttttcgtaaatcatatccttgccccatctggtcttcttctttctctttttgtctccctcctcctagatccaccacttccacctctctctcctcctcctctttccgccccttctcctctcctccgtccatgtcttccgccgccgctgccgccgtggaatccgtcgtctccgacgagactctttcctcgaatcctctcttgcaggacttcgatttccctccgtttgattccgttgatgccagtcatgttcgtcctgggattcgtgctctattgcagcatctcgaagctgaattggaggagctagagaaatctgtggagccaacatggccaaaactggtggaaccattagagaaaatcgttgatcggttaactgttgtttggggaatgatcaatcaccttaaggctgtcaaggacacacctgagctacgtgctgccatcgaagacgttcagccagagaaagtgaagttccagc

SEQ ID NO: 97472 - DNA, 728 bp, Arabidopsis thaliana columbia
  unsure (1)..(728): unsure at all n locations
nnnnnnnnnnnnnnnnnnnnnnnnnnnnnnnnnnnnnnnnnnnnnnnnnnnnnnnnnnnnnnnnnnnnnnnnnnnnnnnnnnnccacgcgtccgcggacgcgtgggctttctcataagttttctgagaatgttttggacgctacaaagaagtttgaaaagttgataacagacaagaaagagattgaggggttgccaccatctgcacttggattgttcgcacaagcagctgtttccaagggccatgaaactgcaactgctgacactggaccatggctcattacactcgatgctcctagttatcttcccgttatgcaacatgccaaaaaccgagctctgcgcgaggaagtctaccgtgcttacttatcccgtgcctcttcgggtgatttagataatacagcaattatcgaccaaatcttgaagcttcgactggaaaaggctaagcttcttggttacagaaattatgctgaggtaagcatggccacgaaaatggctactgtggagaaagcagatgagctactagaaaagcttcgcagtgcttcatgggatccggctgttcaagacatagaagaccttaagagttttgcgaagaaccaaggtgctgcagaggctgacagtttgactcactgggacatcactttttggagtgagaggcttcgtgaatccaaatacggtattattggggaaggacttcggccttacttctaatttcccaagggttttgggttgc

SEQ ID NO: 97473 - DNA, 840 bp, Arabidopsis thaliana columbia
ggccccccctccgggtcgacggtatcgataagcttgcttctgaagatactctctcctcgaatcctctattgcagaattttgacttccctccgtttgactccgttgatgctcaccatgtcagacctgggattcgtgctctgttgcagcagctcgaagctgaattggagcagctagaaaaagctgtagagccttcatggccaaaactagtggagccattagagaagattattgatcggttatctgttgtttggggaatgatcaatcatcttaaggctgtcaaggacacacctgagcttcgtgctgccattgaagaagttcagccggagaaggtgaagttccagctcaggttgggacagagcaaacccatttacaatgcatttaaggctattcgagaatctccagactggaattcattgagcgaagctcgtcaacgattagttgaagcccaaataaaggaggcggttctgagtggtattgctcttgaagatgataagagggaagaatttaacaaaattgaacaggaacttgaaaaactttctcataagttttctgagaatgttttggacgctacaaagaagtttgaaaagttgataacagacaagaaagagattgaggggttgccaccatctgcacttggattgttcgcacaagcaactgttttcaagggccatgacaactgcaactgctgaacactgggaccattgggctcaattaccactccgatggcttcctaagttatatcttcccccgtttatgccaaacattgcccaaaaaaaccggagctttttgcggccgaggggaaattcttaccgggggctttacctttattcccccgtggcc

SEQ ID NO: 97474 - DNA, 710 bp, Arabidopsis thaliana columbia
ttcccgggaaagaaagaaaaaaagagaaggcatggccgcggaagaagcgacggagttctacctgagatactatgtcggtcacaaagggaaatttggacacgagttcctggagttcgagtttagagaggacggtaagctccgttacgccaataactctaactacaagaacgatactattatccgcaaggaggtatttctcacccccgccgtgctcaaggaatgcaagcgtatcgtctccgagagcgagattctgaaagaagacgataacaattggccggaacctgaccgtgttggaaagcaagagctcgagatcgtcttgggtaatgagcatatctcattcgctacatctaagattggatctcttgttgattgccagagcagtaatgatcctgaaggacttcgcatcttctactatcttgttccaggacttgaaatgtcttgttttttcgctcatctctctgcacttcaaaatcaagcctatctagagaagaaaatcagtttgtgacatgtcaagacgcgatgaatttgttgggaacatgaggactttgtgactgaagtttggttgtttttatgtctctggttctctgtttttttttttttgttggatttgggtgaaagtgggtatgtaagatgttctacctcaacttttggtccttttttgtgtcaacatcccatgtgaagaacctttcatgaaccacaacctatcttct

SEQ ID NO: 97475 - DNA, 301 bp, Arabidopsis thaliana columbia
tagaactttaaatccattctctcttagaaaaagaaaaaaacaagtggcggatcatcaacttcgtgtgcgtcaacaacaaccaataatgaggagtctccatgaatcatcaccatcgactcggcagatagtgagattcgtaacggcagctacgatcggcctatcactcctcgtgctctcaggactaacactaaccggaacggcgatcggtttgatcgtagcgacgccgctgatggttctgttcagccccgtgttggtacccgcagttataacaatagggcttttgacgatggcattcctattc

SEQ ID NO: 97476 - DNA, 411 bp, Arabidopsis thaliana columbia
gctagtagcctcttgtactcttccattttacgcgcaatccacgcaccaacaaaaagaaaagaaaagaagagataaagaatatctttaaaaagtaagtgtggagaattctttcttctcaataaacaacaacatgtcgtcgagcaatgaaaatgctaaggcacaagcgccggagaaatctgactttacccggagatgtagtttgctcagccgttacttgaaggagaagggtagtttcggaaacattgatcttggcttataccgaaaacccgattccagtctcgcgttgcccggaaaattcgatccaccagggacttttattatctctttcttctttcatggccgccacttggtaatagtactttaaaaactcagttctgttactacttgcttttgccagatttactacttttg

SEQ ID NO: 97477 - DNA, 401 bp, Arabidopsis thaliana columbia
acgtgaaccacctcaccaccagacacacaaaaagacgagaccgatcggcgatcagtagacttaaccaaactcgcggtgaaacagtcggaatccaccgctataaggaacgatgatgatctcccaattcttcgtcttatctcagcgaggagataacatcgtcttccgtgactaccgggctgaggtacccaaaggaagtacagagacattcttccgtaaagtcaagttctggaaggaggatggcaatgcagaggcgccacctatctttaatgtcgatggcgtgaactacttccatgtcaaggttgttggtctatattttgttgcgacaacgagagttaacgtgtcaccctctcttgttttggagcttctacaaaagattgctcgtgttattaaagattatcttg

SEQ ID NO: 97478 - DNA, 341 bp, Arabidopsis thaliana columbia
acggacgcgtgggttttttttttttaataatatagctctcgtcgtttataattttttttttttcgtctggggcaaattgtaatctagaaacgacaggaaccaagggttacgaaattgaagatcgaagatgttagaacagcttttaatctttacccgaggaggattaatcctttggacatgcaaagagattggtaatgcattaaaaggatcacctatcgatactttgatccggtcctgtctccttgaggaacgatctggtgctgtttcgtttaactacgatgctcctggtgctgcctacactctcaagtggacgtttcacaatgatcttggacttgtctttg

SEQ ID NO: 97479 - DNA, 367 bp, Arabidopsis thaliana columbia
gccaactaaatttgccatacttatatgcataaactttgttagatggtgtctactgcacagactggtgtccttcaatatcagaactataataatttacacggcttggacgataccaagaacgtttttccattttatttcaaacagtgggaaagcaaaatataatggaattcagacaaaataagattttggctacataggtgatagatgtcacgggttctacaaatatatatgcttgaacggtacaatgaaaaaacgtctatatgattttcatatttctgtctctcaaatgttcgcgaggtggccgtattgaactttgctcatagtcatactcatatgcatcaaatacgaattattttcccttagctat

SEQ ID NO: 97480 - DNA, 511 bp, Arabidopsis thaliana columbia
aacacgcgtccgtaggattctgattccgagtctctagttccaaagagaagagaacatctgtgagagatctgagacgtctggaaatgtgaagaaaacaaaaaaaaaaaagatctgagagagagagtttcgaaattctcgtgttcgtaagcaaaaatggtttgggagaaagagaagatcgtcggaagttgtatagtcggaggagctgcgttcgccgtcggagcttctttccttcatcttttccttaaaggtgagcttccgttaggattaggtttaggtttgtcttgtccatggcgcattttgagaaaacgaaaacctgttcgcgtttacatggatggttgcttcgatatgatgcactatggccactgcaacgctcttcgtcaagctcgtgctctcggtgaccaattggtcgtcggtgttgtttccgacgaagaaattatagccaacaaaggacctcctgttactcctcttcatgaaagaatgacaatggtgaaagctgtgaagtgggtggatg

SEQ ID NO: 97481 - DNA, 392 bp, Arabidopsis thaliana columbia
ggggcgacccacgccttccgggaaaccggctttaaaccctttattcaacctaagaaagaggtttcaaggaggcttcccaaggctcttcccgtcgatcctgcatccaagtttccttcaccgttacctacttttactcgaggtgatggttttgcgaaaggaaccattgacttaggaggtggtctcgaagttagtcaagtttcgacattcaacaaagtttggtccacttatgaaggaggaccagacaatctcggagctacattctttgaaccatcctcaatcccttccggtttctccatccttggctactacgctcaaccaaacaaccgtaatcttttcggttgggtactcacagctagagatctctcaagcaacaccttaaaaccaccagtaga

SEQ ID NO: 97482 - DNA, 1424 bp, Arabidopsis thaliana columbia
ctgaaatagttgttgcaactccaggaaggttatgggaacttatgtccgctggagaaaagcatcttgtagagctgcattccttgtcgttctttgtgttggacgaggctgatcgcatggttgaaagaggtcatttcagggagctgcagtctatactcgacttgcttccagtgacagataaaccaaatgaagggaaaacgcaaactgtgaagagtaatgacacagttttaaacgtcccgaagaagaaaagacaaacttttgttttctcagccaccatagcgctgtcttcggatttccgtaaaaagctaaagcgtggctcctcaaagtcaaagcaatcatcatctggtgaagtgaattctattgaggttttatctgaacgagctggaatgagagataatgttgccatcattgatctgacaactacatctattttggcaccaaagattgaagaatcttttattaagtgcgaagagaaggaaaaagacgcatacttgtattatattttgagcgtccatggacaagggcggacaattgttttctgcacatcagtgactgatttgcggcatatctctgggcttttaaagattcttggacttgatgtttgcacactcttctcagaaatgaagcagcgagctcggttgaagtcaatcgaccgtttccgtgcgagcgaaaatggaatactcatagcaacagatcttgtagcaaggggtattgatattaagaatgtccgaactattattcactacaaacttccacattcggcagaagtgtatgtacatagatgtgggaggactgctagagcattcgcagatggatgcagtatagctttgattgagccaaatgagacgtccaagttttacacgttatgcaagtcattctctatggaaagcgtaaagatattccctttggataactcttatatgccagctgtgaggaagcgattatatctagcacgtcaaatatatgagattgaccggaaaggctcgcgggagaatgcagacaggacctggcttaaaaaacatgctgaatcaatggaactcgaattggacgatgaagaaagtgaagaggaaagagtggacaatgtcaggcagagaaaagcgacctcagcacgacttaataagctgaaggaggaacttagcacgctcttatcacatccgatgcagcccaagaaattttcaggccgttactttgctggggttggtgtgtcgactcttatgcagaatcagtttgtagagttaaagaagcaaaaacaagcacaaatgcaaattggtggagatataaagagaagaaaacttgttgtcattaaccagaactgcatcgaacctcttcaagccttcgtgctggtggtaacgagatgctgaaaatgaaaggtcagagtgcagagaagaggcgcgatatagcgagcttgaaaaaaaaaaaaaaaaaaa

SEQ ID NO: 97483 - DNA, 481 bp, Arabidopsis thaliana columbia
aaaaacaaaaaactagctcatcgtcgtcatgtcgtctctgtctcctccaccgattccaatggaactccacgccggtaaccggaaaaagttactagaatcaatacgccgtcagttatctagttccaatcgttctctcgatggatttgttcttctacagggtggcgaggagaaaaatcgatactgtactgatcacaccgagctcttcaggcaagagagttattttgcttacttgtttggagtcagagagccagatttctatggagctattgacattggaagtgggaaatctatcctttttattccaaggttgcctgatgattatgctgtttggttgggagagattaagccattgtcgcattttaaggaaacatatatggttgacatggttttctatgtggatgagattattcaagtctttaatgaacaatttaacggatctggaaagcccctgttgtatctcttgcatggtcttaatactgac

SEQ ID NO: 97484 - DNA, 603 bp, Arabidopsis thaliana columbia
  unsure (1)..(603): unsure at all n locations
caagtaatccaaacccccccctttggattttgggcctaggnttnaaaancnagagnagaggttaaanattccattaaaggctgttccaaanatagaagctacttggttggttagttttnagggaaactgtcatcatncccgtagtaggnccagtagaggaaggagaagtaattgatgaagataaaccacaagaacttgaaagctttccactcgaatccaaccatagagtagatgatnagagaatagtacgtggtctgaatcaagacataaggtagttcacaagtcacctgggagatagcataaggtatagctgagtacatcccagcagctttttctctgtagaacactgttctttccactgccaccattggttgtactgttgagcagttgtttatacccacgaatacaactgctgcgtagattgctccgatcaccatcgttagatcttgtacgtttgatctcttacctccgatttgccagaagacagagccgatcatgagagatgttgccaatgtgaagatgaacctgacaaggttgtagtcaggagatctccaataagtccaccactgcttccatagacatgatttgaattgtccccatgtg

SEQ ID NO: 97485 - DNA, 780 bp, Arabidopsis thaliana columbia
aagaaactaacacaagtataaatttacagaaaaatgcttgataagcttaccagagggatcggaggtctccggcgcggacatgggcatttccaggcaagcgcaggcttcgggttcgaggagcacaaggagttttcgagtcgtgtggagtcatcaggaggcttcgttgaccgtcaagcccgctacaaccaccgtacgggcaaccatggccgtccacccatgcatgtctgggatgaagaagactcagactcagacgtggaggagttctttgagagcagccggacccaacacactactgcgttgccgcaaccacttcatatgaacttcaggcctccacctccagtgactcagcctcaccacaacggaaaaatgggaaagataggtaatggattgcagcagggacacgagatacatgggatgaagcaccagggcgggcacagaatacagcatcagggcatgcatgggatgcagcacccgggtggagtagtggtaaacgctactgagaattggcgggtcagcaaaatcaccggccagaaactcgggtggggaggtaagggactctagactccacctaaatactatgccggttcaaataagaaagtaatgattatgtacccaaataatacatttataagatgtatgtgtgtgatggacatgtttctgtatcgtaccaaaactaaataggtggcttttatcccaaaaaaggtgctttcgtttgatgaccttatgatttctaaagagtgttgttgttgctgcttatgtttaataaaagtgatgtatatt

SEQ ID NO: 97486 - DNA, 854 bp, Arabidopsis thaliana columbia
  unsure (1)..(854): unsure at all n locations
ttctttacttgattgcttattcatctgttgattctgtggttaggtttgattcttctggctctgttttgttctgtttttggtgtttaattcttcttagcaagcaaataagggtatatgagtttgttggacatgggtggagatatgatggaagatgattgggaatttgcgtcatcatcaaaccctaaaagaaccctagttcttgtgggccgtactggaaacggaaagagtgcgacaggtaacagtatccttgggaggaaagcttttaggtcaagagctagaactgtaggagtgacaagcacgtgcgagtcacagagagttgttcaagaagatggtgatatcattaatgttgttgatactcctggtttgtttgatttgtctactgcagctgattttattggtaaagagattgtgaggtgtataagtttggcagaagatgggattcatgcgatcttgttggtattctctgtgaggcggcttgctgaagaggagcaaactgtgcttagtttcttgcaagcgctattcggcagtaagatcgctgactatatgatcgttgttttaaccggtggcgatgagttggaagagaatnaggagacattggaggagtatttggctgactattgccctgagtttcttaaagaaattcttgggatatgtgacaatcggttggtgttgtttaataacaagactactgataaggtgaagnaagctgagcaagttcagaaagcttctctcacttngttgaatctgttgttaaacataaccattnggtaaaccntattcagatgagttgtnccntgngctaccaggaagnggctttcaantaagggccccgaaaaaggngtttgntttacttc

SEQ ID NO: 97487 - DNA, 322 bp, Arabidopsis thaliana columbia
gaaggcgcgagcctcgccacgcgattcacaaagggtctcattgtctcataggtagacttcgaataagcatgtatggtctacactacactttcacgtccatgagtccaaaaagccataactttagtcttcttctgaaatagttgcttcctaataatttaaaaaatattggatgcattggctgcacgtgacttcaaaatatttgtatgtatattttgaaaagagatatagaacaaaacttggacaaaactacatactaaaaaaaaacaaatattaaacaaaaaaacaaaaaaaaaaaattgttggttatccctatcacttttgt

SEQ ID NO: 97488 - DNA, 528 bp, Arabidopsis thaliana columbia
  unsure (1)..(528): unsure at all n locations
nnnnnnnnnnnnnnnnnnnnnnnnnnnnnnnnnnnnnnnnnnnnnnnnnnnnnnnnnnnnnnnnnnnnnnnnnnnnnnnnnnccacgcgtccgctcgactctgttccaagaaattcctctacttaatacagctgattctacagattcctgctacgaaatttctgggtctgggttgatctttgtctcaccagtcaacccaattcaggactttgataaaggtggaaatggcggctttattagcttctcagagctgctgctatggcggtgagaccgcaagagtcaccaaagctattggtttcagtagctctttggagaatcatttcactggggaagccactcagtgttatggcagcaagtctaagagatttcgtattgagatgagacagtcggaattgccctctaaggttggaatcaatggacgttcagtcaaaatggttcctgcgagtgaggtggtgaagaggaaagatggtgtgaatggatccgctgggaaaggggttaatggagcgagttttgttagtagtagaaaca

SEQ ID NO: 97489 - DNA, 512 bp, Arabidopsis thaliana columbia
  unsure (1)..(512): unsure at all n locations
nnnnnnnnnnnnnnnnnnnnnnnnnnnnnnnnnnnnnnnnnnnnnnnnnnnnnnnnnnnnnnnnnnnnnnnnnnnnnnnnnnnccacgcgtccggtaaaactctctcacaaagcaaaaaaaccaaacctaaacaaaaatctagaaagaaagatttccgaaaatctttttaatgaaaaaagagcagacaggacgagaattcgcttttctgaatcctttagagtattgttttctccgtcgaattcgcatgaacacttgagctcaacaagacggcgtggaagtggacggtgaggtagttttttttagtttttgaaagacatggcgcaaaacgggtacttggttccagcggatccttcggcggttgtgacggtgaagaagaaaacgccacaagcgtcgtgggctcttattgacgcgacgggacagagtgagccactcgatgttgataagtatgagatcatgcaccgtgtccagattcacgctcgcgatctccggattctaaccccaatttatctta

SEQ ID NO: 97490 - DNA, 383 bp, Arabidopsis thaliana columbia
catttatatctttgtctcagtcctgctttgttggttgagaatggaaagtttcttctttctgcaaaacgcatgggaagaactacatacaccgagtacgtgatctctatgcacgccgacaccatttcgagatcaagcaatacctacattggcaaaatcaggtctaattttctggggacgaagtttataatatacgatacacaaccagcatacaacagcaacatcgctcgagcggtccaaccggtaggtcttagccgcagattctactcaaagagagtctctcccaaagtacctagtgggagctacaaaattgcgcaggtttcttatgagctaaacgttcttggtacccgtggtccgaggagaatgcattgtgcgatgaactcaat

SEQ ID NO: 97491 - DNA, 398 bp, Arabidopsis thaliana columbia
cagctttggttctgcctccgccgcttcttcttcttcttctaatctccgacagatttactctgattctgttgtcttcgagatgatgatgatgtcgtcgcttggtggtggtggtggtggaggaggaggaagtggtggtggtattggtggtggcggcggagggaggtttatgacgtattcgtcgtctctttcggtgcctccttctgctcctcagtctcctaattactccggtggtctccgatcacagtcttctgtcttcgttgagcaagagaagtatctttcagagttacttgcagagcgtcataagcttactccattcctgcctgtgcttccacatgcatttcggctactaaaccaagaaattttgcgtgtaaccacactgttggagaatgctacagttt

SEQ ID NO: 97492 - DNA, 396 bp, Arabidopsis thaliana columbia
cttaagggcaatatcttcaatagagttctgaactttggaagcatattgggatatcaaagtgattttctacttttagttgtgaagctagtctctcctctgtccccaaaacaagaaacaatttgcaaagagaaagcaaaaggtttttgaagaagacccaattaaaaaagatggaaattgcaagtcaagaagatcatgatatgcccatcccattaaacactacatttggtggtggtggtagtcatggtcacatgatccatcatcatgatcatcatgctgctaattctgctcctccaactcacaacaacaacaatactactcaaccacctccaatgccgttacatggtaatggtcatggcaacaattatgatcatcatcatcatcaagatcctcatcatg

SEQ ID NO: 97493 - DNA, 1019 bp, Arabidopsis thaliana columbia
  unsure (1)..(1019): unsure at all n locations
cggacgcgtgggttgtgattgtatgggccttaatgttccgagcaatatcgctgtatcatagcaaaactcacatctatgacgagaacctggtggacgatgatctcagatcagggccaatggaaatatatgtcgatgatgaagccaagttgactcttcatgggcttgtccagcactataatcaactgagcgagaggagaaaattcgcaagttgaatgccatcttgatgcgtggacttcaatcaagtgtcatttttgtgaagagcgtgagcagggctgcggagctgaccaagttactggtggaatgcaatttcccctcaatatgcatacactctggcatgtctcaagaagagaggttgactcgatacaaaagtttcaaggaagggcacaagaggatccttgtggcgactgacttggtaggaagagggattgacatagagcgtgtcaacattgttatcaactatgacatgccagattctgcggatacctatcttcatagggttgggagagctggtagatttggaaccaagggtcttgcaatcacatttgttgcatctgcttcagattcagaggtccttaatcaggttcaagagaggtttgaggtcgatataaaggagcttcctgagcagattgatacatcgacttacatgccgtcttaaacaagtagcatcatctctgaggaacgaacctcttcagatttcaaccttttaggtgttcaaaggggtcatggaggtccacaactatctctcacaccgtttgttgcttcgctattttagacttttctatgaggacaagtttttccatatatttagaccgttttgtaactcttgaaaaatgagattgagctactctccaaatcgcgcacagttgagagctctcctgttttttgtactagtgatggttatctttaaaatattaagatttcaggatttaaaaaaaaaaaaaaagnnnnnnnnnnnnnnnnnnnnnnnnnnnnnnnnnnnnnnnnnnnnnnnnnnnnnnnnnnnnnnnnnnnnnnnnnnn

SEQ ID NO: 97494 - DNA, 1731 bp, Arabidopsis thaliana columbia
  unsure (1)..(1731): unsure at all n locations
nnnnnnnnnnnnnnnnnnnnnnnnnnnnnnnnnnnnnnnnnnnnnnnnnnnnnnnnnnnnnnnaccggaaattacccgggtgcccacgcgtccggagatttcgaaaccctagtcgatttcgagatccaactaactctgctccttatctcagcttgttgaatttgcgaagtatgggagacgctagagacaacgaagcctacgaggaggagctcttggactatgaagaagaagacgagaaggtcccagattctggaaacaaagttaacggcgaagctgtgaaaaaagggtacgtgggaatacacagttctggattcagagacttccttttgaaaccggagcttctcagagctattgttgactcaggatttgaacatccatctgaagtgcaacacgaatgtatccctcaagctatcttgggtatggatgttatctgccaagcaaagtctggtatggggaagactgctgtgtttgtcctgtctactctacaacagattgaaccatctcctggccaggtttctgcacttgtcttgtgccatacaagagagctagcttaccagatctgcaatgagtttgtgcgattcagtacctatctgcctgatacaaaagtttcggtgttctatggtggagtcaacattaaaattcacaaagacttgctgaagaatgaatgtcctcacattgttgttggtacccctggtcgagtgcttgcacttgccagggagaaagatctctctttgaagaatgtgaggcattttattcttgatgagtgtgataaaatgctcgagtcacttgacatgcgaagggatgtgcaggagattttcaagatgactcctcatgacaaacaagtaatgatgttctcagcaacgctcagcaaagagatacgcccagtctgcaaaaaatttatgcaagatccaatggaaatatatgtcgatgatgaagccaagttgactcttcatgggcttgtccagcactacatcaaactgagcgagatggagaaaaaccggaagttgaatgaccttcttgatgcgttggacttcaatcaagttgtcatttttgtgaagagcgtgagcagggctgatgagctgaacaagttactggtgggatgccatttcccctcaatatgcatccactctggaatgtctcaagaagagaggttgactcgatacaaaagtttcaaggaagggcacaaaaggatccttgtggcgactgacttggtaggaagagggattgacattgagcgtgtcaacattgtcatcaactatgacatgccagattctgctgatacctatcttcacagggttggcagagctggtagatttggaaccaagggtcttgcaatcacatttgttgcatctgcttcagattcagaggttcttaaccaggtacaagagaggtttgaggttgatataaaggaacttccggagcagattgatacttcaacctacatgccttcttaaacaagtagcacgtccctcaggaaagaagctcttcagatttcaaccttgtaggtgttcgaagggtgatgggggttcacaactatctctcgctccgtttgttttagtgttttctatgacgacatttttttccatatgtttagaacgtctgttgtactctttaaaggagattcgagtcactctccaaatcgcacagttaaaagctgtccagttttttgtacaagagattattatgtttgaaatatcaggatttagtctcgnnnnnnnnnnnnnnnnnnnn

SEQ ID NO: 97495 - DNA, 411 bp, Arabidopsis thaliana columbia
cccacgcgtccgcggacgcgtgggcagaaacctttgtttcatttgcttcgtgtgcgatcgcgagaacaagggaaaattagggtttatatcctcaagctttttcgaacaccattgatcgttgatctaagatttttcttctagtcgagtttcttaaggggctttgatcaaactcaaaattgaagaccaatactttgaaggattctggtaaagctaagcaactatgagttcaaattcatgggctgatgtttctgaatcagagagggcaccatctggtggtggttggggttattctcgtccgtctcgaaccaactatgttcctccacatcttaggagccgtacaccatcttcggagtttgttgctccttcacctggtaataatgatcgtgggggatatggtggtgcaaatagtgg

SEQ ID NO: 97496 - DNA, 368 bp, Arabidopsis thaliana columbia
cttcattatcatcatcaatggatgagataaaaccaaagaaagaagagaattccaaacgacgtcgtgacgtcaaacccatttgccgtgaaactggagaccacgtccattatcttccaacatgcaaaaccaagcccaaacccacgcgtactcatcacgcgccaccaccgatcctcgactcaatcttcaaagtcactcacaagccacactactacgaatgcaggaagaatcacgccgctgatatcggaaccaccgcttacgacggctgcggcgagtttgttagctccaccggtgaagaagattctttaaactgcgccgcatgttggctgtcaccgtaaacttccaccgtgaagagttaatcccggagaacg

SEQ ID NO: 97497 - DNA, 468 bp, Arabidopsis thaliana columbia
  unsure (1)..(468): unsure at all n locations
ctttcgctctacattggctctgtgttttttgaattatctattgatttccattagggttttctcacttctttgatcgattgaattatatatgttccgtcaatccatggcgtttcctccaccgatccatggttccgatgcaccgccgccgccacagccgccgtcggtggtgaacgggattgaaacctctagacggcagcagcaacagattgcagcagcttcttcttcgccggtgaaatctcatccgcttcataacttccctttgtctgatctcagatgggctatgaatcacgccaatacacaccggctccgcaaagcatcgagtagatcttccgcttcgtgaagctaatactcgggaaaggaaatctggtgattgaggaggtgacgagcttcaggtcttcggtttaatttagaccngnaagagaaggaacgggnttgtgtagggttcnccgantagancngncgnnaact

SEQ ID NO: 97498 - DNA, 473 bp, Arabidopsis thaliana columbia
  unsure (1)..(473): unsure at all n locations
gatcacttgaacacttataaaaaatattttgctcttctttctatatatttatataaaaagtcaaaatatcaagaagaggaagaagaagaagaaactcattttctccgcagagaaaatacaatccatggcttctacttttaggctctctattagcttcctcactctcatcctcttctctctgtgggtagtggaggcacacacgtctagaaagttgatatcaatcaaggaaaaagaaggtcaagatattagtcatttgctcaaagatggtgaatttgatgacccttcgttgtacatgtatttcacactcaatgatctcaaactaggaaccaaattgctgatttacttcttcaaaaccggtcttcaaaggcttcctccacttctcacaaggccaccagccgggtctcaattcctttcacctagggcaaagcttgcttcccttttgggccccttttttttttccccaaggcnttcct

SEQ ID NO: 97499 - DNA, 1000 bp, Arabidopsis thaliana columbia
  unsure (1)..(1000): unsure at all n locations
gattctccaagctctaatacngactcactattagggaaaagctggtaccgcctgcagggtcccggtccggaattcccgggtcgacccacgcgtccgaagacaacaagccgatctcattcctttcactaagtcaaagcttgacttccttctcgaccacttctctatcaccaaagactctcctcaagggaaagccataaaggagactttgggacattgtgatgctaaagctattgaaggagagcataagttttgtggaacttctttggagtcattgatcgatcttgtgaagaaaacaatggggtataatgttgacctcaaggtcatgacgactaaagtaatggtaccggcccaaaattcgataagctacgctttgcataactacacattcgtcgaggctccaaaggaacttgttgggattaagatgttgggatgtcacagaatgccttacccttatgctgtttactattgccatggacataaaggtggaagtagagtctttgaagttaatttggtgacggatgatgggagacaacgggtagtaggacccgctgtctgccacatggacacatccacgtgggacgcggatcatgtagcttttaaggtgttgaagatggagccgaggtcagcaccggtttgccatttcttccctcttgataacattgtgtgggtaacaaagtaagaaaatagacgtagctctatataatgtgagtatgtgtttgtaataactatggtttgaaaggaaaaagaaaagaaaagaaaaagacagccttaatgttggctttggtattgcctctcttttgtgcaacttgcagtagcaacgtgagaatactagtaatgttaatgtaagataaaatatgtcatgcgtcctgcttaaaccacaacagaataaatgaatgaaataaataatattcgataaaaaaaaaaaaaaaagnnnnnnnnnnnnnnnnnnnnnnnnnnnnnnnnnnnnnnnnnnnnnnnnnnnnnnnnnnnnnnnnnnnnn

SEQ ID NO: 97500 - DNA, 424 bp, Arabidopsis thaliana columbia
aaatagagagagagagtgacagaggagtgtgtgaacatcctttttttagtagatttgggttttcgagatgccgtattgaatcggctacgaatttcccaattttgaattttgtgaatctctctctttctctgtgtgtcggtggctgcgatggaggccagtgccggcttggttgctggatcctaccggagaaacgagctcgttcggatccgacatgaatctgatggcgggtgcagaccaaacctttgaagaatatgaatggccagatatgtcagatctgtggtgatgatgttggactcgctgaaactggagatgtctttgtcgcgtgtaatgaatgtgccttccctgtgtgtcggccttgctatgagtacgagaggaaagatggaactcagtgttgccctcaatgcaagactagattcagacgaca

SEQ ID NO: 97501 - DNA, 414 bp, Arabidopsis thaliana columbia
tccaagggaataacgaatcgaatcgggttgtcgaaacgcctaattcaattgagaatgctactgtttctggtggcgggtttggtgtttccgggtcgggtaatttcccgagacctgagatgtggggaggtgatcctaatatggggtttaggccaatgatgaatgcaccaagaggaatgcaaatgatgggaatgcatcatccaatggggataatgggtagaccaccaccatttcctttgcctttgccgttgcctgtaccgtcgaatcagaagcttagaagtgaggaagaggatttgaaagatgttgaggctcttttgagtaagaagtcttttaaggagaagcaacagtctaggacaggtgaggagttgcttgatctgattcaccgtccaaccgctaaagaagccgctactgctgcta

SEQ ID NO: 97502 - DNA, 686 bp, Arabidopsis thaliana columbia
  unsure (1)..(686): unsure at all n locations
aattggagttccggcccagacccacgcgtccggttcaatcatcccctattactgcttgtttacgttagacaaaaaaacaaaacaaaacaaaagtcagctcaggcgaagaacagatggctcgtaccaagcaaaccgctcgtaagtccaccggaggtaaagctccaaggaagcaacttgctactaaggctgctcgtaaatctgcaccaactactggtggagtcaagaaaccacatcgttaccgtcctggaactgttgctctccgtgaaatccgtaagtaccagaagagtactgagttgcttatcaggaaactgccatttcagaggctagtccgtgagattgctcaagatttcaagactgatttgcgtttccagagccatgctgtcttagctctcccagggaagctgcagaagcatatcttgttggtctctttgaagaacactaacctttgtgccattcatgccaagcgtgtgaccataaatgcccaaaagncatttcaagctcgntcgntcggtatcagaaggtgaacggcgcttaagccaaccanggaattccgaggattttggtttcaaagtaagttttttggtttttttnattgaaaagcaaagnnccttaaaattgcntngtggtttttttaaaaaactcttggggaatttaggtnggnaaggnnttgntaanaaggctttttc

SEQ ID NO: 97503 - DNA, 835 bp, Arabidopsis thaliana columbia
  unsure (1)..(835): unsure at all n locations
aattcggagctcaagtttgaaattcggagaagctagagagttttctgagatggctcgtactaagcaaacagctcgtaagtctactggaggaaaggctcctaggaagcagcttgctacaaaggctgcacgtaagtntgcaccaaccactggaggagtcaagaagccccatcgttaccgtccaggaactgttgcactacgtgaaattcgtaagtaccagaagagtaccgagttgctgatcaggaagctccctttccagaggctagttcgtgagattgcccaggatttcaagactgacttgcgtttccagagccatgcttgtgcttgcactcccaggaggctgctgaagcataccttgtgggtccttctttgaggaccactaacctctgccggccatccatgccaagcgtgttgaccataatgccccaaagacattcagctcgctcgcaaggatcagaggagaacgtgcttaattgtgattgggaagtagttggattatgtgaatgtgggtggttttctaaatagatagttggaattagataatggcttaaaaagcttttgggtgtaggagacttggaaacaatggtgtttttttttttcttttctttctgtttcttgtctagtcggtttatgatttgcttgtgttcttcttagctacgttttgtggtgtgtattgctttcttctttggcaatgttgaacaccttttgttgttgaattcatctctgaaacatatgaatatgttaaagtttctgactcaaaaaaaaaaacaaagggcggcagctctagaggatccaagcttacgtacgcgtgcaggtgacgtcatagatcttctatagt

SEQ ID NO: 97504 - DNA, 737 bp, Arabidopsis thaliana columbia
  unsure (1)..(737): unsure at all n locations
cttatacgactcactatatggaaagctggtacgcctgccggtacccgtcccgaattcccgggtcgacccacgcgttccgggcaaggacgtccccaatattatctttttcgaattcggagctcaagtttgaaattcggagaagctagagagttttctgagatggctcgtactaagcaaacagctcgtaagtctactggaggaaaggctcctaggaagcagcttgctacaaaggctgcacgtaagtctgcaccaaccactggaggagtcaagaagccccatcgttaccgtccaggaactgttgcactacgtgaaattcgtaagtaccagaagagtaccgagttgctgatcaggaagctccctttccagaggctagttcgtgagattgcccaggatttcaagactgacttgcgtttccagagccatgctgtgcttgcactccaggaggctgctgaagcataccttgtgggtctctttgaggacactaacctctggcgccatccatgccaagcgtgtgaccataatgcccaaagacattcagctcgctcgcaggatcagaggagaacgtgcttaattgtgattgggaagtagtgggttttgtnattnggggggttcccaaaaagaagtngnattganatggctaaaaactttnggggatggaccttggannanggggttttttccttcctcccggnntgccaagcggtaaaatcctgggcccccaacncgtttgggggatc

SEQ ID NO: 97505 - DNA, 546 bp, Arabidopsis thaliana columbia
  unsure (1)..(546): unsure at all n locations
nnnnnnnnnncagctctctacgactcactatanggaaagctggcacgcctgcaggtaccggtccggaattcccgggtctgacccacgcgtccgatcatcccctattactgcttttgttacgaaagacaaaaaaacaaaacaaaacaaaagtcagctcaggcgaagaacaggtatgatttgtttgtaattagatcaggggtttaggtctttccattactttttaatgttttttctgttactgtctccgcgatctgattttacgacaatagagtttcgggttttgtcccattccagtttgaaaataaaggtccgtcttttaagtttgctggatcgataaacctgtgaagattgagtctagtcgatttattggatgatccattcttcatcgtttttttcttgcttcgaagttctgtataaccagatttgtctgtgtgcgattgtcattacctagccgtgtatcgagaactagggttttcgagtcaattttgccccttttggttatatctggttcgataacgattcatctggattagggttttaagtggt

SEQ ID NO: 97506 - DNA, 889 bp, Arabidopsis thaliana columbia
  unsure (1)..(889): unsure at all n locations
ccnnnnnnnnnnnnnnnnnnnnnnacgcccgtnnnnnnnnnnnnnnnnnnnnnnnnnnnnntggccgttctgcccaagcgtccgccctattactgcttttgttacgaaagacaaaaaaacaaaacaaaacaaaagtcagctcaggcgaagaacagatggctcgtaccaagcaaaccgctcgtaagtccaccggaggtaaagctccaaggaagcaacttgctactaaggctgctcgtaaatctgcaccaactactggtggagtcaagaaaccacatcgttaccgtcctggaactgttgctctccgtgaaatccgtaagtaccagaagagtactgagttgcttatcaggaaactgccatttcagaggctagtccgtgagattgctcaagatttcaagactgatttgcgtttccagagccatgctgtcttagctctccaggaagctgcagaagcatatcttgttggtctctttgaagacactaacctttgtgccattcatgccaagcgtgtgaccataatgcccaaagacattcagctcgctcgtcgtatcagaggtgaacgcgcttaagccaaccaagaatccgagatttggttcaagtagtttttgttttttatgaaagcaagatcttaattgctgtgttttttaaatctctgggtatgtagtagtaagagtagtaagaagtctgcaatctaagaatgttgtgttctttaagcttattattatgtgtgttgcgaactctttttaactcttttgttaaattcttatgttttcttaactcgtttgttcgtcaccaaaaacaaaaacaaaaaagnnnnnnnnnnnnnnnnnnnnnnnnnnnnnnnnnnnnnnnnnnnnnnnnnnnnnnnnnnnnnnnnnnnnnnnnnnnncan

SEQ ID NO: 97507 - DNA, 1083 bp, Arabidopsis thaliana columbia
  unsure (1)..(1083): unsure at all n locations
tatccttgagcaattcaatgcaggacttttcgattacttgattgcaacggatgataatagccagactaaaaaacaaaaggaagaggctaaaggtgaggctaacaaggagaacaagaaaaataataagcgtacgaaaccaaagctagatgctgagttcggtgtagttaggggaattgatttcaaaaaagttcacacggttataaactttgatatgcctcaaagtgttactggatatatccatcgaattgggcgtacagggagagcatatagcagcggatcttccgtttctcttatttctcctgatgagatggaagggtttgaagatataaagtccttcttagcaagcgacaagaacaaggatattgatattatcacaccctttcctttgttgaccgaaaatgctgtcgagtctcttagatatagagctgaggatgtggcaaagagtgttacaaagattgcggttcgagagtctcgagctcaggatttgaggaatgagataatcaactctgaaaagttaaaagctcattttgaagctaatccaagagacttagatctgttgagacatgacaagcctctgagtaagactgcacctgcaccacatctaaaggacatccccgagtatctagtggacgcaaagactcaagaagcaagcaagatggtaaagctagctagagccgcaatgggcaacactaggagatctggtggaggcggtggtcgcaacaacaaaaacaagaaacggtctagaaaaggcagcgacccactcaaaacctttcaaccctaatgggtctaagagaggaccgttggccagaaggatggcaaagattctagctcgaccaaaaaacagaagacagtttaagttatttcgtttagcgtaagtgtaaccaaattttgactcgttatagtcaatcacacaaaagaacggagacgagagcatcaatctttgtagctctattcatgtagcatcaggagacaaagttttgtgagcatattattagccttttgaggtttttattgaaatagatttttgtaagcttnnnnnnnnnnnnnnnnnnnnnnnnnnnnnnnnnnnnnnnnnnnnnnnnn

SEQ ID NO: 97508 - DNA, 685 bp, Arabidopsis thaliana columbia
acccacgcgtccgcccacgcgtccgctttcttcaaataaattcaatgggtcgcttccgtctcatatctgccataactctactcaaattagggttgtgaaacttgcggtgaactacttcgccggaaacttcacttccgggtttgggaaatgtgtcttgcttgagcatctctgtcttggtatgaacgatcttactggtaacatccctgaggatttgtttcatctcaaaagattgaatcttttagggattcaagagaatcgtctctctggttcgttgagtcgtgagattaggaatctctcaagtcttgttcgtcttgatgtttcttggaatttgttttccggtgaaatccctgatgtgttcgacgaattgcctcagttaaagtttttcttaggtcagaccaatggattcattggaggaatacctaaatcgttggcgaattcaccgagtttgaatctgcttaacttgaggaacaattctttatcgggtcgtttgatgttgaattgtacggcgatgattgctttgaactctcttgatttaggtaccaatagattcaatgggaggttacctgagaatctaccggattgcaagcggttaaagaacgttaacctcgcgaggaacaccttccatggacaagtaccagagagtttcaagaacttcgagagcttatcttacttctcgttatcgaat

SEQ ID NO: 97509 - DNA, 725 bp, Arabidopsis thaliana columbia
  unsure (1)..(725): unsure at all n locations
ccacgcgttcgacaaattccattatccattttctttgtcactaaaatacaccttactttgtgttttatccaattcatggcagaaactagatgcacaatgctaaagtctagaaatgttttggggtgtattccgaaataattaatagttaggtggttcttttgaaatttcttaatgattattgtataatgctgtcaagatgacgtggagacccatgggatgacgaagttttcactggcacgatccattcttcatcgattcaaactcttggattgatttcagagatcaaaagataacactttctcagatcttaaaattgtttgaattcctgctcttaaaggtttttgattgtgcaattttttccgtaacaatggcttccttggagatgaatgacctaaaaaagatagggctaggtttgactggatttggtgtgttctttacattcctgggagtgatatttgtgtttgacaagggactcatagccatggggaacatcctcttcttagctggtgtgactctaaccattggaatcaacccagcaatccaattctttactaaacggcaggattttaagggnnctatatcatttggnttggggttcttnttgggtgtgtttggatggncnnttttcgggtgtgcttcttgaatcanatngggnncccttntnntctcaagngggttttggccacaantnccggccttcctcaaagngaccccctttaggnngg

SEQ ID NO: 97510 - DNA, 1031 bp, Arabidopsis thaliana columbia
  unsure (1)..(1031): unsure at all n locations
cgacccacgcgtcgcatgacacagtgaacgaaggagggttaattgtaggtcaaacaaataaggtgggggtaaaaggagcgcggacagacaatggcccctgctctcgccgtcacgagatctaccgcgtggatctccggagaatgctcctgcgaaaggacgtgcttggtttacaggaagttcaataagccgataacaacactttctttgcctttgttctcaaaggagctttcaaaatcgcaagtcccgctagttccgcgccgggaatccacatgagaagcgaagtggtccgggtctattggccagccatcagtagcagggtcagataggatcaccttgtcggcaccgaaattgaagattggtgttgttttgtctggaggtcaggcacctggtgggcacaatgttatttctggactgtttgattacctgcaagagcgtgcgaaaggtagcacattttacgggttcaagggtggtccagctggtatcatgaaatgcaaatatgttgagttgaatgctgaatatattcagccttacagaaaccagggtggttttgacatgatctgcagtggaagagacaagattgaaacacctgaccagtttaaacaagctgaagaaacagcaaagaagcttgatttggatgggttggtggttatcggtggagatgattccaacaccaatgcttgccttcttgctgaaaacttcaggagtaagaacttgaaaacccgagtcattgggtgccccaagaccattgatggtgatttgaaatgcaaagaggttcctactagttttgggtttgatacagcttgcaagatttactctgaaatgatcggaaacgtcatgattgatgcaaggtcgcctggaaagtactatcattttgtaagacttatggggtcgtgctgcttcccacattacgcttgagtgtgctttacaaactcacccaaacataaccatttttggggaaggggtttctccccaggagcagacttttaagatttaaanctcntgggggtgtattcaaacgnctacttggtctg

SEQ ID NO: 97511 - DNA, 787 bp, Arabidopsis thaliana columbia
  unsure (1)..(787): unsure at all n locations
aannnnnnnnnnnnnnnnnnnnnnnnnnnnnnnnnnnnnnnnnnnnnnnnnncccacgcgtccgcccacgcgtccgaaaggagggaagaaaaaagttaggttcgaaacgaaagtaaactagttaggtgaaaagcgaaacaacacccacagagcaatggcccctgctctcgccgttacacgagatctcaccgccgtcggatctccggagaatgctcctgcgaaaggacgtgcttcggtttacagtgaagttcaatcaagccgtattaacaacactcttcctttgccttctgttctcaaaggagctttcaaaatcgtcgaaggtcccgctagttccgccgccgggaatccagatgagatagcgaagttgtttccgggtctatatggccagccatcagtagcagtggttccagatcaggatgcaccttcgtcggcaccgaaattgaagattggtgttgttttgtctggaggtcaggcacctggtgggcacaatgttatttctggactgtttggtaagggtttgatttttacgtcaaatgatgtttttttttttttttgtagaatagttgctgacattgttccactcttgattttgttttcggcgtgttagattacctgcaagagcgtgcgaaaggtagcacattttacgggttcaagggtggtccagctggtatcatgaaatgcaaatatgttgagttgaatgctgaatatattcagccttacagaaaccaggtacttggattcagatccttcctcaagttttgaatttacgctccgctagatgtggagc

SEQ ID NO: 97512 - DNA, 417 bp, Arabidopsis thaliana columbia
gtcgccggcatattgatcttcgccggaggccgtggcgatttcagaagaagaagccaaactcgaaaggttcctagattggcttcaggtgaatggaggtgaattaagaggctgcaacatcaaatattctgactccctaaaaggatttggcatattcgcttccacctccactcaagcttccgatgaagttttgcttgttgttccgcttgatctggccattacccctatgagagttcttcaggaccctctcctgggccctgagtgtcagaaaatgttcgaacaaggacaagttgatgaccgctttctcatgattctgttcctcactttggagcgtcttcgtatcaattcttcttggaagccgtatcttgatatgcttcctactcgatttggcaatcctctttggttttctgatgatgacat

SEQ ID NO: 97513 - DNA, 863 bp, Arabidopsis thaliana columbia
  unsure (1)..(863): unsure at all n locations
cacgttttgagtttcgcagcatctctntcctctcctctgttcatatctntntttagaaattnctcaatgaacatactcaacagattgggtttggnatcaagtgggcaaaccaatatggntccttctccgatcgctcagggaaatnacgatgacacaccggcgncggggaatcagtttgcccaattcggagctggatgtttctggggtgtcgagctggcggttcaaagagtcccaggggtgactcanaccgaggctggatacanccaaggggccgtacacaatccctcatacggagatgtttggtctggtaccacaggccattcgggaggtttttaaggggtcaatatgtcttacggttnncctatgagctctgcttgatttgtcctggtctaggcatntcccaccactttgaatcgccagggaaatgacgtgggacccaattacagatctggaatatacttctacacacccgagcaggagaaacttagcccgtgagtcacttgaacgtcaccagcaacaaatggagagaaagatcatgactgaaatcttgccagctaagaaattctacagagctgaagagcatcatcaacagtatctgtcaaaaggtgggcggtttggccaagggcaatccactgccaaaggctgcaacgacccaatccgctgttacggctaataagctgctttcctctgtccctctccgaaaacagaggacttagcatcaaaggacttgtgtgtcaaatagattgtgtaaaacttgactaagttgttcacacgctatgtaactacttctttggaatttcattcgcaatgttgtaatattgatgttatactctataaacataaaccaaataatcattgcgatc

SEQ ID NO: 97514 - DNA, 647 bp, Arabidopsis thaliana columbia
ataacccttattaggttaacaaaagctggagctccaccgcggtggcggtcgctctagaactagtggatcccccttttctgtatatttcgcggccgcaatttctcaatgaacatactcaacagattgggtttgggatcaagtgggcaaaccaatatggatccttctccgatcgctcagggaaatgacgatgacacaccggcgccggggaatcagtttgcccaattcggagctggatgtttctggggtgtcgagctggcgtttcagagagtcccaggggtgactcagaccgaggctggatacacccaagggaccgtagacaatccttcatacggagatgtttgttctggtaccacaggccattcggaggttgttagggttcaatatgatcttaacgattgcacctatgagtctctgcttgatttgttctggtctaggcatgatcccaccactttgaatcgccagggaaatgacgtgggaacccaatacagatctggaatatacttattacacccccggatctaggagaaacttagcccggggaagttaactttgaaccgtctacccggcaaccataatgggctgaggaaaaggattcaagggacctgggatattcttttgtcccagggtttaagaaaaaatttctttcc

SEQ ID NO: 97515 - DNA, 386 bp, Arabidopsis thaliana columbia
agactcgctgccagtttcctccgttgtttacatctcattcgggaccggtgcttacttaaaacaagaacggatagacgagatcgcttacggtgtgttaaacgccgacgttacgttcttgtgggtgattagacaacaagagttaggtttcaacaaagagaaacatgttttgccggaagaagttaaagggaaagggaagatcgttgaatggtgttcacaagagaaagtattatctcatccttcagtggcatgtttcgtgactcactgtggttggaactcaacgatggaagctgtgtcttccggagtcccgacggtttgttttcctcaatggggagatcaagtcacggacgccgtttacatgatcgatgtttggaagacgggagtgaggc

SEQ ID NO: 97516 - DNA, 280 bp, Arabidopsis thaliana columbia
gtccgggccggacccacgcgtcggcacacgcgtattggattaatcttttcggggccaatttctttctgttgtgtgtccgtttctgaataatgctcttactaaaaaaagagaagatcatttttgatgtatccttctctggatttgtatgtatgatcactatctcacttacataagcttctcttgatatgatttcaaatatattgttcttactatttcttttcataattattttgtctgccgtcataccgcttatctcatgctaattttagaacattcaaaa

SEQ ID NO: 97517 - DNA, 401 bp, Arabidopsis thaliana columbia
caccgatgtaaaggtaagaggaagagatttgattgaatgactcattcattgttagtttttggctatgtttaggattatgttctaataagtgttcttttgctgttttcagatgagtcctacagatgaagatgaattctctatttacaaacagagaagcactcatatgagaaaccattctttagaagaggatttggaggctgagaagaccatttcctttcaagataaggttgatccaagtggagaagaacaaactctgatgagaaatgagtccatctcaagaaagcaaagcgatctcgagacaccggaaaagatggaatcatttagcacatttggcgatgaaatccaatccgtgggatcgaagtctacaaaagtatctgaagactacgattcaggtgacgatg

SEQ ID NO: 97518 - DNA, 570 bp, Arabidopsis thaliana columbia
  unsure (1)..(570): unsure at all n locations
actcactatttggaaagcnggcacgcctgcaggtaccggnccggaattcccgggtcgacccacgcgtggcgccacgcgtcgcgaccgttctgattactgattcttcattgacggtaggagtcaccacttttggcggcgattccttgttctctattttttttgcacaagcaacatttagcttctgcaaactccagttcatctctcaaccctcatatcgccgtgttttctcgctctagtaccgcgagctcggacgaaccaggaagcaatccgttaatctagaagcggtgttgagaagatgacgattacatcaaatatctctgtacagaacgataacctcgttgttcaagggaagactatccttaccaaaatccctgacaacattatcctaactccggttaccggtaatggattcgtttccggttcatttataggcgcgacgtttgaacaaagcaagagtcttcatgtgttccccatcggtgtattggagggtcttcggttcatgtgctgtttccggtttaagctatggtggatgactcagagaatgggaagctgtggaaaagacattccttt

SEQ ID NO: 97519 - DNA, 664 bp, Arabidopsis thaliana columbia
  unsure (1)..(664): unsure at all n locations
gccnnnnnnnnnnnnnnnnnnnnnnnnnnnnnnnnnnnnnnnnnnnnnnnnnnnnnnnnnnnnnnnnnnnnnggggcgcgtgcgcccacgcgtacgcccacgcgtncgggactttgagggtgagaggaattgaatatgaactcttccacatctctcctttgaaggaaatcactgaaaacatttcgttcgcaccaataggacttgtagacatgttcaactcaagtggagcgggcgagtcgattgatatcaatcacgtgaccgacaagaatcctgaattcttcgatggagagatctcctcggcttctcccgcgctcagggataaccggtctccaacagctctggtatctgtcagtgtcagagggctgtggtcgttttggagcttactcttctcagcggcctctaaaatgcgccggtgaaagcacagagactgatttcacgtaccacgcccagggtgggcttgtgactttgaatctgccggggacgagggaggaaatggtcagatggcatgttgagattctggtctacaccaccaatagggtatttttctttcaccaattgggcattcatcattttggggtataaagtacaataatttgaataatggcatctccgttgaaaatgaacncgcaagtnggacacgccctgagttgcaaaaaangcctac

SEQ ID NO: 97520 - DNA, 748 bp, Arabidopsis thaliana columbia
  unsure (1)..(748): unsure at all n locations
gctggnacgcctgcaggtaccggnccggcttccgaggtcgtccaccccgccggcgagctcggacgaaccaggaagcaatccgttaatctagaagcggtgttgagaagatgacgattacatcaaatatctctgtacagaacgataacctcgttgttcaagggaagactatccttaccaaaatccctgacaacattatcctaactccggttaccggtaatggattcgtttccggttcatttataggcgcgacgtttgaacaaagcaagagtcttcatgtgttccccatcggtgtattggagggtcttcggttcatgtgctgtttccggtttaagctatggtggatgactcagagaatgggaagctgtggaaaagacattcctttggagacacagttcatgctactggaaagcaaggatgaggttgaagggaatggggatgatgctcctactgtttataccgtctttctccctctccttgaaggccagttcagagctgttctgcaaggaaatgagaagaatgagattgagatttgttttgagagtggagataaggcggtggaaactagccagggaactcaccttgtttatgttcatgctggaaccaatccctttgaagttatcagacaatccgtaaaggctgtggagagacacatgcagacatttcatcatcgtgagaagaagaagcttccttctttcctagactggtttggctggtgcacatgggacgctttctacacagatgtgactgc

SEQ ID NO: 97521 - DNA, 575 bp, Arabidopsis thaliana columbia
caggttccatccaattcaataagggaaggctggtccccttgcaggacccggcccggatttccgggttcgacccagccttccgcccagccgtccgggattggggatgatgctcctactgtttataccgtctttctccctctccttgaaggccagttcagagctgttctgcaaggaaatgagaagaatgagattgagatttgttttgagagtggagataaggcggtggaaactagccagggaactcaccttgtttatgttcatgctggaaccaatccctttgaagttatcagacaatccgtaaaggctgtggagagacacatgcagacatttcatcatcgtgagaagaagaagcttccttctttcctagactggtttggctggtgcacatgggacgctttctacacagatgtgactgccgacggtgttgatgaaggccttaaaagtctttctgaaggaggtacccctccgaagtttctgatcatagacgatggttggcaacaaatagaagacaaagagaaagatgaaaactgcgttgttcaggaatgaacacagtttgctactaggcttgttggtat

SEQ ID NO: 97522 - DNA, 1506 bp, Arabidopsis thaliana columbia
  unsure (1)..(1506): unsure at all n locations
nnnnnnnnnnnnnnnnnnnnnnnnnnnnnnnnnnnnnnnnnnnnnnnnnnnnnnnnnnnnnnnnnnnnnnnnnnnnnnnnnnnccacgcgtgcggttcaatctgattttatatgatctcatcattgtctttgactttgtttgtttagcttccttctttcctagactggtttggctggtgcacatgggacgctttctacacagatgtgactgccgagggtgttgatgaaggccttaaaagtctttctgaaggaggtacccctccgaagtttctgatcatagacgatggttggcaacaaatagaaaacaaagagaaagatgaaaactgcgttgttcaggaaggagcacagtttgctactaggcttgttggtatcaaggagaatgcaaaatttcagaagagtgatcagaaggatacgcaagtgtcaggactaaagagtgtagttgacaatgcgaagcagcgccataatgtgaagcaagtttatgcatggcatgctttagctggatactggggtggagtaaaacccgctgcttctggaatggaacactatgatagtgcattagcatacccagttcagtctccaggtgtcttagggaaccaaccagatatagtaatggacagccttgctgttcatggtctcggacttgtcaatccgaagaaagttttcaacttctacaacgaactgcattcatacttggcttcatgtggtatagatggagtcaaagttgacgtccagaacatcattgaaaccctaggtgctggtcttggcgggagagtctctctcactcgtagctaccagcaagctttagaagcttcaattgcccggaacttcacagataatggttgcatatcttgcatgtgtcacaacacagacggactttacagcgcaaaacaaaccgctattgttagagcttccgatgatttctacccaagagatcctgcttctcacaccatccacattgcatcggttgcatacaacagccttttccttggagagttcatgcaacctgactgggatatgttccatagtctacacccaactgcagagtaccatgctgcagcgcgtgcagtgggtggatgcgcaatctatgtcagtgataagccaggcaaccacaactttgatctattgaggaagctggttcttcctgatggttcagttcttcgggctaagctcccgggtaggcctacccgtgactgcttattcgctgatccagctagagatgggatcagcttgctcaaagatctgggacatggataaggtttacctggtatttgttgggggattcaaattgtcaaaggtgcttggttggtgcaaaggaaaccggnggaggacccagntccatgntacttttnctnggaaaaattacggggttaaatccgggcggntaattncttnntttaattntcaaagngggtggtaaaagttngngtggggtcaaaaggctttcaaaaagccaggnnggggaagcnccaaagggttaattcctncccaaacctaaattnccttttc

SEQ ID NO: 97523 - DNA, 1324 bp, Arabidopsis thaliana columbia
  unsure (1)..(1324): unsure at all n locations
gtacgcctcgcggtaccggtctggaattcccgggtcgacccacgcgtccgtattgttagagcttccgatgatttctacccaagagatcctgcttctcacaccatccacattgcatcggttgcatacaacagccttttccttggagagttcatgcaacctgactgggatatgttccatagtctacacccaactgcagagtaccatgctgcagcgcgtgcagtgggtggatgcgcaatctatgtcagtgataagccaggcaaccacaactttgatctattgaggaagctggttcttcctgatggttcagttcttcgggctaagctcccgggtaggcctacccgtgactgcttattcgctgatccagctagagatggaatcagcttgctcaagatctggaacatgaataagtttactggtattgttggtgtattcaattgtcaaggtgctggttggtgcaaggaaacgaagaagaaccagatccatgatacttctcctggcacactcacgggttcaatccgtgcggatgatgctgatctaatctctcaagtggctggtgaagattggagtggagattcaatagtctatgcatacagatcaggtgaggtggtaagactacctaaaggtgcttcaattcctctcaccctcaaagtccttgaatatgaactcttccacatctctcctttgaaggaaatcactgaaaacatttcgttcgcaccaataggacttgtagacatgttcaactcaagtggagcaatcgagtcgattgatatcaatcacgtgaccgacaagaatcctgaattcttcgatggagagatctcctcggcttctcccgcgctcagcgataaccgttctccaacagctctggtatctgtcagtgtcagaggctgtggtcgttttggagcttactcttctcagcgtcctctaaaatgcgccgttgaaagcacagagactgatttcacgtacgacgccgaggttgggcttgtgactttgaatctgccggtgacgagggaggaaatgttcagatggcatgttgagattctggtctagaccaccaataagttattttttttcaccaatttgtcattcatcattttgtagtataaaggcatcaataaattaggaaattaatggtcattcttcgctttgtaataatgtaatctcgtcaagttggggaagcaccgtccccttgtagtttcgttctaataatatagtaccttaaaacaaaaaaaaaaaaaaaaagggaccgctctagaggatccaagcttacgtacgcgtgcgttcgacgtcnnnnnnnnnnnnnnnnnngtgtcctaaancncaattc

SEQ ID NO: 97524 - DNA, 455 bp, Arabidopsis thaliana columbia
atcaaaattcacaccggcgattttgagattgttctctgattggcttaatccgagagaatcaaggaattgaatggccagtgaatcagatgcatcgagcattgctactctttcctgtgctcgctgcgagaagcctgcacatcttcagtgtccgaaatgcatagacttaaagcttcctcgtgaacaagcctctttctgcactcaagaatgtttcaaggcagcttggagctcgcacaaatcagtacatgtgaaagctcagctgtcttcaatcggtgatcagaactctgatcttatttctcaaggctggctctattgcgtcaagaaaggccaggctagaacacctaagcttccacactttgattggactgggcctctaaagcaatatcccatatctaccaagcgtgttgtgcctgctgagattgagaaacctgactgggcaattgatgggactcccaaag

SEQ ID NO: 97525 - DNA, 652 bp, Arabidopsis thaliana columbia
  unsure (1)..(652): unsure at all n locations
nnnnnnnnnnnnnnnnnnnnnnnnnnnnnnnnnnnnnnnnnnnnnnnnnnnnnnnnnnnnnnnttttgcttaatcttaaaatcccccccccccgtcttgttcaaaagaagaaaaagaaattacgaaactttcttcttcaagatatttcaaaatcaaactttggtttaagggtcccattttttttgtttttgtttttcttgcctgattctttaattcttgattctcattaatgcttcatgggttttatatgaatcccctgaaagcttataggctccgttgaacagttataacttgtgaaagttgaatccttttaaaccgacagaggaagatctcagatggcaaacaagataagtgaaactgcttccaagatggacgattatgaggtcgtggaacagatcggacgaggcgcttttggttctgcttttcttgtaattcacaagtccgagagacgaaagtatgtggttaagaagattcgtttggctaaacaaacagagagatgcaagcttgctgcaatccaagagatgagtttgatatcaaagcttaagagtccttatattgtggagtacaaagattcttgggttgaaaaggattgtgtatgcattgtaactagttattgtgacggtggagacatgactcatatgataaagaaatc

SEQ ID NO: 97526 - DNA, 1085 bp, Arabidopsis thaliana columbia
  unsure (1)..(1085): unsure at all n locations
gtggtgcacggcttgtggcacttctttctgttctcaagaacctttttgaaagagaagcttctcaaaaggtggtcgtcttcttttcgacacgtgatgctgtagattttcattactcacttctgagtgaattccagtggccaccgaattctgagacagaagaggaggggactaaagagttgtttctcaagtgcaaaacgttccggttacatggaagtatggagcaggaggatagaagatctgcgtttgggacctttaaaacagagaagcaggctgttctgttgagtacagatgttgctgctagaggcttggatttcccaaaagtaagatgtattatacaatatgactgtcccggggaagctaccgagtatgtgcatagagttggtagaacagctcgtattggtgaaaaaggagaagccttgttatttctacaaccgattgaaatagactatcttaaggagctgaagaaacatggtgcatcacttacagagtaccctcttatgaaagtacttgataaatttcccatacccggcaatatgccccgaatcaaaaaggtcctatctctagaatcccatccatgggtcatatctctgcagagagctcttgaatcccttacttacgccgagccaaagatgaagagcctggcaaagaatgcatttgtctcttgggttaggggatatgcagctcacaagggagagctcaagagtattttcgtggtgaagaagcttcacttgggtcatgtcgccaagagttttgctctgagagaacaaccgtctttagttgggaaatcacatcacaaggaaacaatgaagagaaagagagacgaacgtcaaaaagggcaacaaggtaagaagagaaagaagatgagtggtactggcaatagaagtacacaaaaaacttgatcaaatcggtttcgccaccataaaccgtggcgtaagttttgtagttaaggagctggtttgctcatcgaatattttgaaatatcgaaaagaagttgggagctttatcatgtttgttaacaatattacttgtattggccagaaagctaaagattcacaaaatttgcttnnnnnnnnnnnnnnnnnnnn

SEQ ID NO: 97527 - DNA, 518 bp, Arabidopsis thaliana columbia
ccctgcgtccgattacggcatcattcacctataaatttcgccgctgggtttaattctctattcattcagaaccaaaaaagaagaaacctttttgattctctttgcgatttctttgttcaatctcttctcagattgtgtgaatcgggtttaaatcggggttttagggtctctgttttcaaaagggtaccaaaaagtttggagctttactgtagaaagatttgatttttcgttgacccactccgagattttcggatacaaatcagggttttagggtttttgttggaatggaagaggattatcaacagccgaggtttacgattggtaggcaatcatcaatggcgccggagaagattccggagccgtcggttcactcagaagaagaggtgtttgaggatggagaagagatcgatggtggtgtgagactaatgtatttggctaatgaaggtgacattgaagggattaaggagcttattgattcagggattgatgctaattacagagacattgatgatcggact

SEQ ID NO: 97528 - DNA, 1272 bp, Arabidopsis thaliana columbia
  unsure (1)..(1272): unsure at all n locations
nnnnnnnnnnnnnnnnnnnnnnnnnnnnnnnnnnnnnnnnnnnnnnnnnnnnnnnnnnnnnnnnnnnnnnnnnnnnnnnnnnnncgccccccctcgagtgcgacggtatcgataagcttgatatcgaatacgccataaacaccaactcataacaaaaaacaaagaaccagaagtctaggcacaaaatgcccacaaccatcatacataaaccaagaagcttcaaatgcaactacaaagagagtttgcttatttaggcttttaattatacatacaaaccaccaagtcaccatattgttcactgaaggacaaggcactcggcggccgtcccatttgtgatcggacctccatgggttctgttgcttttctggttaacattgccactagagttttgctgatgaactatggttccttcaagatcctcctcttggttactacaacctatggcttcaaaggcgagagcagtaacctccttaaacctttcctccgacagagaagcttccgcaaggagcctccacgcgttatcctctgaagcaccttcgtaatcctctttcctcttcagtaccatgtgaccacttatctcccacacggctgggttcacttgtgtttccaatacctccgggttaatttaacctagagcctgtttctccgcgtaacactgtggcatttaagaagatctgccttcccaacaatccagcaggatgaagaatgtttgaaaggaatgtttgttgtttttgaaggcaaacaccagcagtcctgaaacaggtatcagatagtccttgcatagaccttccaccttcaaaagagaagacctctcacagggtaactctagaagctctgagattttgacaccactaacagtggtagttatcttcttggtaggagctttctccagtgggaaaggcatggccaagggatatgcctgaaagtggagatgattgatagtggcaaaagcacccaagctgttgtaaccgagtctgaagtatggattagcagcctcagcagccatgtgaactgcaagcaaaaggcttttgtgatcgatcctttgaggcaagcagtcaagaacacgaggaatcagcagcacatggccatactctatcggactaacctgttaaaaacaacaataaagaattaatcttttgctagcgaaaccaataaaaggaagaaaaaaaaaaccaagctctctgcacaagagtctttacattgatggcaacaacactgggagaattctcagggtcaataggcatgcaagggaagaactgaacttgggcattt

SEQ ID NO: 97529 - DNA, 454 bp, Arabidopsis thaliana columbia
cacttgctcggtggttcatttacgaccacactctctcttctctttagccctctcctgctctatttattctccaacaaactctctcttctcttttcaagtcttcttcttcattactcgcaccatgaccaaaccctccgacccaaccagagactcccacgtggcagttctcgcttttcctttcggcactcatgcagctcctctcctcaccgtcacgcgccgcctcgcctccgcctctccttccaccgtcttctctttcttcaacaccgcacaatccaactcttcgttatttccctccggtgacgaagcagatcgtccggcgaacatcagagtatacgatattgccgacggtgttccggagggatacgtgtttagcgggagaccacaggaagcgatcgagctgtttcttcaagctgcgccggagaatttccggagagaaatcgcgaaagcggagacg

SEQ ID NO: 97530 - DNA, 377 bp, Arabidopsis thaliana columbia
ttataacatatgtatgtatacaaccttttataaatcataaatcaacttaaaccacaatgataagtacaacaaatttatccaaagatatgatactcatataatataaacattgtatatgcatttgttgagatatgatatatcatatatgtatatgtcatatttgatattcataaaaaaaaaaagtatagtatgataatcacaatcaatatactttgtgccctcattgaaagctaaatgttaagatcatcaagctttgatgatcttgattacaaccatgttttattattgttaagcaaaagacccaaaattttaatatcaagttttcaccaccgtcacaaagcgatcctttatggtaaacttctatttaactctaaaaa

SEQ ID NO: 97531 - DNA, 381 bp, Arabidopsis thaliana columbia
cggaagacaattatgatgatgtgttgccgccgttgccggtgccatagtggtagtagttatacaagatgcgttaaaactcgggcatctaccaaatcctaccattgggaagaaactgaaaggtggtgaaaatggtgttgtaaatcgaaaggcgttaaatcgagagaagataattactctgcaagaagatgttgaaaagttgaggaagaagctgagacttggagaaaacattcaccgagcacatgggaagggcatttagtagacctcttggagcacttccccgccttcctccgcgtctacctccatcgggtttggagtgactcgcggaagtggctgttttggaagaggaaatggttcgcttagaagaacatatagtgcattgta

SEQ ID NO: 97532 - DNA, 507 bp, Arabidopsis thaliana columbia
  unsure (1)..(507): unsure at all n locations
nnnnnnnnnnnnnnnnnnnnnnnnnnnnnnnnnnnnnnnnnnnnnnnnnnnnnnnnnnnnnnnnnnnnnnnnnnnnnnnnnnnccacgcgtccgaaatcgaaatcacagatgaaagcgaacatgtcgtcgtcgtcttccactcgatacagatccttcttcgtcttcccaattctcttcgccgtcttgttcctgggacttctgattccctcctccgccgataaccgccacgttatcaacttccgatcgccgggactctacccggagggactaacctgggatccaagggaccagcattttctagtcggttctctccacagccgcacaattcattccgtctccgacgctggagtcatcgaaaccctaatctccgatctcgatctaccggagaactccactatcctcggtctcgccgttgactctactaatcgccgtctccttgcctgtatccagagtttgccgcctcttcctcccttcagggccctagcctcctacgatctccgcagcgg

SEQ ID NO: 97533 - DNA, 455 bp, Arabidopsis thaliana columbia
aaaaatatataattcatttcaccaatgcaccatcagaagttgaaaacataacaaaagaaaaaatcaatacattcgactatggaacttttactcccacacgcttcaaactcatgtcctctcactgttcttggcttcttagaacgagccgcctctgtcttcggcgactctccttcactcctccacacaaccactgttcatacttggtctgaaactcattctcgatgtctccgtatagcttcaactctctcttccgcttccctcggaatcaaccgcggccaagttgtctctgttattggtccaaacgtcccatctgtctacgagcttcagttcgcagttccgatgtcaggcgcagtcctcaacaacatcaacccacgtttagacgctcatgcactctccgtccttctacgtcacagcgaatccaagctcgtgtttgttgactatcactcaagctcttt

SEQ ID NO: 97534 - DNA, 379 bp, Arabidopsis thaliana columbia
gggcaaaacatagcttatgatgtgatcatatgatcccaaaatattcatgaaccgtgtcgcgagattcatgtgctatgttgattaaaaggactactttcgttctttcatctattatccatcaatgcattgattttttttccaaaaaaatttatctaccagactttcattaacaacataccaaggaaaacctcgttgaaattaataacctatttcactaatatgtcaaaatgcttgaaatgatatatatttattttattatattggcttcacttgttacaacttgctaccatatcagttgatgtgtattagtttcattgttgtttatcacatcatattttgttttattgttgtatttgctagccatgaagttaaatcagaa

SEQ ID NO: 97535 - DNA, 797 bp, Arabidopsis thaliana columbia
tgccgtaccggaccggaattcccgggtcgacccacgcgtccggggaaagaagaaagaaggaagacgatgatgatgctcagaatccgaagcagagatggactggagagagtcacagcggagggagctcatatcactgtttcccagctcaaaaccttgatcgcggatcagcttcagatccctctccataagcagaccttatccaccaatcgtgatctcctcctcgccaaaactcccgctgatctactcgccttcaccgacctcacggacccaaacctccccctctcctctctcaacctcggccatggctctatgctctacctcgcctacgatggcgagcgctccattcctggagctcctcccgttactcctgccggatccttcgggaggaagatgaccgtcgatgacttgatcgcccgccagatgcgcgtcactcgtcaggagacgtctcactgcgactccgtctccttcgatcgcgatgccgccaacgctttccagcactacgtcaatgagtctctagcttttgccgtcaagcgcggcggctttatgtacggcaccgtcaccgaggaaggacaggtggaagttgatttcatttacgagccgccccagcaaggcacggaggctaatcttattctgatgagagatgctgatgaagagaagcgcgtggacgcaatcgccatgggcttggggatgaggagggtcggtttcttttttaaccagaccgtggtgcaggacaagactgtatacactctgtccaacgccgatgtactacaggcgtcggagctttatgcctattgcta

SEQ ID NO: 97536 - DNA, 560 bp, Arabidopsis thaliana columbia
gcattttgtacatccctgggatgggtcctcttaacaatgaagatgttacaaacccgaaaacaaagaacattcgtctctacgtgaagcgtgtgtttatctctgacgattttgatggagagcttttcccgagatatctgagctttgtgaagggagttgtggactctgatgatcttcctcttaatgtttctcgtgaaattctccaagaaagcagaattgtaagaatcatgagaaagaggctcattagaaaaacctttgacatgatacaagaaatctctgagagtgaaaacaaagaggattacaagaaattctgggagaactttggtagattccttaaattgggttgtattgaagacaccggtaaccacaagcgtatcacaccgctacttagattcttcagttccaagaatgaagaggaattgacaagcttggatgattatatcgagaacatgggagagaaccaaaaggcgatctactacctcgcaactgatagtcttaaaagtgccaagtctgcccctttcttggggaaactaatccaaaagatatcgaggttctatatttgg

SEQ ID NO: 97537 - DNA, 319 bp, Arabidopsis thaliana columbia
ctccatttggaaatccagatcatgctctagagccctagtttagatctcgaaggaagacaatgggacggatcttcgagtacttcgtcgtgtgcggacttggtccagagatgcgaaccgtggatggagatcttggattccatggaatgcaaacattctacttgcctgctcttcttgaccagttccctcctactgatcaatctccttaccctgcccctcctcctcagcttcctacttgtgttcttcctgctggggtggagttccattcttctggttttgtttccagtgaccctgcaagtttcccacggagctatcccatagt

SEQ ID NO: 97538 - DNA, 493 bp, Arabidopsis thaliana columbia
  unsure (1)..(493): unsure at all n locations
caaaaacttgcggactccagagtgagtgtgagaatcggagatgtctttttcagtagtagcagctttaccggtgcttgtagcagtagtggtactgtggacatggcggatcgtgaagtgggtctggataaaaccaaagatgcttgagagttctttgaaaagacagggtcttaccggaactccttacactcctctcgtcggagatataaagaggaatgttgatatgatgatggaagcgagatctaaacccatcaatgtaacggatgatatcaccccacgtctccttcctcttgccttaaagatgctcaattctcacggaaagactttcttcatatggattggaccacttccaacgattgtgataacggatcctgagcagatcaaggaagtctttaataaagtcaacgctttnaggaagtttctncatncctttgntcagntttttagcaggtgggntttcaagtttcaagggggttaantnggngggcncaggggg

SEQ ID NO: 97539 - DNA, 357 bp, Arabidopsis thaliana columbia
ggtgaatcgagtcatggtgctcactgagctcgctgcgttgtattactcaggtactgtagttgctaaccaatggctcaaattctcgtcgaatttaccatcgaaacctagaagtcctgtgttaatgtctagctcggttttcgcattgtgtgatgttggatctccatggagaagtcaatggaagcttttctcatgtaaattgacgaatctcacaatcactcataccaattgggtttgcttggagaaacatgaatggggtgatatattcgatatcatcaaacgaccgcgtttattgcgcggtaacggtgattctaagcttcttatgatcggtggattgaaatcgacgttttcgttgaaccc

SEQ ID NO: 97540 - DNA, 407 bp, Arabidopsis thaliana columbia
gcccgcaggaactgggccgggatccacgcgtccgaaaagaaaagctttctctgggtttttcttgattggccaattacacatcgccctttctctcttctctcgctcaccttcgcttgctttgcttgcttcatctctttggtctccttcttgcgttttctatttactacacagaccaaacaatagagagagactttaagctatagaaaaaaagagagagattctctcaaatatgggttagtccacaattttcactaaacctcttcttcttaggattgtttttagggttagggttttgaggtgaggagagcaagtatgcgggagtttcatcctttttgagttactctggattcctcaccctctaacgacgaccaccgtcgccgccgccgccgtctcgacgaatatgctct

SEQ ID NO: 97541 - DNA, 1242 bp, Arabidopsis thaliana columbia
agtcggaatcatcccagcaattgacaaactcgaaaaccccttctggtcttcatcttgagtatatggaatgcgaacgagataaaaaatcatcacaactagttgatctcctcatcaagaacagtgataaaaagcttatagtattcttcatgacctgtgcttctgttgactactggggactcgtactttcaaaaattcctgccctgaagtccatatctttaattcctatccatggggatatgaagcagaatgcaagagacaaggcattagcttcgtttactaaagcatcaagtggtgcccttctgtgcacagacgttgctgcacgtggacttgatattccaggcattgattatgttgttcagtatgatcccccacaagacccaaatatgttcaaccacagggccggcagaactgcaagattaggaagacaagggagggccattgtgtttttactgcccaaggaagaagcctatgtagagtttatgcgcataagaagagtccctttggaagagagaaaatgctctgaggacgcatccgatgtcatcccgattatacgttcagctgccatgaaggaccgagcagtgatggagaagggattaaaggcatttgtttcctttgtccgtgcttataaggagcatcactgctctttcattttcagatggaaagaccttgagattggaaagttagccatgggatatggcctcttgtatcttccttcaatgtctgaagttaaacaacacagactttccagtgagggtttcacaccagttgaaggtgtcaagtttgaagaaataaaattcaaggacaaatatcgggagaaacaaagacagcaaaacttacaagtaaggaaagagaaacggcaagaagagaaaaaagagaaaggcaagagaaaaagggttgatgcttctgctagtaatgatcctaagaaagcgtcgagaaagttaacggggaaacaaagacaaactattcaaactgctgaagatgaagaagtgatggatcgagattataagttgatgataaaagtaaagaaagggttaattaaagaagatgaatatgaaagacttacaggagatgatgatttattctgatgagaagaaacaaaacctgcatgctgagattggactaagcttagtgtctttctactctcatatcatatgtgattctgttaattttttttttttttttgggtgagaattaatatcggatcatgttatgtcctttttcgttcaaaaaaaaaaaaaaaaa

SEQ ID NO: 97542 - DNA, 419 bp, Arabidopsis thaliana columbia
ctctcattcactaactttctctgcttctctctatctttctctgtgcataccaactctaaagtctctcatcaatggcggctcgaaaactagggtcgttgttacgtcaatactttttctctctatgcttcctcttcctcggttgcttcttcttccctaaagacgcagactataaacaaaagagaagaaagaagaagcttagaagagtttcttcttcttctggttcatctctatcctcttcttggacgtatttaaaacgagttttcttatccacgacaaggatatccaaatcccgtaaccaaacacatcctaacgttactttaacatccgcaagatcatctcaaaactccctcgtcactctcgtccaacccgataccacaaaccaacccgacccggaaacacgtattcatcagcaaaccgaa

SEQ ID NO: 97543 - DNA, 409 bp, Arabidopsis thaliana columbia
  unsure (1)..(409): unsure at all n locations
atcatcttatcttcacaagaagaacaagaagacgaaagatgttgtagctgataaagtcaaaacagaagtcaaggaagcaaaaacagaggaaatcaagaacacagagcctgaaacagagcaaaaacagagctgtgttataaacgagaatctgaagaagatcgctagaccggatcatttcttgcctgtgactgtgatcttggttcttgtgtttttggctttctttggaagatctgtagcgattatgtttacttgtatcgcttggtacttggttccaacgattcaagaacagagtggaaacagaggatcatcaccgtcttacgcgatgaagaagaaagatttcgctaggaaattgagtattganaacagaacatcgtttaatccaagaactgttcgtgatcattctcctcgc

SEQ ID NO: 97544 - DNA, 658 bp, Arabidopsis thaliana columbia
ctacgactcactattgggaaagctggcacgcctgcaggtaccggtccggaattcccgggtcgacccacgcgtgcgatctccttcttcttctccttctcaaatcttttttttcaggcgtaacgaatcgaatcataaacacttacgcagaaacaaaaactaaactttggatcttttaaccgaccatagagattcgtgggttcttcttagtttcgacagattcttgatccgttttagttgttacgctcatctttgcttttatacatcagacccttctcttctcttccttctttatctaagaaacattagggttctttgaaatcttgctaaaaaaaatgggtgttgagaaaatggtgtgtttagcttctcgtacgggtcgtcagtttcagagatacaacaaaggtcgtcgtcaagtcgttggatgtgttccttacagattcaagctatctaatgatggtaaaataagtgatgaagtagaagttcttgttatctcttcccaaaaaggccacgccttaatgttccccaagggtggttgggagcttgatgaatctgtagaagaagctgcatcaagagaatgtcttgaagaagctggagttcttggcaacgttgagcaccaacttggaaaatgggattttttaagcaaaagcagaggaacatacta

SEQ ID NO: 97545 - DNA, 386 bp, Arabidopsis thaliana columbia
ctgctaatgttgatctgagtgatgacgataatgtttaaaatcgcaaaagctacgttgcggagcagaaactcaagcgtcgcgttcgctcttctactctatccaagctcgctctatctccaggcaaagtaaagtggttaagattgagagaatggttgagaaagaagacatgcatgtaactcgtgttctattctgcggtcctcacttccctgattcctacaatttcaccagagaatacttgcaaccttacccttttattaaggttgatgttgtccattaccgcggtgtccctgaggttattaagaactttcatatatggggggcaatggctatgcaaaatgggttcaaatgttatatctcgtgcaagcaacataaagcttattatgcag

SEQ ID NO: 97546 - DNA, 564 bp, Arabidopsis thaliana columbia
cccacgcgtccgggctcatccaacagctcttctacgtgctctgatgaaggaaatgttgaaatcatggagagaaggaggatagagatggagaagaagaagaaaagaagagctgttactgtggtagcaatggaagaagataacttgaaagatgatgatgctcatagacttactctgaatcttggtggtaataatattgaggggaatggtgtgaaaaagacgaaacttggaggagggattccgagtcgggcgatttgttgtcaggtagacaactgtggagctgatttaagcaaagttaaggattatcatagacgtcataaggtctgtgagattcattctaaagctactactgcacttgttggaggaattatgcagcggttttgtcagcaatgtagtaggtttcatgtgcttgaagagtttgatgagggaaagagaagttgccgtagacgtttggctgggcataataagcgtagaagaaaagcaaatcctgatactataggcaatgggacttctatgagtgatgatcaaacaagcaattatatgttgattactctcttgaagatactc

SEQ ID NO: 97547 - DNA, 746 bp, Arabidopsis thaliana columbia
agggttttcaatctcgggttcactttttgaaaaaacaaatgggggctggtgaaacgaaaaactcgaatttacttccaaatcttgggctaatgagatagttacaaaaattgaggctgcggcagcacctatggggtttgatgtcaagacaaataactacaagatgaagctgacaggagagaaatcaggccgcaagggtcagttggcagttgccactgaggtttttcaagttgctccatctctttacatggttgaaatgcgaaaatcagggggtgacacattggaatcccacaagttttcacaacgacccttcccacgggacttaaggacattgtttggaaaacccatcgacgaagcagaaagaggaaggaaccgatggtggtggtactaatggtgccatggctaaccggacaattgcaaaacagtcgacataagctgtttacttttttctaatatagattttgttcgttataaattactatagtagtacggagtggttttgaagttaatacaaaaggaagcgtcaagaagtggagcagaagcagtttgaaactatattggggaatggggattattgatattttaatcatgtttgattccatggaatgttgtgaatagcatatgcgtgttgcgaggttcttggcttgaataaaattaaccggagcggccgcgaattcgatatcaagcttatcgataccgtcgaccgggaggggtggcccgaaacccgattcgccttatacgaatggtcc

SEQ ID NO: 97548 - DNA, 514 bp, Arabidopsis thaliana columbia
  unsure (1)..(514): unsure at all n locations
aaatttatcaccccgtgcttctgatcacggtgggattctctccgatcggtggcatatcgtggttcatactccggtggatctcacggcgtaataatttatcatatctgaatcgcaatcttattaaccatggctcctccggccgcttcacagcgttatccgtcaccgtcccaaccttcagggaaaagcgaagtgtcagatctgaaaacccagcttcgccagctagctggaagcagagctccaggagttgatgattccaaacgtgacctctacaagaaagtaatatcgtacatgactattggcattgacgtctcatctgtatttggagagatggtcatgtgctcggcaacatcagacattgtcctgaagaagatgtgtatctttacgttggaaactatgcaaagggcatcctgatctttctcttttgncgataatttctgcaaaggggttgcaagatganggccnatgatccgtgggttgnttgagggctgtggtccttacgngngcaaccntnttc

SEQ ID NO: 97549 - DNA, 395 bp, Arabidopsis thaliana columbia
gtcgcttccgccagaaatggatggaatgatgatagagctagcagtacaaacgaagcaagtcttcattctgctcttgattttggtggaaaatctagtatagcttctgtgcccataacagacaccacacatgtgaaatctgagactggctctccaagacattcatcctctgctaaaatggatgaaactaatggccgggaggaaaaatcagagaaggaactgaatgatgatggtgaatatttgattagaccttatcttgagcatcttgaaaagattcggttcagatacaactgtgagagagttgttgatctcgacaagcatgatggaatcttcttaataggggaattctgtctgtatgtgatagaaaacttttacattgacgaagatgggtgtatttg

SEQ ID NO: 97550 - DNA, 772 bp, Arabidopsis thaliana columbia
cgataactggaacggcgtcgacagactccatcctcatctctaaggtaagcaagcaagacataggagacacgttcgacgtaccgccccgcatgcgtgttaaagaaggtaacgttgcgagcattatgtgttcgtacaatcaagttaatggtgttcctacatgtgctgatcctaatctcctcaagaagaccatacgcaatcaatggggtctcaacgggtatatcgtgtctgattgtgactctgtcggtgttttgtacgatacccaacattacactggtactcctgaagaagctgccgctgattccatcaaagctggcttggatttagattgtgggccatttctaggagcccatacaatcgatgcggtgaagaaaaacttgttgcgtgagtccgatgttgataatgccttaatcaacacgctaacagtccaaatgagactaggaatgtttgatggcgatatagcggctcaaccgtacggacaccttggaccggcacacgtgtgtacaccggttcacaaaggactagctctcgaagcagctcaacaaggaatcgtcctactcaaaaatcacggctcgtctctacctctctcaagccaacgtcaccgaactgtcgccgtaattggacctaattcagacgctacggtcacaatgattggtaattatgcaggggttgcttgtggatataccagtccggttcaaggtattaccggttatgctcgaaccattcatcaaaagggttgcgtggacgtacactgcatggatgatagattgttcga

SEQ ID NO: 97551 - DNA, 1215 bp, Arabidopsis thaliana columbia
  unsure (1)..(1215): unsure at all n locations
aggatttccataatatgaagattaggctgaggcccagcatctggagtgtgccaagcgtcttgttgtagataaaagcatccagactgcatacatccagacaatcagatctgctcagcatttcatatatatcgagaatcagtatttcctgggttcttcttatgctaggcctacctatagagacgcaggagctgacagtcccattcctatcgagttggcactaaagacngnnagaaaaaacagagctaaggaaagatccaccgcatatttccccagtcgacccacgcgtccgggcgacccaaagtctggccctgtgcaagaaattctatattggcagagccaaactatgcagatgatgtatgatgttatagcaaaagaactgaaagcggtgcaatcagatgctcatcctctcgattaccttaacttttactgccttggtaaacgagagcagcttccagatgatatgccagccaccaatggcagtgtggtatcagattcttataatttccagcgtttcatgatttacgtgcacgcaaaagggatgatagtagatgatgagtatgtactcatgggatctgctaatatcaaccaaagatctatggcaggcaccaaagatactgaaatcgccatgggcgcataccaacctaatcatacatgggctcacaagggaagacacccacgtggccaggtgtatggatacagaatgtcactatgggcagagcatttaggcaaaactggagatgagtttgtggagccatcagatctggaatgtctgaagaaggtgaaccacaatctctgaagaaaactggaaaagattcatagacccgaaattctcagagctacaaggtcacttaataaagtatcctcttacaagtagacgttgatggtaaagtaagccctcttcctgattacgagaccttcccagatgttggtggtaagatcattggagctcattccatggctcttcctgacactttaaccacgtaatgtgaatgttcaatgtaaatttcagcatttgttttggggtttcttttgatcctgaataatattagctgaaagtgttgtttgagttgttgtacatttaactgtgttgtttcttttttatacattcttttgtgattgtcgtcaaaaaaaaaaaaaaaaagggcggccgctctagaggatccaagcttacgtacgcgtgcatgcgacgtcaagaatcttctatagtgcgtccca

SEQ ID NO: 97552 - DNA, 328 bp, Arabidopsis thaliana columbia
ctgaattctgaatccagaatccatcccaaaaaaaaaacatatactgtgagcttcaagtagagagggccgttcagactgaggattggattttattggtactgagagtgggaacgtagtcattcatgagttaagttttgcttggaatggtcgtgagaagtgggtcatcgtctttttccctttgcgttgtgttgtgtgatgttggtacgggttatcttcgtgcttcttgtcgaattgagtatattgtatcagtaaagaatttataacttaaaaagagccttatgtcaaatacgacgtcgttttgtatggaaatggattttttacaccgctg

SEQ ID NO: 97553 - DNA, 829 bp, Arabidopsis thaliana columbia
  unsure (1)..(829): unsure at all n locations
aaccgtgcaattcgtcaaattgttgatgtcatttccgaaagccaaaagtataacaagttggtgaaactgcttgaggacataatggatggaagcagaattcttgtcttcctcgatacaaaaaagggctgtgaccaaatcactcgtcagcttcgcatggatggttggcctgctttgtcaatacatggagataaaagtcaagcggaaagagattgggttctctcggagtttagatcaggcaaaagccctataatgactgctacagacgttgcagctcgtggattagacgtgaaagatgtgaagtatgtgataaactatgacttccctggatcactggaggattatgttcacaggattggacgaacaggtagagccggggctaaaggaacagcttacactttcttcacagttgcaaatgcgagattcgccaaggaacttaccaacatactccaagaagctggacagaaagtgagtcccgaattggcttcaatgggtcgcagtaccgctcctcctcctccagggcttggaggattcagagaccgtgggagcagaagagggtggagctgatcactgattttgtatcttgttatggctttagggctcagtgattttctttctccatttatatctcttgtttactattttgttcctcaaacatttgacatttacagcaaaacattaaacatgtaagataacatttgatctgattatccaaattaattagagtaagataaacaaaaaaaaagaaaaaaaaaannnnnnnnnnnnnnnnnnnnnnnnnnnnnnnnnnnnnnnnnnnnnnnnnnnnnnnnnnnnnnnnnnnnnnccgcat

SEQ ID NO: 97554 - DNA, 1211 bp, Arabidopsis thaliana columbia
  unsure (1)..(1211): unsure at all n locations
tgactcgccgnnnnnnnnnnnnnnnnnnnnnnnnnnnnnnnnnnnnnnnnnnnnnnnnnnnnnnnnnnnnnnnnnnnnccacgcgtccgcccacggtctctctcgcttctgtgatttgggctttttcagatgggaaatgcgaacggcaaagacgaagacgccgccgccggtagcggtggtgcagatgttacctcgtcctcggcgagatctaatggcggcgatccttctgcacgcagtcgtcaccgtcgtccttcttcagactctatgagcagttctcctcccggaagtcctgctcgatctccatctcctttcttattcgctcctcaggttcccgtggctccattgcagagagcaaacgcccctcctcctaataacatccaatggaaccaatcacagagagtttttgataatcccccagagcaaggaatccctaccatcattacatggaaccaaggaggtaatgatgtggcggtggaaggatcatgggacaattggagatcaaggaagaagctgcagaaatcagggaaagaccactcgattctctttgtccttccatctggcatataccactacaaggtgattgtggacggtgaatccaaatacatcccagatttaccctttgtagcagacgaagttggcaatgtctgtaacattctcgatgttcataactttgtgccagaaaacccagaaagcatagtggagtttgaggcgccaccatcacctgatcatagctacggtcaaaccctaccagccgcagaagattacgcggaaagagccacttggcggtgccacctcaggcttcatcctaacactttttggcactactgaagagacagccatagccacaaagcctcaacatgtggtgcttaaccatgtgttcatagagcaaggatggactcctcaatccatagtagctttgggtttaacccacaggttcgagtttaagtacataactgttgtcctctacaaaccgctcacacggtaaccctaaaaattcagtgccacattgttctctctctttctttctttttcatctctcaattatgtgaaaacatgttctttgttcatagtgactagtgagtgcccaacatttgagtttattaacctctttcttnnnnnnnnnnnnnnnnnnnnnnnnnnnnnnnnnnnnnnnnnnnnnnnnnnnnnnnnnnnnnnnnnnnnnnnnnnnnnnnnnnnnnnnnnnnnnnnnn

SEQ ID NO: 97555 - DNA, 629 bp, Arabidopsis thaliana columbia
  unsure (1)..(629): unsure at all n locations
aacttctaacttnaggggcttttaattatctcctcctcgtcgtcctccctccattttnnttcacgtctggttttctctctcttttcctctatctttncctctatctctctcctctctttgtctctctcgcttctgtgatttgggctttttcagatgggaaatgcgaacggcaaagacgaagacgccgccgccggtagcggtggtgcagatgttacctcgtcctcggcgagatctaatggcggcgatccttctgcacgcagtcgtcaccgtcgtccttcttcagactctatgagcagttctcctcccggaagtcctgctcgatctccatctcctttcttattcgctcctcaggttcccgtggctccattgccagagagcaaacgcccctcctcctaataacatccaatggaaccaatcacagagagtttttgataatcccccagagccaaagggaatccctaaccatcaattacaatgggacccaaggggggtatgtttttttcgcgggaagggagggggaaaattgngattcaggaaaaacttcncaaatntcgggaaaacacccggtttcttttgnctnccctggggaanacnnntaaaggggntttnggnggggnnncaaaaacccc

SEQ ID NO: 97556 - DNA, 844 bp, Arabidopsis thaliana columbia
aatattttcaccacaagggaaacaagcttatggtcccattgatttacggccaaagcttttaaatacgacctccactataaggaaaaaattgggtacgccctgcaaggtaccggtccggaaattccccgggtcgacccacggcttccggaaagttggcaatgtctgtaacattttcgatgttcaagtaagttactttcccacctcttttttctcatgttaaatctatcaatcagcttaacagtatctgcaatcattatgcatgcagaactttgtgccagaaaacccagaaagcatagtggagtttgaggcgccaccatcacctgatcatagctacggtcaaaccctaccagccgcagaagattacgcgaaagagccactggcggtgccacctcagcttcatctaacacttcttggcactactgaagagacagccatagccacaaagcctcaacatgtggtgcttaaccatgtgttcatagagcaaggatggactcctcaatccatagtagctttgggtttaacccacaggttcgagtctaagtacataactgttgtcctctacaaaccgctcacacggtaaccctaaaaattcagtgccacattgttctctctctttctttttttttcatctcgcaattatgtgaaaacatgttctttgttcatagtgactagtgagtgcccaacatttgagtttattaacctctttcttacctggtttgtggtgcttgtgtacaaaaaaaaaaaaaaagggcggccgctctagaggatccaagcttacgtacgcgtgcatgcgacgtcatagtataagcctcttttttataggggggccacccttaaaaatttc

SEQ ID NO: 97557 - DNA, 420 bp, Arabidopsis thaliana columbia
  unsure (1)..(420): unsure at all n locations
ctctcctctctttgtctctctcgcttctgtgatttgggctttttcagatgggaaatgcgaacggcaaagacgaagacgccgccgccggtagcggtggtgcagatgttacctcgtcctcggcgagatctaatggcggcgatccttctgcacgcagtcgtcaccgtcgtccttcttcagactctatgagcagttctcctcccggaagtcctgctcgatctccatctcctttcttattcgctcctcagcccacattgttattccacgttacatcttacaacatttgctcacctatgcgtcacctcttccattgtttaggcttaaaatgtgtacctaatggctgcatttggtgtcgnatggttccgtggntcaattgnagagggcaaanngcccttcctcctaataaaattccatnggtaccaa

SEQ ID NO: 97558 - DNA, 318 bp, Arabidopsis thaliana columbia
cccacgcgtccgaagaaatcattttcttctctctctctctctctctgtctaaaatatctatcggttgaagaagatctgaagcttaactttgctctgttacagactctcagggatctgccggctacaaagtccggtggatagtgttattattagacaatggcgtctaataatcatttcatgaacagtagatccaatctatcaacaaactctgatgctgctgaagctgagaggcaccagcagcctgtgtcaaattctgtgacatttgcccgcacgactccctctggccgatatgtcaactactccagagatgatctcgat

SEQ ID NO: 97559 - DNA, 440 bp, Arabidopsis thaliana columbia
tgaacatgtcatagatgagtcaagtaaaagaaaaccatatgcagtcacagcttcaagtggaactggagaatcaatctgatgtcatgcgttacatacccaatggtcataagaaggctttgcggcaacaaaatacggcagaaactaaagatcacttgttttctgcaaattatggtggaatgagtgggtatggagcaagtcttggtgcttctacagtgggttcccatggacaggtcaacatccctaaacgaacctcctcttcagcgagtctctactcaacttcagaccattctagattaggaagcgtgggcttatctgatgtcaatattacgaatggaaatattaatggaacagacttctccacagctggtggttatatggcaaagaacaagttgaattcattagctgagcactattccgctgaaggctcacatttgactggg

SEQ ID NO: 97560 - DNA, 480 bp, Arabidopsis thaliana columbia
  unsure (1)..(480): unsure at all n locations
nnngaccccgcgtncggctggagaaaccaaatatattatgtctcgcagatccaattcaacttctggttctttttctcaaacgctctctgcgcacttgccttaaacttctccatattcttagtaatcggaagaacaggcgctgtaacaatccgggttgctggggttctcaaagactggattctcatagccctctccactgtcatatttcctgagtccacaatcactgggctgaatataactggatatgctatagcgctctgtggtgttgtaatgtacaattacataaaaatcaaggatgtaaaagcgattcaaccaaccactgacagcctcccagatcgaatcacgaaggactggaaggagaagaattcgtcagatggggggagccccagaggattggagcttaacgatgaagaagcccctctgataacctcccggttgtcgcatattggccggactcatcttggacccacacggaagtct

SEQ ID NO: 97561 - DNA, 724 bp, Arabidopsis thaliana columbia
  unsure (1)..(724): unsure at all n locations
gcaggtaccggttcggaattcccgggtcgacccacgcgtccgccacaatcactgggctgaacattactggatacgcaatagcgctctgtggtgttgtaatgtacaattacataaaaatcaaggatgtaaaagctattcaaccaaccactgacagcctcccagatcgaatcacgaaggactggaaggagaagaattcgtcagatggggggagccccagagggttggagcttaacgatgaagaagcccctctgataacgtcgcggttgtcgcatattggccggactcagcttggaaaccacacggcggtctgagaatgacccttatgttgtttcacttctcaggtgaaaatgtcttttatctcttttggaacccaaacaatttaaatagaatttacctcggattacttaacattgttagttctacaaaaaaagaaacgcaaaattatttgtagggtctctgaaagttataaatgttttcactagacagcgtagctccggacccggccttggtctactctttatgatccaaacagttctgacttctgagtgtgtggccctgtatttgatattttccttttctatattacctggaaatactataaattttgtttaaaaaaaaaaaaaaaaaagnnnnnnnnnnnnnnnnnnnnnnnnnnnnnnnnnnnnnnnnnnnnnnnnnnnnnnnnnnnnnnnnnnnnnnnnnnnnnnnnnnnnnnnnnnnnnnn

SEQ ID NO: 97562 - DNA, 835 bp, Arabidopsis thaliana columbia
  unsure (1)..(835): unsure at all n locations
aattacttaaagattacgacgaatggattaaaaaacagcaacggaactccttaaacgcaacttgttaatctattaccaatgttttgtcaaacggccgaggcaggatttgttgggtcgttttggccgtttgagattacagcgtgtattagagatagctctgaattactgcaaaaagtacaaacaattaaatgaacaaaatagatttgattcacttgtatactttggccttttgagacgtttgtgtttgctttgtattaaaagtgcaatgaaattactgaaaaagtacaaacataaataaggtcaagagagatttgattcactcgtaaactttagtctttcttgtgacaaaaatacagcacaataagattacataactttttcgtcatcagtcaaaagtctctaatcctaaaggccaacccagtacgaacggccattggtgttatgcatcggagatggagtaggtgaagacaccgaccattcataccaaacctttgaggaaccacaacacctccaaaagtgtacttctaatggagtatcagggtgaacctccacaggcttcctcaatgggaaaaagattgggaaccagctgaacatgtttggtgttgctgttgtaggctcgatcccaagatgaacatctttataaaggacggaatcaaaatagccagcgaatccatgcaccaaagctgagccagcatcgcttggtagactgaactgaagcttcttatagcgttggttgttgactttcgttgagaagtttggatgagtaaatgtgaaaacagactgggaaggagcaagctntgctacactatgcagcttgacacataagcagtttcaa

SEQ ID NO: 97563 - DNA, 719 bp, Arabidopsis thaliana columbia
  unsure (1)..(719): unsure at all n locations
ctccgcccaccacagacacctgtcctctcccccctagtatcgccnnnnnnnnnnnnnnnnnnnnnnnnnnnnnnnnnnnnnnnnnnnnnnnnnnnnnnnnnnnnnnnnnnnnnnnccacgcgtccgcgagaacaaaaaaaacttctttttttttctctttctctcttggcttctctttagaaagtgactcaccagaaaaaaaaaagggtttttgcttttcgggtttagctaagaaaaatctttcaatcttccttaaatctttcaaaaccccaaaatgggacctcgttgctctaagctctctctctgttggtggccgacccatctcaaatcaactcacaacgaagcttctgatctagataacggaacggacgatttgccgtcgtttacggagtttagtttcgaccaactacgagctgctacttgtggattctctacagacagtattgtctccgaacatggtgttaaagctcctaatgttgtgtataaaggcagacttgaagatgaccgatggatcgctgttaaaccattcaatagatccgcttggcctgatactcgtcaatttcttgaagaagcaaaagctgtggggcagttgaggaatgagaggttggcgaatttgattggattctgttgtgaaggagacgagagattgctcgttgctgagtttatgccttttgaaactctctcgaagcatctctttcactgggatagtcagccaatga

SEQ ID NO: 97564 - DNA, 1969 bp, Arabidopsis thaliana columbia
gtttcctccaaatttaatccgccgggttaaatttggatgccttttttcttcatgaaaggttggtttgtgaaactcgatgattctctcacgctctggctccgcgcttcatttgtgtggagtctcttcttcagcgccgtcgaagctcttatctcagaggttcaaggtctcgttcgctctcgcttatggctcatctgtttctttccgtttaagctctctcaatcgatctgatagaaaatgggttcgtgggtttgcgtctgctactgaagcagaagtcgagaaaaagggtaatgatactttttttgctgaccataccgtttcttggaagtctcttgggttatcagataatgtctctatagctcttcgagattctgggttcgatagaccatctcttactcaggctgtttgcataccgtctatattgtctgggaaagatgtgattgttgcagcagaaactggtagtggtaaaacacatggttatcttgctccaataattgatcaattaacaaacaccgctcttgattccgaggttacgaatagagaggaaagaccgtttccgcttaagaatatctctcttattctgtgtccaaatgtgatgctttgtgaacaagtggttcggatggttaatggtcttgttgatgaagatggtaatccacttcttagagttgaagctgtgtgtggatctcagggttggccagatagactccctgatataattgtttcgacacctgctgctcttcttaataatattgagccgaaaagaaataggcgtctggaatttctacgatgtgtcaaatatgtggtctttgatgaagctgatatgcttctgtgtggaagcttccagaatcagattatccgtctgataaatatgctgcgtttcgatgagaaacaggtgtctcgtttggctaaatccaatcttggcagaccaatggagattgatgcctctgtaccccaaattgatctagaaaatgaggatgatgcagaattcgatgaaggatctatttctgaggaagaggatgaagaagaggaagaggaatatcttgatgatatagcacaaatgcctagtgttgaagctgaagctgggtcagatactaaaaagggctggagaagagtgagaaagatctatacccgtagtaagcagtatattttcattgcagccacacttccagttaacgggaagaagactgccgggggaattttgaaacatatgtttcaagatgctgtttgggttagcggaaactttcttcaccgaaacagtccgagactaaagcaaaaatgggttgaagtcacagtagactcacaggttgatgctcttatagaggctgtaaaaaacaataacaacaccaacacagagaggacaatggtgtttgcaaacacggtcgaagctgttgaagcagtggccgatatattggagaaagctagtatccagtgttaccgttatcacaagaatcacaagctagacgaacgtgctaatatattagctgatttcagagaaactggtggtgtctttgtttgcactgatgcggctgcccgtggagttgatgttcctaatgtctcacacgttattcaggcggattttgctagttctgcagtggatttccttcacaggattggtcgaacagctagagctgggcaatatggaactgtgaccagtctatacaccgaggctaaccgtgatttagtagaggcaatccgtgaagcagtgaagatgggtcagccagtggaaactgcattcagcaggaagagaggttttaggaacaaggttaagaagagagcttttttgaaagctgaagaagcagaggagcctcaagctgtgagatattaagttctgttgttttttttacaattccatagatttgttgtatatagaagtactcaaaatcgaataatcactatctgttattttcttgtaccaaattttttgatatgagataatacaatctcgtttatgccgaaaaaaaaaaaaaaaaaa

SEQ ID NO: 97565 - DNA, 534 bp, Arabidopsis thaliana columbia
  unsure (1)..(534): unsure at all n locations
gatcgaagaacgataattgaaacacacaaatttgcttgaatcaaagactcttcttcttcgttcgttcgtttcagtgattccaaagattccaaatttgtcggtgtaatcttcgttgtattcagaggtgtatgtatatgtattgaaatcgagaatggatctgttccgagtttggtcagggatggatttcttagcttggagaggaatggcttacacacttcttcttctcaacttcgtctttgcttgccaacttcttcttctccaacctctcgtttccgctctagatggtcaatcggtagatgctgctgagttattcgagagagcttcacaaagtatcaagggttaaagcgttatagtgatgccctcgatgatctgaatgcagccattgaagcaggccctgcggtttcagaaggttatttaaagcgtgccctgtgcttcgcaatttttcaaggacggggcctcttagatagtaccaggaatactggatcaaatcaggggtcgatcctggnaagcctttnaagttacaaggaangggct

SEQ ID NO: 97566 - DNA, 870 bp, Arabidopsis thaliana columbia
  unsure (1)..(870): unsure at all n locations
tgatacttcagctctcnnnnnnnnnnnnnnnnnnnnnnnnnnnnnnnnnnnnnnnnnnnnnnnnnnnnnnnnnnnnnnnccacgcgtgcgatcttcttctactttgtcttccatcttcgccgacgagtcacatctccgaaatccggagccggagagggagaaagaaggagaatttgggttctccgagatcgaagctcttgcctcggaacccttgattttgttttggaataggctatttttttagtaaaagaggaaatggtgggaagtagtaattcgttagcgggtctacaagaccacttgaaattagcgagagaatatgcactagaaggatcctatgacacatctgtcatcttcttcgatggcgccattgctcagatcaacaagcatttaaacacccttgacgatcctttggcccggaccaaatggatgaacgttaaaaaggccataatggaagagacggaagttgtgaagcaattggatgcagagaggagagcatttaaagaagctcccactgggcgtcgcgctgcttctccacctatcaataccaaatcatcctttgtttttcagcccttggatgagtatccaacttcatccggtggtggtcctatggatgatcctgatgtgtggaggcctcctacccgtgatgttactagtcgaagacccgccagggctggtcaaactggtactagaaaatcacctcaagatggggcttgggctcgtggccctactacacggaccggtccagcttcccgtggtggcagaggtggggctactagtaagtcaactgcaggtgcccgctcttccactgccggaaagaagggagctgcctcaaaatctaacaaggctgagtctatgaatggtgatgctgaa

SEQ ID NO: 97567 - DNA, 451 bp, Arabidopsis thaliana columbia
caactagtttaagtgttgaattgcatagagaagaaaggttttgagtagcaaaagagtaaaactagatctttaggagaaggtaaaagaagcaattgatggcgacgacagtgggaagaaacatagcagcaccattgctgttcttgaatcttgttatgtacctgattgtgcttggtttcgcaagttggtgtctcaataaatacatcaacggccaaactaaccacccaagttttggaggcaatggagcaacaccgctcttcttgacgttttcgatattggcggctgtggtaggagtagcgtcgaagttggccggagcaaatcatattaggttttggaggaatgatagtttagccgctgctggagcttcttccatcgttgcatgggctatcacagctcttggcatggggttggcatgcaaacaaataaacataggaggatggagaggatggagact

SEQ ID NO: 97568 - DNA, 829 bp, Arabidopsis thaliana columbia
aaaggagacccgatggtggttccacgaggataaagtataaacctcgatcaaccaagaaaaatgtaaaatagtccaaaacagtctttgagctttgttgtcttttttttgagttaattgggtttaagctgtcccaaacccatttccaaaatccgtgatgtataaaaacaacacaataaatttgactaattttgaatcttctactctaattttaaaacccctactaacaaaagacccaacctaatctctctgatgcttctctattaggtcatatatatacatcaggaagaatatttctcaactactactttcctcttggttttgtcctgtgtcaccatgaagccgctgacgaagaagacgacgacggaggaaacaaagacaaagatgggttttgaaagattctctgaccagtagcgagtatgtgtcgcggatcaaactcagcctttaagcttctgaaccgatcccacttgtccccaaaatgagccacccactcttcctgtgttgcgtggtgaggaagatactgcttcacattgatcttggcttggtcacagaactccaagatccgacggttatgatctttcagattctctagcttctgtgtctgtataccggacgttaaagctgatctcaatacagccaccatatataaaacttccttatactgcgtcacggctgagctactctcgtcccatctgacaataacattaaattactacacgtgaacaacgacaatatctatattaatgtaatacatcaatgatgtgcggagggttactagagatcagattggtctacgagaatctgattgggacccacccaccatgagttctat

SEQ ID NO: 97569 - DNA, 551 bp, Arabidopsis thaliana columbia
  unsure (1)..(551): unsure at all n locations
taggtccactatagaagagctatgacgtcgcatcgcacgcgtacgtaagctcggaattcggctcgaggcggggccaaatggagatttctgaggccatggacatcagaacaagacaagggttgcttaatgccctagcgggaaaagttggcaaaagaatggacagcctcctggtgcctttagaattgctatgttgcgtgtctcgtaccgagttctctgacaagaaagcatacttacgctggcagaaaaggcagttaaacatgttagcagaggggctcattaacaatccagttgttggatttggagaatcaggtcgtaaggcaactgacctgaagagtcttctgctaaggattgaagaatcagagtctcttccatcctcagctggagaagtgcaaagagcagaatgtttaaaatctcttagagaagttgctatctcacttgctgagagaccggctcgtggtgatttgacgggtgaagtctgccattgngctgatggctatcatttgaatgtcagactatatgaaaaattgcttctctgtgtctttgacatattg

SEQ ID NO: 97570 - DNA, 405 bp, Arabidopsis thaliana columbia
gttccggggtggacccacccttccggaaaaatggaggagtcacgagaatcgccggcggaacacggctactacatgccggcggaatgggattctcatgctcaaacttggatcggttggcctgaacggcaagataactggcggcacaacgctttacccgcacaacgagtgtttgcagatgttgcaaaggccatctcaaagttcgagcctgtcactgtctgtgctagccctgctcagtgggaaaatgcaaggaaacagcttccagaggatataagagttgttgagatgagcatgaatgattcttggttccgcgactctggaccaactttcattgtacggaaaagacccgtaaaagctccagtttcttctcttaaccgaaacattgctgggatcgactggaatttcaat

SEQ ID NO: 97571 - DNA, 833 bp, Arabidopsis thaliana columbia
gttttaggtgcactatagaagagctatgacgtcgcatgcacgcgtacgtaagctcggaattcggctcgagtattcagcaaagaggaatcgtccccttctgtaagggtcttgatgtgattcaacaggctcagtctggtactgggaaaacagcaactttctgctctggtgtcttgcagcagctggacttctcccttatccagtgtcaggctttggttctagctccaactagagagcttgctcagcaaattgagaaggtcatgagggcccttggtgattaccttggtgtcaaggttcacgcctgtgttggtggaaccagtgtccgtgaggatcagcgcatcctccaagctggtgtccatgttgttgttggaactccagggcgtgtctttgacatgttgaagaggcagtctcttcgtgctgacaacatcaagatgtttgttctcgatgaagctgatgaaatgctctcccgtggtttcaaggaccagatctattacatattccagcttcttccaccaaagatccaagttggtgtgttctccgtaacaatgccaccagaagctcttgagatcacaaggaagttcatgagcaagcctgtgagaattttggtgtatctgtatgtgtcttatcttgtatgtattaattatttattttttaccttttttttttaatttacttttatctttgtttatatttttaattgtcaatgttttattacttcatttatattatttatttttattttatgttatattatatattccttctttttttaaagtaagtattattaatgagtttctattatttactatatattattatgtatatttatatattat

SEQ ID NO: 97572 - DNA, 518 bp, Arabidopsis thaliana columbia
  unsure (1)..(518): unsure at all n locations
acatcttgaacatgtcaaatacacgccctggagttccatcaacaacatgtacgcaagcttggagtatgccctgatgagcttacccttgaaggtatcaagcagttctacgtcaacgttgagaaagaagagtggaagctcgagacactctgtgatctctacgagactcttgccatcactcagagtgtcatcttcgtcaacactcaggcgcaaggtcgactggctcacagacaaaatgagaagccgtgaccacacagtctctgcaactcacggagacatggaccagaacaccagggacatcatcatgagagagttcaggtctggctcctcccgtgttctcatcaccaccgacctcttggctcgtggtatcgatgtccagcaagtctctctagtcataaactttgnncntccaanttaaggccngggattnccnttaacggtatnggnaggangtnggaggttccgtgggaaanggtttttggcnggttaaaccttttttggccnttttgattggtccaaag

SEQ ID NO: 97573 - DNA, 911 bp, Arabidopsis thaliana columbia
  unsure (1)..(911): unsure at all n locations
acttcccctctcactctaatacgactcactatannaaagctggtgcgcctgcaggtaccggtccggaattcccgggtcgacccacgcgtccggccatgggtcttcaagagaaccttctcaggggtatttatgcttatggttttgagaagccttctgctattcagcaaagaggaatcgtccccttctgtaagggtcttgatgtgattcaacaggctcagtctggtactgggaaaacagcaactttctgctctggtgtcttgcagcagctggacttctcccttatccagtgtcaggctttggttctagctccaactagagagcttgctcagcaaattgagaaggtcatgagggcccttggtgattaccttggtgtcaaggttcacgcctgtgttggtggaaccagtgtccgtgaggatcagcgcatcctccaagctggtgtccatgttgttgttggaactccagggcgtgtctttgacatgttgaagaggcagtctcttcgtgctgacaacatcaagatgtttgttctcgatgaagctgatgaaatgctctcccgtggtttcaaggaccagatctatgacatattccagcttcttccaccaaagatccaagttggtgtgttctccgcaacaatgccaccagaagctcttgagatcacaaggaaaggttcatgagcaagccagtnagaatcttggtgaagcgtgatgagcttacccttgaaggtatcaagcagttctacgtcaacgttgagaaagaagagtggaagctcgagacactctgtgatctttacgggnctttttgccatcaacttcagnggtgtcaattttcggggacccccagggggaaaggtttanttggttcccaagnnaaattggggngccgttnccnaaanttttnaaantncnggggctttg

SEQ ID NO: 97574 - DNA, 691 bp, Arabidopsis thaliana columbia
  unsure (1)..(691): unsure at all n locations
ctcccatnnnnnnnnnnnnnnnnnnnnnnnnnnnnnnnnnnnnnnnnnnnnnnnnnnnnnnnnnnnnnnnnnnnnccacgcgtccgcgctatcttcgctcttctctttgctctctctctctcaacgcggttcagatccgagtttgggagattcaagctccctgaaaaaagccctttactctcgcttaccaactttgctccagcatggcaggatctgcaccagaaggcacacagtttgatgcacgtcagtttgaccagaaactcaatgaagtacttgagggacaagatgagttcttcacatcctatgatgatgttcatgagagctttgatgccatgggtcttcaagagaaccttctcaggggtatttatgcttatggttttgagaagccttctgctattcagcaaagaggaatcgtccccttctgtaagggtcttgatgtgattcaacaggctcagtctggtactggaaacagcaactttctgctctggtgtcttgcagcagctggacttctcccttatccagtgccaggctttggttctggctccaaccagaggggttgctcagcaaattgggaggggcatgagggccctgggtgtaccttggggtcaagggtacgcccgggttggtgggaaccagtgtcccgtgaaggatcaagcggcattccctcccaaggctggggtggtccattgtt

SEQ ID NO: 97575 - DNA, 1596 bp, Arabidopsis thaliana columbia
  unsure (1)..(1596): unsure at all n locations
ggaagtcgttcgagtttggtctttgtctctatcttttcaatctttctctctcaatcgctcttcaatttgataacagcaaagtcatggcaggaatggcatctgatggaactcaatatgatcctcgtcagtttgatactaagatgaatgccattctcggcgaggaaggagaggaaacattctacactaactatgacgaagtttgcgacacgtttgatgcaatggaattgcaaccagatcttctcaggggtatttatgcttacggtttcgagaagccttctgctattcagcaaagaggaattattccattctgcaagggtcttgatgtgatccagcaagctcaatctggaactggaaagaccgctaccttttgctctggtgttttacagcagctcgatattagtttggttcaatgccaagctcttgttttggcacctacccgagaacttgcccagcaaattgaaaaggttatgagggcacttggtgactaccttggcgtcaaggctcaggcttgtgttggtggaacaagtgttcgtgaggatcaacgtgttcttcagtctggtgttcatgttgttgttggaacccctggtcgtgtctttgacttgttacgcagacaatccctccgtgctgatgcaatcaaaatgtttgttcttgatgaagctgatgaaatgctctctcgtggtttcaaggatcagatatacgacatcttccagcttcttccttccaaggttcaggttggtgttttctctgctacaatgcctcccgaagcccttgagatcacaaggaagttcatgaacaaaccagtcaggattctggtcaagcgagacgagctgactcttgaaggtatcaagcagttttatgtcaatgtagacaaggaagagtggaaactcgagacactatgcgatctctacgagacactggccatcactcaaagcgtcatctttgtgaacacaaggcgtaaggttgattggctaaccgacaaaatgagaagccgtgaccacactgtttcagctacacacggagacatggaccagaacacaagagacatcatcatgcgcgaattccgctctgggtcttcccgtgtcctcataaccactgacctccttgctcgtggtatcgatgttcagcaagtctctctggtcataaactttgacctcccaacccaaccggagaattaccttcatcgtattggaagaagtggaaggtttgggagaaagggagtagcaatcaatttcatgacatcggaggatgagagaatgatggctgatattcagaggttttacaatgtggtcgttgaggagttgccaagcaatgttgctgatcttctctgaagcctttcttttttctgttttttactgagaaagtgctgtgtttacccctttttttggcagcttctctatgctttgatttttgttttcaggctactacttagatttatagttcttggctaaaagcgaacataactcattacatgattttgcttttttggcaatcaagaatttcggcattatttatctttttgtgaacgtggcttacaaggaaggatactctatgagactaaagacttttctctnnnnnnnnnnnnnnnnnnnnnnnnnn

SEQ ID NO: 97576 - DNA, 1755 bp, Arabidopsis thaliana columbia
  unsure (1)..(1755): unsure at all n locations
ccnnnnnnnnnnnnnnnnnnnnnnnnnnnnnnnnnnnnnnnnnnnnnnnnnnnnnnnnnnngaattcctcgagctacgtcagggatttgcttcaatcttctctttatcgctccaccagatccaagttcgcgagatttcaagctctctaacaaagttcttcacttttactctcaaagctttcatctttcattcaactacttaagctccaagtatggcaggatccgcaccggaaggaacacaatttgatacgcgtcagtttgaccagaggctgaatgaagttctcgatggacaggatgagttcttcacctcatatgatgaggtccatgagagctttgatgccatgggtttgcaagagaatcttcttaggggtatctatgcttacggtttcgaaaagccttctgctattcagcaaagaggaattgtacccttttgcaagggtcttgatgtgatccagcaggcacagtctggtactggaaaaaccgccactttctgctctggtgtcttgcagcagcttgactatgcccttctccagtgccaggctctcgttttggctcccaccagagagcttgctcagcagattgagaaggtcatgcgtgcccttggtgactaccaaggtgtcaaggttcatgcctgtgttggtggaaccagtgtccgtgaggatcagcgcattctccaggctggtgttcatgttgtcgttggaactcccggtcgtgtttttgacatgcttagaagacaatctctccgccctgactgcatcaagatgtttgtccttgatgaagctgatgaaatgctctcccgtggtttcaaggatcagatctatgacatattccagcttctcccaccaaagattcaggttggagtgttctctgcgacaatgcctccggaagctttggagatcacaagaaaattcatgagcaaaccagtgagaatcttggtgaaacgtgatgagctcacacttgaaggtatcaagcaattctacgtgaacgtggagaaagaagactggaagcttgagactctctgcgatctctacgagactctagccatcactcagagtgtcatctttgtcaacactcgtcgcaaggtcgactggctcacagacaaaatgagaagccgtgaccacacagtctcagcaactcatggagacatggaccaaaacaccagagacatcatcatgagagagttcaggtctggctcgtctcgtgttctaatcacaaccgatctcttggctcgtggtatcgatgtgcagcaagtctctctagtcataaactttgacctcccaactcagccagagaattaccttcaccgtatcggaagaagtggaaggttcgggagaaagggtgtggcgattaactttgtgactcttgatgatcagagaatgctgtttgatattcagaaattctacaatgtggttgttgaggagcttccctcaaacgtggctgatttgctgtgaagaagaagaagaagaagaagaagaaaggttgcttgtttcgcaaatttcttatttgatttttgacccgtctctctctctctgaatcatcgatacatctttttcattctctagtattcttcatcaactctatcgaacatatatatgtctcttctgaccatatttcttttttatcaaatgcaatatttatttcttctaaaaaaaaaaaaaaaaaaannnnnnnnnnnnnnnnnnnnnnnnnnnnnnnnnnnnnnnnnnnnnnnnnnnnnnnnnnnnnnnnnnnnnnnnnnnnnnnnnnnnnnnnnnnn

SEQ ID NO: 97577 - DNA, 1747 bp, Arabidopsis thaliana columbia
gcgccgtaccggaattcctcgagctacgtcagggccagtctctcgcaatcttcgctcttctctttgctctctctctctcaacgcggttcagatccgagtttgggagattcaagctccctgaaaaaagccctttactctcgcttaccaactttgctccagcatggcaggatctgcaccagaaggcacacagtttgatgcacgtcagtttgaccagaaactcaatgaagtacttgagggacaagatgagttcttcacatcctatgatgatgttcatgagagctttgatgccatgggtcttcaagagaaccttctcaggggtatttatgcttatggttttgagaagccttctgctattcagcaaagaggaatcgtccccttctgtaagggtcttgatgtgattcaacaggctcagtctggtactgggaaaacagcaactttctgctctggtgtcttgcagcagctggacttctcccttatccagtgtcaggctttggttctagctccaactagagagcttgctcagcaaattgagaaggtcatgagggcccttggtgattaccttggtgtcaaggttcacgcctgtgttggtggaaccagtgtccgtgaggatcagcgcatcctccaagctggtgtccatgttgttgttggaactccagggcgtgtctttgacatgttgaagaggcagtctcttcgtgctgacaacatcaagatgtttgttctcgatgaagctgatgaaatgctctcccgtggtttcaaggaccagatctatgacatattccagcttcttccaccaaagatccaagttggtgtgttctccgcaacaatgccaccagaagctcttgagatcacaaggaagttcatgagcaagccagtgagaatcttggtgaagcgtgatgagcttacccttgaaggtatcaagcagttctacgtcaacgttgagaaagaagagtggaagctcgagacactctgtgatctctacgagactcttgccatcactcagagtgtcatcttcgtgaacaccaggcgtaaggttgattggctcacagacaaaatgagaagccgtgaccacacagtctctgcaactcacggagacatggaccagaacaccagggacatcatcatgagagagttcaggtctggttcctcccgtgttctcatcaccactgacctcttagctcgtggtattgatgtccaacaagtctccctggttatcaacttcgatctcccaactcagccagagaactaccttcaccgtatcggaagaagtggaaggttcgggagaaagggtgttgcgatcaatttcgtgacccgtgatgatgagaggatgctgtttgatattcagaaattctacaatgtggttgtcgaagagctgccttcgaacgtggccgatctgctgtgaagggagaaaagaagtcggttctgttgctgtgtttgctctgccgtactagtatcaccggagaagaaaggttttcttgttttgcaaggcactctttgatctgattttgacccgtcgtctatcagcgatttacatttcttaaattttcttagttgttgttctctcctctctctcccagctacgaacatatctctctcttcttgaccatttttaagtttaagtcatatggagtatttatttcttcactattttaatattcggctttgttgtttgtctttgatttttgtatcaatcaaatcttttcatcaaagtttggttttaagctaaaccctgacgtagctcgaggaattc

SEQ ID NO: 97578 - DNA, 372 bp, Arabidopsis thaliana columbia
caaatgcataaaaaagaaagaaaggatctcccatttgttgagctccatgctgtccggaggattcctctcgattttattagcccaaacctcttgtcagcttgttgacagcactgccccattcgattccattatttttagtacttttgggtttcatttgcaagaattgtcattttgaggagttcaaaaatgatgattttagtgttaacgtgtgatgacattttttgctaatccactagcacaaatgaatcatatcagcccatcgatataggatggaatagttttttttttcttttgtaaaatctaccaaaccccgaaataatgttagcaaagacaagcacccttaacatatccaatattctggtatagactcat

SEQ ID NO: 97579 - DNA, 522 bp, Arabidopsis thaliana columbia
  unsure (1)..(522): unsure at all n locations
nnnnnnnnnnnnnnnnnnnnnnnnnnnnnnnnnnnnnnnnnnnnnnnnnnnnnnnnnnnnnnnnnnnnnnnnnnnnccacgcgtccgcttggagcgacctcgggttgtgtttttgggatcattacttggctaactaccgcaaagacacagtacggacgcgttgatcttgatagcaccgggaaaaatggccctatgttagctggtaacctcgttgcgattctaacaggggggttgatccatgcggtgtgtagtctagtccggccacagaattacgattggtcgacgacgagggagatcaaagtagtggaagcgtatgcttcaggggacgaagatgttgatgttcctgccgaagagctaagagaagagaagctgagaagagccaaagcttggattgtgaaatgggggcttgtcttcactatcctcattggtgtcatttggccagttctcttttcccagctggggatttagcagaggatatttctgggtttgggcaattggggaatagttgggggaatataggat

SEQ ID NO: 97580 - DNA, 392 bp, Arabidopsis thaliana columbia
  unsure (1)..(392): unsure at all n locations
tcgctagaggcttaccattaacaactcccccattctnagacagaaccattctcaatgctcgaaaccctccaaagatcgagaatctccaccaagaatttgaagagatcgaagataaatccaacatcaactctctttacaccaaagagccaactctctacagatccttctgctttgatccagagaaaatcaagaaacttaagctccaagcaacagagaacagtgagtctctcctcggtaactcatgcacaagttttgaggctttatctgcttttgtctggagagcaagaaccaagtcgttgaagatgttgagtgatcagaaaacgaagcttctcttcgccgttgatggtagagccaagttcgagcctcaactgccaaaaaggtacttcggaaat

SEQ ID NO: 97581 - DNA, 534 bp, Arabidopsis thaliana columbia
  unsure (1)..(534): unsure at all n locations
nnnnnnnnnnnnnnnnnnnnnnnnnncaaaaagctatttatttttcatttgatcataatctcaaagcggcgaaggttttcttttgatcattatgatcatgacataaaacgtaacataaatcacatattctctcttacaagttacaatccttgttttcccctatctcgtgtgtctgacaagttaacgaaacaaaacccaaaaatctttcaaaaatactcataattagattacgtactaaatcatctttttaatcattgaatttcttctctaccgcgatggcggaggaggaactccgctgagaaacgccgagaaaaaggcgagagagctgcttggtttgaagcaaggcaccgcatgtccagctcctctgaacgtagcaaacgttaaaccttcgtattcttgaagccacccacttacctgtttttcatggtaccatggcctccaagctgtcttgatgggtaattcgagtgcgtttaagctataacgagtcgcaagtactggaactcttccgtctgggtcaccactgtaaacccatat

SEQ ID NO: 97582 - DNA, 751 bp, Arabidopsis thaliana columbia
  unsure (1)..(751): unsure at all n locations
ggaccactatagaagagtctatgacgtcgcatgcacgcgtacgtaagctcggaattcggctcgagtttttaacaaaagcttctcaaatctttcaaaggtttccaatttacgaagaaaggatctacaacatataatcactattaaagaatgagttatctgaacaaagtgtggatggcagcatcgttcgtagctgttcaaggaaacgccgatcacggcgtcaagttaaaaagcggtctcacctctgctcaccgtctccaacgaagactttcctccgatctccgtcctctcgccgccgcagatctaaccggcgactctctcccttcggaagaaagacgtcgtacctcttcttccactcccgatgagtctctccgacaagtcatgtacctcaactgctgggctcaaggctaaattcagataatgatggtcgtggctcgctcatgaactccgctgaatcagaatttttttctgatgcaaactgtatatagtttggtcatctgtggtggttgaancgtggttatgaaatcggtttgagtcggattttctggatgcaactgnaaagttnggtaaatcncgggganattagaatggtccaaaaggtcaaaggggggcggnatcctgnancccgggggggccacaagtcaaaangggccaaccggggggnncccaactttggccccctaaggnggggaattccggcttgggaaanagggaaagggtccnggnaatnatccgccaatccnnaaaaaggggg

SEQ ID NO: 97583 - DNA, 849 bp, Arabidopsis thaliana columbia
  unsure (1)..(849): unsure at all n locations
gtggaatgtacgatacattcaccagaacagtatgnatgatacgcagctctatcgactcatataggaaagctggacgcngcaggtacggtccgaattcccgggtcgacccacgcgtccgactattttcctttttaacaaaagcttctcaaatctttcaaaggtttccaatttacgaagaaaggatctacaacatataatcactattaaagaatgagttatctgaacaaagtgtggatggcagcatcgttcgtagctgttcaaggaaacgccgatcacggcgtcaagttaaaaagcggtctcacctctgctcaccgtctccaacgaagactttcctccgatctccgtcctctcgccgccgcagatctaaccggcgactctctcccttcggaagaaagacgtcgtacctcttcttccactcccgatgagtctctccgacaagtcatgtacctcaactgctgggctcaaggctaaattcagataatgatggtcgtggctcgctcatgaactccgctgaatcagaatttttttctgatgcaaactgtatatagtttggttcatctgtggtggttgactcgtgcttatgaaatcgcttgagtcggattttctggatgcaactgtatagtttggttacatctctgtgaatattagaatgttctaaaagatcaaagcaagccttggattatgagagaactctgttcattttctatatcttaaaaaaaaaaaaaaaaggggcggccgctctagaggatccaagcttacgtacgcgtgcatgcgacgtaatagctggtngatagtgtcactcgttnnnnnnnnnnnnnnnnnnnnnnnnnnnnnnnnnnnnnnnnnnnn

SEQ ID NO: 97584 - DNA, 932 bp, Arabidopsis thaliana columbia
  unsure (1)..(932): unsure at all n locations
tataacgggtattacggggtgataaatagtcgggaggtntgatgacccccaacgggggttcccggaaaattaaatttctttcccctttttttaaacccaagaaagggttttgtaaaaaatttctttttcagaaaaggggttttgcccatattttgaaaggaggagagaaaggtctcacatacatatgtggggaaattgaccagagagggtttttttatgaaggtcgagtttttttttttgaaaaaaataggtggggagaatcggcattattttgtttgttttagggaggattgtttttaggggaaaaagggccggattctgtgggggcgtaaagagtttaaaaaaaagcggggttcttcaaccttngttgcttccacggcgtgcttcgcaaaacgaaaggacctatttccttcccggattattacccggtccctttgtcaggcgggcggggaaagaatttataaatttcggaggagaattgttgaatgcccgttaaccctttaggggaagagacaggagggagagcattgttttttagtaaaaacatatttaaaggagaaggtgggggttttgtgcggagggtccgtgcaccagggaaatttgggtgggttttgaagggttaaaaatttatgaaaaaggatgcattttttgttttttacagttttttacacacaaaggtggcccttttgtgtggtgatgcaaaggtggtatgcaggtttgggttaaagcgggggtggtggactcggtgcttaggaaatcgcttgagtcggattttctggatgcaacggtatagtttggttacagctctgtgaatattagaatgttctaaaagatcaaagcaagccttggattatgagagggctctgttctttttaantattaaaaaaanattttttnnggggcggccgctctagaggatccaagcttaggta

SEQ ID NO: 97585 - DNA, 675 bp, Arabidopsis thaliana columbia
acgaaccaaaaagcacagcaaataactaagacaacccagtacaggacgataaagacctctaatggcggctcttgatctctctctctctttctctctatataattccttgtctacttacctctagttaagtgcagtcttcttcttccgcattctacaaccccaaagctttgcaggtttgtaagtaagacctttgttagggctctacaaaagtactctcttatcccggtattgttctctgcaccagctcgttctgccaaggcattgaactcagtttatcgaaatgctccaggatgaacatgatacaagctttgcctcagcgacatcgcatggaatgcttctgatagctcgtacatgtctcctatactttccaacgtaatatcctgagcaattgtgtattcacagagtcgtttcaggccctccaagagatactgatccgctgctcttagaagatcttttgatatctcatttgttatgtcgacagatccagtgtatataaacctcatcattaactcaaacacctcccatttgatatttggaatctcaatatctctagcgtctttttctctgtaaccaccatcaaacattgcacgaaatgcatctgaggatgccagcagacaaattctgtgtgcatagaatgtccttccttcgactagaaaggttacatcagacggacgc

SEQ ID NO: 97586 - DNA, 607 bp, Arabidopsis thaliana columbia
  unsure (1)..(607): unsure at all n locations
agttggagagtggattttgaattgaatagtggaagttataccacaatggtatttttggatacaaagggtagcgatttcattcaagaccgattgtgatcagaggagattaattaatacaatacaaaatgaccaaaacgaaccaaaaagcacagcaaataactaagacaacccagtacaggacgataaagacctctaatggcggctcttgatctctctctctctttctctctatataattccttgtctacttacctctagttaagtgcagtcttcttcttccgcattctacaacctcaagctttgcaggtttgtagtagactttgttagggctctacaaaagtactcccttatccctggggattggtcctctgcaccagctcggttctgncaaggcattgaaccccagtttatcgaaatgccccagggtgaacatgatacaagcttgccccagnggnatcnctnggatngtccggaaaggccgaaanggccccaaacttccaacgaaannccgngaaatgggattccagggnggtaagccccaagagaatgaccgggcctaaaggcttganccatgganngnagccggggaaaccccctaaccaaccnt

SEQ ID NO: 97587 - DNA, 367 bp, Arabidopsis thaliana columbia
ccacgcgtccggaattatggagcaggaccctgtactctcttccaacaataaatccataatggacgagtttcgtggaagttttgaagtcaaggagaatccaaagttgaagaaggcttctaagagattgttgcgggataaaccatcgggttcagatgatgaagacaatcgcatgattacttatgacgccaaagagaacaaaattgatatagtcggagatgcaaacccaattcaagattttgaagccatgatatcccgcagagataaaactgactggaccgagaaagcaatcacacaaatgaaaaacctaataatgaagcttgtagaaaattgtaccgacgagggtgacaaagcattggaatgtgtactc

SEQ ID NO: 97588 - DNA, 352 bp, Arabidopsis thaliana columbia
taaaaaatggagacttacgttgatgcgattggagaggacacggcagccacaacaacgacggcggagacggctgcaaataagaacaagaagaagttgaaagtgatggttgcgattgatgagagcaagaacagcttcgatgcgttggaatgggctgtggatcatctcagagttgttattagtgccgaaccggaaaccggtcaagaaggcggtttacttacgttgcttcatgttcacccaacgtaccttcaatatatctatccttctggtggaactgattcagtgcccgaaccaatgaggaaagcacgagaagagagttcgacaaacttattcacacgggcattggagatatgcc

SEQ ID NO: 97589 - DNA, 826 bp, Arabidopsis thaliana columbia
  unsure (1)..(826): unsure at all n locations
cgatagagaaaacgtacggagtaaaaaatggagacttatgtttatgcgattggagaggacacggcagccacaacaacgacggcggagacggctgcaaataagaacaagaagaagttgaaagtgatggttgcgattgatgagagcaagaacagcttcgatgcgttggaatgggctgtggatcatctcagagttgttattagtgccgaaccggaaaccggtcaagaaggcggtttacttacgttgcttcatgttcacccaacgtaccttcaatatatctatccttctggtggaactgcttcggcggtgtatgcgacagattcagtgcccgaaccaatgaggaaagcacgagaagagagtacgacaaacttattcacacgggcattggagatatgccgaggcaaaatggtgaagacagagactatgatattggaaggagatcctaaggagatgatatgccaagccgtcgagcaaacacatgttgatcttcttgttgttggtagccgtggactcggcatgatcaaaagggcatttttagggagtgtaagtgactactgtgcccaacatgcaaaatgtccaattctcattgtgcgaccgcctagagaaacctcaactagtaacacgaaggaacacaagagcaagtgaggaaggaaaccatgttataatagcttctgtttcattccgtttgtactccgtagagaagaaaaaaaagtgtgcagccaataaacaagtttacttttgcaaaaaaaaaaaaaaaagnnnnnnnnnnnnnnnnnnnnnnnnnnnnnnnnnnnnnnnnnnnnnnnnnnnnnnnnnnnnnnnnnnnnnn

SEQ ID NO: 97590 - DNA, 2139 bp, Arabidopsis thaliana columbia
gacattttgcgactcttcttctccttatcctctaaatctctcaccggtcaccgacgacgggaacttggtagttacaggaacaagaaatgtcctcgaagttccctctcggtgtacgcttcatcactcattctcttccttgtactcgtctcgcttccatgaattctggcgcccttatctattcatttcgttccgttcctgttctatccaaagcctttccttttaggttaaagtacattggattaggttcccgggtcaacttttcaacccgaccagagagatctcaacccgaattcgcgcggcgaagtggagctggaggagagattcgcgcgtccaagagcttgattgaggatgaggcagagcttagtgattgggtgagcgatttgaggactagttcgttgcgcgggaagttcacgagcgacgaagataacgcggatccagaggtggttcgtagaaacgtagacagggacaccagtaggggtccaaggagaggaagggaaggccaatctgataggttcggtggtgcgaaaaggggaaaggaaggtgaaatggataggtttgggagtccgaacaggaggagaaccagcggcgagcctgctgattcgttcgggaacaagcggttaggtgatcgagaaggttcaaggaacggtcgtgttcaaggaaagagtagtgagtcgtcttttcgtggaaggagtgatagaaatgtagattcagggtcgtcttttcgtggaaggagtgacaaaaatgttgactcagggtcgtcttttcgtggtaggaatgatagaaatgtagattcagggtcgtcttttcgtggaaggagtgatagaaatgtagactcagggtcgtcttttcgtggaaggagtgatagaaatgtagactcagggtcgtcttttcgtggtaggaatgatagaaatgtagactcagggtcgtcttttcgtggtaggaatgatagaaatgtagaatcagggtttaggagagagccaggttccgaaaacaacaggggcttggggaaacagacaagaggcttaagcctggaagaggaagatagtagtgacgatgacgagaacagggttggattgggaaacatcgatgatttgcctagtgaagatagtagtgatgaggatgatgaaaatgatgagcctcttattaagaaagcggcttctgctaaggctgttcagactgataagccaactggtgaacatgtcaaaacttcagattcttacttgtctaagacaagatttgatcaattcccactctctcccttatcgctaaaagccatcaaggatgcgggatttgagacaatgactgttgtgcaggaggctactcttcctatcattctccaaggtaaagatgtcctagccaaggccaaaacaggcactggtaaaaccgttgcatttttgcttccagcaattgaagctgttatcaaatctcctcctgcaagccgggatagtaggcaacccccaattattgtgcttgtggtatgtcctactcgggaacttgccagtcaagctgcggcagaggcaaataccttactgaagtatcacccctctattggtgttcaagttgtgattggaggcacaaagcttcctacagagcaaaggcgtatgcaaacgaatccttgccagatccttgtggctacacctggaaggctcaaagaccatattgaaaacacttctggattcgcaacaagattgatgggtgtgaaagtccttgtgcttgacgaagctgatcatctcttggacatgggtttccgaagggacattgagaggataattgccgctgttcctaagcagagacaaacatttttattttctgccaccgtacctgaagaggtccgccaaatatgccatgttgctctgaaacgggatcatgagttcatcaattgtgtccaagagggctctggggagacacatcaaaaggtcacacaaatgtacatgattgcatcactggatagacatttttcgcttctacatgtgcttcttaaagaacacatcgcagataatgtggactataaggttatcattttctgtacaactgctatggtgacaagattggtggctgatctgcttagtcagctaagcctgaacgtcagagagatccattctagaaaaccgcagagttacagaaccagagtttctgatg

SEQ ID NO: 97591 - DNA, 1959 bp, Arabidopsis thaliana columbia
  unsure (1)..(1959): unsure at all n locations
gttgcagagccttacagttaaaggcatacgcttcaccgttctcttccgtcttttctccactcgttggcatgaattccgatggacccaaatccggtaagaagagacgagagattcgtgctaaacttgtgaagaagttgacgagtgacgaagatggctcgggaaagctagtcaaggacaacaataagagtctaaagaggggaagagaaggcaaatctgatgttgatgagcctcttattaagaaaccagcttctactacgcctctagtgactcaaattgctaaaacttcagattcttatttgtcaaagacaagatttgatcagttcccactgtctcccttaacgttaaaaggaattgaggatgctggatttaagacaatgactgttgttcaggaggctactcttcctctcattctccaaggtaaagatatccttgcgaaggccaaaacaggcactgggaaaacagttgcatttttgcttccatcaattgaagctgttatcaaagctcctcctgcaagccgtgataataggcatcccccaattattgtgcttgtggtatgtcctactcgggaacttgcttgtcaagctgctgcagaagcaaacatcttgctcaagtatcacccatctattggtgttcaagttgtgattggaggcactaagcttcctacggagcaaaggcgcttgcaaaagagtccttgccagattctcgtggctacacccggaaggctcaaagaccatatcgacaacacttctggatttgcaacaaggttgatgggtgtgaaagtccttgtgcttgatgaagctgatcatctcttggacatgggtttccgaagggaaattgagaggataattgctgctgttcctaagcagagacaaacatttttattttccgccacagtatctgatgaggtccgccaaatatgccatgttgctctgaaacgggatcatgaattcgtcaactgtgttcaagagggtgctggggagacgcatcaaaaggtttcacaaatgtacatgattgcatcattagatagacatttctcgcttctatatggtcttctgaaaaaacacatcacagataatgtgggctataaggttattattttctgtacaactgctatggttacaagattggtggctgatctgcttggtaagctaagccttaacgtcagagagatccattctagaaaaccgcagagttacagaaccagagtttctgatgagttccgcaagtccaagagtattatccttgtgacatctgatgtatctgctcgtggtgttgattaccctgatgtgtccttagtcgtacagatgggattgccatcagacagggaacaatatatacatagacttggcagaactgggcggaaaggtaaggaaggagaaggtgtactattgttggcaccgtgggaagagtactttctatcttctgttaaggacttgcccatcacaaagtcttctttaccgccaatagaccatgaggctgtgaaaaaggtgcagaaagggcttatccaagtggaaatgacgaacaaggaggcggcatatcaggcatggttgggttactacaaatcgcagaagaagattgctagagacacgaccagactggtggagttagctaatgagtttagccgcagtatgggacttagcatccctccggctatccctgtaaatattcttggcaagatgggtctcaaaaacgttcctggtattagagtcgctccaggttttgacaagaaacctgcaaagagaaattatcgttcccgctagattttctctttctttgcctaatggtattgtttgtgttgaactttattgcttttttgaagtttggcattttggtaaaagttaccttcttaagaatttcatttggtaaaaaaaaaaaaaaaaacccaaagnnnnnnnnnnnnnnnnnnnnnnnnnnnnnnnnnnnnnnnnnnnnnnnnnnnnnnnnnnnnnnnnnnnnnnn

SEQ ID NO: 97592 - DNA, 663 bp, Arabidopsis thaliana columbia
atctctccagaactttcttttcccagtacttctcctctgctttttattacttgtcttcttctctctttaattttttataaatttaattttgggttgaaaaaaacgaggaagaagagaggagaggagactctttcttttagtatttatttatggaggaggagaggagactgtcttaatcgtttccgggtctcttattctgatccattcttctctcaagatctaagatttactgattttgaagtggagaagaaattagttgtctcgacaaaccccactagaaactttgtttagtgtgtcttcttaaagcctgcaagatgcagagaccacctcctgaagatttctccttgaaggagacgagacctcatctaggtggaggaaaactctctggagataagcttaccagtacttatgaccttgttgagcaaatgcagtatctctatgttcgtgtggttaaggcaaaggagttacctggcaaggatatgactggtagttgtgacccttatgttgaggttaagcttggaaactacaaaggcaccactaggcatttcgagaagaaatctaatcctgagtggaaccaagttttcgccttttctaaagataggattcaagcttctttccttgaagctactgtcaaggacaaggattttgtcaaagatgatttga

SEQ ID NO: 97593 - DNA, 508 bp, Arabidopsis thaliana columbia
  unsure (1)..(508): unsure at all n locations
agggtctcccctangggtgtgtgacaaaccccccagcccaggcatggggcatcancggcgtcaccttcagatagcccctnccttggggggggatcctatggggtctaccaggtgagcgccattaccacgatgcatgaagagttccctttgcagcaatgattgcaggccggtgcttcttactccctgttcccaagaaggaaagaaggagatttgggacgtcctagatccaagcggaaatcatcccgcgataagctgaagcgtcccggtgatatcgatatctctcgggtcagaaccaggccgatgcaaagggaaaggttttactaaaaacccgagagccttaggattgtttggttttatgtaaatgtcattttgagccttggctcattgtatactactaagtatggcttcttatgcaatgtcttttgttacttaactcgtggattattttcttttgcgttgtgatgaagtttgttatttaggaaatcgaccacgtataaatattttatct

SEQ ID NO: 97594 - DNA, 556 bp, Arabidopsis thaliana columbia
  unsure (1)..(556): unsure at all n locations
tggggggagaatctaatgggtttccacgatgaggccccatacccccattgatgaagagtttcgttttaagaaataatcaaggcggtgcttctactcctgttccaagaagaagaaggagatttggacgtcctagatcaagcggaaatcatccccgataagctgaagcgtcccggtaaaaattcgatataaatcattgggtttttggttgtagaaaaacctttgcgattactgaacctggttttgtctttaggtgatatcgatatctctcgggtcagaaccaggccgatgcaaagggaaaggttttgctaaaaaccccccaggcttaggattgtttggttttatgtaaatgtcattttgacccttggctcattgtatactactaagtatggcttcttatgcaatgtcttttgttacttaactcgtggattatttgcttttgcgttgtgatgaagtttgttatttaggaaaaaaccaaaacacaaagggaggccgctctagaggatccaagcttacgtacgcggcgatgcgacgtcntagctcttgtagatggtcacct

SEQ ID NO: 97595 - DNA, 367 bp, Arabidopsis thaliana columbia
ctctgatcaaccctcctcctccgccgctgctacaaacactttaatatatgttgccaccgtccttccatatatatatagtccacttaagatctttccactcatttataacccaaatttgttctgtttcataaatatgtgtcttccatttcgacccgtctcgaaaacatattattcgtcttcttcttcgactatcgtgacgcgtatggtaaactgcatactactttttgtattcattttgttggtctacctcctcatctcggcctcaagacttcaatctaaaaactctattcatgcatacttctcatcttctgatcaagatcaatctcagagcccgacaaaaatcgagcacatcgtctttgggataggc

SEQ ID NO: 97596 - DNA, 602 bp, Arabidopsis thaliana columbia
  unsure (1)..(602): unsure at all n locations
taaaaccnnaaagccttcttaggnannnanaaagctttaagcagccnccttnaaggggtannaaaaggtcccccaacccaagccctaggtttccttaatggnaccnctaacctcagaagcccattcccccccattncctttgccctaacaccaacaggcttcttcctaggaacagcaggagaagctgacacagctatcttgccatcagttttagtactgtcctgagaagaactctcagaaggctgttcagaaacttccatagaaggaaagttaatctcacgaacgatacgtttcattttccttggcttaggaaccttaagctcttcctcatcactagaggaatcatcagtagcataaggatcattcacaataatacggactttcctcaaaggttgggtttcttgaggaagggacgatagagtgtttctcttagctctcttcttaatctcgctactaacaccactcaaagactgttcctttctaatcgcaaccattgttaaacccactcctcaaaaattccccgaaaacagaaagaacaaaaaatcactctaaaaagtcaaaacttttttggtatcaaaacctaaaactctcaaccgactatg

SEQ ID NO: 97597 - DNA, 436 bp, Arabidopsis thaliana columbia
  unsure (1)..(436): unsure at all n locations
ggtataacaagttttcgaggattgtaaacgaagaacttgactccaagtgcggtgcagttcttgatggtttacttagtaacggtaggcttaccttgggacagtttattgaaagagatagagattcaggaaatacgataggttctgaagcaatcagagattctcttcagaaattggttgctgcccgttttgttgagcgcattccttctcccgaacctgttcttggaaacaaagaaaaagagccggcaaagagaagaggcgctaaagctgccaagattcttaaagaaccagaaaccttggaggaacaagttgttgaagcagcaactcccagtttgacgcaataaggtttccccactttatattcccaaacaaaaattccccaattcntccttttagccgaatgaccatagccccctctctgganggggaagccnttnac

SEQ ID NO: 97598 - DNA, 755 bp, Arabidopsis thaliana columbia
  unsure (1)..(755): unsure at all n locations
actatagaagagttatggcgtctactgcacgcgtacgtaagctcggaattcggctcgagttgctagcttgggggccatctggactagcagtggtcgacggtttatccaatctattgaagtgtcgtctaccagcaacaatacggtgcctttcacacccaagtgcacacgtacgtgccttaagcacgtcagtactacgtgatatcatgaaccaaagctccatacccatcaaagtaactccaaaactgccaacaacagagaagaacggaatgaatagtccgtcctatcgattcttcaacgccgcctcaatagactggaaagccgatatccaaaactgtttaaactgggaagctcacagcttgctctccacaactatgcctactcagtttctcgacactgcggctcgggaactcggctgtactatatccttgtcccaataacgagcacccacttttgtttttggtaaattttagttctctagacaaaacatttggacgtagaccaagaagaatatatatatagtttgttgtatgtaatgttgtaatgatgagtgactgacgcaatcactcccaccgagcgttggatttgctctcgctcggtgtcttatataactcaacctcttctctgtacattttaaatgacgaagtagctcaatcttttttttaaaaaaaaaaaaaaaaagnnnnnnnnnnnnnnnnnnnnnnnnnnnnnnnnnnnnnnnnnnnnnnnnnnnnnnnnnnnnnnnngtctgctcaatc

SEQ ID NO: 97599 - DNA, 380 bp, Arabidopsis thaliana columbia
aaaaaaactcaaattctctgatctgatctaaaagcttccaacaaatggcggagactgcgaatacagatctagaacgaatcgatggagttcgtatgacatggaacgtctggcctcattccaaagctgaagctagcaaatgcgtgatcccactcgccgcttgcatttctccgatccggcgacatgccgatatccctactcttccttacgcaccgctccgatgccggacttgttccgctgcgttaaacgcttacgcacaagtcgatttcaccgcaaagctttggatctgtccgttttgttatcagcgtaatcatttcccgcctcattatcatgtgatctctgagactaatcttcctggtgagctttatcctcagtacactact

SEQ ID NO: 97600 - DNA, 364 bp, Arabidopsis thaliana columbia
attggaccaaaattgagaatcgctctgaaaccaaacatggagaagccggcgtcatcggaaacttccgggatttcctccgtcgtgcatcccaatgacggcgttcatcccaatgacggcgttcaacgccaggatcacgccgtccttcccgaagttctcgagcatcctggagctgagcagatagcagatatgtctgaggaagaagtaaagcgcacattagaagctgtagcatctactgggaagttctggcaggactgggagatactaaagggaacgctatcgtactggttgaagaaggttctatcggaatattctgacgcaaaaatgacggatgagcaacaaaaggaagctcttggagaaccatatt

SEQ ID NO: 97601 - DNA, 898 bp, Arabidopsis thaliana columbia
  unsure (1)..(898): unsure at all n locations
gctccctacgactcactattnggaaagctggcacgcctgcaggtaccggtccggaattcccgggtcgacccacgcgtgcgccgcacgcgtccggaaaataattcgtaatcaattgaccaaaccgatcgatcactgttgtcataaaagtcatcgccatcttggtttcgtgatcgaaaaagactcgtgaaaaaatggatcatatgatatcagaaaacggagaaacaagtgccgaaggatcgatttgcggctatgattcgctgcatcaactcttatcagcgaatcttaagcccgagctctatcaggaggtaaaccggttgctccttggacgtaactgtgggagatcgcttgaacagattgttctgccggagtctgctaaagccttgtcttcaaaacatgattttgatctccaggctgctagcttttcagctgataaagagcaaatgagaaatcctcgagtggtcagagttggtctcattcaaaactccattgctcttccaaccactgctccattctcggaccaaacaagaggaatattcgacaagttgaagccgataatcgatgctgcgggtgttgctggtgttaacatactgtgcttgcaggaagcttggaccatgccatttgcattttgcactanggagaggagatggtgtgagtttgcagagcctgttgatggcgaatcgacaaagtttcttcaagaactcgctaaaaagtataacatggtgattgttagtcctattctcgaaagagatattgatcacggtgaagtgctttggaataccgctgtgattatagggaataatggaaatatcattggcaagcatcganagaaccatatacctagggtaggagatttcaacgagagcacctattacatggaaggagacacaggccatcctgt

SEQ ID NO: 97602 - DNA, 536 bp, Arabidopsis thaliana columbia
  unsure (1)..(536): unsure at all n locations
ggcaaagaatttgcttcagtatatgttcaactctcttgcaaaaacaaggtgtcgattatgggagaaggatgtggagataaaagaaatgaaagatcagttcaaagaaattgttggtcttctgaggcagagtgagttgagaaggaaagaagcagaaaaggaattaaaattgagggagcaagcaattgcaacttcattaggtacgccgccgagttcagtgaaacatgtagactgaagacttgagcacaccttctccaatgaccgtgccagcacagaaacagctcaaatttacgccagggattgctaacggaaaagtgagaggaccggctgcatttcttgatacaaacaagaagatggtaccgatgggacaagtatcgatgaggaaactatcagccgtaggaaaaacagggtgggagacttttggaggttggaagggaagtcaatcacccagtgggtttgttcaatttcaaaatcggaattggcaaaagccatgggggccctctgtgtggaggattaggggcaattgacgggaacacntc

SEQ ID NO: 97603 - DNA, 2933 bp, Arabidopsis thaliana columbia
tttctttaacatcattatacaaagttacaacaacttgaaaaaattaattatataagcccattaaatcttgtatcataagcccagcccaaagttataaacttttcaaaatgcaaggagctaaaaaacaagttggttttgttggtttcaaatcaaaccaaaccgtttttttaagattacgaatcgaatggtttatttttgctaaatcggttcggttttttctccagacctattagtaaacctcttgcttcgattaggcggtcgtctctctgaaattttctgaaacctcttaaaccctagcaatgccgtcgagtttcttctttgaggatgctagtgacgacgagctcgaattaatacgcaatcaagaggacagtagtgaggaagacgtaaaggaaggcgaagcagaagagcatgaagctggagaagacgaagatggagaagaggaatatgaagaagaagatgacgacgaagaagaagaagatgagaagcggaaacgagatgctgatgctcaatctccttgggattttgcatcttactcaagctccgttggtgaagaacacgcccgccgtcacacaacgtctattgatgaaaagatctctaaagctattcagcatcgtccagttcccatttcaataaatgaagaagaagaagaggaagaagaagaagaagatgcctccgatgctgaaactgacaaacaagaggagtatctttcggaagacgatgaggcagctgagtacaaaccagaagatgctactcccaagccgttcttctctacagtggatggagtttcatttcatgctgatactttcatggagcttaatctctctcgtccattgcttcgagcttgtgaaactctcggatacaagaaacctactccgattcaggcagcttgtatacctttagcacttacagggcgtgatctttgtgccagtgccatcactgggtcagggaagactgctgcattcgctttacctactcttgagaggttgctgttccgtcccaagcgggtctttgctactagagttcttattctcactccgactagggagttggccgtccagattcacagtatgattcagaatcttgcacagtttactgatatcaagtgtggattgattgtaggagggctttctgtaagggagcaagaggtggttctgaggtctatgccagatattgttgtggcgactcctggacgtatgatagatcatttgcgtaattctatgtctgttgatttggatgatctagcggttttaatccttgatgaggcagaccgccttctacagactgggtttgccactgaaatcacagagctggttcgcttatgtcccaagagaaggcaaacaatgctcttctcagccacaatgactgaagaagttaaagagctagtcaaactttccttgaacaaaccgttgcggctctcagctgatccatcagctagaaggccaccaggcttgactgaggaggtggtaagaatacgcaggactcgtgaggcaaatcaggaagctgttcttctatcattgtgcacaaggacttttaaatcaaaagtcattatctttagtggaacaaaacaagctgcacatagactgaaaattttattcggattagctggcctcaaagcagctgagcttcatggaaacctaactcaagcacaacgtcttgattctctggagcttttcagaaagcaggaggtcgattttctcattgctaccgatgtagccgctcgaggacttgacatcattggtgttcaaacagttataaattatgcttgtcctcgggaaatagacagttatgttcacagagttggtagaacagctagggctggaagggaaggttatgctgtaacgtttgtgactgatagtgaccgatcccttttgaaagtcattgcaaagaaggtgggttcaaagttgaagagccgagtcatcccagagcagtcaatcgtcaagtggtctcagataatcgatgaaatggaagatcaatattccgctgttatttcagcagagagggatgagcgagctctaaggaaagctgaaatggaatttgcaaaggcggagaacatgcttgagcacagagatgaaatatatgcacgcccaaaaaggacttggttcatgacagagaaggagaagaagctcgtggcacaggctgaaaaggattctgcagggaaccctgctggaggcgaactagttagtgctgatagagcagaggacctcaagatgaaggagaagagaaaacgtgaacgcgagaagaatcttcctaggaaaaaacgtagaaagctagaagctgccagagagatgctagaagataacgaaggagaagaagaggaagaagacgaagaaggagacgaaaagagaggaagatcaagagggaaagacaagaaaaaacaggagacagataagaagggattgacactaaaggatcttggttacatgagagcaaaagcggtgaaagcaaaacagagagcaattgattccggtaagatggagagaccaaagccggacaagaaacaaagccggagtaaaccaagaaaccagcctcgtggtgaagagatgaaagatctgttcaagagtgatatgggcgagaagaaacagggcagaggcggtgccgcggctgcagcaaaacctcggacgaagtcgaagaactcattcaagagcaaagccagatataagcgtaggtaaaaggaaaaagcatttttgagaagatatcgaaggacaaacccacgagaagaaggacatttcattgagaagggtttaaacaatttaaattattgttgtaatatcataatttagaacaaaactggttaagatgttcgaaattttgttttctttgtcctatggtttttataatctttcataaaaaaaaaaaaaaaaaagcgctctagaggatccgagctcacgcacgcgtgcgtgcgacgtcatagctcgtaccatagtgtacaggga

SEQ ID NO: 97604 - DNA, 512 bp, Arabidopsis thaliana columbia
  unsure (1)..(512): unsure at all n locations
ggaaaatctaattctcagacaacttttttcgaagaagacgagcgaattttaaagattttgttttctatattctcttctgatagtgaagtctcggagactgaatgatattgtttctggtcaacttaaccaatttcagaacatggcaaacagagcagacaactcaatgcgttgttcaaatagtaagaaaccgaatgacggtatgatgctcgtaatatcgattttcgcgggaatagttatcggatttttattaggcatatctttccctacattgtcactaactaagatgaattttccatcaagcattcttccttctgttgctactgtctacatagaaaatgagaaaccggagaaatcatctaagacgagttcacaaaacgaaagtgatgcatcacatcatcataagatttgggttccatcgaatcctcgaggtgcagagatgttacctccaagttttgttgcagccgaatcggatttttacttacgaagattgtggngattgcctaaagatgatt

SEQ ID NO: 97605 - DNA, 768 bp, Arabidopsis thaliana columbia
  unsure (1)..(768): unsure at all n locations
tttcccagtgagaaatggcgacgaaggaaccagaatctgtttacgagttaagcatcgaggatgcggaagggaacaactttgcgcgcagtcaatacaaagacaaagttcttttaattgtcaatgttgcttccaaatgtgggatgacaaactcaaactacactgaattgaatgagctttacaacaggtataaagataaaggtctggagattctagcatttccttgtaaccagtttggtgacgaggaaccgggaactaatgaccaaattactgactttgtttgtactcgcttcaaatctgaattccccattttcaacaagattgaagtaaacggagagaatgcttctcctctgtataagttcctgaagaaaggcaaatggggaatcttcggcgatgacattcaatggaactttgctaagtttcttgttgacaaaaacggtcaagctgtacaacgttattatccaactacttcccctcttacacttgagcatgacataaagaatcttctgaatatctcctgaatgatgaagctttgttgctgaatcgtattgtatttgattatgaacctctctcattcaataaagagccatgacattgacttggattgattagttctgtttgagagccaaatcggttatttagataaaccagcacttattatctcaaaaaaaaaaaaaaaaaagggcggccgctgattagtgagtnnnnnnnnnnnnnnnnnnnnnnnnnnnnnnnnnnnnnnnnnnnnnnnnnnnnnnnnnnnnnnnnnnn

SEQ ID NO: 97606 - DNA, 670 bp, Arabidopsis thaliana columbia
atggacttatattgaatttgaatgtgtaattcaaggaatgggagggggtcatctcatttttggatctgcaacgaatgaattcaagagataagagaattaaggatacccaccaagaagactaatccaatccataaagatgtaccagaaaatacaacatttttgttactcgaccaaccatcaggagacgcaaatacaacgggtccactaatcagtaagattaatgaagtaataattaatgcaaaaactgccaattggaaagcaatagtcatgtttttaatcctccaagctattaacaaaagaatatacaccatttaatcctcttacccactaaaaatttttaataaataaagggattttatcatgaatccgttgattcgagatgacttagttccaatttctttttaccacttttagtctattcggacatgaagttaaaggttcttttttacttcacaaacgggtatactggatcgcgtatctcatttatttatatagccagatttatagacctattaaagaaagtcacaccctatatctttctctacatagtgatcgtattaactcatagggctatgttctatttggcgaaaaaaaaaataaaaactcgagccgaattccgagcttacgtacgcgtgcgttcgacctcataagtcttctagagttgtaccta

SEQ ID NO: 97607 - DNA, 693 bp, Arabidopsis thaliana columbia
acgagctctcttctccgtacggagacaccgagcaaaaactggcttcttacttcctccaagctctcttcaaccgcatgaccggttcaggcgaacgatgctaccgaaccatggtaacagctgcagccacagagaagacttgctccttcgagtcaacgcgaaaaactgtactaaagttccaagaagttagcccctgggccacgtttggacacgtggcggcaaacggagcaatcttggaagcagtagacggagaggcaaagatccacatcgttgacataagctccacgttttgcactcaatggccgactcttctagaagctttagccacaagatcagacgacacgcctcacctaaggctaaccacagttgtcgtggccaacaagtttgtcaacgatcaaacggcgtcgcatcggatgatgaaagagatcggaaaccgaatggagaaattcgctaggcttatgggagttcctttcaaatttaacattattcatcacgttggagatttatctgagtttgatctcaacgaactcgacgttaaaccagacgaagtcttggccattaactgcgtaggcgcgatgcatgggatcgcttcacgtggaagccctagagacgctgtgatatcgagtttccgacggttaagaccgaagattgtgacggtcgtagaagaagaagctgatcttgtcggagaagaagaag

SEQ ID NO: 97608 - DNA, 376 bp, Arabidopsis thaliana columbia
cggacgcgtgggcaaaatacatgcttcgttattatgaaactgttttgagggtaggagaaagatacgagcgatgttttctcactagcattctcaccagctcatgttgcaagctttgtctatgttgggagcttatagatcgctcctccattagcttcgaaatggttgaatcagcctgcaccagatttaaactctttagcacagttacatatagcacggaagttatggattttaaaatttgataagcagacctgttttaacttggattcaagagcatccactttcagcttcatctcctcaatgtctttaaccaacttaagttcatccaatcctctgacattctggccatctgttttctgcagctggacaacatctctct

SEQ ID NO: 97609 - DNA, 637 bp, Arabidopsis thaliana columbia
cagctctatacgactcactatagggaaagctggtacgccctgcaggtaccggtcccgaatttccgggtcgaccacgcctccgggccattgctctgtgtactttgcttctttaggagaaagaaagcacaaggggcaaaatcggaaagattatcatggccgacggtagtactagttcttcggagtccactaccgcctgcgctggaagcggcacaagaagagagattatgctgttcggagtcagggttgtgcttgacccgatgagaaagtgcgtgagtttgaacaatctgtctgactatgaacagacggcggagactccaaagatcgacggcgaagatagagatgaacaagatatgaacaaaaccccggccggttacgcctcggcggatgaagctcttcccatgtcttcttctaacggcaaaatcgagaggaaacgaggagttccatggactgaagaagaacacaagctgttcttgcttgggctgcagagagtcggtaaaggagattggaaaggaatatcaagaaactttgtcaagaccagaacctctacacaagttgctagtcatgctcagaaatacttcctcaggcgaagtaatcttaaccgtcgccgccgaagatctagcctttttgacatgactac

SEQ ID NO: 97610 - DNA, 790 bp, Arabidopsis thaliana columbia
ggaatcaaggaaattcgggttgaggtctggtgttagaagtacttgtatctatggtggtgctcctaaaggacctcagattcgtgatcttagaagaggtgttgagattgtaattgctacacctggtcgtttgattgatatgttggaatgtcaacacactaatttgaagagagtgacttaccttgtactggatgaggctgacagaatgttagacatgggatttgaaccccaaattagaaagattgtatctcagatccgacctgatagacaaacacttctttggagtgcaacatggccacgagaggttgaaactcttgccaggcagtttctacgagatccatataaggccattattggatcaacagatctaaaagctaaccagtctattaaccaagtaatcgagattgtaccgacgccagagaaatacaacaggctccttacactacttaaacagttaatggatgggagtaaaatcctaatttttgtggagacaaagagagggtgtgatcaagtgactagacaattgagaatggacggatggccagctcttgccatacatggtgacaagacccaatcggaaagagaccgagtcttggcagaatttaagagtggacgaagcccgataatgactgccactgatgtagcagcaaggggacttgatgtgaaggacattaaatgtgtggttaattatgatttcccaaatacattggaggattacatccataggattggtcgaaccgggcgtgcaggagctaaaggaatggcctttacattcttcacacatgacaatgct

SEQ ID NO: 97611 - DNA, 859 bp, Arabidopsis thaliana columbia
aaaattttgtaacggcccaaaaggttttttcccgtgaaaaaattttttgtcgcaacttaaaaaaggttttaaaccaatttgggcaagggcccctagatttgggttgcgaagccaaggccaagaaaggtccaaaatccaggccttaaaccggtcattgggtccaccaatgtgggacgcttattgcgggcaaagctcagtacgttaaattgggaaaacgcctccggcttaaatctcacttcgaatgagattttcttcaccaaccccaccctcagaaaattctcccaatcccatgtccgggtgattattccatccatctcagcgaaaactcattgcttatttacccatcagggacaaattgtactttcaacgtgttgcattgcagacagtgctgaatagagtgaacaccttcacaaacataacttacaagaacgaccccacaatcttcgcctgggaacttatgaatgagcctcgttgcccctctgatccttccggcgacaaactccagtcttggatacaagaaatggcggtgtttgtgaagagcttagacgctaaacacttggtggagatcggacttgaaggcttctatggtccctctgcccctgcgagaaccagattcaaccccaacccctacgctgcacaagtcggaactgacttcatcagaaataatcaggttcttggcattgattttgcctcggttcacgtctatccagattcctggtatgttttttaatgcaaaataccaagaaacagagactgccctgaatctgaaaacagagaacagctgaaaaatgcagtaaataatttgtgaactgtaggatcggacgcgtgggtcgacccgggaattccggtccggtactgc

SEQ ID NO: 97612 - DNA, 137 bp, Arabidopsis thaliana columbia
gcctgagctaatgactcgtcttctccagcactatggaaacagccacgtgcctttgcgtcttgtatcagattcctccacacagacttgctattcatcaaagttgcctcatttccaagtatccataagcagaacctatg

SEQ ID NO: 97613 - DNA, 800 bp, Arabidopsis thaliana columbia
  unsure (1)..(800): unsure at all n locations
gtaatttgaaaaccccacagaagattgcgattatggacatcttattctgtttcatagaatttgcttggtcctacaattcatattctaaccttagaacacgtatgaatcacattcccacagagaggccacctctaaaccttctccggcaagagctggaaggaacccccccatattttggacgtcttgcaaaagacaacttttgggcttgcggatgatgcatctaactcggaagatagactagaaggtgcagcagaagaaaaattggtatcgttttgtgaacaggttttgaaagaaacatctgatctccagtcccctttgggggagactactaacatggatgttcatcgggtactggagctacgttctcccgtgattgtgaaggttttggaaggcatgtgcttcatgaccaccacaatattcaggaagcccatgagagagttctaccctctgctcccgaggctcgtttgctgtgaacagatggagataagaggtgccctagccaaccttttcaaagcccaattgaagccccttttgccacagtaaatgatctatacgctatgatattgtggcaaagcaaaaccctcccaattgtcatttacttccccccagtttttttttttttttttttctacaattggattgatttttctccctgattaaagaggcccctccccgttttnnnnnnnnnnnnnnnnnnnnnnnnnnnnnnnnnnnnnnnnnnnnnnnnnnnnnnnnnnnnnnnnnnnnnnnnnnnnnnnnnnnnnnnnnnnnnnnnnnnnnnnnnnnnnnnnnnnnnnnnn

SEQ ID NO: 97614 - DNA, 465 bp, Arabidopsis thaliana columbia
  unsure (1)..(465): unsure at all n locations
aaaggatcccttgatgggttcggcccacttctcacaggatttgtcgttggagccaacatccttgcaggaggtgccttttctggcgcctccatgaaccccgcccggtcttttggtcccgctttggtctctggaaactggactgaccattgggtatattgggttggaccgttgatcggtggtggactcgccggtttcatctacgagaatgtcctcattgaccgtccacatgtcccagtcgctgacgacgagcaaccattgttgaattaaatgtgtttgaaactgtgctatgcacgtcacataccctattagctaatcattaatgtattattgatccccaaaaatcgtttcaataatgtattattgatcccaaaaattgtttctttctgtcctataagatgtatctcttttaagttgcacccttaatctattaattccaattattaaaggaanaactttctgttaacc

SEQ ID NO: 97615 - DNA, 703 bp, Arabidopsis thaliana columbia
tgttagtgaaagatcttagtgcaattcaaatttcagtctcttttatgggaccataatactctgatttgaaaatcaaacttcatcacctcctttcctcaatttcaggggttaattctagtgtttttttcattcacatgaatttggtttagcttctttcgtttataccaaagaaatctagtcaaatgttacatacaatatatattacaaatgaacataaacgacaaaccatcatcactccaagcactagacaaaaaagagtaagagaataggctagagactaattaaacatccaaatctaaccccaaacaattcaattctaaaagctaactcaaaatactagattaacttatcggaccaagtagtcaacgccaagaggaaacggtgaggagaggcacattgttccaagccaaggagatgaaacctggctccgattcaacaagtgaatacaatgtactataattgtagttccatagtagcagcttcgcttggctaaccgcgtaattactcggtttaaccggctcaaatccagctttctccatcaacactctccattgttctttctcctccattaacccaaaccgggttcccggtttattattatcatcatctgatcggaccaaatccataatcctcctaccgaacagcactctctccactctcagcctttctttcgaatctcgatccaaattcggttcaagcgatt

SEQ ID NO: 97616 - DNA, 932 bp, Arabidopsis thaliana columbia
  unsure (1)..(932): unsure at all n locations
antaaaaacnttnaggccccccttccggaanttggccggnttnnnccnanccggggnaaaacagggnccacaaaganagnggtttccccgattacctttggaantttctttaatcctggacctnctataatcagaaaacaagcncccattacccttatgcctcaatatccccactaaaccggtcaaaacctgtaaaagattcaaatngaaaaacacagagatcatgtacaatcatgggatgtggtaaatagagctttatgtaacagttttctaaccgcattggccaagtttcttcgaacatcttcaggtaccaactcaagaaccggaggaagnacaaagcttatgttcatctctagttgacctctgagccttgtgtgctttcctcttcggtcagggtacaatgctcctttgacttccaaactnaaatcagctggttccattactcggtcaagcccttgaagctcccatttcgtcatgttgagctcaagaactttggttatgtgtagaggtacgtctgatgggtaatcctgaccgttggatttgcatctaatccgcatgaccaccactggacacgcagtgaggaagaaaaattttattggtaacatttggattctccattcttcctcattaagcctatagtttttgggtttatccggaaacattgcttcgaaaacccttgatttgtcttccaaatattcatcaaacaaggcctgaggagactcgtggagagcgatatcggttgatattttagaggaatacttggcggattttacaggtgacaagtgacacttcactctccaccgttttgatctaacctgcccacaacttccgatccccttctgtcgtcttctcgcagcggacgcgtgggtcgacacgggaattccggaccggtacctgcaggcgtaccagctttccctatatgagtcgtatta

SEQ ID NO: 97617 - DNA, 1292 bp, Arabidopsis thaliana columbia
  unsure (1)..(1292): unsure at all n locations
cttcaactgctgcgtctagctgtccttccttcttcatttgcttcttcttctctagctcagcgcggatcgctgcagtagtaccctgacgtagcctttcttcttcctttactttctcatcttctatctctcaaaagaaaagcagacaactttatttgcaaaaacagagttttttttttcttatcttgagaaagttcaacagaagatgatgttcgagaaagacgatctgggtctaagcttaggcttgaattttccaaagaaacagatcaatctcaaatcaaatccatctgtttctgttactccttcttcttcttcttttggattattcagaagatcttcatggaacgagagttttacttcttcagttccaaactcagattcgtcacaaaaagaaacaagaactttcatccgaggaatcgacgtgaacagaccaccgtctacagcggaatacggcgacgaagacgctggagtatcttcacctaacagtacagtctcaagctctacagggaaaagaagcgagagagaagaagacacagatccacaaggctcaagaggaatcagtgacgatgaagatggtgataactccaggaaaaagcttagactttccaaagatcaatctgctattcttgaagagaccttcaaagatcacagtactctcaatccgaagcagaagcaagcattggctaaacaattagggttacgagcaagacaagtggaagtttggtttcagaacagacgagcaagaacaaagctgaagcaaacggaggtagactgcgagttcttacggagatgctgcgagaatctaacggaagagaaccgtcggctacaaaaagaagtaacggaattgagagtacttaagctctctcctcagttctacatgcacatgagcccacccactactttgaccatgtgcccttcatgtgaacacgtgtcggtcccgccaccacaacctcaggctgctacgtcagcgcaccaccggtcgttgccggtcaatgcgtgggctcctgctacgaggatatctcacggcttgacttttgacgctcttcgtcctaggtcctaagtctttttacttgcaaccaaagggcattttggtcgttttttaagtttcatggaccagatatgcatgtagttgttaacatgtatgtattttcttagaaagaaagaaaaacagattaatattaaaaaaaaaaaaggnnnnnnnnnnnnnnnnnnnnnnnnnnnnnnnnnnnnnnnnnnnnnnnnnnnnnnnnnnnnnnnnnnnnnnnnnnnnnnnnnnnnnnnnnnnnnnnnnnnnn

SEQ ID NO: 97618 - DNA, 750 bp, Arabidopsis thaliana columbia
  unsure (1)..(750): unsure at all n locations
aaaactttagaacgaaaaaagatgaaaatctttaactcatctcaaaacctattcttggccataacctttttccttgttctcatagttcatctaaaagcccaagacagtcctcaagactttttggcagttcacaaccgagcacgagccgaggttggggtgggacccttaagatgggacgagaaggtggctgcttatgcccgtaactatgctaaccagcgtaaaggtgactgcgctatgaaacactcgagcgggtcctatggagagaacatcgcttggagcagcggtagcatgacaggcgtagcagcagttgacatgtgggtggacgagcaatttgactacgattatgattccaatacatgtgcatgggacaaacagtgtggccactatactcaggttggtggtggagaaactcggagagggttgggattgtgcaaaagtgagatgcaacaatgggcaaaccctttatcacttgcaactacggacccccccggtaactgggttcggcgagtcggcctccctaaaaggaaacctccctttaaatgttttccggtttttgttatccacatgtatatatgtattgtttccatgttgttcagttttaccaatcatctatcggtcagctaataaagatttggtttgtgtgggccctggnccggnccggncttcttttntaccncatgtataantgnntgcgngggtttttanaatggatnagnaantncaatcctncgggttcnctgctttgtttnt

SEQ ID NO: 97619 - DNA, 375 bp, Arabidopsis thaliana columbia
gaaaaaaagaacgaacgctagtctattaaatactagaaacacaaaaaaagggcggtctacataagcttcgccgtgaaccatttctatcagctgtagcaaataactaaacttcatccatcgaaatatgaagtgaagactagatatgcctaaatactttcttttctatggataaaaaaagatttaattgatagaggaagcaccgtaaagatcaattggaaaggttttggaccgacacaacaagagctgtttatttatatcataatatgagataaatcttaggaatctacttatgtaatagagtaatccccgaaggtattgagcaccggtgtagcatcacatcctaaagacagtaagtctttttcttttttatgaagt

SEQ ID NO: 97620 - DNA, 379 bp, Arabidopsis thaliana columbia
tgtcctcccaaaatggtgacatgtcattaagtgggagggacatggggggtatgcatgggttttagtgtgaagatatgggtgcaaaacgaacatctaatgttgcttcaatgttctccaaaatggtgcagagcaatcatcaatcctttggtcgctctcttccttcaaacaacgttccaaaggatagcttacgtcacgaggaacaaatggctggaagtggggagggcgatgcacccaaggtgactgttaagagagttgagaatggtgcttttgatcctcaagaggtagctcccaaaggggagcaacaatcaccttcaagatctgatcgtttagttagaggtgggttaaataacaaggagtcagcgaatcacttgccgcattt

SEQ ID NO: 97621 - DNA, 979 bp, Arabidopsis thaliana columbia
  unsure (1)..(979): unsure at all n locations
gggaagatgactcgaagctggtcgatggaattactgagaagatatcaaaaaagttgttcacggaaaaaccaaggaatgatagtatcctaattgggatcgaccaacacatgggggaattgtatcccccacgcgtccggaattcgaatgaagatgttcaagtcattgggatttggggaagaggaagtaatggtagatcagcactagcaagccacgtttaccaaaacatcaaacatcacttcgaagctcattgttttctcgaagacgtgagacggatttcgctacatttccgtgactctcatttacaagatgagcttctttcaaatatgcaaggagaaggtttgacaacaaagaactgtcataggtgtcttaagactatcaaagcacggctaaggaacaagaaggttcttcttgtggcgaacgatgtagacaaacttgaacaatttgatgcacttgctgaagaatttacctggtttggtcctgggagcacaatcatcattaccccccaagatagacaattgcttatttcatcagtagtgaggagtgtctacgaaggtaagctcttgagatgtcacgcaggtcgtgagctcttgaggtcaaatgcctccaaggaaggagaaggagacgaccctgtggggttcgaccagtctacatatcgagccatgtatatatcacgtcatgtgtttttgaccttgagatatattttcactttgttgtgtgatagaggtcaacttagagaaaggataaangcaatagtacatagtctttagattcattaatccttttagatacaaggtgttgtatttaggtcgaataagttggttagattcaggaatattaacttaatgtgtttgtttgttctatagtgaatgttacgccatttttttacatatggatgtgccacttgtgtatggatttgtgtactatccatttggtaaactattttattcttaagacggttcacaacaaattcatttaaact

SEQ ID NO: 97622 - DNA, 884 bp, Arabidopsis thaliana columbia
  unsure (1)..(884): unsure at all n locations
nnnnnnnnnnnnnnnnnnnnnnnnnnnnnnnnnnnnnnnnnnnnnnnnnnnnnnnnnnnnnnnnnnnnnnnnnnnnnnnnnnnccacgcgtccgcccacgcgtccggggaagaacaaaattgatatcactgtccctactggagcacaaattatctactccaaatacgcaggaactgaggtggagttcaatgatgtgaagcatcttatcctcaaggaagatgatattgttggcattcttgagacagaggacatcaaagatctcaaacctttgaatgaccgagtctttattaaggttgctgaggcggaggagaaaacagctggagggttgttgttaaccgagactaccaaagagaagccttctattggcacggtaagtgctcacttgatatcatgtccattcggggaatctgatactttcttagtagcttgatgtgatagtcagttcatacacaagttccaattatacatattctcctcttcattttatggcaggtgatagcagttggaccgggttccctagacgaggaaggtaaaattacgcctctaccagtatcaaccggaagcacagtactttactccaagtatgctggtaacgacttcaagggcaaagatggttccaactacattgccctcagagcttcagatgtgatggctatactttcttagttatgttatatctttgtaatctgcaacttgtatcccaattgtggaaattttttccgtaaacggcctgagcataatctggaataaagacttgagtttgaaaatgtgattttattgctgatttcatgttaaaaaaaaaaaaaaagggcggcagctctagaggatccaagcttacgtacgcgtgcatgcgacgtcatagaacttctatagttcgtcctcaa

SEQ ID NO: 97623 - DNA, 983 bp, Arabidopsis thaliana columbia
tttgtccgcggacctctagtgcaatttttagggttttatcctccgaaagtctcaacctttttcttatcctcaacaaggagaaatggcggcgactcaacttacagcgtcaccagtgactatgtcagcaaggagcttagcctcgctggatggtctcagagcttcgagtgtcaagttttcatctttgaaaccagggacccttagacagagccagttccgtcgtttggttgtcaaagctgcttctgttgttgcccctaagtatacttcaattaagccattgggagatcgagttttggtgaagatcaaggaggcagaggagaagactttaggtggtatcttacttccatccactgctcaatcaaaacctcaaggaggtgaagtcgttgccgtgggtgaaggaagaactattgggaagaacaaaattgatatcactgtccctactggagcacaaattatctactccaaatacgcaggaactgaggtggagttcaatgatgtgaagcatcttatcctcaaggaagatgatattgttggcattcttgagacagaggacatcaaagatctcaaacctttgaatgaccgagtctttattaaggttgctgaggcggaggagaaaacagctggagggttgttgttaaccgagactaccaaagagaagccttctattggcacggtgatagcagttggaccgggttccctagacgaggaaggtaaaattacgcctctaccagtatcaaccggaagcacagtactttactccaagtatgctggtaacgacttcaagggcaaagatggttccaactacattgccctcagagcttcagatgtgatggctatactttcttagttatgttatatctttgtaatctgcaacttgtatcccaattgtggaaatttttttccgtaaacggcctgagcataatctggaataaagactttgagtttgaaaatgtgattttattggtgatctaaaaaaaaaaaaaaaa

SEQ ID NO: 97624 - DNA, 381 bp, Arabidopsis thaliana columbia
aaatcatcttcaaacccaaaaccaaatcagatcataaagaaccaaaaataaaagccaaaacgtttttagacatggcactcacaaaagagagaagaagcttgttggtttcaatggtgttggtgttcttcttcttcaactgtcaccatcttcaagtcacgagttgtccagatcaggcgacgacaaactgtacggaccaggacaggaaattattggagtttccattgaatttggagtaccttgaagctgagtttttcttgttcggagcgttagggtttggtcttgataaagtcgcaccaaatctaacaatgggagggccaagtcctattggagctcagaaagccaatctcgatcctttgacaagagatattattttgcagtttg

SEQ ID NO: 97625 - DNA, 650 bp, Arabidopsis thaliana columbia
  unsure (1)..(650): unsure at all n locations
aannaaacccncccccccggacacctttncaagtttggggtcaaggcttncccgatttccccggngnnccnttttttaaacccccnntttcccnccagggaccngatttnggggggttnagggccatgtggcccattgggatgtccactatcccttctcttcgggcacgagactgtccaagtaaagagaaagaggctcttaactacctctttctcatcgtccccttgctcaatgttgctattcccttcttttggaaatcatttgctcttgtctggtctgctgacacggttgccttctttgctatgtatgcctggaagcttggatggctggaaagaacagagtagggactactcgtgaatcatgatgggattagagcatgaagattctttgtcttttcttccttagaatggtacttcattcagcttatcgtgttaggtacgtgggtttaaggcaaatgaatgtgaacattgctctagaatgatatatgaactagccccttaaggaatatttcttgtaaatcttaaagttctgagatgaattattgttccaaattaggaaaaaaaaaaaaaaagnnnnnnnnnnnnnnnnnnnnnnnnnnnnnnnnnnnnnnnnnnnnnnnnnnnnnnnnnnnnnnnnnnnnnnnnnnnnnn

SEQ ID NO: 97626 - DNA, 1154 bp, Arabidopsis thaliana columbia
  unsure (1)..(1154): unsure at all n locations
gtgagacaaagagagaagagaagattagagagaggagaggaagggtcaaagaatacatagcatcaccactagtcaacgcttttataaaacttcttcttcgtctcctctccttctcacatctctctctgtctttctctctcaaacctaacaaaagcttcagacttcaattctttagctacctctctcccatggcacgttcgaatgtaccaaaatttggaaactgggaagctgaggagaatgttccttacacagcttactttgacaaagctcgtaagactcgagcacccggtagcaagatcatgaacccgaatgacccggagtataactctgactctcaatcacaagctcctcctcatcctccttcttccagaaccaaacctgagcaagttgacacggttagaagatcacgtgagcatatgagaagccgagaagagagcgagttgaaacagtttggtgatgctggtggttcatcaaatgaagctgctaacaaaagacaaggaagagcttctcagaacaatagttatgacaacaagtcacctttgcataagaattcttatgatggtactggaaaatctaggcctaaacctaccaaccttagagctgatgaaagtcctgaaaaagtcacagtggtgcctaaattcggtgactgggacgagaacaacccgtcatcagctgacggatacacgcatatcttcaataaagtccgtgaagagagaagttctggagcaaatgtgagtggatcttcaagaacgccgactcatcaaagctcccgtaacccgaacaacacttcctcatgttgctgctttggctttggaggaaaatgaaagggaccggaagattgtatatagttatcgagaaatcagtgtgtaatcttgatgattagacattcgtgcttctttagatgaaataaggcataagtctcacttgcataagatttttatagtataatttttgtatgtatattttgcaattcttccttaatacttttggtgttttcataagacacattccagtttcggatctgcttgcagatgcattatatcttgcttggtacggccttagtgatttggtcactgatttgatatgcnnnnnnnnnnnnnnnnnnnnnnnnnnnnnnnnnnnnnnnnnnnnnnnnnnnnnnnnnnnnnnnnnnn

SEQ ID NO: 97627 - DNA, 663 bp, Arabidopsis thaliana columbia
  unsure (1)..(663): unsure at all n locations
nnnnnnnnnnnnnnnnnnnnnnnnnnnnnnnnnnnnnnnnnnnnnnnnnnnnnnnnnnnnnnnnnnnnnnnnnnnccacgcgtccgctcaaacctaacaaaagcttcagacttcaattctttagctacctctctcccatggcagtaagtgttttctttccttctttccttctcctcttcttcttatttaggtctagagctttctctcagattatagtttttgtttcgattccgtcaatctctgaccctttttttggaggatttgtagaaagttgagtcttaatctatttgcatttatggttcttcctattgagataacatttctatggattgcgatgtctattagtattcaactttatgattctgatttgctttagataagaaaagggttttatgaaagttactatttttatggtaaagtttctatttttgcttagcaaagatttcaactttatcatctgtacttggtcgaaatcgataaacccaatctgtatttgttctgttttggattcttaagagaatntgctatcttgtttctgagatgattgttctttacgattgtatagctattgatgtttgtgaggaaggacattgctgcagaatcgtacggtgcaccatcctgcgacgtaccatactgaggaactggcaagctgaaggacaatgc

SEQ ID NO: 97628 - DNA, 651 bp, Arabidopsis thaliana columbia
tgaggcttaattttaatgaaagtattaaatttgtccaaaaaaaaaagaaaaacaaatatggaaatgttgggttggtataagccaaaccggaaatctctataccaaaaacaaaaccgaaaaattcatgaaagagagttttattctttcagacttctggattcctctagagaagctgagaaataccaatttttcttctatacatgtcgcttctcctaacttctccagaattttattattgtctctgctcaaagctttcacttgccgttgaacaaacgaagaatggaggagaacgagcgcttgtcgatgaagaggcaagatattgacagagtaacccatgacttctctgatttttccctctcttctcccgccaggaagattcgtcgtctggatgtggatttgccaccgattatggaggaagaagagattgatttaccgatgcaagatacggtcgcggaagaaatcgagcttgagccggttaacgatgagagagcaattgttctatttaagcctcttcattatcatcagccttcttctggaaacgtatttgttgatcgacacttgatttctgggtttaagaatagatttcttcgcgatgtatcgatagctgatgataatcagtatgaagatgagagattaaacaagtgtcaagct

SEQ ID NO: 97629 - DNA, 551 bp, Arabidopsis thaliana columbia
  unsure (1)..(551): unsure at all n locations
nnnnnnnnnnnnnnnnnnnnnnnnnnnnnnnnnnnnnnnnnnnnnnnnnnnnnnnnnnnnnnnnnnnnnnnnnnnnnnnnnnnnnnnnnnntgttgtcgcccttttttttttttttttgtgagaattatgaacattataacatcaaaaatccaaattcagaaacattactatccacaaattagaggccaagatatacaacacagttatttaacttggtttgacatctatactgaaaccaaaacataacccgaatcatccaaccgttcttccacgggaagccggtttacataaacataccatgataccaacatcctccacttgaaagaacacggttggaacttaacttttgttgttcaccacataaaacctaacataaccaatcaatacaataaacaaccgaatatacttttatgaatttgaatttacctcttcgggcttcactccaccaataataccaatagatgagccgataatcggggtgttccgccgcattaacttagagggatttagcagggcggatttcaattccttgaatgatcaagccacactt

SEQ ID NO: 97630 - DNA, 829 bp, Arabidopsis thaliana columbia
  unsure (1)..(829): unsure at all n locations
gccaggccccgggaagaaaagctggattcctctaaaacgggcgcccctttttctttgggtaactttgcttaggacccctagggcggttnnnccnttttncccgaacaaaattgcaaaagctctttttagaagaaaacataaacgttaacaagaccaaaatagacaaatcgaactatcaaaaatttatacctgttttccttcttttgtagccttttaaccaaaatcactcgtacaatttcttggccgaaagagttctgagggttttggttttgtcctttgtagctttcgcttcatacttctcgctcaacgctatagctttagccacggctttcatcttccttgcattctttgttctcttcatgtttgtcgggttacgagaaagagtagctagtttcaggtatccggtttccgtagctactttcaagtctccggtttccgtagctagtttcacgtcaccggtttccgtagtgtccatggctacagccacagctttcatattcattgcaatcttcgttctcttcatcggttttcctttcctcgtgctcatcaagctacgagcacgagaagctagtttcccgtcaccggtctccgtagtgtccatcacttgaggagtagcttcagagacgctctgagattcagaaacgtccatggaagcttcctcgtctctattcttcttgttcctcttcttcgtcattgctgattaggtcagacgcacgacggcacgaagcaaagcaacgagagtagagagacggaaatcgatcgaattttagaatttcaccggacgcgtgggtcgacccgggaattccggtcgggtactgcagacggccat

SEQ ID NO: 97631 - DNA, 2104 bp, Arabidopsis thaliana columbia
  unsure (1)..(2104): unsure at all n locations
nnnnnnnnnnnnnnnnnnnnnnnnnnnnnnnnnnnnnnnnnnnnnnnnnnnnnnnnnnnnnnnnnnnnnnnnnnccacgcgtccgtgcggctgcgagacgacagaagggtacggctgcgagaaacgacagaagggggcttctgtggctaacaaagagcaaacaaacacttagaagaaactaagaatactctcatcaaggcgatatagaaaaaaatggagagcaaagggagttggacagtggctgatgccgtagactacaaaggacggcctgccgacaaatccaaaaccggtggttggatcactgccgctctcattcttgggatagaagttgtggagaggctatcaacaatgggaatagcagtgaatttggtaacatatttgatggagacaatgcatctcccaagttcaacctctgccaacattgtcactgatttcatgggcacttccttcctcctatgcttgctcggtggttttctcgctgactccttcctcggccgtttcaaaaccatcggcattttctcaaccattcaagctctgggaactggtgctctagcggtagcaactaagctgccagagctacgtccaccaacatgccatcatggagaagcttgcatacccgcgaccgccttccaaatgacaattctttatgtttcgctttaccttatagcccttggaactggtggtcttaaatctagtatctctggatttgggtctgaccagtttgatgacaaagatcctaaagagaaagctcacatggctttcttcttcaacaggttcttcttctttattagtatggggacattattggctgtgactgttttagtttacatgcaagatgaagtgggaagatcttgggcttatggaatctgcactgtctctatggctatagctattgtaatattcttgtgtgggactaagagataccgttataagaagagccaaggaagtcccgttgtgcaaatatttcaggtcatagcagctgcgttccgaaagaggaaaatggaactacctcaaagcattgtttatctttatgaagataaccctgaaggcattagaattgaacatactgatcagtttcacttgttggacaaggcggccatagttgcagaaggagattttgaacaaacccttgatggagttgcaatcccaaacccttggaagctaagctcagtgaccaaagttgaggaagtaaaaatgatggttaggcttttgcctatttgggcaacaactataattttttggacaacatatgcccaaatgattacattctctgttgagcaagcttcaactatgagacgtaacattggaagctttaagatcccagctggttccctcaccgtgtttttcgttgcggctattctcataactctagctgtctacgaccgtgccataatgcctttttggaagaaatggaaaggaaaaccaggtttctctagcctacaaagaatagctattggattggtcttatcaaccgctggaatggcagctgcagctctagtagagcaaaagcgtttatccgttgcgaaatctagttcacaaaaaacattgcctataagtgtgtttttacttgttccacaattcttcttagtaggagctggggaagcctttatctacactggccaacttgatttcttcataacacaatcgcctaagggaatgaaaactatgagcactggactcttcttgaccactttatcactaggtttctttgtcagcagtttcttggtctcaatcgtcaagagggtcacttcaacttctactgatgtaggatggctggctgataacattaaccacggccgactcgattacttttattggcttttagtcattctcagtggaattaacttcgttgtctatatcatatgtgccttgtggtttaagccaacgaagggtaaagactcagtagagaaggaaaatggcaagggattttcagttgaagactgctgaattttgttttgcaataattgtcttgtgtacaatattatcttgcaacaatgtcgctttccaattatgtttcttgtatattaagcaattggcttgtttttagattcctcccggtctcaaatattgtgtctttaccgttaaaaaaaaaaaatcttttttt

SEQ ID NO: 97632 - DNA, 373 bp, Arabidopsis thaliana columbia
ggaagtgagattacactcgcttttttgtttatgccaacacttacactcgcttaaattatatatttgttaggtgtatgaataacatatagttcctttccacatgtaaggctttttcatttgattattttaactaaattggttaaggtttctttaaatattcttagaaaatctccaagagatactctagaacttaaaacacataaagtattatgtattccgaaagcaactttgctttattgttatattttactaacaccaaataaaaatatccttggagtgaaataatgattatccggcatctaaaatctgttttaatctattttgaaaaattatatggatccatctccggataataaaattttggatccatcga

SEQ ID NO: 97633 - DNA, 372 bp, Arabidopsis thaliana columbia
tatctgtcaactctatcgcttgggctcctcatgaactcgcactgggctgagcttgcggtggatgggagggaaacatatcagttttctcggctcgagctgatggcggttagggacacgacaaagatagaccaagcacaccctgctggtgtcacttcagtgtcgtgggcacccgccacagaaccaggcgcactcgttagctctgctatgatcgatccggtctacaaactagcatccgccgggtgtgatagcacggtcaaagcgcgcaagttctcgaacgggtcatgcaaaacggattgtttcccggctctcaacaagcacacggattgggtccgcgatgtggcttgggcaccgaacttgggtcttccaaagtca

SEQ ID NO: 97634 - DNA, 380 bp, Arabidopsis thaliana columbia
accaatacgacgtcgtttattggatccagcattggaattcacccatcccgccacattgctatcccactgacgacaaagattgacaaaaaaaaacctaattttcattttcagctctcttcacactacaaacctcttaatctggtgattttgatgggtccaagtaagtttccttatttcttcttctgattcttgttctcacgcagtgtttgcctttaattctactccatcagttagctttctttgtttctcgttggcaatgttagaattgtgtaaaaagacaaaaccacctgggaactgttttgttttctagtttgagaatgtcgtgtttggactgtattgagttccgttttaaaccctgttgtgttctacttgtttaggtt

SEQ ID NO: 97635 - DNA, 621 bp, Arabidopsis thaliana columbia
  unsure (1)..(621): unsure at all n locations
cgagggaacgcaaaggtaggggccagattctgtagtaccttcttcgcctacctactctctttcccgaatttatttgccggcggtgatcaatcagaacgggattttagcctgagtaatcggtcactgggaagagaatttcgacggtgagagaagatgaagatatttgtgaaaactctcaaggggactcacttcgagatcgaagtaaaacccgaggattcggttgttgatgtgaagaagaacatagagagtgtgcagggcgcagatgtgtatcctgctgcaaaacagatgcttattcaccaaggtaaagtgcttaaagatgagacaactattgaggaaaacaaagttgctgagaacagttttattgtcattatgatgaacaagagtaaacctgcttcagctgcagcatctagtgcatctgctggcacatcgcaggccaagtcgatacctccctcaacatcacagccttcaatttccccntcagacttcagcttctgtatcagcaccagtggcacctgcaccaacangtccaccancaacttgaccggcaaccggcaactngaacctttaggtnnnaacttgaaaantntntttttttttttnnanagttttntttttattttg

SEQ ID NO: 97636 - DNA, 919 bp, Arabidopsis thaliana columbia
actcacttagggaaagctcggtacgcctgcaggtaccggtccggaattcccgggtcgacccacgcgtccgaaaaaaaatcaaaaaaaaaaatcaagaacaaatcgaaatctcaactctgtgaaaacctcgtccttgttcttcttctgcttctcccattccttcgatttttgcttcaatggatgtttgatttgctctctgactgcgtttggttttactatactatggaccctgagagtatcatggctgctgatgggactgattctgctcctgcaaatggtggtttagcaatggaaaatgtatgtgttaaagaaaatggggctgtttctgtcgaaaccgtggacactacttcagaaagtcagaatgagaattcggcaaacagttccactttggatacaattgaacacgtcaaggaggcagctgagggcacacaagttgaacatgtagatgattcaaagtgtatgaaaggcgaaaaagctcaacggaagccaaggcatgagaaactatcaggtggtaagaataattcatcggttcacatcaaaaagagcaaagagggcaaaagtgcagatgctaaagtggcagcatcaaatggttctgttgctcctaatgtacagacaacaaatcctcttaagagcaaatcattcaatgggcgagaggcacaagtcacaaagcaagggaagcatgactctgcacctgctgaaagcgctgatggggagaaggtgaaaccaaagtctcaaaagaaacaagcccatgagacatctgaagatgatactcagtcttctaatccgaaagcagacgatggaaaacctcgtaaagttggtgcacttccaaattatggattcagtttcaaatgtgaccaacgggctgaaaagagaaaagagttctatgttaagcttgaggagaagactcatgcaaaagaag

SEQ ID NO: 97637 - DNA, 506 bp, Arabidopsis thaliana columbia
gagttgacgttctctcctctgatctacgttcagatgacccggtttaaatgcggaggattagggttgggcttaagctgggccaatataataggagacgcattctctctgttctatgccttcaacctatgggctaaggccattaccggagaaaagatttatgccccaacaacaccctttataggagagagaagggtccaaagccccaacccgaccggtaaagatcccgtttcaattaaaccggtcgaaccgcggttggtgatctctgggtcactccaaacgacaggaaattggcgaattactgtttcaatctcgtcagtcgccgatcagatatcaccacattttccggcgaagggagatgactcgattccggtgttcgagattctcgccggaatcatatggaaatgcatagctaaagttagggtagagccaaagcctgtaacggttacgatcattaaaaaagatccgaacggtctgaaactttaatgcggtttcgaaacagtcaggtg

SEQ ID NO: 97638 - DNA, 480 bp, Arabidopsis thaliana columbia
ctaaactcgagaatttttgtagagagaggaggcaaagtgcgaaagctaaacgcagatccacgatcaatctcctccaccttcaaaagccttcaaaagtgtttcttcttcgtcttcttccttttattatctgtgccttgacagatccacgatccgattctggtcaaattttacatttctgcagactccatagaaggtgacatttgtgtaagatactcttgttcctggaacacatacgaagatgaagaaagtcttcggacaaactgttagagaccttaagagagaggtcaacaagaaagtgctcaaagttcctggagtagaacagaaggttctagatgctactagtaatgagccatggggtccacatggatcacttcttgctgatcttgcgcaagcttccagaaattatcatgaatatcagctgatcatggtggtcatatggaaacgccttagcgacaccggaaaaaactggcggcatgtcta

SEQ ID NO: 97639 - DNA, 678 bp, Arabidopsis thaliana columbia
  unsure (1)..(678): unsure at all n locations
gaggaggcaaagtgcgaaagctaaacgcagatccacgatcaatctcctccaccttcaaaagccttcaaaagtgtttcttcttcgtcttcttccttttattatctgtgccttgacagatccacgatccgattctggtcaaattttacatttctgcagataagctgctcatactagttatacaacagactccatagaaggtgacatttgtttaagatactcttgttcctggaacacatacgaagatgaagaaagtcttcggacaaactgttagagaccttaagagagaggtcaacaagaaagtgctcaaagttcctggagtagaacagaaggttctagatgctactagtaatgagccatggggtccacatggatcacttcttgctgatcttgcgcaagcttccagaaattatcatgaatatcagctgatcatggtggtcatatggaaacgccttagcgacaccggaaaaaactggcggcatgtctataaggctttgacagttttggagtacatggtaggccatggatcagaacgtgttatagaccgagattagagaacgtcatatcaaatttcgnattgccgatttccaganattgatccggggggngngtcaaggaccatgttaggagaacccaaccnggngcttggnnatgccaggaagattcccgagcnnccgaagt

SEQ ID NO: 97640 - DNA, 796 bp, Arabidopsis thaliana columbia
  unsure (1)..(796): unsure at all n locations
ggcgaacgcgaaatctgggtattgtaatttgaagcgatggcgacgactggaactgctgcggttgcgacgggaacttcgacggtgaagagaaaaccggtgtttgtgaacgtggaacatgctaaagcctgtgaacgactggtcacacgttgactgttaaagtcattgaggctaatatcgtggttcctgttacccggaagactcgtccagcgagttctctgagtcgtccttctcagcctagtcgactcgttgagtgtctcatcggtgacgaaactgggtgtatcctcgtcactgctcgtaacgatcaagttgatcttatgaagccgggtgctacggtgatactgcgcaattcaaggatagacatgttcaagggtacaatgaggctaggagttgataaatggggacgcatcgaagccactggagccgcgtctttcactgtcaaggaggataacaatctgtctctcgttgagtatgaactgatcaatgttggtggtgatcagtgatcttttagtatgtttatggaggttaacccctganagtgttgggttctgattttcctaccgtgaaggtctttnatttaagatgatgaagattgtatgacttggtccagagttgcttgtagggatatgcttctcctttttaacccnaaaatatccgggcaatgatctttcccttggggaccattttagccttcnggtaatgggcgnaatcaattgtncccntaaattngngttgntgaaggtaaaggcccttaggnttcttttcacctntctnatccagaaaaaaaagtttcttttct

SEQ ID NO: 97641 - DNA, 439 bp, Arabidopsis thaliana columbia
  unsure (1)..(439): unsure at all n locations
nnnnnnnnnnnnnnnnnnnnnnnnnnnnnnnnnnnnnnnnnnnnnnnnnnnnnnnnnnnnnnnnnnnnnnnnnnnnnnnnnnnccacgcgtccgggcggatcgaagtcggatcagaggctttcttagagaagaacatgtgacgtatgcttccattcttctctacatcactctctctagcggtcaaatcttcttcaataagtgggtattgtcatctaaggaaataaacttcccttatccacttggattgacattacttcacatgactttttcctctgttttgtgttttctcctcacgaaggtttttaaggtcatgaaggttgaggaaggaatgacattagaaatatatgttacatcagttattccaataggtgcaatgtttgcaatgactctatggttaggaaacactgcttatctctacataaactgtgcatttttccc

SEQ ID NO: 97642 - DNA, 757 bp, Arabidopsis thaliana columbia
ccggccgaaattccggtcgcccacccgtcggagggtctttttgagggcttgcgccgacgaattaggcgacgtaggtgacttggatacgaacgtggcatattcttcccaatcacatagagagtctcatttctttgtaaataattggcgggctttataatgatgttttcattctttaatttgaaaaaaaagaacacaagtaaacttgtttgggtcgccaagagcttattctccgcaacaagcaacgtgtaagagcaaatagcgtattaaacacgtcatttaatcttggtaaaagaagctcatacacaaaagagagagcacttcttttttctttgcttttttgttggatgaaacctgtaacattacagtacagaaaaatcaaacaaaggggcaaataggaatgtgcatcattcattagacagctttttaatctgtacaatgataattgtgatatcatctgtcctattctcatgctccaaccacagtttatatgattccgctgctgctgcagcgcatccatcgcgcggatctgcgtatctccccaccatatcaacaacagcttggcttggaagaaactcgaaaatcccatcgcttgcaacaacaaagaacaaatggttaggcgagagatgaaccattgacacttctggctctgcaataactccaatgctctcagctgtaaaatcaccaacactcctcgtgaatgcggttcccggatacatcccgttttgtacccaaagtctcggcggatctcctccttcac

SEQ ID NO: 97643 - DNA, 431 bp, Arabidopsis thaliana columbia
attttagttatctgccagagagaaagattttggatgggatggcatttgaggtaccggcagggaaaagtgtagcgattgttggtagtagcggaagcggcaaatcgacgattcttagaatgattttcaggttctttgacacagattctggtaatgttaggattgatggtcaagatataaaggaagtgacactagagagtcttcgaagctgcattggagttgtccctcaagatactgtgctcttcaatgacacaatatttcacaacattcactatggaaacctttcagcaacagaagaagaggtgtacgatgcagctaggcgaccagtgattcacgatacgatcatgaaatttccggataaatattcgaccgcggtgggagaaagagggctgatgctgagtggtggagaaaaacaaagagtggcacttgctcgt

SEQ ID NO: 97644 - DNA, 506 bp, Arabidopsis thaliana columbia
  unsure (1)..(506): unsure at all n locations
nnnnnnnnnnnnnnnnnnnnnnnnnnnnnnnnnnnnnnnnnnnnnnnnnnnnnnnnnnnnnnnnnnnnnnnccacgcgtccgcccacgcgtccggcaagatcaataaaagttttgatcaaaccggacttgacgtggcagatatcttcccaaagttgggcgatctgacaatagatcactgtgatgatctcgtggcactaccttcaagcatttgcggactgacctcccttagctgcttaagcataacaaattgtccacgcctcggtgaattgcccaagaacctcagtaagctacaagctctcgagatctttagctcagggcaagcatatagccttaagatttcgacatctcacaatgtgtcagcctgagttgtcttccagaggaaataggaaagctaaagaagcttgagaagatcgacatgagagaatgttgcttctcggatagaccgagctctgctgtttcactgaagtctctgcgccatgtaatctgcgataccgacgttgcattt

SEQ ID NO: 97645 - DNA, 771 bp, Arabidopsis thaliana columbia
  unsure (1)..(771): unsure at all n locations
nnnnnnnnnnnnnnnnnnnnnnnnnnnnnnnnnnnnnnnnnnnnnnnnnnnnnnnnnnnnnnnnnnnnnccacgcgtccggttctgcgagacctagctcttcatttaagcaatgcagggaaagtaaacagaagaaagcggttgctgatgccgaaaagagagttagatcttccaggagattgggaaaggaacaatgatgagcattacattgcccagattgtctctattcatactggggaaatgaatgaaatgcaatggtttgacatggagttccccaaggcagagattctaatattgaacttctcttcagacaagtatgttcttccgccttttatcagtaagatgagccggcttaaggtcctagtgattatcaacaacggcatgtctcccgcggttctccatgacttttcaatatttgctcatttgtcgaaactaagaagtctctggctagagagggttcacgtccctcaactctccaactcaaccacccccttgaaaaatctccacaagatgtctttgattctgtgcaagatcaataaaagttttgatcaaaccggacttgacgtggcagatatcttcccaaaattgggcgatctgacgatagatcactgtgatgatcttgtggcactaccntcaagcatttgcggactgacctccctttaggttgcttaaggataacaaattntccacggcctnggntgaattnnccaagaccttagtaagntncagggntnttggaaattttaagggntatatntttnccctgngntaa

SEQ ID NO: 97646 - DNA, 706 bp, Arabidopsis thaliana columbia
  unsure (1)..(706): unsure at all n locations
atgatactccagctctctacgactcactattgggaaagctggcacgcctgcaggtaccggtccggaattcccgggtcgacccacgcgtgcgcataattgtccacgcctcggtgaattgcccaagaacctcagtaagctacaagctctcgaaatcttaaggctatatgcttgccctgagctaaagacattacctggagaaatatgtgagcttcctgggcttaagtatctcgacatctcacaatgtgtcagcctgagttgtcttccagaggaaataggaaagctaaagaagcttgagaagatcgacatgagagaatgttgcttctcggatagaccgagctctgctgtttcactgaagtctctgcgccatgtaatctgcgataccgacgttgcatttatgtgggaagaagttgagaaggctgttccagggttaaagatcgaagctgctgagaaatgcttcagcctagactggcttgacgaataaagtgtaaactcattgtttagagtctggtaagttaaatggcttgtatagagaactctttctactctgttttctaatttctaagttcaataaaggataacttttcataaaaaaaaaaacaaaaaaaggacggccgctctagaggatccaagcttacgtacgcgtgcatgcgacgtcaaagctcttctataagtcacctnnnnnnnnnncgnnnnnnnnnnnnnnnnn

SEQ ID NO: 97647 - DNA, 595 bp, Arabidopsis thaliana columbia
  unsure (1)..(595): unsure at all n locations
tgggnttttgggaaaggcggaattttttnntaattggggngaccccntggtttgaaaaaancgncnncaaatgggtnaaccgggnggntctncngtcngnaaacncaaggtgccaggatcagngtttcccttttacaccaaatcccccttggtcaactcctgccaatggttcccaccttaanccaacccgatcaaaatgacctgcaagtcccgtccgatcttgtgtcccgatgtatcgctacattgcttatgattcagaaatgtacagagaggcaattcccaccaagtgaagtagcccaggttctagactcggcagtggcgagtttacagccttgctgctcgcagaaccttccgatctatacagagattcagaagtgcatgggaatcataagaaaccagattctagccctcgtaccctcctaaagtaagaatcctaaaaccataacttaacctttgtgtctcttcataatgcttgtttctctttgtaaaatcaatatctccttatacaaaatccttttatataccccatttatttggagtgactcacaacagtttctcgatttcacatttatttatatgtaacacatcatttgtt

SEQ ID NO: 97648 - DNA, 472 bp, Arabidopsis thaliana columbia
cccacgcgtccgcttctcttgagattgcgataatgagagaacggattattacattcgtttcgctgcttcttgtagctttgctttcgtttcccagtgttagctactgtgacgaccaaacgatcctgtatgaatcgtttgacgagccttttgatggtcgctgggtcgtttcagagaaagctgaataccaaggtgtgtggaagcacgagaagagtgaagggcatgatgattatggacttctagtgagtgagaaagctaagaagtacggaatagttaaagagcttgatgttgatgagcctctaaaccttaacgaaggaactgttgttcttcaatacgacgctcgtttccaagaagggcttgagtgtggtggtgcttacataaagtatcttcgtcctcaagaagctggatgggttcctcaagggtttgataatgactctccttactctatcatgtttggacctgataagtgtggtgc

SEQ ID NO: 97649 - DNA, 940 bp, Arabidopsis thaliana columbia
  unsure (1)..(940): unsure at all n locations
gggggggggcctgtgttggacacacccgacttaattagggaaacctggtacgcctgcaggtaccgggccggaatttccggggcgacccacgcgcccgcttgagattgcgataatgagagaacggattattacattcctttcgctgcttcttggagctccgcctttcgttcccagtgatagctactgcgacaaccaaaccattctgtatgaatcggttgacgatccttttgatgggggggggggccttctcaaaaaaaacctgaataccaagggcgggtgggaaccacacaaaaaaggggacggggcttgataattttggcccccctaggcgggggaaaaaggctaaaaaccccggatctgttatagggccttgttgttgttcacccttttaaccttataccaaggaaccggttgctcctacataccgatgctcctttcccaaaaaggccccgggggggggggggtctaactaaaagattcctcccccctcaaaaaggtgggggcgcccccagggggttggaaaaggcccccctccccctttatgggggccccgattgtggggggcccccccagggtttttttttttggaccctaaatcccaggggggggcttttggggagcccctttaaagccctccnttctggccggtggacgccttctttgtctaccttgggccttaaacctaagtgggggagattttgtcccggcgggaaaaaaaaaagggtttcttttggggggaaaatttgacgcccggttttctcccaacccccccctgcggagaaaaagaccaaacacgtgggtgagaacacatccgctctccaccgtcataccctcaacggggagaacccccccaaagagaaagaaacccccacccccacggggggggtattctctttgtttaacacccccggcgccccagagggtggaaggaagggggggg

SEQ ID NO: 97650 - DNA, 1097 bp, Arabidopsis thaliana columbia
  unsure (1)..(1097): unsure at all n locations
ctcactatagggaaagctggtacgcctgcaggtaccggtccggaattcccgggtcgacccacgcgtccgtacggctgcgagaagacgacagaaggggggtgaagtgagaagctagtatcaaaccttttcgagatggcccgtgaaagtgctccctcgattatttttgttgatgagatagattctttgtgtggtacacgtggagaaggaaacgagagtgaagcttcaagacgtatcaaaacagagcttctagtgcagatgcagggtgttggacacaatgatgagaaagtacttgtacttgcagcaaccaatacaccctatgctcttgatcaggctatccggcgacgttttgacaagcgtatctatattcctctcccagaggccaaggctcggcagcacatgttcaaagtccacttgggagatacacctcataatttaactgaacctgattttgaatatttaggccaaaggacagaagggttttctggttcagatgtgtctgtttgtgtaaaagatgttctgtttgaacctgttcgtaaaacacaagatgcaatgttctttttcaagtctcctgatggtacatggatgccatgtgggcctaggcaccctggtgccatccagactacaatgcaagatctagcaacaaaagggcttgccgaaaagattattccaccaccaatcaccagaacagatttcgagaaggtacttgcaagacaaaggccaacagtgagcaagtctgaccttgatgtccacgagagattcacacaggagtttggagaagaaggttgatagatttgacattcccatcaagcatctttcacaatcatattattattagtctcttcaccatctccttatgtatgtactgagaagcaaaacaaaatctcaaacccatgtttgatttcttcccaaaacattgaatttgctttatttctcgaattgtgtaaaaaaaaatgttctgaacaatgttttctatttattatgtccccaaaggtctccccatgggcaaactccatccctgctaaaggggtgaaaccgggttggaacccttnnnnnnnnnnnnnnnnnnnnnnnnnnnnnnnnnnnnnnnnnnnnnnnnn

SEQ ID NO: 97651 - DNA, 658 bp, Arabidopsis thaliana columbia
cccgactacccagagaaagaactacgcctgcaggtaccggtccggaattcccgggttgaccacgcgtccgtctccatcttcgcattcatagtctctacgatcagatagataaaagaagtcaacaacgatgtcttgggacgatggatcacacgcaaaggtgaagaaagtgcagctaaccttcgatgagatcatctactcaatccaggtcacgtacgacggagccaccgctcttcaatcccagcttcgcggctccgttggtcccaaatctgctgagttcactttggctccggacgagtacataacggccctttctgcttacggcaaatcgttgagtacgcaagaagttattacggcgttgactttcacaaccaacaagacttcttatggaccttacggtaccaaatccggtttccagatttctgctccggaagccaccggtaaacagatctccggtttccttggtaccagcggcaatgttctcaacaccatcgacgttcactattctcccatacctactggaggaactggcaccggaggaactggcaccgggactggcaccggaactggcactggacctggcactggcaccggacctggcactggaactggcactggacctggtaccggaggaactggcactggaactggcaccggtact

SEQ ID NO: 97652 - DNA, 749 bp, Arabidopsis thaliana columbia
  unsure (1)..(749): unsure at all n locations
nnnnnnnnnnnnnnnnnnnnnnnnnnnnnnnnnnnnnnnnnnnnnnnnnnnnnnnnnnnnnnnnnnnnnnnnnnnnnnnnnnnnnnnnnnnnnnnnnnnnactataaaacccttacacacatggtgttaaagttttaaccacgccattatgacaaaacctataaggaatatagtttccgataggcttgtttcaccaaaatggtgtgaaaccctcaaatatatggaggctcataggcatgtgtgagagaacaggttcctaaaataaaataaaaagtgacagtcaaaggctcaaagctgtaaaacaacattgaccatgcatgtcattcaaagtactaatccgcacttgtttttttcagacatctctctccactgtctctctctccactgtctctctctcgtcacactaaagaaacggatttatttagacaaaggaaatgtgattcaaagaaggaacaggtcaaggtgttcagtctcatcgtagaaatcagatacgtacacaccgtctctgtatgggtcgattaatgagtagtcgtcaaaagccacgaagccagacgtcgagtcatcacaaggtagttcatcaatactcatcgtctcatcaatctccatgtaacaactaatcaattccttctctttcatgttaattgtcatcatcttctcttcatcaacggcttctcttggttgttctgccaatatcactgtcttgatactctctagtccgtgttttcttgacgagattccagcagcgagct

SEQ ID NO: 97653 - DNA, 726 bp, Arabidopsis thaliana columbia
  unsure (1)..(726): unsure at all n locations
gcctgaagtacccctcgttgctccatcggtgaactattagcggaagaacgtggtattagacatagggatagagaggctnnnaancaacangcgaggaatgaccaatgggcggttcgtgttgcacactatgttccttggcttactcattggtagaactcccagagctggttccctggatcaagtgtcgtggctcgcaatctcggtatgttgtccaaagcagacaaagagatcatgtttaagctcggcgctgcaaggagccaacatgaggcacaaataaggcaacaaggaacacacgagacattgcaccgtgacatgattgttggatttggaacttgggagttcgatccaatggagctcgagaatctgttcccgaacaatgaaggatcagtgcacttgtggcagggagatgatgatgtgcttgtccctgtgactctgcaacgttacattgcgaagaagctgccatggatccattaccatgagattcctggagcagggcatttgttcccgtttgctccaggtatggttaataacattgttaaaacgctcttaaccaatgatggagtgaagaagtaaacgatgtcttctctctcaaaaagttggctagttttggttttgtaacatgcattgctatgatattttgaacccgggatcagagagattccatgagaatcccaagtttctcttgggtgctggaaaaaattgggggggngtttgaaaaagggctgg

SEQ ID NO: 97654 - DNA, 584 bp, Arabidopsis thaliana columbia
  unsure (1)..(584): unsure at all n locations
caaaacgttgccgtttccgtttgaaagtatagggatgggatcataagggaagcctataatgcttgacattcctcataagctatcgcttaaagggtttatcggtttcttgagatcgtggcagcccgcaatgaaagctaaagaacgtggagttgagcttgtgactgaagatttgatctccaaatttgaagatgcttggggtgatgatgatgatgttaaagatattttctacaaagctcatatgattgttggaaaactttcggcttcagatatagagcggcatcgaaagagatttgatacggaactgcgtagttacaacactaaaggatcataacaactcggctgttattggcttcagtgacctgctgctgcatttgcctggagtggcggctttactgttcttcccctgcaagggaagaccagttagaaccctttgaaggcccaaagaaaccggntttcctgaatccaagtgaatgaaancctttttaattttancatggttgnncatggttggccaatggaatttaataanggccanttganntgngnntgggtaaggaaaaaccccaaaagnntttaaagnggnc

SEQ ID NO: 97655 - DNA, 671 bp, Arabidopsis thaliana columbia
  unsure (1)..(671): unsure at all n locations
aacgntggccccnccgtaacccttagactcctcgcggtaaacgtccntccttnaagtngggatgnccagaggacccttangcttgcatccccatacgtcccttaagggttaccggttcttgaaacgtgcaccccccatgaacctaaggaccgtggagttgagcttgtgactgaagatttgatctccaaatttgaagatgcttggggtgatgatgatgatgttaaagatattttctacaaagctcatatgattgttggaaaactttcggcttcagatatagagcggcatcgaaagagatttgatacgaactgcgtagttacaacactaaaggatcataacaactcggctgttattgcttcagtgactgctgctgcatttgctggagtggcggcttactgtgcttactctgcaaggaagaacagttagatcctttgaaggacaaagaaacggttttctgaatctagtgaatgaaatcttttttattttacatgttgacatgttgtcatgtatttatttatgtcattgatatgagatggttaagtaatatctaaagatttaagagtcacccaacactcttacattcatgactcaaggggatnnnnnnnnnnnnnnnnnnnnnnnnnnnnnnnnnnnnnnnnnnnnnnnnnnnnnnnnnnnnnnnnnnnnnnnnn

SEQ ID NO: 97656 - DNA, 447 bp, Arabidopsis thaliana columbia
gagcataaccacttctgtctctgcgaatctccttaggactctttgagaagctttcctctgtttctccgctggtaagctggcgttgtctctctctctctcgcttctcagatctgctccttaaacctttaatttctcaccgacgagtggatctgcatccacagttatgggtagctccggcgacgttaactggaaacttgcggaccaccccaagcttcccagaacgcaaaactatcggcccgcattgttctcgatggatggggtgaatctgctcccgatcaatacaattgcatccataaagctccaacctctgccctggagtcccttaaaggcgggctgcccgtcacatggaggttgttcaaagctcatggtaccgccgttggtcttcccagcgcaaacgacatgggaaacacttgaattggccacaatgctcttggagcttggccgatt

SEQ ID NO: 97657 - DNA, 2042 bp, Arabidopsis thaliana columbia
ctctcaacctaccatacttcaccacataaccacttctgtctctgcgaatctccataagactctttgagaagctttcctctgtttctccgctgttatgggtagctccggcgacgttaactggaaacttgcggaccaccccaagcttcccaaaggcaaaactatcggtttgattgttctcgatggatggggtgaatctgatcccgatcaatacaattgcatccataaagctccaactcctgccatggattcccttaaagacgggaagcccgacacatggaggttgatcaaagctcatggtaccgccgttggtctccccagcgaagacgacatgggaaacagtgaagttggccacaatgctcttggagctggtcgaatttacgctcaaggtgctaagcttgttgatctcgcccttgcttcagggaaaatctatgaagatgaaggtttcaaatacatctctcaatcttttgagaaaggcactgtgcaccttattggtcttctaagcgatggtggagttcactctcgtttggatcaagtccagttgctgcttaagggttttgcagaacgtggtgctaagagaatccgcgtccatatttttactgatggtcgtgatgttttggatggttctagtgtcggatttgttgaaactcttgaagctgacctagctgctttacgtgcgaaaggtgttgatgctcaggttgcatctggtggaggtcgaatgtatgtcacaatggaccgttatgagaatgattggagtgttgttaaacgaggttgggatgcacaagtccttggggaagctccccacaaatttaaaagcgctcttgaagcagttaagacactgacggcagaacctggtgccaatgaccagtatttgccttcgtttgttattgttgatgataatggaaaggctgtgggtccaattgttgatggtgacgcagttgttacattcaatttccgtgctgatcgaatggtcatgcatgcaaaggccctcgaatacaaagatttcgacaagtttgatcgcgtacgtgtccctgatatacgttatgcaggaatgctccaatatgatggagagcttaagcttcctagccgctatcttgtttctccaccattgattgacagaacttctggtgaatatctggcacacaatggcgttcgtacttttgcttgcagtgagactgtgaagtttggccatgtaaccttcttctggaatggcaaccgctctggatatttcaatgaaaagttagaagagtacgttgagattccaagtgatagtggaatatcattcaatgtccagccaaagatgaaagcactggaaattgccgagaaagcaagggatgctatccttagtggcaagtttgaccaggtgcgtgtaaacctgccaaatggagatatggtggggcatactggtgatattgaagcaactgttgttgcctgtgaagctgctgatcgtgctgtgaggacaatccttgatgccatagaacaggtcggagggatatacgttgtgactgcagatcatggaaatgctgaggacatggttaaaagggacaaatccggcaagcctgctctcgataaggaagggaaccttcagattcttacctctcacacccttaaaccagtgccaattgccataggaggtcctggcttgtcagcaggagttaggtttagacaggatatcgagacacctgggcttgcaaatgtagctgcgacagtgatgaacctccatggatttgtggccccgagtgactatgagacaagtctgatcgaagtcgtcgagaagtgatgattcttgttgttgtagttctttttaaaagtcccacctgagcctctatagactctgattctcttttaagttactattttcaccgctctctaataaggctcgtgattttttgggagccatactgtatactcgccggccctctcacgatgttgttcaattcacagactaaatttgatttaaaaaaaaaaaaaaaagggcggccgctctagaggatccaagcttacgtacgcgtgcatgcgacgtcataatcttgtatagtgcacct

SEQ ID NO: 97658 - DNA, 427 bp, Arabidopsis thaliana columbia
aaaggcccggggcgatccacgcgtgcggcttcaaccatttatcattatttccagtccacaccgctcgagaagagggtgcctgtgcttttagggtgtgtggagtgtatggaatgtatcatttcttggatatcctgctagggccatcttaccttattcgcaagcccttgagaaatttgctccacacattcaacaggttagtatggagagtaatggaaagggagtctcaattgatggtctacctctcccgttcgagactggtgagattgattttggtgaacctggaacaaatggtcaacacagcttttaccaactcattcaccagggacgcgtaatcccttgtgatttcattggcattgtgaagagtcagcaacctgtgtaccttaagggagaggtggtcagtaaccacgacgagctcatgtcaaacttt

SEQ ID NO: 97659 - DNA, 442 bp, Arabidopsis thaliana columbia
cccacgcgtccggagaaaacgaaactaaccggagcatgaagagacgaagatcggcgaagaaatctccggcgatggtgacggttaccgattggaaagggttagattgcggcgaatgagacgagaatcgtaaggagattgatgaagttcgaagacttgcctgagtatttgaaggacaacgagtttatacacaaccattatcgatgtcaatggtctctcaaagatacttttctcagtgctttctcttggcacaacgagactctcaacatttggacgcatttaattggatttggtatatttctgtggatgacggtggtgagttgcttggagacgacggagattagtctcgccggcgtttttaacggcatggccggagtgaggatttgcctctcaagcaatcagactctgcttcatgattcgaacgtgacacatcacatctcatgtc

SEQ ID NO: 97660 - DNA, 480 bp, Arabidopsis thaliana columbia
  unsure (1)..(480): unsure at all n locations
attcaaagcttcaatattttcactagggttctttccctttcgcttgttctataaattgtgtggtgttctttncaattctcacggacgaacaaaccccaaggcaacgagctcatgattgagattgtggcttttgagtaaatgattcactgctcagctagagacaatggtgttggtaacccatctcttgcagggttcacatgtcttgtctccttggagttcgccaacatggaccagaggcttgtgtttaaagagacctgcttacgacagtgcactttgttgagagggaagataagcatttacgattgaagcaaaaaatgttgtttttgggtgcggtcccctcgctacaaatcctgcttaggttatgtactactagtttgagactcatactctctctgtgcgactgtactctagacgtagtatatgtgataatgtgctctatacgctgagactatctgtagctagagatctgtagatctgaga

SEQ ID NO: 97661 - DNA, 485 bp, Arabidopsis thaliana columbia
  unsure (1)..(485): unsure at all n locations
atgatacgctttnnnnnnnnnnnnnnnnnnnnnnnnnnnnnnnnnnnnnnnnnnnnnnnnnnnnnnnnnnnnnnnnnnnnnnccacgcgtcggagaacaccgcgttacaaacttctctcgtctttcctggaaatttctgtccacaaatattagtctttaattttcggtatgaacactgacccttccttgatctattgatctttgtcgcagtatttattaagattttatctctatcagacggctcttttgattaatatttttccgactcttatttcttatcttctttgctcagaaacttctctcaggcgaattcaagtttcatagttttggtctagtttttgtccaccgatctatctctttaggtgagttttgtttatttttttcggctttatagtttgtctacgcttcatgttgttgttgttattataatcttgtggttggattgggggctttggatctcggttctttctgaatttaaatatggg

SEQ ID NO: 97662 - DNA, 666 bp, Arabidopsis thaliana columbia
cggcaacttttgtggttagtcatataagaacaaccgcgttacaaacttctctcgtctttcctggaaatttctgtccacaaatattagtctttaattttcgaaacttctctcaggcgaattcaagtttcatagttttggtctagtttttgtccaccgatctatctctttagttgaaacttatcagaatggctcgtccacaagaccctccacgtggtttcttcccttttggaaaccccttcaaaaatctatcttcgaagaactcggtactctcctcaaagcttctcccactcctgaacaattttgagaccaacttagcatcttctattagtaagcttgtccctaaggaaaagagcgatatcctgactgtctcatggatgaaacaagctatggaatctctttgcgagacacataatggtatcaagacccttataaccgatcttgagcttcctgtatcagattgggagggtaaatgggttgatgtctatcttgacattagtgtgaagcttcttgatctctccaatgcctttagctctgagcttacccgtctcaaccaagggcatctcttactccagtttgcccggcataacttggaggccaactctcctcagaatctgtcgaaagctcagtcatcactagacagttggaagcaacacattgtctccaaga

SEQ ID NO: 97663 - DNA, 1091 bp, Arabidopsis thaliana columbia
  unsure (1)..(1091): unsure at all n locations
nnnnnnnnnnnnnnnnnnnnnnnnnnnnnnnnnnnnnnnnnnnnnnnnnnnnnnnnnnnnnnnnnnnnnnngaattttcccacgcgtccgcgcgcccgtgggtgggttgatgtctatcttgacattagtgtgaagcttcttgatctctgcaatgcctttagctctgagcttacccgtctcaaccaaggtcatctcttactccagtttgctctgcataacttggaggccaactctcctcagaatctgtcgaaagctcagtcatcactagacagttggaagcaacacattgtctccaagaacccgagaatagaaaattgccgtgcaatcttgagcagccttgttcagaccttgaatctccccaaggtgaaaaactcggccaaagggaaagtcttgatgagagctctatatggtgtaaaggttaagaccttatacatctctggtgtttttgctgcagcgttctcaggttcatcgcagaatctgatgtaccttacagtctcaaacgagcttacatgggcacaatcattcatggaagtgcagaacaccatgaacgcacaaatcaagaacatatttttgtcagacgggttaacggttctgaaagagctagaggcagttgcttcaggtgtcaagaaactctcccctgcgatccaacaaggatcaatagatcccatatcgctgcagccactgaaggactcggtcacagaattatcgaatgggatagatcttgtttcgaaagaagtggattgtttcttcaagattctgttatcggggagagacacattactagagaacctaaggtcgatgggtgcatcaaccctacaggcaacatcgccaaaaaaggctgccggaaaaaattacagaggattctgataaactataaatgtttgtacagatggttttacttcaagtgttccatcttcttggtattgaatgtattattaggtttttgtgcaatcgtagtcgtttgtatgagatgctttgaaagtagtagttgtataagtaaaggttttaccaaaaaaaaaaaaaaagggcggccgctctagaggatccaagcttacgtacgcgtgcgtgcgacgtcataatcttctatagnn

SEQ ID NO: 97664 - DNA, 432 bp, Arabidopsis thaliana columbia
  unsure (1)..(432): unsure at all n locations
cagaaatctctcttcttcttcttctctacaaaatttcaatggaagctgttcttgtcgcaatgtccgtccccgccacaacggaagacgacggattttcgttaatcaccgataaactttcatataatctaacgccgacgtcggacgttgagatcgttacctccgataaccgtcggattccggcacactccggcgttctggcttcagcttcaccggtactgatgaacatcatgaagaaaccgatgagacgttacagaggctgtggatctaaaagagtcatcaagattcttggcgttccatgcgacgccgtttcggtttttatcaaattcctctactcttctagtttgaccggagggatgagattggagaggtatgggaatccaancttttnaagcggttggnttaacggcttcnatggnnanccnnctttaagna

SEQ ID NO: 97665 - DNA, 415 bp, Arabidopsis thaliana columbia
cattattgtatcataaatattctcatctataaattacctaaacccttacaggtagtgtcccaaccaaacaaatcgagaaagacgaacacttacaaaaaaaaatctctttgtgagctttagcgatcgtaacaatggcgaacgaggtgattcttcttgatttctggccgagtatgttcgggatgaggacaaggatcgcattgagggagaaaggtgttgaatttgagtacagagaagaagatctaaggaacaagagtcctttgcttctccagatgaatccgattcacaagaagattcctgttctcatccacaatggtaaaccggttaacgaatctatcatccaggttcagtacattgacgaggtctggtctcacaagaaccctatccttccttctgatccttacctgagagctcaagc

SEQ ID NO: 97666 - DNA, 808 bp, Arabidopsis thaliana columbia
  unsure (1)..(808): unsure at all n locations
ctcgtgcgtcgacgcaagcctatatactgatgcgaaataacgacagaagggggtcccaatcaaacaaatcgagaaagacgaacacttacaaaaaaaaatctctttgtgagctttagcgatcgtaacaatggcgaacgaggtgattcttcttgatttctggccgagtatgttcgggatgaggacaaggatcgcattgagggagaaaggtgttgaatttgagtacagagaagaagatctaaggaacaagagtcctttgcttctccagatgaatccgattcacaagaagattcctgttctcatccacaatggtaaaccggttaacgaatctatcatccaggttcagtacattgacgaggtctggtctcacaagaaccctatccttccttctgatccttacctgagagctcaagctaggttctgggctgatttcattgacaagaagctgtatgatgctcagaggaaggtgtgggcgacaaagggtgaggaccaagaggcaggggaagaagggtttcattggagtacctaaggcctcttgaattctgagctttggaggcaaacccttactttagtggcggtgcctttggctatgtaggcattccggttggttgggtttcacaatggttcccagcattcgggaaggttctaacttcaggatcgaatctgagggnccgaaactgccttctttgggttaaaaagggtttcagagggggagcggtggataagccttcctcaacccttangggtcctaattcgctttggcccagagaaattttccccggaaaaatgtcnttgcaaatggcggcctata

SEQ ID NO: 97667 - DNA, 1250 bp, Arabidopsis thaliana columbia
  unsure (1)..(1250): unsure at all n locations
nnnnnnnnnnnnnnnnnnnnnnnnnnnnnnnnnnnnnnnnnnnnnnnnnnnnnnnnnnnnnnnnnnnnnnnnnnnnnccacgcgtccgtagaagacgacagaagggtacggctgcgagaagacgacagaatgggaaccaaacaaatcgagaaagacgaacacttacaaaaaaaaatctctttgtgagctttagcgatcgtaacaatggcgaacgaggtgattcttcttgatttctggccgagtatgttcgggatgaggacaaggatcgcattgagggagaaaggtgttgaatttgagtacagagaagaagatctaaggaacaagagtcctttgcttctccagatgaatccgattcacaagaagattcctgttctcatccacaatggtaaaccggttaacgaatctatcatccaggttcagtacattgacgaggtctggtctcacaagaaccctatccttccttctgatccttacctgagagctcaagctaggttctgggctgatttcattgacaagaagctgtatgatgctcagaggaaggtgtgggcgacaaagggtgaggaacaagaggcagggaagaaggatttcattgagatactcaagactcttgaatctgagcttggagacaaaccttactttagtggcgatgactttggctatgtagacattgcgttgattggattctacacatggtttccagcatacgagaagtttgctaacttcagtatcgaatctgaggttccgaaactgattgcttgggttaagaagtgtttgcagagggagagcgtggctaagtccttgcctgatcctgagaaggttactgaattcgtctctgagctcaggaagaaatttgtacctgagtaaatatgtttctcttgtcatatggttcggacttaagatgctctctgttttactttcgtgtgttgtctttcttaaataatgcagagcatctgtgaggtggtttgagtgtagagaatgtatgtctttgctgtagcagattcctgtgttttctggatttaatggcttgtcctagtttttatgcattgtaactatgagtttaattaatgatcgttaatctataatgattattaatttgttaaaaaaaaaaaaaaatcgccccnnnnnnnnnnnnnnnnnnnnnnnnnnnnnnnnnnnnnnnnnnnnnnnnnnnnnnnnnnnnnnnnnnnnnnnnnnnnnnnnnnnnnnnnnnnnnnnnnnnnnnnnnnnnnnnnnnnnnnnnnnnnnnnnnn

SEQ ID NO: 97668 - DNA, 639 bp, Arabidopsis thaliana columbia
  unsure (1)..(639): unsure at all n locations
nnnnnnnnnnnnnnnnnnnnnnnnnnnnnnnnnnnnnnnnnnnnnnnnnnnnnnnnnnnnnnnnnnnnnnnnnnnnccacgcgtccgccaaagtctgtttaccagtaatatcaatcgatcgccattctcgacatttctctctctcaagctagtctaaagtttcttcttatctccttcctccgaccaaaacttcgacttctctcttattttcaccctcagagagtaaccatggatgccttgacctcgagtttggttcgatctcccatcgtaccatcgagaacttccgacaacggttctggatctatgttccttaccgccagtggccctggattcacgcgttctggttcttcaagacttcaacttcgtttaaggcaaaacgcgtctgctagatcctcaagatcattacagagcttaacaacgactgctaaaactcggagaagttttgtggttagagcttcttcagcgtctaatgatgcttcatctggttcttcccccaaaccgatcgctccgctccagctgcaatcgcctgctggtcagtttctgtctcagattttggtgagccatcctcatcttgtgcctgcagctgttgaacagcagcttgagcagcttcaaactgatcgggactctcagggacagaac

SEQ ID NO: 97669 - DNA, 664 bp, Arabidopsis thaliana columbia
  unsure (1)..(664): unsure at all n locations
tttttttttntttatcgtgaaataaactgggattgttctaaaaagcattctacacattggcgtaagagccattctttttgtacatgtgagaggaaaaactctaaaatcctcaccatttttctttacaccattctctgccttttatctcactcactcatcagcctaagggggatctttggttctatgtatagtcaaaacggtaagaaactacacaatgtacagattttgcggagaacaaaacaaagctctctctcattatttctccgcagatttttggtttagatcttacctaattctcaaaacgttatggcagagccatccaccctagttaagctgtacaacacttgcggccttacgccaccagaggctggggtaatgactgcaaagccattctcctctctccagcagcaacgagtttttcaacacgggcaacgatatgctttccgtaagtgtatttctttagagcattcagatgcactttaatacgagtcagtatcagttcacgctgttggtcatcacatgtctccaggactttttgcactacatagtttgcaaactgatccttcatcatcgcctgaagaggctcgttttcatcagttcggacgcgtgggtcgacccgggaattccggaccggtaccgcaaacggaaaggcaatcaaatttcc

SEQ ID NO: 97670 - DNA, 572 bp, Arabidopsis thaliana columbia
gttttcaagacttttcattcatcattaatcgcaaaaatcaatcggtaacaacatcgatttttttttttggattgaaacttccatatttgttttaaagacaactctacatattggcattgatatgagccgataagaggatacatcaaacaatctaaaaaacctatctttctttaaaagcaaatatctatctaattctacggagaggcagaggcagagtctgaagaaagacgagagagctcgttcatgagaaagatgatacgagagtggtaatcacgagcctggtctaaagattctgcttcaagctcggctagctgtgagcagagacgctcctccgcttcttccgccacctgtgtccgccgccacaactgcaacatctctttcttcatctcctccacagctttctccatctctccgttcttccgtcgtagctcgtccacttcggaagccgccaccgtcacatagtttcctcctttccccatttttaagaacttttaaaggttttctaaagccttctccttttggttattttgcgccgctttgagtttttttgtccccttctgtcgtcttcatcg

SEQ ID NO: 97671 - DNA, 670 bp, Arabidopsis thaliana columbia
ggcggctgaaacaagttgtaattgtggtgcatttgttcttcagcgcagccgagaagattcgaaaccggagctaagctatgacgacgattgttcccacctccgaagaaaatccctttctcgctgttgtccgattcacttcccagctcgcctgggccgatgctggtcccgaggcagcagagccagaaattaccaggctctgtagggaggctgaggagtcaatggtagcagagaagtggcttgaattgtcttcgttaatggtcacttcagctgaattggtaccttctaagatatctgagaaagatcttgagtgtacctacaccatcatttgcagcattgtcaagaatgcgaaaagccctgagcaagtccttgaaatggtgaaagctatagcttccaaggttgctcaacaacccagtgacaaagcttcacttcgtttgaagatcctcttcaatctctataacctggttgaccacccgtatgctcgatttcaagtatacatgaaagctcttacactagctgttgatgggaaggttactgagtacatagtttcttcttttaagaagaccgataactttctgaaagagtggaatattgacattattttttgctagtaatgtttcttaacttgatgctacccactatttcaaaagtttaccctgaatatcttttgccc

SEQ ID NO: 97672 - DNA, 1393 bp, Arabidopsis thaliana columbia
cttgggctagggatttaggattagcgttagagactcagtcgagcagagaatgacgacgattgttcccacctccgaagaagatccttacctcgccattgttcgtttcacttcccagcttgcctgggctgatgctggtcccgaggtcgcagagcctgaagtttccaggctatgtaaggaagcagaggagtctataataaatgggaagtggctggatttggcaacgttgatggtaacttcagctgacttggtatcagccaaaatctctgagaaagatcttgagtgtacctacaccatcatttgcaaccttgtcaagaatgcgaacagtcctgaggaagtccttgaaatggtgaaagctatagctgctaaggttattcaacaaccaaacgacaaagcttcattgcgtttgaagatcctcttcaatctatataacctggtagaccacccatgctcgatttcaagtatacatgaaagctcttacactagctgttgatgggaaggttactgagtacatagtttcttcttttaagaagatcgataactttctgaaagagtggaatattgacattaaagatcagagggaactctttcttgccattgctaatgtgctgaaagaaaacaaaagcttggtgaatgaatcccttaagttcttgacgaagtacctagcaactttctccaatgaggatgctcaggtcctggatgaagccaaggaggaggctgtgcgtgcagttatcgaatttgtcaaagcttccagtattttccagtgtgatttattggacttgccagccgtagcacaattggaaaaggatgctaaatatgcacctgtttaccaacttctgaagatttttcttactcagaggttaaatgcctacacggaattccaaaatgcaaattcgggatttctgcaaagctatggactttccaatgaagattgtgttacgaagatgaggttgttgtcactagtggatttggcctcagatgaatctggcaaaataccttacacctcgattaaagacactcttcaggtaaatgaacaggatgtcgagttatggatcgtgaaggcaataactgcaaaactgattgagtgtaagatggatcagatgaaccaagttttaattgtcagccgctcttccgaacgtgaatttgggacaaagcaatggcaatctctccgaacaaagcttgcgacttggaaggacaacatttcaagtatcataactaccatcgaatccaataatgtaactcaggaaggttttcacgcatcatcatcatttgctgcagctattcaaggcttgagtgttcgttgccaaagctatgaagaaaaactctttcattccccgagaagctaaattgtattacgaacctttcgtcttcctttaagctttatctctgcgttttt

SEQ ID NO: 97673 - DNA, 513 bp, Arabidopsis thaliana columbia
acaacaccaatcacacttctcaaaaaagatcagagatttctagatccttcttcttctcctgcaaattcatctacctgaatcttccaactttataaatcgatcatgatctccgtcgtaatcatcgctgagttactagtagagtacacgacggctctcgcgaaactaaccgccgggattcttccatcgagacggcgaggcgatagtaacgttgtacggattggtggtttctctctgccttgtccttctccgtcgagtagtagtactagtcgatcatctgcgattccagatttctcttctcatctcgttgatttctgatcttgtggaagacgaaacagattttgttttcttctctctcttttttttaaatctattcgaagattggattggacggctgagatttttccatgtgtgtctcttctgtctccctctcttcctctagattttaaaatcgcttattagatctttgtaaatcggtatcatcaatataataatagtggttatgaatttttgatg

SEQ ID NO: 97674 - DNA, 600 bp, Arabidopsis thaliana columbia
  unsure (1)..(600): unsure at all n locations
nnnnnnnnntagctctctacgactcacttagggaaagctggtacgcctgcaggtaccggtccggaatccccgcgtccgcccacgcgtccgtacggctagaagacgacagaaggggaatcacaaacacaaatgagccacaaaaacgaagacatcatatcaagaaacgacgatgagcttcactgcttctctcgtctcttatttgacgtctccctcactcgtctcgctcaaccatcttcctccttccttcttcctcccaaccaaacttgtcaagccaacaagcctcactcattcacagcctccgagattgtccgcatcctatggtccagctgcaaaagctgctacagccaacgacgttgttccagaaacagctccgacatcagcgtcggaggtcgtctccagcttctacgccgccgttaacgtccatgatttatcctctgtcacagacctcatcgctcaggactgcgtctacgaggatctcgtcttctcatctccctttgttggccgaaaggcaattcttgatttcttcggaaaattcatttgaatcaacaaggtcgggttctcaatttggggntngntggttttnnaacagnaggcttttna

SEQ ID NO: 97675 - DNA, 692 bp, Arabidopsis thaliana columbia
cgcaacctctatacgattcacttagggaaagctggtacgcctgcaggtaccggtccggaattcccgggtcgacccaggcgtccgtacggctgcgagaagagacagaagggggagccttcagcttcgaggacgggctgaagcttgtaaaacttagaggagaagctatgcaggctgctgcagatgctgctaagagtgccatggttagtatcatagggttggactcagaaaaggttcagcagttgtgtgatgcagcaaatcaagaagtagatgaagctgacaaagttcagatcgcaaattacttatgtccgggtaattacgcagtatctggaggtcttaaaggaatcgaagttgttgaagccaaagctaagtcattcaaagcacgaatgacggtgcgtctagctgttgcaggtgctttccacactagtttcatggaaccagcagtctcgagattagaagctgcattggcagccacagagatcagaagtccgaggatcccagtgatctcgaatgtcgatgcacagcctcatgcagatccagacacgatcaagagatactggcaacgcaggtgacatctacaggccaatgggaggacacagtaaagactctttattccaaggacttaaaagcacttctaatcgggacctggtaaggtaattgccggggtattcaagagagtagataaaagcgcaagt

SEQ ID NO: 97676 - DNA, 467 bp, Arabidopsis thaliana columbia
ggctggaggctgtataaaacgcgacagtgtcgtggacatgatactctacccctctggtatctcttttccttgggttttacgatgctgacttctgtcgctttcactgctctgctcggtgcttccgcggtacttgctaccccattcacccgtacccagaggacttgtggcacacatatcagcgacgatcaggttgcccaggatgagaggtatttcgaggccaacagcgcttctcttgacgtcgacacggcggccaagggaaaggttcccgttctcaatgtttactggcacgtcgtccaggccaacaagactttagagggaggccatgttccaaagtcacagatcaaagcccaaatcgacgtgttgaacaccgcctacgtacctagtgggctccaatggaggctcgccgagatcacccacacgactaatgagggctggttcaacaacgctggtcccgacaccgatgaaca

SEQ ID NO: 97677 - DNA, 718 bp, Arabidopsis thaliana columbia
tttttaggtacacactatagaagatctatgacgtcgcctgcacgcgtacgtaagctcggaattcggctcgagcttggcgacgagtctctaatatgagagtaggtcgtgaatttgcagcagctggtgtaattgatgggaagatttatgtgattggaggatgtgtagttgataattgggctcgatcgattaactgggcagagatgtttgatataaagactcaaacttgggagccagtggctagtccaggtatggaggttcgtgagaaatggatgcacgcaagtgcggttatggaagggaaggtttacgcaatggctgatcgaaacggtgttgtttacgaacccaaggaaaagaaatgggagatgcctgagaagaggcttgatttgggatggagaggaagagcttgtgtgattgagaacatattgtattgttatgattacttggggaagattagagggtatgatccaaaagagaggatttggagagagctgaaaggtgtggagtcacttccaaagtttctttgtggggctacaatggctaatcgtggtggaaagcttacggttttgtgggaaggtaaagctggtagtggtggttctaggagaatggagatttggtgtgcggagattgatgttggaaggcgtggagaaagggagatttggggaaaaattgaatggtctggtaccgtgcttacggttcctaatgaatctgccattgtgaattg

SEQ ID NO: 97678 - DNA, 385 bp, Arabidopsis thaliana columbia
  unsure (1)..(385): unsure at all n locations
gacgagaacaattacttccaacggagaatggcctcaattgtcggaattcgaacaagattcctgagtttcgggaagctttcacaaatctcttcttcactgttgagaatacacaatcctcgtaatcatcagaatcctcttattctccctcttccttgtttctctgccgctcctagtcgtcatcgtcctctgatttggcttcgctcatctccgcctgtgtcctcgatgaccactcaggctgaatctgggtcttcccagcaatccgattcttccaaaacggtgagagtggtgataaagggaagagtacagggagtgtgctacagaaactggactgttgagaacgctgagcagctggggataaagggatggggttangaaccgcagggat

SEQ ID NO: 97679 - DNA, 1112 bp, Arabidopsis thaliana columbia
  unsure (1)..(1112): unsure at all n locations
nnnnnnnnnnnnnnnnnnnnnnnnnnnnnnnnnnnnnnnnnnnnnnnnnnnnnnnnnnnnnnnnnnnnnnnnnnnnnnnnnnnnnnnncggccgcttacattccctgcatcatctgcaagagtaaaggctacagagaggtttgaggcaatatatcccttgctgaaagaagtggctcttgctggtgcaccaggaagcaaggcgatgaaacaagtcacacaacagatattcacttttgctctgaaattagctggagaaggaaatcctgttttagccaaggaagctacagcaattgctatctggtctgtgacccaaaactttgattgctgcaagcactgggacaatctctacaaggagaatctggaagctagtgttgctgttcttaaaaagcttgttgaagaatggaaagagcattcggtcaaactatcatcatcaccgaatgatgctctcactctcaaccgaactatgaaaagcttcaggcctaaagaaccgaggaggtcatcactgagggaggagccaatgcttctcttttacaaagaagctgacaagtcttgcaaaacgatctcggggagactctcccgtggaagtggctgcctcaaaggaacagccattactttagtgtttctagctgctgcaggagccgctgctgcagctgttctatcttccaacccggaggttacaaacgagctgaagaacctggtggactcattggagctgcatgaatacatcaacaaatacactgaggttatctccacagctttgaagaagtaagagaaaagaaacaatcaaaaacctgaggatgatatagcgaggtccctcttctcctcctcggtgtagggncttccttgagagttggagccttttcctctcccgggtgcgggtttttgtccctcttgtcccgnncttnggggttacccccgctaaagaaggaaatgagagttttcgtttttataatcacagagtctgttcaaagttgttgaaggttttttttagactgtttaatttgtttctgagataatttatatttcttcttttttccccgatgacaataaagttatttctgtttaaaaggaataacccccaagggcgaacgctctagaggatcccagcttac

SEQ ID NO: 97680 - DNA, 706 bp, Arabidopsis thaliana columbia
  unsure (1)..(706): unsure at all n locations
tggaagccctcgggaaactttcccnnccccggtggtgccncnccttnanccngnctttngaaacnctccgggtnaaagcccggggggcccnccctgggggggggcccaatggttccnttttccaaaggagcttgnaagtnttgcaaanccattctcggggaagctctcccgtggaagtggctccctcaaaggaaccaacccattactttagtgtttctagctgctgcaggagccgctgctgcagctgttctatcttccaacccggaggttacaaacgagctgaagaacctggtggactcattggagctgcatgaatacatcaacaaatacactgaggttatctccacagctttgaagaagtaagagaaaagaaccaatcaaaaacctgaggatgatatagagaggtaactcttaatatcatcggtgtagagaattacttaaaagttaaagccttttactctccaagatacaaaattttgaacatcttgaccagaacttaggggttatggaggtgaagagaataatgagagttttcgtttttataatcacagagtctgttcaaagttgttgaaggttttttttagactgtttaatttgtttctgagataatttatatttcttcttttttccctgatgccaatccagccatttctgtttaccacatgtttgctttggattnnnnnnnnnnnnnnnnnnnnnnnnnnnn

SEQ ID NO: 97681 - DNA, 425 bp, Arabidopsis thaliana columbia
  unsure (1)..(425): unsure at all n locations
aaattctccgacgcattacattttcttccgatcaatacagagagatcagtttctgagagagaagaagatgtctatagaggaagaaaacgttccaacgactgttgactcaggagctgccgatacaacggtgaaatctccggagaagaaaccggcggcgaaaggtggtaaatctaagaagacgacgacggctaaagcaacgaagaagcctgtgaaagctgctgctccaacgaagaagaaaacaacttcctctcaccctacctatgaagagatgattaaagatgcgattgtaaccgttgaaagggggagaccttgggttcttngtcaattcnggcgggttcagaaatttcctttgggggggaaccataaatccccttgcccccctncttttttaggganngcttttttcttnttgaaatcccnaaggg

SEQ ID NO: 97682 - DNA, 1264 bp, Arabidopsis thaliana columbia
  unsure (1)..(1264): unsure at all n locations
ccagctctattctgactcacattagggaaagctggcccgcctgcaggtaccggtccggaattcccgggtcgacccacgcgtattctccgacgcattacattttcttccgatcaatacagagagatcagtttctgagagagaagaagatgtctatagaggaagaaaacgttccaacgactgttgactcaggagctgccgatacaacggtgaaatctccggagaagaaaccggcggcgaaaggtggtaaatctaagaagacgacgacggctaaagcaacgaagaagcctgtgaaagctgctgctccaacgaagaagaaaacaacttcctctcaccctacctatgaagagatgattaaagatgcgattgtaacgttgaaggagagaactggatctagtcaatacgcgattcagaaattcatagaggagaaacataaatcactgcctcctacttttaggaagcttttgcttgtgaatctcaagagacttgttgcttctgagaaattggttaaagtcaaagcttcttttaagattccttctgctagatccgcagcaacacctaaaccggctgctccggttaagaagaaggcaactgtagtagctaaacctaagggtaaggttgctgctgctgttgctcctgctaaagctaaagcggcgggctaaaggaactaagaagcctgcggctaaagttgttgctaaggctaaggttactgctaaacctaaggctaaggttactgctgctaaacctaagtctaagtctgttgctgctgtttccaagactaaagctgttgctgctaagcctaaggctaaggagagaccagctaaagcttctaggacttcgactagaacatctccagggaaaaaagttgctgctcctgctaagaaagtggctgtgactaagaaggctccggctaagagtgtgaaggtgaagtctccggcgaagagagcttcgactaggaaggctaagaagtgaagaagattggtttaggataggttttggggggagattgaatacatggtggtggttagcttctatagggtagtcttgtataattgaatcatccttgaaggagcttgctttccaaagttttttacttgtttctttggtttcttcttgaaacttttttttttcttctttgtaagttttggtttgtttgaattttaagccttttgatccataaaaaaaaaaaaaaaaagnnnnnnnnnnnnnnnnnnnnnnnnnnnnnnnnnnnnnnnnnnnnnnnnnnnnnnnnnnnnnnnnnnngtcc

SEQ ID NO: 97683 - DNA, 600 bp, Arabidopsis thaliana columbia
  unsure (1)..(600): unsure at all n locations
ggaggaaaaatggcgatggctttgtccaacccgaccacaagcactaacctctaccactactcaattctctcgccgttctcaccgccgtatcaccttcaccgtcgaaacaccgtcctactagcgagtccccgccgtttacgccgcctcgccgtcgctggtggtcctccttctcctccaggccctgatccgcctccgcctgaggacaccactcagctagaaggtcttgtgggagctgtgacaagggttcaagaccgcgtaaagattttcctcgcagtgttcttttggatgtttctcttcttctgggttatagtcacagatgggacgggtaaaggcaaaggcaagaagggttcacgtttcaagtagtttccatatatgaaggaggctttggtgattatctactactccaagtacctctatactgtatataatatcaaggcttcaaagggatcaaattacctgtataaacttcaccaagtaagcatcttccttgtacatcacttattcagatgataataggaaacaataagatcgtgttatcttcttggtcaatgctagtgatatatagtcctccnnnnnnnnnnnnnnnnnnnnnnnnnnnnn

SEQ ID NO: 97684 - DNA, 669 bp, Arabidopsis thaliana columbia
  unsure (1)..(669): unsure at all n locations
ccccgnngccgcgggnacncctngaagccgcgnccccgncatcntnatcccgtcnaccacaanccncgancatccccgcaaaanccnctncggggaacccggtcnccgctaatccctttggaggaattttagngaggttaattggnctaaaccagttatggacttgccttacgatccctgaggtncttggatgttcttgatactctctctagggctaaaaaggtgaaggttgtagcaaaggtgtattggggagatccaagggagaaacttttgtgatgctgtccaaaaatctaaaactcgattccattgttcttggcagtccaggtttgggttctctcaaaaaggatcttgctgggtagtgtgagcaatcatgtggtgacaaatgcaacatgtcctgtcacagttgttaaggctaattaaagtgtctcttgttctttaattggacccagttaataacattagtagttacgtgtgtcactcatgcattgttttgacatttatacgtttgttgccttctacaaatttgtgtgaaactgattggtactgtttcattaataaatttcagttaaatgataaaaaaaaaaaaaaagnnnnnnnnnnnnnnnnnnnnnnnnnnnnnnnnnnnnnnnnnnnnnnnnnnnnnnnnnnnnnnnnnnnnnnnnnnnnnnn

SEQ ID NO: 97685 - DNA, 720 bp, Arabidopsis thaliana columbia
  unsure (1)..(720): unsure at all n locations
nnnnnnnnnnnnnnnnnnnnnnnnnnnnnnnnnnnnnnnnnnnnnnnnnnnnnnnnnnnnnnnnnnnnnnncacgcgtcagcccacgcgtccgcccacgcgtccggagaaaaatgggaaaggcacgtacggtgggagtgggaatggactattctccgacgagcaaattagctctccggtgggcggcggagaatctccttgaagacggcgacaccgtcatcttgattcacgtccaaccacaaaacgccgatcatacccgcaaaatcctcttcgaggaaaccggttcaccgctaattcctttggaggaatttagagaggttaatttgtctaaacagtatggacttgcttacgatcctgaggttcttgatgttcttgatactctctctagggctaaaaaggtgaaggttgtagcaaaggtgtattggggagatccaagggagaaactttgtgatgctgtcgaaaatctaaaactcgattccattgttcttggcagtcgaggtttgggttctctcaaaaggatcttgctgggtagtgtgagcaatcatgtggtgacaaatgcaacatgtcctgtcacagttgttaaggctaattaaaggtgctcttgtccttaattggcccagtnataccattggtggttccgggtgcccccatgcattgtttncattttcggttgtnctctncaaattttntactgttgncctgtnataaaaantccggtatg

SEQ ID NO: 97686 - DNA, 411 bp, Arabidopsis thaliana columbia
ggtcgaccatttttgtttctgagttgttcttcttgattagctttgtccgcttggaaccaaacatggcgagtcttggccatatagccagagaatcatcagacatcacacgcctcgcccagttttacaaagaggtgtttgggttcgaggagatcgaaagtcctgattttggagacctacaggtggtgtggctaaacttaccaggtgcttttgcaatgcatattatccagagaaacccttcaacaaatcttccagaaggtccttacagtgctacctcagcggttaaggatcctagccatctcccacatgggtcatcatatccggtttctctgtcccaaatttcgactctttccttcattctctcaaggagaaagggatagaaacttttcagaagtctcttcctgatggaaaagt

SEQ ID NO: 97687 - DNA, 639 bp, Arabidopsis thaliana columbia
ctcaattgcttgataccatggcctcatgttccagaagaaatgagttctgtagcccatgatataatagaccgatttttaacagaagatccacatcagagacttggagctagaggggcagctgaggtcaagcagcacatcttctttaaagacatcaactgggacacactagcaaggcaaaaggctgcatttgttccggcttcagagagtgcacttgacacaagttacttcagaagtcgctactcgtggaacacatcacatgagcaatttttcccaagccgtgacgttccagattatagtgatgctgatagcatgactaacagcagtggttgctcgagcaatcatcatgaagaacgggaggctgaacaatgcgaaggtcatgcagagtttgagtctggcatacctgtagattactctttcagtaatttctcgtttaagaacctctctcagttggcgtctatcaactatgatcttttatccaaaggctggaaagatgagccacaacaaattccgcatcacaagtaacatccatttcctggatgttttttctcgattcttttggtgttcagtcagtgtaatgagtactctgccattaccggcgtttgtttgaaaactctgtaaaagtaactcgttcgtttctgt

SEQ ID NO: 97688 - DNA, 386 bp, Arabidopsis thaliana columbia
  unsure (1)..(386): unsure at all n locations
gatacacgataaagattgcacaatttctcaataaatagatttacacatttcctcaacataaccaaaagatccaaactacccttctctgatcaaatggattgttcattcataactacaaacgatctccgaagaatgttcaagacgctcgacaagaaccaagacgggcttgtgaccctcgacgagctcctttggattcttgataagctcggttcggccgaacacactcccgatgagcttgaactgatcgttggtaaacagagcctcgatttaaacgagttccttcggttccactacgacgcttgttttagatagcaaaagggatctaaggaggatatttgatgttgntgctgntaattgatgaagcgntttcaaagggcggttaaatg

SEQ ID NO: 97689 - DNA, 365 bp, Arabidopsis thaliana columbia
  unsure (1)..(365): unsure at all n locations
tacggctgcgggaagacgtcagaagggtacggctgcgagaagacgacagaagggtacggctgcgagaagacgacagaagggtacggctgcgagaagacgacagaaggggttaatgctttgattaatgttactgagacaactatcgcttcaggagatgataaaggctgcgttaagatttgggatacaagacagcgctcttgctctcatgagtttaatgcacacgaggattacatttctggcatgacctttgcatctgattcaatgaagctagtggtaacaagtggagacgggactttgtctgtctgtaatcttagaacgagtaaggtccaatctcantcccaaattttctgaagatgaactacctt

SEQ ID NO: 97690 - DNA, 389 bp, Arabidopsis thaliana columbia
cttcatgggcaagtcggcaagacttcgccggagccagacctcatcgccggagaatgtcttgttgggtaaagatagctccgatgatccttacagatccgactcagagactgaatcaaactcgagctccgggaccgagtcgaacatgagctctgactctacaacttcgggcaggagtgtcggcggatgatacgaggcttcgtctgattctctgcttcgaacggaactcgcggagatggagatgatcaaggctcgtgaagcagcgaggttggaagctgagaagagaacgttggaaatggaagtcgacttgactcagatggtgcttcagactcatttgcaagcgatgtcgtcgttacccgtcggagagcataagatttatcaggcacagagga

SEQ ID NO: 97691 - DNA, 1835 bp, Arabidopsis thaliana columbia
  unsure (1)..(1835): unsure at all n locations
tccagctctatactactcacttagggaaagctggtacgcctgcaggtaccggtccggaattccccgggtcgacccacacgctccgaaaaaagtaaaaaacatcgagaagagttgtagctgtggtcaacacttgagaggcagcacgatgagctccatatggaacgttgcaatgttgatggtagctttggtggttgtgaggatcagccactggctttaccgatggtcaaaccctaagtgccctggcaagttaccacctggatcgatgggttttccaatcattggagagactctcgatttctttaagccttgtggagtcgaaggtatcccaacctttgttaagaagaggatgataaggtatgggccgttgtttcgaacaaacatttttggttccaaaaccgtggtttcgacagatccggatgtgatccaccagattttccggcaagagaacacgtcttttgagctaggctatccagacatatttgtgaaagtatttggaaaagataatttgttcttgaaggaagtgttcatccacaagtacctccaaaaaatcactatgcaaattcttggctccgagggtttgaagcaaacaatgttaggaaacatggacaaagcaacccgcgaccatattaggtccattgctagccaggggagcttcaatgttcgtaaagaagttgaaaacttggtagtagcgtacatgacaccaaagctgataagtaaccttaaaccagagacgcaatcaaagcttatagataatctcaacgccttcaatcttgattggtttaagtccttcttaagactctctacttggaaagctgtcaccaaagccctcaagtcacgcgaagaagctatccaggtgatgaaagacgttctcatgatgagaaaagagacgcgagagaagcaagaagacttccttaacacgcttctagaagaactggagaaagacggtagctttttcgaccaaggatcggctataaatctcatcttccttctggcgtttgccttgagagaaggtacctctagttgtactgctttggccgtgaagttcatatccaaagacccgaaagtgcttgcagagctcaagcgtgagcataaggcaattgtagacaacagaaaagataaggaagctggagttagctgggaagaatatagacacaacatgactttcaccaacatggttagcaatgaggtgcttcgcctagcaaacacgacccctttgttgtttcgaaaggcggtgcaagatgttgagatcaaaggatatacaattccggctggttggattgtggctgttgcaccttcagcggttcattttgatcctgcaatctatgagaacccatttgagtttaatccatggagatgggaggggaaagaaatgatttggggatctaaaacgttcatggcgtttggatatggagttagactttgtgtaggtgcagagttttcacggcttcaaatggcaatcttcctccatcatcttgtggcatattacgatttctcaatggtccaagactccgagatcattcgttcaccattccatcaatacaccaaggatctgcttataaacatctctcagtctcctaccaagtgaaccatgcatgcagtttccaaatcttaataatcagatcattatatgcaataatctcatttcctgcttccgcaaaatctctggagtctttttatatgtaatatgcgatctctataatttttaaaaagtatctatcttgtccaatgagttaaactttgttaaaaaaaaaaaaaccaaagnnnnnnnnnnnnnnnnnnnnnnnnnnnnnnnnnnnnnnnnnnnnnnnnnnnnnnnnnnnnnnnnnnnnnnnnnn

SEQ ID NO: 97692 - DNA, 766 bp, Arabidopsis thaliana columbia
  unsure (1)..(766): unsure at all n locations
tcgccacnnnnnnnnnnnnnnnnnnnnnnnnnnnnnnnnnnnnnnnnnnnnnnnnnnnnnnnnnnnnnnnnnnnnccacgcgtccgtacggctgcgagaagacgacagaaggggggaggagaaaaggtagtgccaatattagccggcgattcagatggagacggtggtcgataaagatgttctgaagtcttccggggctgagcttcttcccgacggacgtcgaggtttacgcatccatgactgggagatcgaaaccctccgcggcacgattctcacttctctcgctgtcgaagagtgggaaaaaaagcttaagacatctcacttacctgaaatggtttttggtgagaatgcattagtccttaaacacttgggtagcaacactaagattcattttaatgcgtttgacgcactagctggttggaagcaggaagggcttccacctgttgaagttcctgctgcagcacaatggaaattcaggagcaagccgtctcagcaggtgatactagattatgattacacgtttacaacgccctactggggaagtgaagtagttgagaaagacaaagaaacgggtgaggcaaaagctaatccaaagggggatgctactcttcagtgggagaactgggaagacagattgatttggctgtctttcacttangaacctattctcttctatgatgagggtagtttgtttgaagatgactggctgacaatggagtgtcacttctgactgtgaaagtgagagcgatgcaagctcatggtcctc

SEQ ID NO: 97693 - DNA, 740 bp, Arabidopsis thaliana columbia
  unsure (1)..(740): unsure at all n locations
nnnnnnnnnnnnnnnnnnnnnnnnnnnnnnnnnnnnnnnnnnnnnnnnnnnnnnnnnnnnnnnnnnnnnnnnnnnnccacgcgtccgtacggctgcgagaagacgacagaaggggaagacaaaaaagggtaatttgaaaattttcagatagaaacagtcccgtcaccggcgacgatgaaatggttgctcgtcgccgtattgacctctcttacgatcttctccgccttaacacagtcccatctcctccatggatctccggtcaattctctctgcgctgatctcattcatcccgctaattactcctgcactgaacacagtattcaaacaaaggatggttacatattagctcttcaacgtgtagcttctcttggtccaagacttcaatctggtccacctgttttgcttcagcacggtctctttatggctggagatgtgtggttcttgaattcaccaaaagagtcactaggtttcattcttgctgatcatgggtttgatgtttgggttggaaatgttcgtggtacacgttacagttatggacattgtaacttgtctgacactgataaggagttttggggactggagttggcaagatttggcatgtatgacttggcagaaatgattcagtatctgtatttcatttcaaactccaaattttccttgttggacattctcaggggacttcatggttttggctggtttactcaaccgatgttgcggaaatggttgatcccctgcgttgc

SEQ ID NO: 97694 - DNA, 552 bp, Arabidopsis thaliana columbia
tacgacttactctaaggaaagctggtacgcctgcaggtaccggtccggattcccgggtcgacccacgcgtgcgaaaaatcttaatttataaaaaagtagtcaactttacacttgaccccttggggtgatagaagaatcatgaagaaagggtccaaagaaatacaatcactttcttaactctactgttccaacatttaaaagagcatatctttcttcttcttcgtcattatcttcatttgctgcttcttcttctttcttgtaaatttcagacctcgttggagagttttggacagcaagcctcgacggcatcagccaccgttagatagatattgtcttgtcctaacatgtcggcaaagtgcgacaagtgtagcttgcctatcaccaacggtccaggattcgccagaatcaactgtttatcatcacaaaacacagagtcaggtaaatcttcttcaacctaatcaactttgagtgcttagattataatccttaaagaattcagtatgtgtgtatacatgtatgtacctgaatgtctcttttctggagagacttgta

SEQ ID NO: 97695 - DNA, 907 bp, Arabidopsis thaliana columbia
  unsure (1)..(907): unsure at all n locations
gttcaggctccttctctctttttctctttcactcagccacgaacgaaccttccccttaatccaatcttcttcttacataaacacctgtcctcccccaccgtttccaaaagagagaagctttctcactaacaccaaaaacaagtctttgaagaagaataaaaagattggattttgataagtttagtgaaaatgggggagcttttgtgttcttcactgtggaacccgtcacgattcattgttgcttctctcaaaaggtattttctgggtttagcttcttagaggttcttcgttcttaaaggtctgtttttttttaggttgtgatactttgaatgtaaaaaagggaagatttttagtttcgatatgtatatctctcggatgggtttgagtcggagtttcccgccgctttttgggggatttcgggaaattctagggttagggttggatattgtcttcctctagcagtctctgccacttttaaaatctcttcatctttctttgagagtgaaagaggtttttttatttgtttgtgtcttcctgggaatcgagattctggatcttaatcaatatgtgggttaattgggagatctgggatttgggagatcttgtggtggattgaagaaaaagcaaggttgtagattttgaaaaatgaaaggttcaattcttactgttttgtcaatggagaatcatcatccgtcaacgcttttatctatggattctagtggctcatctcatgaagagcttgatttggagatgaacaatggnaataggcaaatcacnctttataancaccagacattaatctgcctttgnctgnaggagaagctcccctcctnggatttggatcctgngnaaaaatttggatgtggccnaccccangccatggccggacgtcccaaggggccggggt

SEQ ID NO: 97696 - DNA, 380 bp, Arabidopsis thaliana columbia
tacggctgcgagaagacgacagaagggtacggctgcgagaagacgactattgagagctaaaatccgagattaagaatggcgaatcaaggagcgaagaaacgaaaggaagagaacgccaaacacatggctaagctccgtcgtatcatcatcgcttccaatgctgtgtatttcgttgtgaggatgttgattttctactcaagctttacttggaaacattggatcggtttagtgataacttcgctggcttacgcgtttccttataagcagcttgatcaaatggctaaacctagtgttactgatgatggtgagcttattgatggtggatttgacatggacactggtggaatctgcggatatttgcacgatgtcatctatatcac

SEQ ID NO: 97697 - DNA, 1476 bp, Arabidopsis thaliana columbia
cagctacatacgactcacattagggaaagctcgtacgcctgcaggtataataaaaagcattttcttctttcgattgcttcagattcgtcagctcactctttcctctccagaagaaaccctagacatctcatcgccaaaatgttcagatctatgctcgtccgatcttctgcctccgcgaagcaggcggttatccgccgtagcttctcctccggctccgtccccgagcgtaaagtcgccatccttggtgccgccggtggaattggtcagcctcttgctctcctcatgaagcttaatcctcttgtctcttccctctccctctacgatatcgctaacactcctggagttgctgctgatgttggtcacatcaacaccagatctgaggttgttggatacatgggcgatgataacttggccaaagctcttgaaggagctgatctcgttatcattccagctggtgtaccaaggaagcctggtatgacccgtgacgatcttttcaacattaatgctggaattgtcaagaacctttgcactgccatcgccaagtactgcccacatgcgcttattaatatgatcagcaaccctgtgaactctactgttccaattgcagctgagatatttaagaaggctggtatgtacgatgaaaagaaattgtttggtgttaccactcttgacgtcgtcagggccaggactttctatgctggaaaggcaaatgtcccagttgcagaagttaatgttccggtgattggtggtcatgctggggttactattctccctctcttctctcaggcaactcctcaagccaacttgtcaagtgacatacttaccgcccttactaagcgtacccaagatggaggtacagaagtcgtggaggcaaaagcaggaaaaggttcagctacattgtccatggcctatgccggagcattgttcgctgatgcatgcttgaaaggactcaacggtgttccagatgtcatagaatgctcatacgtgcaatctacaatcaccgagcttcctttctttgcctcgaaggtgaggttggggaagaatggtgtggaggaggttcttgacttgggaccactctcagactttgagaaggaaggcttggaagcattgaagccagaactcaagtcctccatagaaaagggagtcaagtttgccaaccagtgattaaaccgagtttactcggtaatttttccaattttccagctagagttgccacctcctccttcatcgggttgtatcaataaaaaatccatgtttgtgcctccattagtgaaaccataaggctctttttggttaatcaccaaactcaaagaaaaactgtaacatgtcaaagttgtaattctttcttcctttttggaaccatgcgactttttttttcatggacaacgagatcataaagtatgaaaaaaaagggcgaccgctctagaggatccaagcttacgtacgcgtgcgtgcgacgtcatagctcttctatag

SEQ ID NO: 97698 - DNA, 638 bp, Arabidopsis thaliana columbia
  unsure (1)..(638): unsure at all n locations
gtcatcaagaagcttcgatatctcaatctatctctactcattctctcttaaaaaaaaaaaaaaatcaaaaatttctggagtagtttctcgagccatgaccgcaaagaacgctgtgttgcaattgagtattcacgaggagagaaccaggaagaaagcgcttgtcaccgtttttcgattttcaggagttacttcgataacaatggacaaaagtgggaaaatgacaatagttggagaagttgatgtaccagctgtcgtgatgaagctaaggaagctatgtaacacagagatcgtttcagtcgatgatgttaaaccacctgttaaaaagcctgaacctgagaaaccagctgaatctattgcatatcctgttccgatgaactacgcgtaccaattcaatcctgcctatgcaaattcttactatcatcaaccatacggaaattgtagagtggtagacgaaccaaattgtgtgattatgtgattgttccagtgttatttcaattaatgctcagttatttaacacttatagttttgatagaaatatgtaattttttcttagatactgttgtaatatgtaattttttgtcaacgttgtaacatccatttctcttgcccatnnnnnnnnnnnnnnnnnnnnnnnnnnn

SEQ ID NO: 97699 - DNA, 321 bp, Arabidopsis thaliana columbia
cacagagagagatacagatattatggggaagcaaggaccttgctaccactgtggagttacaaacacacctttgtggagaactggaccaccacagaagccggtattgtgcaatgcgtgtggatcgcgttggaggacaaagggaacacttgtgaactacacaccgcttcatgctcgtgctgatggtgatgagaatgatgatcatcacaggtttcaaagaatgaagagcatttttttaggcaataagaacaaagagataaagatgctcaagaggaaagcaattcaagaaaacatcattattaaaagaccggtctttgaattcag

SEQ ID NO: 97700 - DNA, 642 bp, Arabidopsis thaliana columbia
ggaaattgagagagagtagaacactaaattagtaaaatggctgcaaaagcatcaaatttagttgctcttcttctctttttgtttcttctgcttctatctatctcctcacaagttggactaggcgaggccaaacgcaacctacgtaacaatttgcgtttggattgcgtttcccatccctctcctcctcctcctcatcgttccatggcccctccaatttttgtaccgccttctacatcacacaaaggacaaggcccataaacaaaatcatacaagtaaccgagaagaagtgatcaaaatttcataccaaaaaaagaagtgatcaagattccatatagagaaaagagtattgtgtaagaagaagggtcaagatttttcttttattgggtcaagcttttacaagttgactattataaattatacaacttattgtgtcttatacaggttgaaccttttcagagcatgttggaattttaaatcatatattgtgaatatatatgaatatgttggatatcttatataataaagtcattttagataaattgattattgcaaaaaaaaaaaaaaaaaaaaaaaaaacaaagcggccgctctagaggatccaagcttacgtacgcgtgcatgcggcgtcaagctaatctatag

SEQ ID NO: 97701 - DNA, 726 bp, Arabidopsis thaliana columbia
  unsure (1)..(726): unsure at all n locations
nnnnnnnnnnnnnnnnnnnnnnnnnnnnnnnnnnnnnnnnnnnnnnnnnnnnnnnnnnnnnnnnnnnnnnnnnnnnnnnnnnnnnnnnnnnnnnnnnnnnnnnnnnnnnnnnnnnnnnnnnnnnnnnnnggagatttagaaaaaaaggaagctccaagagatggcaagagttgttaaaatcgattctgcagagtcatggaatttctatgtgagtcaagccaagaatcagaattgtcccattgtggctcatttcactgcattatggtgtattccttctgtgtttatgaactccttcttcgaagagcttgcgtttaactataaggatgctctgtttctaatagttgatgttgatgaagttaaggaagtggcaagtcaactagaggtaaaggcgatgccaactttcttgttcttgaaggatggtaatgcgatggacaaactcgtgggcgcaaaccctgatgagattaagaaacgggtcgatggtttcgttcagtcctcacgtgttgttcatattgcttaagagagatttatagatacgagcagaatactataataaagtttgtgtaaagtgtaattagtttgtaactttgggatttggtttgtgttaaatatcaagtgtaagtgtaaatttttataaaagcaagctttgttaaaaacaattaaaaaaaaaaaanaaagggcggccgctctagaggatccaagcttacgtacgcgtgcatcgacgtcagg

SEQ ID NO: 97702 - DNA, 353 bp, Arabidopsis thaliana columbia
  unsure (1)..(353): unsure at all n locations
caaaatatggcaccagctcaaaaccaaatcacttctaaacacgtggcagtgatcggagccggaccagccggtctcataacgtctagggagctccgtcgtgaaggtcacactgtacttgtgtttgaacgggagactcaagtcggtggtctactgggtttacacacctaaatccgactccgatccacttagcctggaccccacccgatccagagtccactcgagcatctacgagtctctccgaaccattgtcccgagagatcgtatgggtgtcagggacttcccgtttttgccacgtttcgatgacgagtcaagagacgcgagacgttatccanatcatagggaagttcttgcgt

SEQ ID NO: 97703 - DNA, 484 bp, Arabidopsis thaliana columbia
  unsure (1)..(484): unsure at all n locations
tttncccnnttaaaaacntnccgtnaaccctttttccggggctgggacccncgntngggggccttcccgggaaaattttaaagggtgggaancnccgggttcaaaattntcccngnttttttcccagcccaattatgggtggaaagggggaaacctggatatgtgccaggctgcttttgcaagggctaaacagctatcagctcccaaggccacgggagcggtgctgtgcggacagaaacaaatggctgaggagataacttcaatgcttgtagctgatggagtctcaaatgacaagctgctcaaaaacttttgacagatatagttcttgtattatcgtataattttactgtttcttcacatcattattcttttgatacgaaagtcctcttcaaggcctctctaattcataaacacacagaattttgtagtcccttaaaaattaatactactgtgttgattgtccccccaacattcttttttgttt

SEQ ID NO: 97704 - DNA, 615 bp, Arabidopsis thaliana columbia
ttttacgacagaagggggctgtggccgtctccaacaccatttcgaagaccagggagatcgaagcaaaatggagaaaggaaagggaagaaaggaagaggtcgtgaccagggagtacactatcaatctccacaggcgcctccatagctgcaccttcaagaagaaggcacccaatgccattaaagagatcaggaagtttgcattgaaagcaatgggaacaaaggacgttagagtggatgttaaactcaacaagcagatatggagcaaaggtatccgaggtcccccgaggagaattagagtccgtgttgcccgtaagagaaacgatgatgaagatgccaaggaagagttcttctccctcgtcaccgtcgctgagattccggctgaaggattatctggtttgggtactaaggtcattgaagaagaggggtgaaaattggtgaatgtacactcacacaaccttatctttagatgaaaagacgaaacgaaaagactttgcttgttttgatcacttacctattttggtcatttatcatttcttatgttttaagttctatagacaacagatttggtactactcatacgagtttgatcttttgagtcgcaaaaaaaaaaaaaaaa

SEQ ID NO: 97705 - DNA, 571 bp, Arabidopsis thaliana columbia
aatggggaatgataggagaagagctgaataagatgagaagaagtgtttcctttggaatccatggaaccaacaacaataacgcagctagagactacagggacgagccagatgtgtcatgggttaactctttagttaaagacagtactgtggtgtctgagagaagctttggaatgaatgagagggttcggataatgtcgtgggctgagcaaatgtacagagaggaggagcagactgtggtgtaaacacacacaaagatggtttcttatatatattgcttttgggccatctctgcaaatttgattctttaatttttgtgactttctttagttgttactgttattagtagtatatggtttgttgtcactacgagtctacgtgatgaaaagatagaagttaattgcattagtttctatattcgtttctcatcctcttgtaatttatcaaaccatgaaatggctaagcaatccaaaccccaaaaaaaaaaaaaaaaaaaaaaaaaaagcggccgctctagaggatccaagcttacgtacgcgtgcatgggacgtcatagcactctgatagtgcgtcc

SEQ ID NO: 97706 - DNA, 740 bp, Arabidopsis thaliana columbia
  unsure (1)..(740): unsure at all n locations
agtacggctgcgggaagacgtcagaaggggggtcaaaacatgaaccaacattatccatcttccccggtgagacaaccgccatctcaacacgggttcgaatcttcagcagctgcagcggttgcagtgatgaaagcgagatcaaccgcctttgcgaaacgtagcttgagcttcaaaccagctactcaaacagcaccacagtcgaatctctcggattggggatctccaaacgggaagctggaatggggaatgaaaggagaagagctgaataagatgagaagaagtgtttcctttggaatccatggaaacaacaacaataacgcagctagagactacagggacgagccagatgtgtcatgggttaactctttagttaaagacagtactgtggtgtctgagagaagctttggaatgaatgagagggttcggataatgtcgtgggctgagcaaatgtacagagagaaggagcagactgtggtgtaaacacacacaaagatggtttcttatatatattgcttttgggccatctctgcaaatttgattctttaatttttgtgactttctttagttgttactgttattagtagtatatggtttgttgtcactacgagtctacgtgatgaaaagatagaagttaattgctttaaaaaaaaaaaaaaaaacccaaagnnnnnnnnnnnnnnnnnnnnnnnnnnnnnnnnnnnnnnnnnnnnnnnnnnnnnnnnnnnnnnnnnnnnnnnnnn

SEQ ID NO: 97707 - DNA, 662 bp, Arabidopsis thaliana columbia
  unsure (1)..(662): unsure at all n locations
nnnnnnnnnnnnnnnnnnnnnnnnnnnnnnnnnnnnnnnnnnnnnnnnnnnnnnnnnnnnnnnnnnnnnnnnnnnccacgcgtccgcccacgcgtccggctgcgagaagacgatagaagggggtccgcggtcgggaggaaagggcagcgataagccatgatgatacggggtggtggatccgcgtttgctaagtactgtcgaagagggatgtcatcatctcgagagttaccttcagagaatcatcagatggaggcgaatcgtggttttgccagttacgtatttaaaggggcagtcttttacacgtcatacgccatgagtatgtaattcgtagccgggaagaagatcatcatgcttctgcttctggttcccttggcgaggtaaaagaaagaaaatagtttgtttttggattttattttcaaaacccactagttggatcttcatgtatcaacatgatcatcgtttcagtcgtcgacgacttcccaagacaagagagaatgaaggaatcaatcgtaatggcttttgcttgtttctttcgctttttatgtatttatgttcttaacctgagttgggatctgtagaactaacttcccataattgtatctcacgaacgtgatgtagtaatctgagtaaatctaaaactatctcgtggaattgcaacaact

SEQ ID NO: 97708 - DNA, 542 bp, Arabidopsis thaliana columbia
  unsure (1)..(542): unsure at all n locations
taaaaattatcaaaagagggcgatccggggtgttgcccagtcccgttttataaaggcgagtttttttcccgttcaacaccccccgagtatgtaattcgtagcccgggaagaagatcaccatagcttctgcttctggttcccctcccgaggtaaaagaaagaaaatagtttgtttttggattttattttcaaaaccccccagtgggatcttcagggatcaacatgatcatcgtttcagtcgtcggcgccttccccacgccaagagagaatgaaggaatccatcgtaagggctttcccccccctcctctcgctttttagggatttatgttcttccctgagttgggatctgtagaactaacttccccataattgtatctcccgaaccgtgatgtagtaatctgagtaaatctaaaactatctcgtggaattgcccccccttaaaaaaaaaaaaaaagccccaaccccaagcgcggccgctctagaggatccaagcttacgtacgcgtgcaggcgacgtcatactcttctatagtgnnnnnnnnnn

SEQ ID NO: 97709 - DNA, 423 bp, Arabidopsis thaliana columbia
  unsure (1)..(423): unsure at all n locations
gtaaacatcatacaacttcaagtcttgattcaattacttgttggaagtgttcttcgtctctaacttgctgagaaattcatcgaatttgttgaacaattcttatggcgatttcgaaaggtagattgaaagtttggttcgataagaagatcagtgaaccacttatccagatcttgcgcagaggtgctgagccaaagcagctggctttttctgcggcattgggtattaccatgggagtatttccaatctgtggtgttacggtgttactatgtggagtggctattgcgtcgcttggatctctttgtcattctccaactggtgatggttggctaacttcattgctacacccccataggacctaagttttntgggggcttttttacgncctttnggggnaaaaanaaccggggggncccccattttncc

SEQ ID NO: 97710 - DNA, 558 bp, Arabidopsis thaliana columbia
gttgatatggatgaaagcaaaagggctgttccaacagcaaagggccaagctttggctgatgagtatggaatcaaattctttgagacgagtgcaaaaacaaacctcaatgtcgaaaatgttttcatgtcaatcgcaaaagacataaaacaaagattgacagaaaccgacacgaaggcagagccccaaggcatcaagatcactaaacaagatactgccgcatcgtcttctacagccgagaagtcagcttgctgtagttacgtttaggagtatgattgctctttttcgcctgcaccgggttttttaaatatctggccatctttttcatctcttacgtctcaaatcagagataattctcatgttgttacctagaacgagtaggaaatctcattgatggttgtgatctttatgtctaatttgttatctccataattcctgtacaatgatcttcctgatatggaagactatgttggtcaaaaaactatgtgaaaaagactttgaatttataaaaatgaaaccgttgtagtgtgtagaaaaaaaacaacaaaaaaaaagaataga

SEQ ID NO: 97711 - DNA, 646 bp, Arabidopsis thaliana columbia
  unsure (1)..(646): unsure at all n locations
nnnnnnnnnnnnnnnnnnnnnnnnnnnnnnnnnnnnnnnnnnnnnnnnnnnnnnnnnnnnnnnnnnnnnnnnnnnnnccacgcgtccgtacggctgcgagaacgacagaagggggaattcatgattcacaaaataaccaaaccttcaatttataatcgtttccaatcccaaaatcaagccatggacgccaagaacaccaaagctgatggagccaagaattttggtacgagtggcggaagcagtggttctggtagcacttccgacatcggtaaaacaatggttgctcctggatctggtggacgacaaagcgtttagagggaggcttttgagagcaaccctaagaagttctttgatgatcgtaacttcaaagagaagaaatgaaccgtttaaatgaagagcaagttctcaaaaagtgatgatatatcttgtttcttattttcttctttgttagtgatcctccaaggctccactagttcacacatatggtggagtgaagtaaaataattatcaataataattaataagattcataatttctgttnnnnnnnnnnnnnnnnnnnnnnnnnnnnnnnnnnnnnnnnnnnnnnnnnnnnnnnnnnnnnnnnnnnnnnnnnnnnnnnnnnnnnnnnnnnnnnnnnnnnnnnnn

SEQ ID NO: 97712 - DNA, 637 bp, Arabidopsis thaliana columbia
  unsure (1)..(637): unsure at all n locations
nnnnnnnnnnnnnnnnnnnnnnnnnnnnnnnnnnnnnnnnnnnnnnnnnnnnnnnnnnnnnnnnnnnnnccacgcgtccgcgagaagacgacatgaaggggatggagaagaaaggtatccgttcaaacacgattgtgtataatacgttgatggatgcttacaacaaatccaaccacatagaagaagtggaaggtctttttactgaaatgagagataaaggcttgaagccttcggctgcaacttataacattcttatggatgcttatgctagaaggatgcagcctgatatcgttgagacacttctgcgggagatggaggatttaggtttagagccaaatgtgaaatcgtacacgtgtttgattagtgcgtatgggaggacgaagaagatgagtgatatggctgctgatgctttcctgcggatgaagaaagtaggtttgaaaccttcttcacattcttacacagctcttattcatgcttactcggttagcgggtggaacaaaaaaccttatgcttcctttgaagagatgtgtagggaggggattaaaccggcgttggaacatacacatagtttttgttgcttaaaacatcaggggacattggaagctgttggaaattgaaaactaatgctggaaaaaat

SEQ ID NO: 97713 - DNA, 826 bp, Arabidopsis thaliana columbia
  unsure (1)..(826): unsure at all n locations
nnnnnnnnnnnnnnnnnnnnnnnnnnnnnnnnnnnnnnnnnnnnnnnnnnnnnnnnnnnnnnnnnnnnnnnnnnnccacgcgtccgcccacgcgtccgcccacgcgtccgcggacgcgtgggcggctgcgagaagacgacagaagggggtggctctggtttctccatccaaacaaaaacaacacccaaaccttgtccacaccaaaatgttaaactcaaaatccaaccacacacacacaatttctcttcctctctaccattaacatcgatcagaaagaccgagagagagagggagaagctgattgattatggctgctgcttcgatttctgcaataggatgtaatcaaactttgataggaacttccttctatggaggatggggaagttccatctccggagaagattaccaaaccatgctctccaagacagttgcgccaccgcaacaagccagagtctcaaggaaagcaatcagagcagttccaatgatgaagaatgtcaatgaaggcaaaggcttatttgcacctctagttgttgtcacacgcaacctagtaggcaagaagaggtttaatcagctcagaggaaaagccattgccttacactctcaggtgatcactgagttttgcaaatcgattggagcagatgcaaaacagagacaagggcttatcaggcttgctaagaagaatggagagaggcttggtttccttgcttaggtcttaaaaagaacaaatctttctctctgcttgtgtctgatatatacactcacaactcctcttgttgttcttgtctagatgtattttgtccaaacctataatcttgatttttgttcc

SEQ ID NO: 97714 - DNA, 575 bp, Arabidopsis thaliana columbia
  unsure (1)..(575): unsure at all n locations
nnnnnnnnnnnnnnnnnnnnnnnnnnnnnnnnnnnnnnnnnnnnnnnnnnnnnnnnnnnnnnnnnnnnnnnnnnnnccacgcgtccgacagtgaatcagcaaattgggtaatacagtggatggcaaaaaatgggacagaaaaagatggcggattcatcagatacacaactccaagaactcagggagaaagagcctcgaaagaaagcgaatgcgcaaagaaatgcgctggcctcagcacttaggcttcagaggaagcttgcgaaaacagccactgagaccatagatgagattagcgatggccgctagaccgtttggtggaaccgatggatccccagagaggagtggggacggactctacttacaatatatcatttctcatttccggtttcgatagtgtaaatctcaatgtatatctttattagccccttagctaaatttcctacttcttggaaaatcaagtaatcttaaaggaaaaagattgtgtgggtacctaaatccacaaacttcggagttgctgactctggttttgaagtttcatactttgtcgcttaaaaaaaaaaaacggatctccaatt

SEQ ID NO: 97715 - DNA, 599 bp, Arabidopsis thaliana columbia
  unsure (1)..(599): unsure at all n locations
aggttcccgttccgcancaacttggatgcattctncggntccaacggnctccgtgancccncaattggtatccgttatgcaaaaatggccngaaaaagatggtggttcccgaaacacaactccaagaactcagggagaaagagcctcgaaagaaagcgaatgcgcaaagaaatgctcttgcatcagcacttaggcttcagaggaagcttgtgaaaacagtcactgagaccatagatgagattagcgatggccgcaagaccgtttggtggaaccgatggatccccagagaggagtgaggacagactctacttacaatatatcatttttcatttcggtttcgatagtgtaaatctcaatgtatatcttattagcccttagtaaaatttctactacttgtaaaatcaagtaatcttaaagaaaaagatgtattgtacctaaatccacaaacttgggagtctctgactctgtttctgaagtttcatacctttgtgtataaaaaaaaaaaaaaaaaaaaaaaaaaaaagcggccgctctagaggatccaagcttacgtacgcgtgcatgcgacgtcatagtctagctatagtgtcagttcaatt

SEQ ID NO: 97716 - DNA, 389 bp, Arabidopsis thaliana columbia
gcacaacaccatggaagtttcactaagcaactgaggcattacatttctgagttcgatcccaagatattgcggagatgcgcaaaaccaaggtcacatgaagcaaaaagcctgatagaaaagcagagtttagctctttttggtcctgaggaaagcagcaaagagagcattgtgacatcgttttctagcctgaagaggttgcttcttgaggctgtggcgtttggtacgtttctatgggacgcagaggagtatgtagatggcgcgtttaagctcaaggagaatgaggatgcagaggaagaaacatatagcagtgtttgaagtatgtatgaaccagtttgctagaaagaaacttgaatatcttttttggtggacattgcaatatatatatagat

SEQ ID NO: 97717 - DNA, 730 bp, Arabidopsis thaliana columbia
  unsure (1)..(730): unsure at all n locations
gccctactcctaacaccagtcaaaaatcatctcaagatcagagcccagatcccaaaccgacgacaccaaccgggacgtcgtcgacaactcctgccgaagatagtagtacgacgtggtcaccggtagatacatcaatgatatacgaaggagctttggatcaaaacaaaggatcaccgtccacgtgtcatctttcgttatgtggaatcacagtcacacttgcgctggccttttgtcggatgtggcggctcttttgacacctaactttgtctcccgcgtaaaacactgaagaatgtgggccctcactgacgaaagccttatctcgttccggcccatgtgaaccggttattcccgaacgacgtcggattgggtcagggttgagaaaaaaagttaacaaccccctacagttacgaaaatatccttcattcatgttcatgggagaattcttaatttgggtgaggaacacgtgggcaagaaagtgggctgctggtggagttcataaaaaatgggaatgtttaattgtaaggtcagaatatttatttgatttataatgtaactaggattagaagaatattatgtcccctatataaagcagtaatctatttagtttaaagctatatattgggacctacccacaccccaanannnnnnnnnnnnnnnnnnnnnnnnnnnnnnnnnnnnnnnnnnnnnnnnnnnnnnnnnnnnnnnnnngtacctannnnnnnnnnnnnnn

SEQ ID NO: 97718 - DNA, 1633 bp, Arabidopsis thaliana columbia
  unsure (1)..(1633): unsure at all n locations
atgatcctgccagctactatacngactcactttagggaaagctcgtacgcctgcaggtaccggtccggaattcccgggtcgacccacgcgtccgaagagacaaaaacaacttgaagataaagggataaggaaggcttcctacatgatggacaacatttctttcacacaaattctcataataaaaatcttataatacaaatacttacgtcataatcattcaatctagtccccatgttttaaggtcctgtttcttgtctgatacaaattaaaactcttaaacagcttcctaacgagaggaaactgaggaacacaacaatggagtttcgtggagatgccaaccagaggattgctaggatttcagctcatctcactcctcagatggaggccaagaactctgtaatcggacgggaaaactgcagagctaaaggtggtaatccaggattcaaagtagcaattcttggagctgcaggtggaattggacaatctttatctttgctgatgaagatgaaccctcttgtctctttacttcatctctacgatgttgtcaatgctcctggcgtcactgctgacgtcagtcatatggacactggagctgttgtccgcgggttcttgggagcgaagcagcttgaggacgcgctaacgggtatggatcttgtgatcataccagccggtataccgaggaaaccagggatgacccgcgatgatctgtttaaaatcaatgctgggattgttaaaacactatgtgaaggtgtagcaaaatgttgtcctaatgctattgtcaacttgatcagcaaccctgtgaactctactgtccccattgccgctgaggttttcaagaaagctggaacttatgatcctaagaagctccttggagttactacactcgatgttgctcgtgccaacacatttgtggcagaagttcttggccttgatccaagagaagtcgatgtgccagtagttgggggacacgccggagtcacaatcttgccactactgtcacaggttaaacctcctagcagcttcacacctcaagaaattgagtacctgacaaaccggattcaaaatggtggaactgaagttgtggaggcaaaagctggagctggttctgcaacactttcaatggcatatgctgcagccaagtttgcagatgcttgccttcgcgggttaagaggagatgcgaatgtcgtagaatgctcttttgttgcttcacaggtgacagaattagctttctttgcaacaaaagtgcgccttggccgtacaggagcagaggaagtgtatcagcttggacccttaaacgaatacgaaaggattggtctggagaaagcaaaagatgaattagccggaagtattcagaaaggtgttgaattcatcagaaaatgaaactgagagataatcagagagatacaataagttatttcctcaactatatgatcatgtactcatcatcacatcatgcctatgtctcctctgcttctgatacaactttgtataaatccttatcagtttgtgtacgatatatgtgaccttttccaaaaaaaaaaaaaaaaaaaaaaaaaaaaaaaaaaaagggcggccgctctagaggatccaagcttacgtacgcgtgcaggcgacgtcataactcttctatagn

SEQ ID NO: 97719 - DNA, 1160 bp, Arabidopsis thaliana columbia
  unsure (1)..(1160): unsure at all n locations
cttgcaggtaatgagggccgtgagtatgttctgcggcgtattcttcgtcgagcggttcgctatggaaaggatatcctaaaagctgaagaaggatttttcaacgggcttgtaagttctgtcattcaggtgatgggcgatgtctttacatagttgaaggaacatgagaaagagatcacagatataattaaagaagaggaagcaagcttttgcaagaccttggcaaagggaattgagaaatttcggaaagctggacaggcggttcaggggaatacactgagtggagatgatgcttttatcttatgggatacatatggtttcccgttagatttaactcagttgatggctgaagaaagagggttactggttgatgttgatggtttcaacaaagccatggaagaggcgagggaaagatcgagaagtgcccagaataagcaagctggtggtgccattgttatggatgctgatgctacatcaacattgcacaaggctggtgtttcagcaacagatgattcttttaaatacatttggttccaggaccacgagagtgaactaaaggcaatctatactggctctactttcctagaaagttcagctgctagtgataacgtgggactagtattggggtctacaagcttctatgctgagcagggtggtcagatttttgacactggacttatagaaggctcgtttgggacattcaatgtatgcaatgtacaaatatttgggggctttgttcttcacattggttatctctctaaagaaactggagaggtatctgtgggtgataaagtgatttgcaaggttgactatgagaggcgtaaactcatcgctcctaatcatacttgcacacatatgttgaattatgccctgaaggaagtgctcggggatcatattgatcagaagggatcaattgttcttcctgaaaaactgcgatttgatttttctcatggcaagccggttgatcctgaagatttgagaaggatcgaatccatagtgaataaacagatcaaggatgaattagatgtgttttccaaggaagctgtgctttctgaagccaagcgcatcaaaggtctaagagcagtgtttggagaagtctaccccgatcccgtcagagtcggtgtcaaatttgggaggaaagttttnngntnntttttggnntg

SEQ ID NO: 97720 - DNA, 480 bp, Arabidopsis thaliana columbia
  unsure (1)..(480): unsure at all n locations
ggagtggacttagacttagagagataacagataaaatggcgacggggacggcgacggagaaaccgaagatcgtgtggaacgaaggaagacatagattcgagactgatgatcacgatgccttcatagagtacaagatgaagaatgacggtaaagtcatggatctggttcgaaccttcgtaccgccgtcaaaagcaggacttggtttagcttcgcatctatgcgtcgccgctttcgaacacgcctctgaacactctttctccatcatccccacttgctcctacgtttccgtatccttccctcctctactcaaaaagtttgagatgaatcagattcttatgaaantatgtccgtgtttttgcaggaaacgttttcttcatcgnttacccaacgtgggcagaatctgggtgcactcaggaggattatttccaagnaccctcaaagtctngcantcttnatcaagtcccttctttaaaagccttt

SEQ ID NO: 97721 - DNA, 811 bp, Arabidopsis thaliana columbia
gctgagatttttacagaagggggatgtgagcattaagttggacgagcaaaagaatgaaagcctcacgcaactcaaagaaaatgagatgttaaggacgaagttgaagcacctggctgatcaatttatgctttcagaacaacaacatgagcaaaggttgaagcagaaagcacttgagctacagatctctgctttaaaaattaaacagcacgaggagaaactcatccatgaacaatctcagatgaaagtttacgcagatcatgtttctcagcttttgtctactgagaaaaatttgcggttgcagctgacttctgatggagataaattccagcagttccaggacgcgttggttaagagcaatgaggtgtttgaaacattcaaacaagaaatcgataagatgtcaaaagcaatcaaagaactcagaaaagaacgcgcattcttgaaaaacaaaactgagaagtcggatatcactctcatagaactcgtcgaagagcgtgaaagattgaagaaactgttggagaagccaaagaaacagaaagccaagcttgaatccctttgcagatcccttcaagctgaaagaaaacagaaagaaactaacagtgctgattctgctgttcaaccatgaaacagagagagactatgaattcagtgttttgctctctttttttctttgtcagagttttgaactaattagcacttcagattacaaaactacaattagactccaaattcactttaaaatgtagaaacatatcacatcatattgattctgctcttttgcgagctaagtccattttatctcacaaaaaaaaaa

SEQ ID NO: 97722 - DNA, 445 bp, Arabidopsis thaliana columbia
  unsure (1)..(445): unsure at all n locations
atgatgatcagttcagtccacttccaggaggcgtctcttcctccctctgtataagatgcgttaccacccaacgttgtgtaggggccgtaggcgcgccacgctcgacgtacacttgcactatcatctcgaaacagtgtgaaaatatacctggccattgatcaggtcataactttgaaatgcacatctatgatctattcatatatatgaatgtatgtactaaagccgtagtgggtttgcgttttctatcttttttcgtttcatattattgggggttgcaatatatatttttttatagatttattcagtgtaaaattaatacatatacatgatatatactatatatctgctgaatatggaaaaaaaaaaaaaaaaaaaaaagcggccgctctagaggatccaagcttacgtacgcgtgcatgcggcgtcatagtntaagtatagtgtc

SEQ ID NO: 97723 - DNA, 829 bp, Arabidopsis thaliana columbia
  unsure (1)..(829): unsure at all n locations
nnnnnnnnnnnnnnnnnnnnnnnnnnnnnnnnnnnnnnnnnnnnnnnnnnnnnnnnnnnnnnnnnnnnnnnnnnnnnccacgcgttcgcccacgcgttcgcccacgcgtncgtacggctgcgagaagacgacagaaggggaagtagagataaaagaaagtttaattagctcagattcagctcatgcaacgtcctaaattaggtcagattcagtgattagtgataagtagtaacagagagatttattaagatgttgtcgtcgtcaacagtttctttcatgttattttttcctcatgttttcgatccatatgaatgaagctcttggtgctcaaattgaaatccgcaaactcgaagagacgatggtgatgaggaggaacaagaaaggtaatggcttcgtaacctccaaaatagatgttccaccaagcgcatcacaacattgcgggggaggtaaacgttttaagaacatggcgaccactaatcgacatgatgatcagctcagtccacttccaggaggcgtctcttgctccctctgtataggatgcggtaccacccaacgttgtgtaggggccgtaggcaccccacgctcgacgtgcacttgcactataatctggaaacagggggaaatatacctggccatgatcaggcataactttgaatggacatctattgtccatcctatatatgaatgatggcctaagccgaacgggtttgcggttctatctttttccgttaaatgaggggggtggcaaattattttttttagattatttagggggaattaaccctttcgggttttactttttcggcggaaaaaaaaaaaaaaaaacaaa

SEQ ID NO: 97724 - DNA, 781 bp, Arabidopsis thaliana columbia
  unsure (1)..(781): unsure at all n locations
gccggcacgcctgcaggtaccggtccggttttcccggggggagcacgggttcgtacggcgagaagacgacagaagggtacggctgcgagaagacgacagaagggtacggctgcgagaagactacagaagggtacggctgcgagaagacgacagaaggggggataaaaaagggaccccttctggtttgggggggggcananangggcgatggncaagctgaggagaccaaaggatcatgatcggcacaaccaattacaaagagaaactcgacgcggccttgctgagaccaggacgtatggatatgcacatccacacgtcggattgcacaccaaggactttcaaagctcttgctttgaactatcttgagatcaaagagcaccgccttttcagcaagatcgaggaagggattgaggcgacagagggcactccagcagaaggagctgaacagcttatgagaaatgactctggagacaaggctctggagggtttgatggagtccttgaaagccaagaagatcgaaaacgaacaagataaggccaaaacagagaagcaagagttggagaacaagnaaaaagaccaaggagggnaccagattccggtagtcaaggaaaganggttgatgancagcctagtgagnaatgncccgtgttgataanggtccttaagggtttggccganttgttaaagcccagagntcgggggcggcccangttaacccancctgggggggtnnccacnttacttgggganccaacccaanncttaancncnntaccggcct

SEQ ID NO: 97725 - DNA, 1019 bp, Arabidopsis thaliana columbia
  unsure (1)..(1019): unsure at all n locations
tacggctgcgagaagacgacagaagggtacggctgcgagaagacgacagaagggggtataaaaaagtgacactctctggactgttgaatttcatagatggtctatggtcaagctgcggtgacgaaaggatcataatcttcacaaccaattacaaagagaaactcgacgcggccttgctgagaccaggacgtatggatatgcacatccacatgtcgtattgcacaccaagtactttcaaagctcttgctttgaactatcttgagatcaaagagcaccgccttttcagcaagatcgaggaaggtattgaggcgacagaggtcactccagcagaagtagctgaacagcttatgagaaatgactctgtagacaaggttcttgagggtttgattgagttcttgaaagtcaagaagatcgaaaacgaacatgataaggccaaaacagagaagcaagagttggagaccaaganaaagcccaaggagggaacagattccgtagtcaagaaagaggttgatgaacagctagtgaggaatgaccgtgttgataaggttcttgagggtttggtcgagttgttaaaagccaagaagatcgaggacgaccaagataaagccaaacatgaggaggttgaccaacattaacttgtgagatatcaatacctaaatcattaaatcgccagttactgtctataatctacagattcatttataaacctagtcctaagataaaataatcttagtgagattgagaccaaaaaagggaaaaaattgaggagatcagataaaacacctctgcatccgagtggtagctgtaaagagaagagcacgtgtatttatacaaaactatgcgtttagcttgttttttctctctgttttttttctaactttttttagcacaatttgttttaagctactaaaaaaaaaagtttgccgacaaaaaaaaaaaaaaaagnnnnnnnnnnnnnnnnnnnnnnnnnnnnnnnnnnnnnnnnnnnnnnnnnnnnnnnnnnnnnnnnnnnnnnnnnn

SEQ ID NO: 97726 - DNA, 404 bp, Arabidopsis thaliana columbia
gaaagaagagatggagaatactttgtcgccgttgttgtcaccgtcgccggcaagtgaagtcgctgcgagagtatcgtctttgttcgtttatccgatcaaatcatgtcgaggaatttctctgtctcaggcagctctcactcccaccggatttcgatgggatcgaaactggttgattgtgaattctaaaggaagaggattgactcagagagtggaaccaaagctttctttgattgaagtagaaatgcctaagcatgcgtttggagaggactgggagcctgagaagagctctaacatggtggttagagctcctggtatggatgcccttaaggtctccctagctaaacccgacaaaatagcagacggtgtctcagtttgggagtggtctggctccgcactagatgaag

SEQ ID NO: 97727 - DNA, 733 bp, Arabidopsis thaliana columbia
ggtctcagcgccgcgttttttctctcctcatcctctcgacgaattcctctcaagcttgcttcttccatttttctcttagaccaatctcgctttcgcatccctcctatgccatcctctcgaaacgagacccatttctgtgttctcaacccagaaaatgccttactacgaatttgaatatgtcaagaacgagacaagggcattctatacaaatgaacagaagacatcttcttatgaaagaaaggaagagtttttcgataaattattccgataagttcagagatgattctatgagtagcgaggagatgcatacagatgctttggatgtggagattattccgccagattcacaggacattcgtaattcacagaactctgctgtctccaacacactacaggatgataggccaaagtcttttagaaataggtttcttgaccactatctacgcagcatcaatcaaggcttttctatcggatttacatctgttttgatcattgttggttccattattgaactcagaagatcttaccatgcctacaatgtaatgccgagtttaagcaaagcgttaaagagatatggcgtataaagggagattggagaaacagaagaacttatagatatattattgtcgtttaaactttagaagtttctgtagctcttttgattagtagattaggcattagataatttgtattaagaaccaaaacacatttccatcataatattagaagactt

SEQ ID NO: 97728 - DNA, 579 bp, Arabidopsis thaliana columbia
  unsure (1)..(579): unsure at all n locations
cnnnnnnnnnnnnnnnncactagagggacagctggtacgcctgcaggtaccggtccgttttcccgggtggacccacgcgtccgcccacgcgtccgcccacgcgtccggctgcgagaagacgacagaagggggagtttctgtgaactcaaaaaaaaaatcaaatcctttttgagtttcaatctctgagagtttctatgaaacaatcgtcatggggttgcacaatcttcatccaattatctctatgtctcatcatctatgtgtctctgcattcgggtcacccattcttcttctctagtgacgacggtgacaatgccacacctctagatcttcatttcatctccgttgccggcggtttcaggcctcttaaccaccaaactcgccttctccgattgatggagaaagttgcagaaacttacaaggccaaatttgttgtgagctcaagtgaacaaggagaagaagatccattcctgcaaaatgcgactcgactgtcttcttcactgaaacttccatggtacactagaatgaaagggatctggatttttcagagagcccattcaaatgccctttggggggatcctt

SEQ ID NO: 97729 - DNA, 792 bp, Arabidopsis thaliana columbia
  unsure (1)..(792): unsure at all n locations
nnnnnnnnnnnnnnnnnnnnnnnnnnnnnnnnnnnnnnnnnnnnnnnnnnnnnnnnnnnnnnnnnnnnnnnnnnccacgcgtccgtacggctgcgagaagacgacagaagggggagaatagagagatagaacagtgaagaagaaatgggaaggatattcacggtggagcttgaaggaagatcttacagatgcaggttctgcagaacccatctcgctcttcccgatgatcttgtctctcggtcgtttcattgccgtagaggaaaggcttacctcttcaaccgttcggtgaacataagtatgggtcctctagaggaaagactgatgctttccggtatgcacaccgtagctgacattttctgctgctgttgtggacagaatgttggctggaaatacgaatcagcgcacgagaaagctcagaagtataaagaaggcaaatttgttctggaaagaggagggatcgtggatgaaatcgatttatcaactgaggtttatatcgatactcatggtagcacaagcgacacagaagattcttaaatgttaccttttttctgtgtgtttgtcaagagcagagcttgttagtgtagaaatctgtagcatgtttatagagatgtgtatcaaacttgttgtgttgtttttatatctcgtagaaattttatgtgaattcgaatctttatttttacccccaaaaaaaaaaaaaaaaaaaaaaaaaaaaagcggccgctctagaggatccaagcttacgtacgcgtgcatgcggcgtcatagctnntagctatagtgtctggttcaatt

SEQ ID NO: 97730 - DNA, 492 bp, Arabidopsis thaliana columbia
  unsure (1)..(492): unsure at all n locations
ggaagaagagcaacgagggcgagagatatcttcttatccatggcggctattgctagtctgcaagcagttaatctcacatttaggcgacgtagcactcgatgtggaattgctgagccgagcggagagccagctccgatggggctgaagactagatacgaggatgggctggtggagagagtgttcatgggtctcttcgcgaggaagatggacaagttcgggtcgaagaagaagaaggacacgaaggagaagggtttttgggagtacgattacgagagcttcgtggaggtgtcaaagagagtnatgcagggacggtccagagtgcagcagcaagaggccgtgagggaggttccttctctctcatgctgcctccctggtgcttccttaaccaanttttaggcaatttgttcccacccaacggaattggcntcaagagttcaaatncccntctttnaantgcctttttttttacttngtggttagcccatcntaang

SEQ ID NO: 97731 - DNA, 778 bp, Arabidopsis thaliana columbia
  unsure (1)..(778): unsure at all n locations
cgtaattcacacatttcaccatcacgatgaactccttctacgccttatatcgtccaatcacgtcgcggtcagaattggcgatttccttcaactgtattctctactccgggagctttatcgattccggcaccgttatcactcgtctcccgccgaaagcttacgcggcgttaagaagctcgttcaaggcgaagatgtcaaagtatccgaccacgtcgggcgtctcgatcttggacacgtgtttcgatctcagcgggtttaagacggtgactatcccgaaagtggcgttctctttcagcggtggcgccgtcgtggagcttggttcgaaagggatattttacgtgtttaagatatctcaggtttgtctggcgtttgcagggaatagcgatgacagtaacgctgccatctttggaaacgttcagcagcaaacgctagaagttgtgtatgatggtgcgggtgggcgggtcgggtttgctccaaacgggtgtagttaagttagttaatgaaaaacagaacggggtaaattttaaatttatggatttggcacaaattagctttatccttaatcaagtgtgtaatttgggtaaagatcggaattcgtgatggtctttgaagtaattgtatagtaataagtgtgcatgatacaacaattacaagaacgcggccgnnnnnnnnnnnnnnnnnnnnnnnnnnnnnnnnnnnnnnnnnnnnnnnnnnnnnnnnnnnnnnnnnnnnnnnnnnnnnnnnnnnnnnnnnnnnnnnnnacgggcgaagaatcgtc

SEQ ID NO: 97732 - DNA, 776 bp, Arabidopsis thaliana columbia
  unsure (1)..(776): unsure at all n locations
nnnnnnnnnnnnnnnnnnnnnnnnnnnnnnnnnnnnnnnnnnnnnnnnnnnnnnnnnnnnnnnnnnnnnnnnnnnnccaggcgtccgcccacgcgtccgtacggctgcgagaagaaacagaagggggagagagtttaaatagaaaacgaattacttgtgtattcaaaccaaggaaagaaaacgagagaggtacgtagaagaaaatggctgccttatcagagaaagaggctgaagcttatctcgacgcaaggcctagatatccgatcgattggtttaagaaaattgccgcacggacacaggaccacaaatttgcttgggatgttggaactggtaatggtcaggctgctattgggcttgtggagcattacgagaatgtagtggctaccgatataaacgaagcacaacttcaacgagcaatcaaacactcaagaatcagttaccatcacactccaacaacgatatcagaagatgagatggtggatctactcgggggagaaaactccgtggatctcatagttgctgctcaagctgtccatttcttcgacctcaacgtattatacaatgttgcaaaacgtgttcttcggatagaaggaggcctaatcccctgttgggtatacaacgatatcattatctctcatgagatcgatcccataatgaagcgccttgtcgactctactttcccttttagaactcctattatgaatttatcatatgaacgggtcaagacattgacattttcttttgagaccatanggatgggttccgaaggaaagccc

SEQ ID NO: 97733 - DNA, 391 bp, Arabidopsis thaliana columbia
gactgaaagaaaaaaatgaacaaactctccaacgctttctctgtcctggctttcgccgatgaagatgctccaatggcttcttcttcttccactgggaaacaagaagaaagtgtaaatgggtcacttgaggatggagattacaagcaaccacttgtttggattgacttggaaatgactggattaaatgttgaagttgacaggatattggagattgcatgtataattactaatggagatttaacacaatcagtggagggtccagatttagttgtacgtcaaacgaaagactgtttggataaaatggatgactggtgtcaaactcatcatggagctagtgggttgacgaagaaagtgctcctcagtgcgataactgaaagggaagctgagcaaa

SEQ ID NO: 97734 - DNA, 447 bp, Arabidopsis thaliana columbia
tacggctgcgagaagacgacagaagggtgttcttaaaatgggctgcaacgaatctcggatatccatccttggcagagatagaagctgctccaccaacagctgagcttgagcccattcgttctgactattctcagctcgatgaagtcgacatgggaatgacatatgaagagctttcagtctatggaaggatgaggaagatattccgttgtggaccagtatctatgttcaagaatctatgttacaagtggggaacaaagctaagcccagcagaagtagctgagaaagtgaagtatttcttcaaatattattcgatcaatcgacacaaaatgactgtcctcacaccgtcttatcacgctgagagttactccccagaggacaacagattcgatctgaggcagtttctgtacaacagcaagtggccataccagtttaagaagattgacgaga

SEQ ID NO: 97735 - DNA, 403 bp, Arabidopsis thaliana columbia
gtagtgggcaaatgcagccgttgggtggatcaagttacccaagtggtcagcctccatcctcaggagtagtgtcgaaagtgttgagttcgatgaaaaagccagtgaccttgctcgatgtcacaaactttgtctcagttgagaaaagatgctcatccttcttcttatgggtggcgatggaggaacagattgcagccattggtgcctcccagggttgcctgatacatggaaccaacttctctacgcagctcttacgatgtgaagtgttaagatactataaagaaagtgcataacacctttattctgtatatgacattcgtaaatcttctagtgttgtgtgatgctatagaaaacacacttatatcacacgagacattctcagtataaaataacacattggtttggt

SEQ ID NO: 97736 - DNA, 597 bp, Arabidopsis thaliana columbia
tatacgactcttatagggaaagctggtacgcctgcaggtaccggtccggaattcccgggtcgacccacgcgtccgtagaagacgacagaagggtacggctgcgagaagacgacagaagggtacggctgcgagaagacgacagaagggtacggctgcgagaagacgacagaagggtacggctgcgagaagacgacagaagggggccgtcaaaggttaaacagtcgaaacaatggagattctgaagcttgatgtagcgaagtttccagaaattgaggatacaatcgaattaactaacccaaagagaaacgacgaagtagaagattgcgacgaccaacagaagcagcagctagctacacaagaagatgaagaggaagacgaattgagaaagcttctgctttcagatattggagaacttccgatttctcctccttcagctacacaagtcaattttgtttcttacttcatcacagattttactaaatcgggtcatgatcaatatatttaccgtcacgctaatggtttgtgtgtaattggattggctcctacgcatatagcttttaaggatgaacgtggaatcactagtgtcgatttcaatgt

SEQ ID NO: 97737 - DNA, 733 bp, Arabidopsis thaliana columbia
  unsure (1)..(733): unsure at all n locations
agctactacgcctgcaggtaccggtccggaattcccgggtcgacccacgcgtccgaaaatggggaagcttgtgattaagcatttgatggctaagggttgcacaaaagtggtggtagtcaacagaagtgaagagagggtttcagctatccgtgaggagatgcctggtattgagattatatatcgacctcttgatgagatgctttcttgtgctggagaagcggatgttgtgtttaccagcacagcctctgagacgccattgttcttaaaggagcatgtagagaatctccctcaagcttctccagaggttggaggactgaggcattttgttgacatctctgttccgagaaatgttggatcttgtgttggtgaagtagaaacagcacgggtttacaatgtggacgatctcaaagaagttgttgctgccaacaaagaagacaggatgaggaaagcaatggaagctcaaaccataatcacagaggaatccacacagtttgaagcatggagggattcnttggagacggttcccacgatcaagaagttaagagcttatgcagagagaatcagagtggcacaactcnaaaaantgcatgttccaaaaatggggagatgaatatcccccnagaaaaacnaccaaaagcggttgaatgacttnaagcccgaaggttntccgtgaaacagattccttaccnttggtcccaatggcnncattttaaaatttttnaccggaaantng

SEQ ID NO: 97738 - DNA, 1736 bp, Arabidopsis thaliana columbia
ctctctcgcttcttcaacgatcgcataaattccctctttgtctgctcgattcctgatctctagagtttgtgttcctgagacgaagggggtgtttcgtgtgtaattgagatattgagattattgctttgtaaaactcaaaatctatggcggtttctagcgccttcgttgttacaccgaagctggagaagctgttagcgaatcaccataatccaacgtattcttcttctccggccccgttggatgtaattgggatacgtgctcttccgatgaacaataggaacaagcgaggtctgatccagagagcgcgttgcgagatttctccgtctaataaggcagctagcatctcagctctcgagcagctcaagacttctgctattgaccgatacactaaggaaagaagcagcattgtggtgattgggcttagcattcacacagctcctgttgagatgcgtgagaagcttgccattccagaagctgaatggccacgagctattgctgaattgtgtggtttgaatcatattgaagaagctgctgtactcagtacctgcaaccgaatggagatttatgttttggctctatctcagcatcgtggagtcaaagaagtgactgagtggatgtctaagacaagtggaatcccggtttcagaaatctgtcagcatcgttttctattgtacaacaaggatgtcacgcaacatatatttgaagtctcagctggtctagactctcttgtcctaggtgaaggtcagatacttgcacaggttaaacaagttgttaaagtaggtcaaggagtcaatggttttgggaggaatatcagtgggctatttaaacacgcaatcacagttggaaagcgtgtcagaacagagacaaatatcgctgctggggctgtttccgttagctcggctgcagttgaacttgctctcatgaagcttcccgaatcttctcatgcatcatctgctaggatgttggtagttggtgctggaaagatggggaagcttgtaatcaagcacttggttgctaaaggttgcaccaaaatggtggttgtgaatcgaagcgaagagaaagttgcagctgtgcgcaatgagatgccgcctggcgttgagattatttataaaccccttgatgagatgctgtcttgtgctgcagaagctgatgtagtctttactagcacagcatctgagacaccattattcttgaaggagcaagtagagactctccctcctgttagagatgcgaggctctttgttgatatctctgttcctagaaatgtcgggtcctgcgtcgctgaaatagacggtacacgggttttcaacgtggatgacctcaaggaagtcgttgctgcgaataaagaagacagggtgaggaaagcaatggaagctcaggctataattacagatgaatcaaaacactttgaagcgtggagggactcgttggagacggttccaacaatcaagaaattaaggggatatacagagagaattatagctgcagagattgagaaatccttgcccaaaatgggcattgacatgaacaagaagatgaggaaaacagtagatgatctaatccgaggtatagtgaacaagctcctgcacggtccaatgcagcatttgagatgcgatgggaacgatagcagaacgctgagtgagacactagataacatgcaggctctgaacaggatgtatggacttgatgcagagatactcgaggagaagattagagcaaaggtggaaaaaaagtag

SEQ ID NO: 97739 - DNA, 2089 bp, Arabidopsis thaliana columbia
agaaccggttttgacccgatttgatttttcagcctcaaatctgacaaatcatattcacagcgatctccttcttccacatcgcaacccaatccctctctgtctcttcctcaattcttattctctctcgcaaaggtttggttttttgaagacagagaggagatttgagattttgggtttcaatggcggtttcaagtgctttcgttggttgtccaaagcttgagactttattgaatcaccataatctatctccttcttcttcttcttcgtcctctgtttcacagacaccattgggtcttaatggggttcgtgttcttccgaagaacaatagaaccagacgaggtttgatccaaaaagctcgttgtgagctctctgcttcttctgattctgcgtctaatgcagctagcatctctgctcttgaacaactcaagaactctgcagctgatcgatatacaaaggaaagaagcagtattgttgtgattggacttagtattcacacagctcctgttgagatgcgtgagaagcttgctatacctgaagctgaatggccaagagctattgctgaattgtgtggtttgaatcatattgaagaagctgctgtgcttagtacttgtaaccgtatggagatttatgttttagctttatctcagcatcgtggagttaaagaagttactgaatggatgtcaaagacgagtgggatcccagtttcagagatttgtcaacaccgttttctgttgtacaacaaggatgctacacagcatatatttgaagtctcagctggtcttgactctcttgtcctaggagaaggtcagatccttgcacaggtgaaacaagttgtgaaagttggtcaaggagtgaatggctttgggaggaatatcagcgggctgtttaaacacgcgataactgttggtaagcgtgttagaacagagacaaatattgcttctggtgcggtttcggttagctcagctgctgttgaacttgctctgatgaagcttccgcagtcttcaaacgtatctgctaggatgtgtgtaattggcgctggaaaaatggggttgcttgtgattaagcatttgatggctaagggttgcacaaaagtggtggtagtcaacagaagtgaagagagggtttcagctatccgtgaggagatgcctggtattgagattatatatcgacctcttgatgagatgctagcttgtgcttcagaagcggatgttgtgtttaccagcacagcctctgagacgccattgttcttaaaggagcatgtagagaatctccctcaagcttctccagaggttggaggactgaggcattttgttgacatctctgttccgagaaatgttggatcttgtgttggtgaagtagaaacagcacgggtttacaatgtggacgatctcaaagaagttgttgctgccaacaaagaagacaggatgaggaaagcaatggaagctcaaaccataatcacagaggaatccacacagtttgaagcatggagggattcattggagacggttccaacgatcaagaagttaagagcttatgcagagagaatcagagtggcagagctcgagaagtgcatgtccaaaatgggagatgatatcaacaagaaaacaacgagagcggttgatgacttaagccgaggtatcgtgaacagattcttacatggtccaatgcagcatttgagatgtgacggaagtgacagtagaacgctgagcgagacccttgagaatatgcatgctttgaacagaatgtacggtcttgagaaagacattttggaggaaaagcttaaggcaatggcggaacaacaacagaagtaaaagagaaaaataagaagatgttcatctcttttgacatataagattagcttccccacaaactctgagtaaattgcatagatcctatagcgatggatctatttgattcatttaatttgtgtgcaagagactaacaattctatcgtcaagtgtaagtgttgtgaagctataagcgagcttgttgcatgtttgttgcttcatagactcgagtgtaatggtattggtcccagtatcgttacatatatgtaataatgtataaactttggttcttgcaatataga

SEQ ID NO: 97740 - DNA, 374 bp, Arabidopsis thaliana columbia
cacacttcaaaaacgattttacaagaaataaatatctgaaaaaatgtcagagaccaacaagaatgccttccaagccggtcagaccgctggcaaagctgaggagaagagcaatgttctgctggacaaggccaaggatgctgcagctggtgctggagctggagcacaacaggcgggaaagagtgtatcggatgcggcagcgggaggtgttaacttcgtgaaggacaagaccggcctgaacaagtagcgattcgggtcaaatttgggagttataatttcccttttctaattaactgttgggattttcaaataaacgatctttgatcaagaattgcattatatatatataaatatattgcaaaattattagacgagcc

SEQ ID NO: 97741 - DNA, 646 bp, Arabidopsis thaliana columbia
  unsure (1)..(646): unsure at all n locations
nnnnnnnnnnnnnnnnnnnnnnnnnnnnnnnnnnnnnnnnnnnnnnantccccacttatcccccctttgggaantgtcccctcggtccgnccggatcccggncncccccacgccttcacaaacaaaacacacatcaaaaacgattttacaagaaaaaaatatctgaaaaatgtcagagaccaacaagaatgccttccaagccggtcaggccgctggcaaagctgaggagaagagcaatgttctgctggacaaggccaaggatgctgctgctgcagctggagcttccgcgcaacaggcgggaaagagtatatcggatgcggcagtgggaggtgttaacttcgtgaaggacaagaccggcctgaacaagtagcgatccgagtcaactttgggagttataatttcccttttctaattaattgttgggattttcaaataaaatttgggagtcataattgattctcgtactcatcgtacttgttgttgtttttagtgttgtaatgttttaatgtttcttctccctttagatgtactacgtttggaactttaagtttaatcaacaaaatctagtttaagttctaaaaaaaaaaannnaagggcggccgtcgtaccagtatccaagcttacgtacgcgtgcatgcgagtcaag

SEQ ID NO: 97742 - DNA, 439 bp, Arabidopsis thaliana columbia
ctagattataagttatataatcatataatattttgtgttcgattagtgtaacaaaaatggggttagagaggaaagtgtacggtttggttatggtatctttggtacttatggctattgcaacgatgtgttgtgtccaagctacgatcgacgaagaagcggctaaggatgaatcatggactgattgggcaaaggagaagatcggtctcaagcacgaagacaacatccaacccactcacaccaccacgaccgttcaagacgacgcttggagagcgagtcaaaaagccgaggacgcaaaggaggcggctaaacgcaaagcagaggaagcggttggagccgcgaaggagaaagcgggttcggcatacgagacagctaaatcgaaagttggggagggtttgggttctgtgaaagacaaggcctcgcagagttacgactcagctgg

SEQ ID NO: 97743 - DNA, 1103 bp, Arabidopsis thaliana columbia
ggagctccaccgcggtggcggccgctctagaactagtggatcccccgggctgcaggaatttggttatggtatctttggtacttatggctattgcaacgatgtgttgtgtccaagctacgatcgaggaagaagcggctaaggatgaatcatggactgattgggcaaaggagaagatcggtctcaagcacgaagacaacatccaacccactcacaccaccacgaccgttcaagacgacgcttggagagcgagtcaaaaagccgaggacgcaaaggaggcggctaaacgcaaagcagaggaagcggttggagccgcgaaggagaaagcgggttcggcatacgagacagctaaatcgaaagttggggagggtttgggttctgtgaaagacaaggcctcgcagagttacgactcagctggtcaagttaaggatgacgtgtctcacaagtcaaagcaagttaaagatagcttgtcgggagacgaaaacgatgagtcttggaccggttgggccaaagagaaaatcggaatcaagaacgaagacatcaacagccctaacttgggagagacggtatctgagaaggcaaaagaagctaaggaagcggctaaacgcaaagcaggagatgctaaagagaagttggcggagacagttgagacggcgaaagagaaggcgagcgatatgacgagtgcagctaaggagaaggcggagaagttgaaggaggaagcagagagagagagtaagagtgcgaaggagaaaattaaagaaagttatgagactgcaaaatcaaaagccgatgagactttagagtccgcgaaagataaggcgtcgcagagttacgactcagctgcgcgtaaatcggaggaagctaaagataccgtgtctcacaagtcaaaacgtgttaaagagagcttgaccgacgatgatgctgagctctgagaagttgggagaaactcatcgatgacttgaacagtgttaagatgttgatcttgcttttcttgttacaggtgtttaaatatgtaatcatgttttaatctttttcatgttcttttttatttttggtttagttgtgtgtatgtgttgatctttcggaatatacacattacgttcctg

SEQ ID NO: 97744 - DNA, 533 bp, Arabidopsis thaliana columbia
cccacgcgtccggccgcctcatcctcctcgtctcttctcgttagctctctcaatgaggagcccgatttagggtttcctccattggttatatcaattcgatcatctccacaaagctctcgaagactctttcggtgatctcatcttcttcttcttgtttagcctcctggaggttactttgtttgttactagttccaaaacatgccgaaagagaggaaagaacggtccgtatctcttgataagtataaacgatcgccactgtgttgtgaggcaagccttgctttgaagccgagtgagaaacaagttaaggaatgggaagaggctcgttgtcctgtttgtatggaacatcctcacaatgggattcttctcatttgttcttcttatgaaaatggttgtcgaccttacatgtgcgacactagccatcggcattctaactgtttcgaccagttccgcaaagcttcttaggggaaacctgctttgtctttacttcgtgggggggggggaagtaatgaaccaactgagatggaagatgtgga

SEQ ID NO: 97745 - DNA, 431 bp, Arabidopsis thaliana columbia
ggagactttcgtgtgcttatccaaagacgacgagaggagtcccaagaagtctagcggtatcaatcaaatctcttcttacttgaggagattccttggaaccatcaagaggaagcattatggctggggaacttatttcgtttggtatacaaaacctgtggaacctactgagtcaagaatgcgagctatttcagggagtcgaagatcaagtaactgaactaaaaagggatctaaacttgttaagctcttttctgaaagatgcagatgcaaagaaacatacaagtgcggtggtgaaaaactgtgttgaagagatcaaggaaattatctacgatggagaggatacaatcgaaacatttgttcttgagcaaaacctgggaaaaacacgtggtatcaagaagagtatcagaagacttgcttgcattattccagatcga

SEQ ID NO: 97746 - DNA, 601 bp, Arabidopsis thaliana columbia
  unsure (1)..(601): unsure at all n locations
nnnnnnnnnnnnnnnnnnnnnnnnnnnnnnnnnnnnnnnnnnnnnnnnnnnnnnnnnnnnnnnnnccacgcgtccgaaacaatccttgttctcgccgaaatagagaattttgtgaatctgggtttttagttcaggtgttaatataagattttgatcaaaagaagacgagattcgatccgatccgatctgattgaagaagaaatggcgaatctgtatgtgaaagcggttccaccaccggatatgaataggaatacggaatggttcatgtatccaggagtttggacgacttacatgcttattctcttcttcggttggctcgttgttctctctgtctctggttgttcccctggaatggcttggactgttgttaatctcgctcacttcgttgtaacgtatcacagcttccactggatgaaaggaactccttttgcagatgaccaaggaatctacaatggtttaacttggtgggaacaaatggacaatggtcaacagcttacccgcaaccgcaaatttcttaccctaggttcctgttgctctgtacttgattgcatcgcatacaacagattacagacatccatggctgttcctcaacacactcgct

SEQ ID NO: 97747 - DNA, 761 bp, Arabidopsis thaliana columbia
  unsure (1)..(761): unsure at all n locations
nnnnnnnnnnnnnnnnnnnnnnnnnnnnnnnnnnnnnnnnnnnnnnnnnnnnnnnnnnnnnnnnnnnnnnnnnnnnccacgcgtccgtacggctgcgagaagacgacagaagggggcacaaaagatgtgttagtagaagaagattggagtgaattgaggaagcctagtgtagtagcttctgaagatttctggactaataccactttagatatggaaagcaatgctcacgggagtgtttcttcaatcagtacaaccaatctgactattgattctcaaggatgtggttccagctctaatgaacctgctgaatttgttaaccatggtcttgtgctatggaatcaaactcggcagcaatgggtgggagataaaagatccgagagccgtaaaagcgttggtcgagaaccgattctaaatgagaatgtgacttatgagagtctacttgggagcaacaagcgatttccgaggcctatacctcttgatgaaatggtgcagtttcttgttgaagtttgggaagaagaaggtctatacggctaaaagattctttttacacatttacaattgtaaagagagctgagaaaaatatatacacccaacaaaaaatatttgttgatggatcaaattttataaaattctcttgatttggagtaatttccccaaaaaaaaaaaaaaaaaaaaaaaaaaaaaagcggccgctctagaggatccaagcttacgtacgcgtgcatgcgacgtcatagtnaactantagtgtcagctaaatt

SEQ ID NO: 97748 - DNA, 737 bp, Arabidopsis thaliana columbia
  unsure (1)..(737): unsure at all n locations
ctactacgattcactatagggacagctggtacgcctgcaggtaccggtccggattcccggggcgcccacgcgtccgcccacgcgttcgtacggctgcgagaagacgacagaaggggattctcagtgtcctgaagaacaccaatcgtcctgtaaaattctggtttattaagaattatctctctcctcaatttaaggatgtgattccacatatggcacaagaatacaactttgagtatgagctgattacatacaaatggccgtcctggttgcataaacagaaagaaaagcaacgaattatttgggcctacaaaattcttttccttgatgtcatatttcctctctcattggaaaaggttatatttgtcgacgcagatcaaattataaggacagacatgggagaactgtatgatatggatattaaaggaagacctctcgcgtatactcctttttgtgacaacaacagggaaatggatggctataaattttggaaacagggtttctggaaagaacatttacggggtaggccataccatatcagtgctctatacggtgttgacttggttaaggttccgagagccagcggcaggagataatcctaaggggcattctatgagacgcttaccagaggatcccaacagtttgtccacctaggtcaggatcttcctaattnttntnagnaanctgtcccatatttctantnncccaagnggnggttttgggttnaancctggtttgga

SEQ ID NO: 97749 - DNA, 536 bp, Arabidopsis thaliana columbia
  unsure (1)..(536): unsure at all n locations
cacacgcgtccgcccacgcgtccgcccacgcgtccgcacaaaacaaaaaatattaagaaagtgatattatgacttgcagccaaacactcggaaacaacaacaccaacaaataccagatctgcgaggagatcggccgtggccgtttcggcaccgtctctcgcgtctacgctccggccaccggtgatttcttcgcttgcaaaaccatcgacaaagcctctctctccgacgaccttgaccgtgcctgtctcgacaacgagcctaagctcatggctctcttgtcctatcaccctaacatcgttcaaatccatgatctcatcgacactgattcgactctctccatcttcatggagctcgtccatccctctgtttcgatctacggccgtctcgtctcttctggaaccttcttttgagcctcagaacggcgtcgttcgctaaacaagattctccagggggttttcggatttgtnaccgntngggnntngtttaaaaggggtttttaaccggggacatttttggnagntctnnggancgntngg

SEQ ID NO: 97750 - DNA, 504 bp, Arabidopsis thaliana columbia
  unsure (1)..(504): unsure at all n locations
aaggctagtgctgcatctccagcgaaggaaattccggtagcaagaccgataattgtagaggaagaaaagtatattttagaaaagacacagttcgaggctatcgcttcttctagtgaaatccgcgaagctctaaaggatgaacctcttcagaaactcatctacagtattgatagttcttccaaccctttacaggaactcgatgaagccatgggaatagaagcattccgcgaattcacagacaagattttatcaaacatttcgaagagtaatgacgaccagtcagtgtagtcgcttcaaaactcccagtagtattcttgcttagtgtattcgttacatagtttgagaaaagtttcagagaaatgtttactggctataaaaacgagccgttttggtttacccnnnnnnnnnnnnnnnnnnnnnnnnnnnnnnnnnnnnnnnnnnnnnnnnnnnnnnnnnnnnnnnnnnnnnnnnnnnnnnnnnnnnnnnnnnnnnnnnnnnnnnnnn

SEQ ID NO: 97751 - DNA, 832 bp, Arabidopsis thaliana columbia
  unsure (1)..(832): unsure at all n locations
nnnnnnnnnnnnnnnnnnnnnnnnnnnnnnnnnnnnnnnnnnnnnnnnnnnnnnnnnnnnnnnnnnnnnnnnnnnnccacgcgtccgtacggctgcgacgacagaagggtacggctgcgagaagacgacagaagggggattgaggtttttctcttcccctgaatcgctgtgctcgttgtgagagagtgagagatgtgtcctcgagctactcaaacatgccgaaatctgcgagaaggttgtatccaaatacaagtgtccttcttgtcttgttccttactgctcattgggttgtttcaagatacacaaagagactccatgtgctaaaccgtctgatccttcttcaaccgaagaaaagccagcttctccagcaaaggaagtcccggtgaaaagacctgaggaagctaatgatgttgaacagaagacacagcaaaaggctagtgctgcatctccagcgaaggaaattccggtagcaagaccgataattggagaggaagaaaagtatcttttagaaaagacacagttccaggctttcgcttcttctagggaaattccccgaggctctaaaaggtnaaccctcttcagaaactcatctagcaggattgatagtttcttccaaccctttacaggaactccatgaagccctggggatagaaaccttccccgaatcacaaaccagattttttcaacttttccaaaatcaatgacagcaggagtgggtccctttaaactccaggagatcttgcttatgtttccgatctaggttgaaaaaggtcaaaaaagttactcgctttaaaacgcccgtttggttcaccnnnnnnnnnnnnnnnnnnnn

SEQ ID NO: 97752 - DNA, 666 bp, Arabidopsis thaliana columbia
gaatctcggagaagggaggaaaaatggcggccaaaaccctaatcaggtcaggagcttcgttgatgaatcggtttctaacgaagccgacaacgaatatcgtgcagaacaatctcagatcttcttttcaatacatagctcctcagggacaagaaatcccgccgtattttttcccgtcgttgtcgaatctacagagctcactcatttcgcgccctaacgacactgcttcgctccaggaactcaacgaacgtggatttctttacccttctggtcttccttcactcgaattcttcttgccagaagttgatccttcaagtgagccattgcttctgtttcctaagaggacattccaaccaagcactataaggcgtaaacgggaccatggattctttgctcggaaggcaaccaaaggtggacggagagtcatagctcggagaatagcaaaagggcgtcacagagtcccagcctagaatctctctaatctttccattgatgaatctccggttattcaggctagaaaacctgaaacttccatctcctaaataacttgtcttcttatccatgttctcatgtgttgttgatctcagaattgatctgaagttaaaattttaacgatctcagctcttttgtaatggatagtttatatcaatgaatccctttttcctcatg

SEQ ID NO: 97753 - DNA, 497 bp, Arabidopsis thaliana columbia
  unsure (1)..(497): unsure at all n locations
nnnnnnnnnnnnnnnnnnnnnnnnnnnnnnnnnnnnnnnnnnnnnnnnnnnnnnnntccggaactcatgggtcgaccacgcgtccgcggacgcgtgggagacgacagaagggatcccggggtatatacctttacttgtgaacatccttccaggaccgatgattccccaaatgatcgacgcgttgtagaacactacatccccagggcaagtccacggactactctttgggagcatatctgtgttacagatgttctcgactgaagaaagcaaccaccatgtggtcccgagggagacagttgaagcaacaatagtcgcaacgagttgaacgatgaacatagatctcggaggaatcttcatgtagtggccaagtttgaagtctccgacaaagtacaaggcttgagctatactcacagaaccataagtcttaaaagccacattggcaagtggctttcccggatacaagaacccgatgatcagtccgatataacattaagacc

SEQ ID NO: 97754 - DNA, 419 bp, Arabidopsis thaliana columbia
ggaagttgcagagaatctagcgagaccaatggctactctggtctcgtctcaaacttacatctaccattgtcatattagtaaacaagctctttatcaggcaaaagaatcatactctcatcgtagaatttcccgtcataatcacagagaaagactcgatttttctcatagaaaccatagattgacaataactagaaagcagcaacctttgtctttcaacaccgtgtgttttgccgcagacgagccctccgaaatcagtgctgatgctagaatccgtagtgaggttctgtctccgttcagatcagtccgtatgttcttctacctcgcctttatagcaagcggttcattaggaggactaatagccacttctaggctcataggtgccctggcgaatccggctagatcaggtgaagttcttgaga

SEQ ID NO: 97755 - DNA, 555 bp, Arabidopsis thaliana columbia
  unsure (1)..(555): unsure at all n locations
gatgcgacgacagaagggggagtgcaagagtccatactctccatcagagagactcaaatccaattctccttactgcaacagctcaaatttggaatcttttgtaaaaacccagatcagcggatctcgaatggcgaagcacacggcagcgttgaaggtgggactagctttactggccctcagcatgattggctacatacttggtccaccgctctactggcacctcacggaagccttagccgtttcagccacttcttgctctgcttgcgtctgtgattgctcttcgttgcctcttctcaccatcccaactggactcagcaatggttcattcactgattgtgcaaagcgtgatccagaggtgaacgaagacacagagaagaactacgctgaactttttaacagaggaactgaagcagcgtgaagcagcatcgatggagaacacaaacgggtaggcacgggtctnctngaggccagaaggtaacatnatnttccnaaggggnnaggttaggntaatngggnnttggnctttttaagagcaagaagaagcgggaanccntc

SEQ ID NO: 97756 - DNA, 382 bp, Arabidopsis thaliana columbia
gactgtatgttgacaaattgaatagtctctgatgatttcgatcagaagagaagccacggggggaacgctagcacttaaaggacgaaagctgtgttagtattctctccactgtaaaggacaagatgtcccagaagcgaaatcttccttcttggatgagttctagggatcccgagattactccgagtaagtctcattgtaagaagcctaaggatgaaggaccaaccgaagagcacaacagtagaaatgccccttccaacaagtcagaacacgccgagccaagttcatataccactgaattctctaaacttatggaaggcgttgtttttgtactttcgggctttggtaatcctgagaggagtacactgacgtcacaagccttgac

SEQ ID NO: 97757 - DNA, 539 bp, Arabidopsis thaliana columbia
  unsure (1)..(539): unsure at all n locations
cannnnnnnnnnnnnnnnnnnnnnnnnnnnnnnnnnnnnnnnnnnnnnnnnnnnnnnnnnnnnnnnnnccacgcgtccgaagaagggttggaatcagtttgtggaaataagttcacgagcagtgcttctgcatcgacctgttcagctaaatcggtcaccactgatctgaatcttagggtaagttcagtcaccacaggatccggtctcaagaagcatttggatagcaaagatttttctcagccacaatctgtgtcctcctattcctttgataacccaagggacctcaacgcagagagtttcaagattatttacagaagattaaccgatatggtttcaggacaagatgaggctgctagagttatcagctgtgcactgtcacaaccgcctaagagtgtcactcgaagagatgtttggcttaatttggttggtcctgatactgtaggaaagagaagaatgtcgcttgtccttgctgagattgtgtatcaaagcgaacacagatttatggccgatgatcttggtgccgcggagcagggaatggg

SEQ ID NO: 97758 - DNA, 435 bp, Arabidopsis thaliana columbia
aaaaataaaataaaataaaaataagccaaagacaaatttaaacctccgatttcaaccttctcggcgaagaagaagaagaagaagagaaaatgacgatttgcatgtgttgcgattcacatctcgtagcgaaatcgattctaaatccatggaattctcctaggataatgaagctaggtttcgtaccagtcgttcgccgttttccagctactactaccgtcaaggcttcggcggtggattcacctgagagttcttcaaatttcgccaagcgtatggatcgagcttggattatctcacagcaaccaagtcctgttggatgttcatcgtgcaattcaaagggtcatgtggaatgcaaatggtgtgcgggtacaggattcttcatccttggtgataacatgctttgccaggttccctcaaggaatacttcatgtgtaatct

SEQ ID NO: 97759 - DNA, 575 bp, Arabidopsis thaliana columbia
  unsure (1)..(575): unsure at all n locations
ccccgttnccngntnttnncccnnaaggncnccgcggggntcccccgggggntctcaaattccccaagcgtttggtccaaggctggatttccccacggcaaccaagtcctgttggatgttcatcgtgcaattcaaagggtcatgtggaatgcaaatggtgtgcgggtacaggattcttcatccttggtgataacatgctttgccaggttccctcaaggaatacttcatgtgtaatctgctctggacagggttctgctagctgtagcgattgcaaaggaacggggtttcgtgccaagtggttggaaaaacctccagtgccaacataactgatgaacaaaagcaagttaagctttttggtctttgatgatttcttatggaggaaaaatgtttatatattgattcaagtggaacatgaatcagatatgcatatatctttatacatgtgttaagtatatatatgtaagttcatttattcatttccccttgttctgtctgtacnnnnnnnnnnnnnnnnnnnnnnnnnnnnnnnnnnnnnnnnnnnnnnnnnnnnnnnnnnnnnnnnnnnnnnnnnnnnn

SEQ ID NO: 97760 - DNA, 543 bp, Arabidopsis thaliana columbia
  unsure (1)..(543): unsure at all n locations
nnnnnnnnnnnnnnnnnnnnnnnnnnnnnnnnnnnnnnnnnnnnnnnnnnnnnnnnnnnnnnnnnnnnnnnnnnnnccgggcgtccgtacggctgcgagacgacagaagggtacggctgcgagaagacgacagaaggggggaatccagaggttttgtttctgaatggaaacaagtttttgggagttttgattgtgcctccaacaagtttcttggcatccaacaggaaggggatgcaaagaagtatgtgggtgttccgggcatgaactctatatctaaggccttgtgtaatgagtctggtgttaagagtatgtttggaactggtattgccaagatggaatggttggaagaagagataccatggttgttgacagattcaaaaggagaaaatttgggtcgtttcgatggagtggttgcatcagataaaaacattgtttctccaaggtttactcaagtaactggactcccaccgcctctggacttaagtctagtcccggagttggcgactaatgctgcaaaacattcctggttctacatgcttctct

SEQ ID NO: 97761 - DNA, 770 bp, Arabidopsis thaliana columbia
atctctctgtctctctctgtatctctctctctcttcttccccgcgtcgatttcacattttctcttttaagacagctttgaatctacagacaacttcatttttaccaaaatttctgtttcttcaaaggattgaactttcatatttctctcttgcccagttctgagttattgcaatcagaagttgtaaacacttttcctgtctctttctgctacccgaatttatcttctttagcgtctgtctctttcagcggacgtgtcttgtctctttaaggtaatttcaagacttaaacttgaagtatctctggccttcttctgctgtctgtttcatttttgaaatcgatttggagattagatctgactcagcttcgactaaaagccattgctttcgcctttggattgttgattccctagtggatgttctttatctctttaaaaagggcctctcttttaaatcaatttttgctgaacctgcccaattccgaaactttggtgcaaggctcctcttgggctctggtaatcggtttcgcatcaatccttatattgagttgaatctggaatcagattccatccttggtgcttatttgggattctattgaagaccacctatctgaattgggtttcctccgtggattggattagtgggtagggaatgaagaaaatggtttacgagcctggtttcattcagagacccatttgcttcgggccagagacctggtagctcaccttccagggtttagaccttccaccaccgaaaaagggtggttccttttc

SEQ ID NO: 97762 - DNA, 426 bp, Arabidopsis thaliana columbia
cccacgcgtccggtacgattctagtgggtatggtgagcctaaactggctctgatcaggcggtggatcaacggtgttgttagtcggaaagtgaaatatctcggtgttttggatgattcatgtgataattatgagttcgagatgcctccaaccctttacacttgtgagaccttagtatacttaacgctcgatggactatccttggctagtcccaagtttgtttctttaccttctcttaaagaactccatctaagtatagttaagtttgccgaccatatggcgttggaaacactcatctcacagtgcccagttctagaaaacctaaatatcaacaggagtttctgtgatgattttgaatttacatgtgtgcgttctcagtcactattgagcttcactcatgttgcggacactgatgaaatgttgaatga

SEQ ID NO: 97763 - DNA, 694 bp, Arabidopsis thaliana columbia
  unsure (1)..(694): unsure at all n locations
gctggtacgcctgcaggtaccggtccggaattcccgggtcgacccacgcgtccgggaacaaacaaaggaagcttgtttttgggtgatgttgctacccaagtgaagaacaacaacttcactgctgatgtcaaagtttccactgattcttctcttttgaccactcttacctttgatgagcctgcccctggactgaaagttattgttcaggctaagttgcccgatcacaaatctggaaaggctgaggttcagtatttccatgactatgctggtatctctaccagcgttggattcacagctaccccgattgtcaacttctccggtgtggttggaaccaatggtttgtctcttggtactgatgtggcctataacaccggatctggcaaccttcaaacatttcaaatgctgggtttcaactttcaccaagggtgattttgacctgnttccntcattctgaatgacaaaagggtgagaaaatttgaatgcatcctacttaccagattgtaaggcccgttggctttgggtgggggtnaggttaggcacaactttaanggcccaaagggnncgncattaactttnggnccttaaaangggttttncccattgcccnaagttanggaagggtacaatgttggntgggaangggttnnncacatgngggggccaaggggttttacgttttngggggtgtnaaggg

SEQ ID NO: 97764 - DNA, 1159 bp, Arabidopsis thaliana columbia
ttactcttcttctcgacttcggaatctttcaaagcttcttcgatttttccagaggcaatcatggttaaaggtccaggactctacactgaaatcggcaaaaaggccagagatcttctgtacagggattaccaaggagaccagaaattcagtgtcaccacttactcttcaactggtgttgcgatcactacaacgggaacaaacaaaggaagcttgtttttgggtgatgttgctacccaagtgaagaacaacaacttcactgctgatgtcaaagtttccactgattcttctcttttgaccactcttacctttgatgagcctgcccctggactgaaagttattgttcaggctaagttgcccgatcacaaatctggaaaggctgaggttcagtatttccatgactatgctggtatctctaccagcgttggattcacagctaccccgattgtcaacttctccggtgtggttggaaccaatggtttgtctcttggtactgatgtggcctataacaccgaatctggcaacttcaaacatttcaatgctggtttcaacttcaccaaggatgatttgactgcttccctcattctgaatgacaaaggtgagaaattgaatgcatcctactaccagattgtgagcccgtcgactgtggttggagctgagattagccacaacttcacgaccaaagagaacgccatcactgtcggaactcaacacgcgcttgacccattgaccacagtgaaggcaagagtgaacaatgctggtgtggctaacgctctgatccaacatgagtggcgtccaaagtcgttcttcaccgtttctggagaggttgattctaaggcgatcgataagagtgccaaggttgggattgctctcgctctcaagccctgagaagataccaccaaatgggccctgaagtgggtagaataggtgttatttctttttcgtcttcaaatctttggacaaatcgctgtctggtttgctaaacaatctttcatttgttttttttgttcggtgttgggatttgtagaaaataaaagagaaaaatactattgaaaggatcgtctttgacgataaagaaccattaagatcgttttgcggccgctctagaggatccaagcttacgtacgcgtgcatgcgacgtcatagctcgtctggagttcac

SEQ ID NO: 97765 - DNA, 828 bp, Arabidopsis thaliana columbia
acccaagcgtccgcccacgcgtccgctgaaatattcatcgcaattcgtatcggtttaaagtaaaaaagcaatgggaggtggtaaagacaagcatcatgatgagcaagagaaaggatttcatggttttccaggaggtggacattacccacctgctcaaggaggttaccctcctcaaggttacccaccacaacaagggtatcctccagctggaggctacccacctgccggatatcctcctggtgcttaccctgctgcgcccggtggttatcctcctgcacctggaggttaccctcctgctggctatcctgcacctggagctcaccattcaggacattctggtggtggactcggaggcatgatagcaggtgcagctggtgcagccgcagcagcttatggagctcaccatgttggtcacgcctctcacaacccttacgggcatgctgtaggacatggagggtatggccatgcccctgctcatggctttggccatggtggtcatggtaaattcaagcacggaaagcatggaggcaaattcaagccacggaaagcatggaaagcacgggaaacatggcatgtttggaggaggaggcaaattcaagaagtggaagtaatctcaaaaaccccacctttgatcctctcctccagtatagtctcattacctgaccgatgtttctaataatcccccttcaaacatatttcattttaactatgtcggtttagagattactggttgaggaaataattggagagtgctagtataaaccttatggtatctgcagcagaggtttctttaatctctcaatagtagatgctttgaaacttatctat

SEQ ID NO: 97766 - DNA, 503 bp, Arabidopsis thaliana columbia
  unsure (1)..(503): unsure at all n locations
ttttacgacagaaggggggaatggctgggcaagaagcaagtcctgcttccttgtttcagttatatgttgattatgggcgtcttacagaggcaactaatttgctacttgagtacatggaatcatttgcttcatcgaaaccagcagaggtattgaagaggaaaaaggtatccggagtttggtttccgtgcacaacagtagaaagactatggtgggagctagagaaaacaatgaactcaggacgaatggtggagcaatgccataagctgaaggaacaacttcatcatgcattactcaatcacttaaaactgcttaaggtggactcaaatgatgctgtatcctctgcaaccggttaaagaaagtcttgattgttccgtgtgaatattattatatctgtatcaaaatcgtatcaggcttttgtttctcgttagtctttgtgtcatcaaaacaaatcttgcatcgttgataaactcgaaagaccaatgtaatctaaattctcttanccc

SEQ ID NO: 97767 - DNA, 501 bp, Arabidopsis thaliana columbia
  unsure (1)..(501): unsure at all n locations
agtgtgtataaacaaggaagggccagtgataagtcccttgggcccttggaaatctagatggtcgagccagggactttcgataagctcatggattatgcgataagcttgggtgcatcgatcaatcagtccaacaccccaaggtgtgtgaagtttgctccgctccttgagcttttaaactctagggttgttgatagttacttcagccccaagtgtcctaaatggtcccctggtcccaagcaatgggggagtacctaaagaggaaaccttggggaagaagaaagactctctatgaagtagaaggttctgttttgtaatccaatcaatatcgacaaaagtgataaattactatgtccgtttgttccaatctaaatcttaatttaattttgccttactgtttttgttttgaaatatgtttagattctagtcacacgtacataccccaaaaatctcacctaagcgactcttttaagtnnnnnnnnnnnnnnnnnnnnnnnnnnnnnn

SEQ ID NO: 97768 - DNA, 512 bp, Arabidopsis thaliana columbia
  unsure (1)..(512): unsure at all n locations
caagtccataggcccgcttgagatcaagattgttgagccagggacattcgataagctcatggattacgcaatcagcttgggagcatcgattaatcagtataagacgccgagatgcgtgaagtttgctccaattatcgagctattgaactcaagggttgttgatagttacttcagccccaagtgtcctaaatgggttcctggtcacaaacagtgggggagtaactaagatggaatgtggaacgtgaagagactctctttgagctagaaggtttgggacttggacttgcaaatgatgatgtcttctctaatcttaattttagtttaatcttttgttcttttttttttgttatccttttaatatccatagtccctgtgggtttgaaaaccagttgtacaaaaggcaaatcatgttttctccaaccaactctcaaaaaaagttctaaaacatccaaatttttctattgtttnnnnnnnnnnnnnnnnnnnngggagtggcnnnnnnnnngtaccta

SEQ ID NO: 97769 - DNA, 789 bp, Arabidopsis thaliana columbia
  unsure (1)..(789): unsure at all n locations
ggcattagagccctttgcaggaacttggccagtgtatcagcatgactgagttgcagctcgatcatactgcagctacatcaaatgtcaatcctggagatcatgttctagggatctctcctacgtcatctctctctccaggaactcagagtcgcctgcctcttattgaggctttctttgttctctgtgagaagattcaaactccgtcaatgttacagcaggatgcaactgtgacagcgggagaagtaaaggagtcgtctactcatggttcttcatcgaaaaccattgtagattctcagaagaaaattgatggttctgttacattttcaaagtttgcggagaagcacaggcggcttttgaattcatttgttaggcaaaatccgagtttgctggagaagtccctttcaatgatgctgaaggcaccaaggctgattgattttgacaacaagaaagcgtacttcaggtcaagaataaggcaccaacatgatcaacatatttctgggccattgcgtattagtgtccgccgagcttatgtgttggaagattcatacaaccagttacgtatgcgctccccgcaggatcttgaagggacgtctgaatgtgcagttttcaaggtgagggaaggtatttgatgcccggtgggtctaaccagagaattggtatccagttatttgtcaaggggtatactttgacaaagggggcgtactttttantanccnttngaaataatgccaccttccaaccggatcccaattnttnttnccaaactggacattttnanacttnaatttc

SEQ ID NO: 97770 - DNA, 405 bp, Arabidopsis thaliana columbia
ggaggacactgtgcagatcactacggctcattcacaggctgtgttttctgattcctacccgccttcgtcttgtgtgtttaaagagaatgttgttcagttcatgaagccattgttggagttttttcagcagattgggtctcctttttgtttgaatgcttacccttttttggcgtacacttataatccgaaggagattgatatcaactatgctcttttcaagccaacggaagggatatatgacccgaaaaccgatttgcattacgataacatgcttgatgctcagattgatgctgcttacatggcgttgcaagatgctgggtttaagaagatggaggttatgatcactgaaactgggtgggcttctaaaggggattcagatgaaactgcagcaacaccagagaacgc

SEQ ID NO: 97771 - DNA, 600 bp, Arabidopsis thaliana columbia
tacggctgcgagaagacgacagaagggggagttcaaaaattcaattcaaagaataatttctttccataaaaagattgttgtggattaacttctttcttaaaagaatctcatacccgtcgaatcttcttcttcaacctttttctgcgtttttaatattttccctacaaaaagattctcaaaatcgttttacataaacccgatcttgtcaatctccagaaacaaaaaaaaaaatggcgatcaagacaaagactagtctaattccaagttgttcatcacctgaggatctaaaacgcgttttgcaaacgctaggttcgagctggggagatgtagttgaagatctggagcgtcttgaggttgttccgttaaaaggagctatgactaacgaggtttatcagattaattggcctactttaaacggtgaagatgttcatcggaaagttcttgttcggatctacggtgacggcgtttgaccttttctctaacagaggtgatgaaatcaaaacgtttgagtgtatgtctcatcatggttatggtcctaagcttcttggtcgtttctctgatggtcgtcttgaagaattcatacacgccagaactctttct

SEQ ID NO: 97772 - DNA, 539 bp, Arabidopsis thaliana columbia
gggtaatgaagggataaagaaaagtgaaccaaaaaacataacaaatggaagtagtaaagagaagaaagaggagaaacctgaggtgataaagaaaaatggtcaggagaaaccaaagtttgtagagggaggacccagattagagagagaacaagacgttgtgggtactagggattttagagtgcaagacttttcaacagcaggcgtcaagaaccttactgctgagagaattcttggcaaacggaaggatcttgagacaaatggattgctgtatggtgagtccttccctgaccgaactcttttttcagttcccatagataatatatatgtcttgtcgtccaaaaaaagaaaaaagttatatgtgatgtaccttatgtcttactcttgataactcattgatgtctttatatattattagtatattcattttcccaaaaaaaaaaaaaaaaaaaaaaaaaaaaaagcggccgctctagaggatccaagcttacgtacgcgtgcatgcggcgtcatagctctatctatagtgcagctaattcaag

SEQ ID NO: 97773 - DNA, 777 bp, Arabidopsis thaliana columbia
  unsure (1)..(777): unsure at all n locations
tnnnnnnnnnnnnnnnnnnnnnnnnnnnnnnnnnnnnnnnnnnnnnnnnnnnnnnnnnnnnnnnnnnnnnnnnnnnnccacgcgtccgcccacgcgtccgtacggctgcgagaagagacagaagggaaagttgacgagaagagaaacagtacccatagaaactctgctatgtcaaaaaagtctgaaagtgcggttctccgagtatcaccttgcatggatcagaaaggagctgaggttaaagttaaaccagtggagcaaaatgataaggcaaagaaacgggaactacaagagaagaatcaccgcagggacagtgtgacaaagagtgataagccattgggtaatgaagggataaagaaaagtgaaccaaaaaacataacaaatggaagtagtaaagagaagaaagaggagaaaactgaggtgataaagaaaaatggtcaggagaaaccaaagtttgtagagggaggacccagattagagagagaacaagacgttgtgggtactagggattttagagtgcatgactttccaacagcaggcgtcgagaaccttactgctgagaagattcttggcaaacggaaggatccttggacaaacggattgctggatggtgagtccttccctgacgaactcttttttcagtgaaatagatatatatatggcggggcgcccaaaaagagaaagtatatgttgtgtacctaggcttactcttgggacgagtgatggcttatatatatacgttatccattttcccaacaaaagacncttaacgacaagggg

SEQ ID NO: 97774 - DNA, 406 bp, Arabidopsis thaliana columbia
ggggaagttgaaaatatgaaaattgtaaatgacactgtaatgttgtgtgggaatctgaatgcagatgaagctacgcaggcgacacctgagcctaataatgcagaaccgtatccagactataacctggtggtcacagagagggaaacaatcatggaggttgatgagccggatccagatgatcaagaaatccagaggatccaagactctgttaccatcatctctaaccgtctcaagaaagccataaaggccttgagaaatgaagtcagccccggtcaagcaaccactgtgttacaaatgcttctcaaaatagtcaggaacatcattgaacaaccaaatgaaatgaaattcaaaaggctgcctaagggaaatcctgcaagtaggcgcaacattctcaactttccagctg

SEQ ID NO: 97775 - DNA, 1029 bp, Arabidopsis thaliana columbia
  unsure (1)..(1029): unsure at all n locations
actctttactctcttctcttctcacatcaattttttatagttctctcttctccggcaagaaaagatgcctatgaagtcgttgaggaatgaccatggaacccttaaggccatgatcggatccgatttcaacgagctcactatcgctgctaagaacctagctacacacgccttcacactcactggtttaggctttggtacctctgtcctcgaatgggttgcttcaatcgccgccatgtaaccattctctctgtttctatgtctctttcctctatccgtttcttgtgttgatcttgatgaggttttgatgtaataaatgcagatacttgttggtggttggatcgaaccaattggaagacgaatatgctcacatcacttctcattccttacatccttcttcagtcttccttccttgatctttggtattttcagagnagaaattggtaaatggattgctttcgtagctgttgttgtacaactcttctttcctaaacacgccagagaatacctggaattaccggtggctttggttcttctcgccgtggtggcaccaaatttgattgctggcacattcagagacagttggattggtttagctatatgtttaggtattggatgttacttgcttcaagaacacattagagcttcaggtggattcagaaatgcatttactaaagccaatggtatctccaacaccgtcgggatcatctgtctcgtcgtcttccccgtctgggctcttatcttttaagttaactcttcagtttctttttccatttgtcttttttttttcatgtaagagtgattgctttgtacgatctgtctctcctcgtaactctatcaatgaatgtgatttgaataagaattgcttcagcaataagatatcatcatgaggtgttagtgtggaataaatctcctctttcatcattatagctttaaaaaaaaaaaaaaaaaaaagnnnnnnnnnnnnnnnnnnnnnnnnnnnnnnnnnnnnnnnnnnnnnnnnnnnnnnnnnnnnnnnnnnnnnnnnnnnnn

SEQ ID NO: 97776 - DNA, 733 bp, Arabidopsis thaliana columbia
  unsure (1)..(733): unsure at all n locations
tatacgactcatatagggaaagctggtacgcctgcaggtaccggtccggaattcccgggtcgacccacgcgtccgcccacgcgtccgctctttactctcttctcttctcacatcaattattcatagttctctcttctccggcaagaaaagatgcctatgaagtcgttgaggaatgaccatggaacccttaaggccatgatcggatccgatttcaacgagctcactatcgctgctaagaacctagctacacacgccttcacactcactggtttaggctttggtacctctgtcctcgaatgggttgcttcaatcgccgccatatacttgttggtgttggatcgaaccaattggaagacgaatatgctcacatcacttctcattccttacatcttcttcagtcttccttccttgatctttggtattttcagaggagaaattggtaaatggattgctttcgtagcctgttgttgtacaactcttctttcctaaacaacgccagagaatacctggaattacccggtggctttgggtcttctcgccgtggtggaccaaatttgattgctggacattcagggccagttgggtgggtaagcaaaatggttagggattggtggaacttnctcaaaacacattagggcctcagggggggggcaanaatnattccaaccaatggcccaaacgccgggactgcngnggtcccgctgggcaacttnagaacncaagccttncattt

SEQ ID NO: 97777 - DNA, 631 bp, Arabidopsis thaliana columbia
aagctggtacgcctgcaggtaccggtccggaattcccgggtcgacccacgcctccggggaagaccgaatatgcccacaccacttctcattccttacatcttcttcagtcttccttcctggatctttgggattttcagcggagaaattcggtaaatggattgctttcgtagctgttgttgtacaactcttctttcctaaacacgccagagaatacctggaattaccggtggctttggttcttctcgccgtggtggcaccaaatttgattgctggcacattcagagacagttggattggtttagctatatgtttaggtattggatgttacttgcttcaagaacacattagagcttcaggtggattcagaaatgcatttactaaagccaatggtatctccaacaccgtcgggatcatctgtctcgtcgtcttccccgtctgggctcttatcttttaagttaactcttcagtttctttttccatttgtcttttttttttcatgtaagagtgattgctttgtacgatctgtctctcctcgtaactctatcaatgaatgtgatttgaataagaattgcttcagcaataagaaaaaaaaaaaaaaagggcggccgctctagaagatccaagcttacgt

SEQ ID NO: 97778 - DNA, 883 bp, Arabidopsis thaliana columbia
acaacaccacaacaaacaaccccacatcaacccacaccaaaacaaacgcctcacacaaaacgacacaatccacccaactcaccacccccccaaacaggaccacaacacccccaccatcaacaaaaggcaagaaaaccaacatttgaaccacgctggaaacaatccctctcttctcttctcacatcaattattcatagttctctcttctccggcaagaaaagatgcctatgaagtcgttgaggaatgaccatggaacccttaaggccatgatcggatccgatttcaacgagctcactatcgctgctaagaacctagctacacacgccttcacactcactggtttaggctttggtacctctgtcctcgaatgggttgcttcaatcgccgccatatacttgttggtgttggatcgaaccaattggaagacgaatatgctcacatcacttctcattccttacatcttcttcagtcttccttccttgatctttggtattttcagaggagaaattggtaaatggattgctttcgtagctgttgttgtacaactcttctttcctaaacacgccagagaatacctggaattaccggtggctttgggttcttctcgccgtggaggcaccaaatttgattgctggcacaatcagagacagttggaaaggcttagctataagttgaggtattggatggaacatgcttcaagaacacattagagcttcaggtggattcagaaatgcatccaccaaaaccaaagggatctacaacacccgcggggatcatctgtcccgacggcttcccccgactgggcatctaatcttttaaagaaaacctcctcaaggttcccacattcccagtttgggccaatctgtttggttcaaaggaaaaa

SEQ ID NO: 97779 - DNA, 458 bp, Arabidopsis thaliana columbia
cgggtcgaccacgcgtccgtgcaagagacgacagaagggcagggatcagcggatgttgcttataggactccgctggcaccttatgagaaatcaaagtttttaggtttaatggggaggaggatgtggtggcggaagtggcggagatggaggagatttgccggaaaatggaagatgggcttgaggggttacagagaagagttagagaagtgtttcataggttggtgaaaagcagaagtgagatacttgaagtgattgatcactgattgtaatcttttaactttgttgttgtgaaaatttaatctttgagttaactcttttgattaagaaaagagaacaaattacaggtttttattgttttatttatgtgataatctttgatgtatataaattacaattcgtaattaaagaaagataatgtataccccatgtttaatactaagattgcaaaactattgccg

SEQ ID NO: 97780 - DNA, 554 bp, Arabidopsis thaliana columbia
  unsure (1)..(554): unsure at all n locations
gccgcccgcgacgtcgcgagaagtccactaaaccagaatagagaagaagaagatgtcgatgattccgatcagcaatcgccggagactatctcccggcgatagaatctgggaaccatttgaactcatgaacacctttcttgatttcccatcaccagctctctttctttctcaccactttccctcactttctcgagaaatattcccacaaacttcatcatccaccgtcaatacgcagctcaattggaccgagactccgacggctcacgttttcaaagcgtatcttccgggagtggatcaagacgaagtgattgcgttcgtagatgaagaaggatatcttcagatctgtactggcgacaacaagttcatgagcagatttaagcttcctaacaacgccttgacggatcaggtcacggcgtggatggaggacggagtttccttgtcgtgttccgttgagaaaagtggtttttnggtggccgcaaaagtttccgganatttagggggattgtnacggtgnanttttggaaannncccggggttnntggttattaagggtt

SEQ ID NO: 97781 - DNA, 605 bp, Arabidopsis thaliana columbia
  unsure (1)..(605): unsure at all n locations
anatagnanaanagttcgtgtccgtnnaancccggactttccccgcgataaactggaccntngacncngaccccttcttgattcccatcnccagtcttttctttctcaccacttcccctcactttctcgggaaatatccccacaaactttcatcatccaccgtcaatacgcagctcaattggaccgagactccgacggctcacgttttcaaagcgtatcttccgggagtggatcaagacgaagtgattgcgttcgtagatgaagaaggatatcttcagatctgtactggcgacaacaagttcatgagcagatttaagcttcctaacaacgccttgacggatcaggtcacggcgtggatggaggacgagtttcttgtcgtgttcgttgagaaagatgcttcttcgtcgccgccacagctgccggagattgaggagaatcgtaacgtgagagttgtggaaatcaccggcgatgatgattaattaagtgttacatgttgtcgagatatatgtgaattaaagggaaacttaaaagtttagtgtactaaatgaacaagttaatcgcttgtttaggttgtgttaaaaaaaaaaaaaaaaagggcggccgct

SEQ ID NO: 97782 - DNA, 677 bp, Arabidopsis thaliana columbia
  unsure (1)..(677): unsure at all n locations
actggtatggcggagaaagctatggtggttctgagtagccttgcagcgatagatgatggcaaagaggctattgtcgaggaaggagggatcgcagcgcttgttgaggccatcgaggatggatctgtgaaagggaaagaatttgcgatcttgacgctgttgcagctttgttctgatagcgttagaaaccgtgggttgcttgtgagggaaggcgcgattcctccgcttgtgggcctctctcagagcggctccgtcagtgttagagctaagcgcaaggcagaaagacttctggggtatcttcgggagccaaggaaggaggcaagttcatcaagcccatgaaatgcaaccatgtggaggtttcatcagtctagtatgtatatactgagtgtatgtttggtgggttttgtatagcgtcttttgtgtagactgtaaaagagagatcaaatgattaccagaaacttgactgacttttgatctctctcatgtattgatggttaagctagtttttgaggagtttcaagggagagtgcttatggatttggtttacaagtctagcattcaggttttggcttctggtttgtgcagggtgggtggattatgctgatttttaaggcaanaagctttgtagtcagcgtcgggcaaatggtcttgttcaagaactaagcaatttttaatcgatt

SEQ ID NO: 97783 - DNA, 736 bp, Arabidopsis thaliana columbia
  unsure (1)..(736): unsure at all n locations
gtctagggccttgacggaagagcatgccagagacagctttgagaatcttctctttagcgtttgtcgattcagagagctcacaggctcttacccacagaatataacagtagtgagttatgattttaaggacgagagatttgcgcatttgcatcgttcagcaatgggatttccggaatcaagatttttctacttaggaacaccagcttctctatcatccaaagaagacgctctaaaaggcgaggctttggttagatcacaatttcaagaagatccatacggatgtgttggttcgctttggcgtaagaagctgaatcgtgaccctttccataggactataccttaccctattggttgccctgaaattggaggattgttcaggtactgtggttcagctccttttcctggctctctcccatggggctaatctgtataagatctatacttaaagaggaatcaatacttgatcaaagagcttgttggtagagaaactctttttctttttgttactgtccaacatatttagattatacagaaaacttcagaatctttgtattctgctttcatgtgttgtcgaaaaaccgagaattttacttgtatcaaatgcaatttacgtaaaataaaattttgacatttctatccaaaaaaaaaaaaaaaagnnnnnnnnnnnnnnnnnnnnnnnnnnnnnnnnnnnnnnnnnnnnnnnnnnnnnnnnnnnnnnnnnnnnnnnnnnncattc

SEQ ID NO: 97784 - DNA, 401 bp, Arabidopsis thaliana columbia
ggcgaaatcatcatcttctccggcgatgaagacgacggcgacgtcgtttgtaacgggagagagagttgtagttttcgtcgtggtttctcgtattctcttatctcttcctttatcacttatctccatggcttctccctcttcctcctctctctctccgccttcctcgtcgagatccgcgtcgagacttctccgtttcttctctctcatttcagctccagacgcggtgcgtcttcagggatattactaggagctgtgacacttccttctgttatgatatctaagttagttcagctttcaagagctatttcaatccatgaagctgaacaagatgagcttgcacatgtgacaatgcagtattgggcagcatcggctagttgttgtgctatacttatatatctatc

SEQ ID NO: 97785 - DNA, 754 bp, Arabidopsis thaliana columbia
  unsure (1)..(754): unsure at all n locations
nnnnnnnnnnnnnnnnnnnnnnnnnnnnnnnnnnnnnnnnnnnnnnnnnnnnnnnnnnnnnnnnnnnnnnnccacgcgtccgtacggctgcgaaagacgcagaaggggagggctgtgaccatcgaccatcgtcgtcttcgcggagctcagttgaaagatgttaacggctgatataccaccaaatcagtcaatctacataaaacatatcaatgagaagatcaagaaagaagagctgaaaaggtctctttactgtttgttctctcagtttggaagattacttgatgtggttgcgttaaagactcctaagctccggggacaagcatgggttgtttttactgaagtcaccgctgctagcaacgctgtccgtcagatgcagaactttcctttctatgataagcctatgcggatacaatatgcaaaatcaaagtcagattatgttactaaagccgaagggtcttttgttcccaaaagaaaagaagatgaagcaagaagagaaagtttgaaaaggaagcggacatgctgcaagaaactccaacaacccaggcatggcttaatgggcgcaacttactcagaacgggattgcctggggcctccttttccagccgagttggggaagacccgatncccccaaacaacattnncnttcattcaaaancttcccattggggcgatngnttgatgnctcaggnggccttttgggaattcccnggttccaagggttgaatgtngggnaacccgnatgngtttggggtta

SEQ ID NO: 97786 - DNA, 794 bp, Arabidopsis thaliana columbia
  unsure (1)..(794): unsure at all n locations
aatctggggtttatggttaaattgggggacgncgacccgccacnncacctgggtggcnnanccccccnccnaaaggggccgtcgnacacgtatctcgggttcnaagacatcctcaagaaaatcgggagaagagttgnccgttccnccccccgaaatctgangggngccctatttcctacccacatncgggcggaagaaggaacacgtggagggaagaatcaacccgttggaatatgcgttgacctttcaaaggaaataagcgtggaacaagttgacgcaggcgttgcaagaagagactagtatggatgatgttgtggtctgtacacgccatccttcaaacggcaagctgtttcctctttcgtttgcaacttccacctaatagtggaacaatgcatgtcattctagtaccctcaagtacttaacggcaagctgtgtggttcccctttatttcgaatgtattatataagtagactagtagttgaagtattaggctcaagattgagagtttggtccttgcctagttgcctccattagatacgagtgtggaattaatcatagaaagttcagatagactattattgtggatttgatttaatctttcattttattgtacataagcttattttgtaaacgaagcatttaagtttcgtcctcccattttttatgtgaattcgccataaaaaattgtttgtactataaaagttttttttttttttttttaaatattaaagtgtaacccaaaaagaaaaaaaaaaaagggcgaccgctctagaggatccnagcttacgtacgcg

SEQ ID NO: 97787 - DNA, 576 bp, Arabidopsis thaliana columbia
  unsure (1)..(576): unsure at all n locations
ggagagtttgcggatgaagatgatgatgttgaagaggaggatgaagaatctggtgaagggtaccttgttcagccagtctctcaagtggaagatcatgatgctgtgggtaatgacatcgagccgatcaatgaggacaatgatccanatgaagaagaagaagtcgaagatgacctgccaattcctgaccagtccttggcttcatcatctcgcccaaagagaaaacgagatgacgatgatgacggtgaggatgatgacgatggtgatgaggaacgttgaacatacagatcagaatctctagtttgatgagttttagatgggaaagaagctcggctcccttctttgattcaaggcggctttatcttgaaatgttcaaaatgtccagttattgggcaggctcggtagattttcaaatgacgggtacccagccttggatttttcccccccttttagaaacccccctttttggggggaaagaaaaacacactaacacacaaaggaagagtttcgagaccttgtttctctgttagagggtcttgtaagaatgcttatgtggataaatcttttgagttatatcgt

SEQ ID NO: 97788 - DNA, 494 bp, Arabidopsis thaliana columbia
gctggtacgcctgcaggtaccggtccggatttcccgggtcgacccacgcgtccgtacggctgcgagaagacgacagaaggggggagtttcaggtagtctccatcgttcctttgtcaggaacaaaccaacgactcaaaatttaaccagagatggtggaaggtgaagaacagaggaggatcacacacttggatctgagaaacgagccccagtttccaatggttttcgttagagaatcgacttgtttcgctaaggacgatctcgctatcttcccgccgatcaaccacgagaatctctacgtcaacggactcgaatctccgtcggtatcatcctcttcttcatcttcctcgtcgagactctcagattcgtccttctctccgtccgattcagacgaacaatttcaatttagccggaaatcgcattctcagccatcggaggatgtcgggaaatctccgtggaaatcccgaattgagattgatattatccaacgttggtgg

SEQ ID NO: 97789 - DNA, 461 bp, Arabidopsis thaliana columbia
  unsure (1)..(461): unsure at all n locations
cccacgcatccgcccacgcgtccggttatggaagaatgtgcaaggagagtaatttgagatatacaacttgggcacaagaatcagatgatcgacaacaattgtttatataaagaagagctgaatcgcaattcttactcaggtctggccaaggaggcttctgagtcgattttgctccctagtgaatccggatttgacggttctcggagtccggtttgctcctcgccggatccgaacctcaactacagacctgtcatcggtatcctgagtcaccctggagatggtgcgtctggtcggttgaccaatgatacgagctcgaacgtacatcgctgcttcgtatgtgaagttcgctgacgcaggtggtgctcgtgttatcccactcatctacaacgaacctgaaggaagtgctcttccagaagctagagttggtcaacggttgtgatattcactggtggttngggcta

SEQ ID NO: 97790 - DNA, 527 bp, Arabidopsis thaliana columbia
  unsure (1)..(527): unsure at all n locations
cacatttcaaaccattgactcttcttcttgctccgagatgtggcgttacatttgcttaccgtttttcctcttgctttggaacgatataggtctggccaaggaggcttctgagtcgattttgctccctagtgaatccggatttgacggttctcggagtccggtttgctcctcgccggatccgaacctcaactacagacctgtcatcggtatcctgagtcaccctggagatggtgcgtctggtcggttgaccaatgatacgagctcgacgtacatcgctgcttcgtatgtgaagttcgctgaggcaggtggtgctcgtgttatcccactcatctacaacgaacctgaagaagtgctcttccagaagctagagttggtcaacggtgtgatattcactggtggttgggctaaaaaatatgattatttcgagatcgtcaaaaaaatctncactaaagctttggagagaaatgatgctggagagcatttcccagnatatggnatttccntcggattcgngcttntggcaaatt

SEQ ID NO: 97791 - DNA, 762 bp, Arabidopsis thaliana columbia
  unsure (1)..(762): unsure at all n locations
attcgccattgaggctgacaaagcctttcacgaagagtataagataaagaagaaggtgaacctgttgccatacgcagcgtgggtgaggaacgagacgttatcgtttgagatcaatcacgatccgggaaaggaagtggaagccaaagcaaagggcagggggatgggcagaatccagccggttaaagacgacagaaggggtgacttagctggagaggtgaatttgattcaagggtttgatttcgctgactggttgaagaagagtgtgagagagagggactttgttgtgatgaagatggatgttgaaggaaccgaattcgatctgatcccgaggctaatcaagacaggagcgatttgtctaatagatgagttgttccttgaatgccattacaacaggtggcagagatgttgtcctggtcaaaggagccaaaagtacaacaagacttataaccaatgcttagagctcttcaattcgctcagacaaagaggggtgcttgtccatcaatggtggtaatggttaggatgctgcataaaagtctccttcttctatgcatttggtgaaaaatgtactttcttcttctagaatatataaagcgggatattgtaggtttctattaaaaatacgttgtctgtgctgaaattcccttttactgtaagaaaaaagaagtttagctttaaatggaaatttgagtttctttccgggggatcccctagttttaaaacggccgcccccccggtggaggtcccggctttgnnnnnnnnaat

SEQ ID NO: 97792 - DNA, 491 bp, Arabidopsis thaliana columbia
gaggaatttattgtccctataccacacgttaagcaagtgaaacttcctgatgctggagggagactcatcatagcttcagatggtatatgggatatactgtcttctgatgtggctgccaaagcttgtcgtggtttatctgccgatcttgctgctaaacttgttgttaaggaagcattgcgaacaaaagggttgaaagatgatacgacttgtgtagtcgttgacatagttccatctggtcatctttccttggctccagcacccatgaagaaacagaacccatttacctcatttctttcaaggaaaaaccatatggataccaacaacaaaaatggcaacaagctttctgctgttggagttgtagaagaattgtttgaagaaggttctgctgtgcttgcagatagattgggaaaggatcttctctcaaatacggaaactgggctcttaaaatgtgctgtatgccaaatagatgaatctccgagtgaagatttatc

SEQ ID NO: 97793 - DNA, 503 bp, Arabidopsis thaliana columbia
cggttcggaggcccgactcgacccacgcgtccgaaagacatgagtttctttttataatagtcaaatttccaggaaagaaagaaaaacccacctaatccagtagtaatctgcaaagagaagacagtttcccgatatcaaaaaccctaaatcgaatcacaatcctttctaataagagtgaaataacccagagcagcacataccgcagcaacagctgcgccttcttgcaaaagaaccttaaacacagatccaaacacttctcttgtaatcttacgagcttcaacaaccaatacgccttctcgatttcccaaaagacgcaagcaacacaaccaccgatatccagatcaccataaccgccgggaccggaacccgcaggccgccgcaacccatgggcaatcggctccaaacacagctccttaacaccacagacgcgtaaaccggcgggaatcttgacggagacggcgatgacgagtactggatcttgtcccagctaagcacagatggga

SEQ ID NO: 97794 - DNA, 540 bp, Arabidopsis thaliana columbia
gctggtacgcctgcaggtaccggtccgttttcccgggtggacccacgcgtccgtacggctgcgagaagacgacagaaggggacctaatccaataataataaaaaaagagaagaaaatttcccaaaatcaaaaaccctaaatcgaatcaaaatcctttctaataagaatgaaataacccaaaacagcacaaaccgcagcaacagcattgccttctttcaaaagaaccttaaacacaaatccaaacacttctcttgtaatcttacgagcttcaacaaccaatacccttctcgatttcccaaaaaacgcaagcagcacaaccaccgatatccagatcaccataaccgccggaaccgcaaccgcagccgccgcaaccatcgacatggctccaaacacagctcctaacaccacagatgcgtaaaccgccggtaatcttgacggagacggcgatgacgtgtactggagcttgtaccagctaagcacagatgtgagaaagttccatgaggaagccaggagaatcgcgtagacagctacaaagagaca

SEQ ID NO: 97795 - DNA, 604 bp, Arabidopsis thaliana columbia
  unsure (1)..(604): unsure at all n locations
atcgactcacttagggacagctggcacgcctgcaggtaccggtccggaattcccgggtcgacccacgcgtccgacggctgcgagaagacgacagaaggggaaagttgtaagaaaaaagagagagacagagatttactcaacggctaagatgaaaagctcatcggagctccttgtaataatgattttcttattcttggcgcttctcataatctcccacgctcaatcacttccaggtacgccgtatggcggccctggtccgtatccgcgtagttaccctgtgtgttacccaccgtattgccgtccatgagagtttcaatttggtcacatgaatgaattatagtcaaatacctatatcaaggtgatgtatgtgtgtatattattatatgttttcatcatttgatggagaataaaaagcttaggaaatatatccatgttattatatgtttcagtttgtaatatgtataatgatattgctggctctgtccctttttttcgctgtccaanaataaaaaattatannnnnnnnnnnnnnnnnnnnnnnnnnnnnnnnnnnnnnnnnnnnnnnnnnnnnnnnnnnnnnnnnnnnnnnnnnnnnnnnnnnnnn

SEQ ID NO: 97796 - DNA, 889 bp, Arabidopsis thaliana columbia
  unsure (1)..(889): unsure at all n locations
gaagacgacagaagggggaagaagttgttggatataactcggactgactcggctgagaaaaagcgagtcagagacgagtcattcgacgaagcggttcttgactcgccggaggtgaagaggttgagagatgatttattcgatgtcctggatgactcggatcctgaaccagtgagtcaagatctcgactcggttatgaaaagtttcgaagacgagttatcaacggtcaccaccacgacggcgcaaggttcctctaccgccggcgaaactcagcctgatctcggatatcttcttgaagcttctgatgatgagcttggtttaccaccacctccatcgatttctccggttccgtcgcgaaggaggaggtaacgacggagacggtaacggatttggtacgagcgtcttctgattcgtcaggaatcgacgagatttggggatttgaagatcacgtgtcgaattacggtggtttagattttggttccggcgtcggagatggtggagattacgtggctgttgaggggttgtttgaattttccgacgattgttttgacttcggcgatctgttttcgtggcggtcggagtcgttaccggcggaataaataaataacaaactttttttttaattaggtgggaaatgaaaacgatatcgttttgttaaagcgtttggctctccctcgcttttttttttaacccgatggttaatatctattaactaaaattattaggatttaggaaaagttaaatattttgtaagggtaatttgctagattagtattagcgaattcgtttgtttgttctgccagatctttttttcacacgcttttgttaatgtgaaatttcccaatgaaaaactctctttgtcnnnnnnnnnnnnnnnnnnnnnnnnnnnnnn

SEQ ID NO: 97797 - DNA, 404 bp, Arabidopsis thaliana columbia
gagagtaagagagacagagagagagatgagtagcttcacgattccatctccttcctccttctctctttccaattcatataatcaaacctctcctcattccttcactctccgcaattctcgttccaattttgagttccaccggttacgattagatgtggagtctcgaagaagaagcacttctttacggtccaattgctccaccaaaggtacagattcaggtgaaaatgagaacaaaagtgtgttagatgctttctttttggggaaagcattagctgaggttatcaatgagagaattgagtctactgttggagaagtgttgagtactattggaaagtttcaagctgagcaacaggaacaagttcaagagattctggaagaggttcttgaaagagctaagaaagcta

SEQ ID NO: 97798 - DNA, 636 bp, Arabidopsis thaliana columbia
gccagcactatacgactcatttagggaaagctggtacgcctgcaggtaccggtccggaattcccgggtcgacccacgcgtccgtacggtgcgagaagacgacagaagggtacggctgcgagaagacgacagaagggtacggctgcgagaagacgacagaaggggagttccctccgttgcttggaatcaacactggacatggaaaacacaaatactcagacaaaggtctagcagctgttttcgagtctcacttgaaggagctaaatgctcctttccatgaagccccagataaggttggctggtttttgactaccagtgttgcggcaaaggcatggttggagtctagacgctcagctggaggagtttctgcgtagcccttgtaattggtatgtagctttgatattgtctatgtggcttcgagctttctccactatttagttttctttctcctgataccggatactggatcaggaaagattttgtaatgctagcaaactcgggttatacacattttgaaacaatttagagaactgattaagttccaaaaaaaaaaaaaaaaaaaaaaaaaaaagcggccgctctagaggatccaagcttacgtacgcgtgcatgggacgtcatagcactctagtagtgt

SEQ ID NO: 97799 - DNA, 575 bp, Arabidopsis thaliana columbia
tacggctgcgagaagacgacagaagggggaggaagagaaaacaaacctttaactgaagaaagagtttgagtatggcagcgtcgaccataggtagaggttcatcggaggataagccggggaaaagaacatctccggtgactggcaagcccacaagattccccaactgaatcatcgataccgccggtatagcaacgtatgtaatcccggcgatgtcatggatctttatactcccgttgcaatttgcggtgttgcatgaactccaagaatcggtaaataaaggagtcgatatcattaccgaagcttgcaactcactcgtctcgaatcgacaatcgtccatgattggatatcgagtagagagttgcagaacgatgatgtttatgaagttgtaaatatattacaagcaaaaagaaattatctatgtatcttcttggcttgttcctatgtaatttcttggttttggtctttgctaagtcgtcttcttcaaagtctcttactttaacatcataatttagtaaaattgggctggtcccgtaaaataataataaagaaatcccgtgaaaggtaggtcctttctc

SEQ ID NO: 97800 - DNA, 545 bp, Arabidopsis thaliana columbia
ctggtcgcctgcaggtaccggtccgttttcccgggtcgacccacgcgtccgcccacgcgtccgtacgacggctgcgagaagacgacagaagggggatacattagtcgaccgtcgcgcattaatactggtgtggtggttccgttaacgagcaacggcgatgaagagacctcgacctacatctcagccgtcgatctcttccaccgtcaaaccaccactgtctccgccggtcacaccgattctcaaacagaagctacacagaacaggaacacctaaatggttcccgttaaaactaacccacacggagctgacgttgccgttaacttttccgacgggtcaaacattccggtggaagagaactggagcgattcagtatagcggaacgattgggcctcacttagtctctcttagacaacgtccaggagacgacgcagtttcctactgcgtccattgtagcacaagccctaaatccgcggagcttgcgttgctcgattttctcaatgctgagatcttcgtagctgagctatgggctgatttctcgaaaaaag

SEQ ID NO: 97801 - DNA, 813 bp, Arabidopsis thaliana columbia
  unsure (1)..(813): unsure at all n locations
ttatttgacgacagaaggggggcttcaatccgttgttggctcccattaattcgttccaagcaatcttcttcgatctccctcgtgttggatggcacattctttgagtttcatctccaccaacttgaacagttcagtccttaaccatcatcagtgccagagtttcggaacgtttgtgtcgtcgccatttaaacgaaagaggagatttgcaagaagcattagagctttacaagagactgaaggtccaacgccaagaagattgatagacattataagatctgttcctgaaatctctaggaattacttcaagaagccttcaagaagaacgctttttggaggaatctcgttgttaggtggcttttatgtcgcgcagactatctctctctcgtttggagcattgggagtgaacgatgttattgctgcggttctatgcgttcttttgacagagtatgtgacaagattctattatagccgcaccacagtcacatttcctattgctctgctcaataatttcaagatgggtttcacttatggtctcttcattgacgccttcaagctggctagctaactgtttgcaaaactgagtcaccagagatcccaagctcgtgtatttacttgttttttctcctccaaatgtaatattttgttgtcataattttgtagtgaagcaaccaaaaactttgaagttaaagagaatctgtagtatgctccnnnnnnnnnnnnnnnnnnnnnnnnnnnnnnnnnnnnnnnnnnnnnnnnnnnnnnnnnnnnnnnnnnnnnnnnnnnnnnnnnnnnnnnnnnnnnnnnnnnnnnnnn

SEQ ID NO: 97802 - DNA, 551 bp, Arabidopsis thaliana columbia
aagctggtacgcctgcaggtaccggtcctgtattcccgggtggacccacgcgtccgcccacgcgtccgtactgcgagaagacgacagaaggggggagaagtagaaatcgataaaggcgaagaaggaatcgcaaggaaggaagaaacttgagaggaagatcatgatcctagctgtgttgttcgccaattccgttgggaatgttttaatcgaaaggttcaatggagtaccagctgaggaacggctccgctggcgatctttcttggttaagttgggagcagataatctcaaaggcgttaaaaatgaggagcttctcgttgcttgccacaagtcggtttatatcgtgtacacaatgctaggggatgttagcatcttccttgttggcaaagacgagtatgatgaacttgctttggcagaaaccatctatatcataacagcggctgtgaaagacgtatgtggaaagccgcctacagagccagtgtttttggataaatatggaaggatttgcttgtgccttgatgaaatcgtgttggaacggacttctggagaacacg

SEQ ID NO: 97803 - DNA, 704 bp, Arabidopsis thaliana columbia
  unsure (1)..(704): unsure at all n locations
gctggtgtcgcatccgtggaatgtttaacgaaggtccatggntccactgaggacggcccatgcgtcttcttgntangttgggngcgatatctcaaaggcgttaaaatgaggagctctcgttgcttgccacaagtcggtttatatcgtgtacacatgctaggggatgttagctcttccttgttggcaaagacgagtatgatgaacttgctttggcagaaacctcctatatcataacagcggctgtgaaagacgtatgtggaaagccgcctacagagcgagtgtttttggataaatatggaaggatttgcttgtgccttgatgaaatcgtttggaacggacttctggagaacaccgacaaagacaggatcaagcgactcatcagattgaaacctccttctgaagtttgatatgctccaaccaaccacacattcttcttctactcattttaagagctttctcattctccaccgattgttgtttgttgaatcacttctctatatcacatattcacccatcaactactgctgttgttcgatcagtccatcttgtagtgttgttttttaaatcttcagtttttagtgttacataccaaagaacaaatttctatccaaaggcttttccctgcggtttaaaaaaaaaaaaaaaaaaaaaaaaaaaaaagcgcccgctctagaaaatccaagcttacgtacgcgtgcatgcga

SEQ ID NO: 97804 - DNA, 860 bp, Arabidopsis thaliana columbia
acgccacgctctaattctattcactatatggaaagctggcacgcctgcaggtaccggtccggaattcccggggcgcccgcgcgtccgctgagagaagaccacagaagggaattcataaaagaggaaattcagaggattaaggcgaataatccagacataagccacagagaagcattcagcactgctgccaagaattgggcacactttcctcatatttcactgtggtctaatgctcggagagtaacaagcaagctaagatagcctaataattctcgagattaatggtaatataagtgttggagacttcgaagtaacaagagctgagaaggcaactatatgtattggatgatctttggaaccgtatgtatgtaagggaagatgtctatctttaaaaccatctataggttaaaatttaagaaaagcttcttctaatttatttctatgggcccttgtttgatgggtcggctcacaggaattatgggtcctttcggattttgaatctaaataaaaaaaatggatttatattatggaaacctatttttcctggattataaaagtaaatttgccatggccaaagaagaattataaaaaaaccccaggcggccgcttaaagaaccaagttaccttccggggctgcaattataatttttttaggggacctaattcaattacggcccggggttaccacggggaatgtggaaacctggggtaccaactaaacgccgggagaaaaccctttgcggggggtaaaggaaagagcccaccatacccttcaaaggtggcctcctatgggaaggggccccctttggtaataagcgggggggggggggaccgcaaggaccctccttcccctctacccc

SEQ ID NO: 97805 - DNA, 515 bp, Arabidopsis thaliana columbia
gggtagtatcgccggcactatacgactcatatagggaaagctggtacgcctgcaggtaccggtccggaattcccgggtcgacccaggggtccgaaaaaactttggcctctccggtgactcttccttcttctgctaccgaacttttcgcttccttctctgaccaatttttttcaacaacctctcttcttcaacaaattctcttctcaaatcctccaaatcctctctgccatgaacgctactttcttcctcctctccaccaccgtctccaccgtcacaatcaccggattcaacggtctcgatttctcatcttagaaccacatgcatcccttctgttgcgttacaactgtctccgatcactctccttcgatgcctccgttacctgaaccacaaccgcctctaccgaattacgccgccgattttggttcggcgagatccgaaccgattataactcgatctgcttctcaaaggtataatcattcaggtcaattcaataacaatcttattcataggctctg

SEQ ID NO: 97806 - DNA, 453 bp, Arabidopsis thaliana columbia
tttctgctgacgacagaaggggagactttcagaagaagaaaaaacgaaggagaagaagaacaatttcgcggattcaagagacagagagcttcttctgcgtaaagtctgatctttgaaaatgacggaagaaccagagaaggtgtcttcttcagtattacatcaaccttctggtgataagaaacctgaagatgttgggatcaaacctcaggatccagcgtcttcttctgggtttcgagcttatcctaatggtgattctccaatgtacccggttttttatccgggtcttgttcccggatccaatcctgtacagtacgaggaacaaatgaaccgtggagctgggatctatgcggttcctgttcatcaatttggaggacatgtcgctggtcttccctcaaattatcttatccctctcacttacaatgttccaacgactagaccaaataatgaagctga

SEQ ID NO: 97807 - DNA, 587 bp, Arabidopsis thaliana columbia
  unsure (1)..(587): unsure at all n locations
caaacacaaacagagaatcaacgaagaagaaaaatggtgaaggtgatgtgggtttccgttttagctctggcggcggcgattctccttttgacggtccccggtggcagaaggggtgacgtgctcgccctatgcagccgcgcccatcggaggcgtgttgcacaaagctgagagagcagcagccatgcctttgtgggtacatgaggaaccctaccctccgccaatacgttagctcccctaacgcaaggaaagtctccaacagttgcaagattccttccccaagctgttaaggaaatgttaatcatgattaattagtgacaagtttcgctgattatagtggttaatgctggtcttatcttcgtcactactatttagaataataaatgaagtgatgatgattgatgattgatgattgatgattatcatcatcatgcttgaatgttatgttttctatcttataaaatatgaaatatccttttaaaaaaaaaaaaaaaaaaaaaacccaacnnnnnnnnnnnnnnnnnnnnnnnnnnnnnnnnnnnnnnnnnnnnnnnnnnnnnnnnnnnnnnnnnnnnnnnnnnnnnnnngcc

SEQ ID NO: 97808 - DNA, 491 bp, Arabidopsis thaliana columbia
  unsure (1)..(491): unsure at all n locations
gactgaaaacagaacaaacacaaacacaaacagagaatcaacgaagaagaaaaatggtgaaggtgatgtgggtttccgttttagctctggcggcggcgattctccttttgacggtcccggtggcagaaggggtgacgtgctcgcctatgcagctggcttcatgtgcggcggcgatgacgtcatcttcgccgccatcggaggcgtgttgcacaaagctgagagagcagcagccatgcctttttgggtacatgaggaaccctaccctccgccaatacgttagctcccctaacgcaaggaaagtctccaacagttgcaagattccttccccaaagctgttaagggaaatgttaatcatgattaattagtgacaagtttccgctgattataagtggttaatcctgggctttatttttggtcagtacttccttaaaataattaaatgggtttgtgtggtgtggtggttgttttccatcatcatgtcttnnatngna

SEQ ID NO: 97809 - DNA, 597 bp, Arabidopsis thaliana columbia
  unsure (1)..(597): unsure at all n locations
nnnnnnnnnnnnnnnnnnnnnnnnnnnnnnnnnnnnnnnnnnnnnnnnnnnnnnnnnnnnnnnnnnnnnnnnnnnnccacgcgtccgtacggctgcgagaaacgacagaagggggaaacaaagagattagaaactacggagagaaagagagaagatatatagccatggcaatgaagtcagtttctaccttggccgtttttgccatcctctttttggttatcgttgaaatgccagagataaaagcgcaaggtagcaagtgtctgaaagaatatggcggtaatgtgggtttcagctattgtgcgcctaggatatttccgtcattctgttatcggaactgccgtaagaataagggcgcgaagggaggtagatgccgttcgggaggggcaggagctggtagtatgatatgtttatgcgactactgcagcgacaaaccttaaatcagatcgttaaacgttttaacctcaaacgcatgagtagttgctatcttgtactatgtgccatggttcgtacctttgtgtagcaataaaggtgactgggcccccaagtaataatgaataagggaaatattaaataaagaaacgtncgactttgtgtgtg

SEQ ID NO: 97810 - DNA, 496 bp, Arabidopsis thaliana columbia
tgggggacgcggacgcctgagtccggccggattccgggcgaccacgcgtcgaaaacacagagggggagtttgatgcagacatgctcaagatacgtaatgagtctgcaatcagtgctttatatggggatctcccgaggcaatgcacaacctgtggtctacgcttcaagtgccaagaagagcacagtaagcacatggattggcatgtaaccaagaacgggatgtccaagaaccataagcagaacccttctcggaaatggtttgtaagtgctagcatgtggctcagtggtgcagaagcacttggagctgaagcagtaccagggttcttgcccacggagccaacaacagaaaagaaggatgacgaagatatggcagttcctgcagatggagaccaaacttcatgtgcattatgtggtgagccatttgaagacttttatagtgatgaaaccgaggatgggatgtacaaaggggcggatacatgaatgctcctgaagaatca

SEQ ID NO: 97811 - DNA, 848 bp, Arabidopsis thaliana columbia
  unsure (1)..(848): unsure at all n locations
cgcaatcctgatatatctatcctcggcgtttccaagtgttgctgatcattggtaagtttctacttcgtttgacacaaagtgtaatcattttgctttgatgttcatttgtttacttttaggtatccgaatgatctatccaaaagagccaagattcactcagttttggattggcatcacaccaatttacgtcgtggtgcagctggatatgttctgaatagtgtactaggtccagctctcggtcttcctctgaatccgaaagcagctgctgaagctgagcagttactaacaaagtctctgtccactctagagactttttggcttaagggcaatgctaaatncttgctcgggatgaaccaaaccatcctttttgctggcctccgccttgtatgcgaaccttatgcagctgcaggtttttgggatgccaaagatcggccttagggttgctcagcacctcacttgggaagttgaccaatcgggttgngggtccggaaaaagcaacaatccctccctttgttgggccccatgaggtccttttcaaagtcaaagaaggattccagaagcggcgagagatgggaaccttatctaaaccgggtcttcaatccaagatctaagaacttagaacaaaactttggcaaaaccggtttcaggggtcagtcactggttcgttgaagaaaagccgattatctcctattctccattgtaagaaaaataaggaatgtaataatcacttgttttttgaactatatgtaataatcactttatcaaaggtttttaccgaaccaaataannaaaanaggaaanaanaangggnggcccctnttnggggttccnggctttcggtccggggt

SEQ ID NO: 97812 - DNA, 932 bp, Arabidopsis thaliana columbia
acgcgtccacttcaccagattatcgccgttcgttcagagaaaactttttccgatacacaaaatcggaggaagaagatgatgaagctcaaagtgtatgcagatcgaatgtcacagccatcacgtgctgttatcatattctgcaaggttaatggaatccaattcgatgaggtcttgatttccttggcgaagcgtcaacaattatctcctgaattcaaagatattaacccattggggaaagttccagctattgttgatggcaggcttaagctctttgagagtcacgcaatcctgatatatctatcctcggcgtttccaagtgttgctgatcattggtatccaaatgatctatccaaaagagccaagattcactcagttttggattggcatcacaccaatttacgtcgtggtgcatgctggatatgttctgaatagtgtactaggtccagctcttagtcttcctctgaatccgaaagcagctgctgaagctgagaacatactaacaaactctctgtccactctagagactttttggcttaagggcagtgccaagtttttactcgggggcaagcaaccatctatagctgatctcagccttgtatgtgaacttatgcagctgcaggttttggatgacaaagatcgtcttagattgcttagccctcataagaaagttgaacaatggattgagagtacgagaaaagcgacaatgcctcactctgatgaggtccatgaggtccttttcagagccaaagatagatttcagaagcagcgagagatggcaaccgcatctaaaccgggtcctcaatctaagatgtaagaacaaaaaacttgaccactttcatcagggtctctatatgagagactccttccccctaaagataagtcattcgagatccaaacactccgtttaatttctcatccagtttcatggatca

SEQ ID NO: 97813 - DNA, 572 bp, Arabidopsis thaliana columbia
  unsure (1)..(572): unsure at all n locations
cccacgcgtccgagcgtcttctccataaacccagaaaatcgcagagagctttctcttgtctttgtacagatctctcccatcatcgttcgtgattcgatgccttctcgtagaagaactctcctcaaagtcatcatcctcggtgatagcggggttgggaagacttctttaatgaatcaatatgttaataagaagttcagcaaccagtataaggcaactattggggctgatttcttgactaaggaagttcaatttgaagaccggcttttcactttacagatctgggacacagctggtcaagaaagggtttcagagtcttggtgttgtcggttttatccgtgggtgctgattgctgtgttcttgtatatgatgtcaactccgcaaaatcattcgaggatctcaacaactggagggaagagtttctgatccaggcaagtccttcggatccagagaactttccctttgttgttatcggtaataagatcgatgtggatggtggaagcagccaggtggtatcagagaagaaggctcgagctnggcgtgcttcgaaaggaaacattccatactatgaaacc

SEQ ID NO: 97814 - DNA, 581 bp, Arabidopsis thaliana columbia
  unsure (1)..(581): unsure at all n locations
aataatagtcacaaaagaaattagaagacagatcaggaacagctagaagactcttcagggcacagagaaaacacccaccacatcaccgtcttcttcaacaaaatttaccaccagagatcgcagatatttcttcattctatctctctcttttagatccgattcgatgccgtcccgtagacgtaccctcctcaaggtcatcatcctcggtgatagcggggtgggaaaaacctctttgatgaatcagtatgttaataaaaagttcagcaaccagtacaaggcaaccattggagccgacttcttgaccaaggaagtacagtttgaagatcgacttttcactttacagatctgggatacagctggacaggaaaggtttcagagccttggtgtagccttttaccgtggtgctgattgctgtgttcttgtatatgatgtcaaattccatgaaatcatttgaaaatctgaacaactggagggaagaatttctgatccaggcgagtccatcagattccggctgaattttccaattggcccttatncggaacaagggttgccgngggttnntggaaacngcnaagngntnc

SEQ ID NO: 97815 - DNA, 706 bp, Arabidopsis thaliana columbia
  unsure (1)..(706): unsure at all n locations
cgnnnnnnnnnnnnnnnnnnnnnnnnnnnnnnnnnnnnnnnnnnnnnnnnnnnnnnnnnnnnnnnnnnggctcgagctcgagccgtgatgaccttgaggagggcccgcctccgggtcggcatcctcggtgatagcggggtgggaaaaacctctttgatgaatcagtatgttaataaaaaaggttcagcacccagtacaagggcacccatttggagcccgactttcttgaccaaaggaagtacagttttgaagatcgactttttcactttacagatctgggatacagctggacagggaaaggtttcagagccttggtgtagccttttaccgtggtgctgattgctgtgttcttgtatatgatgtcaattccacgaaatcatttgaaaatctgaacaactggagggaagaatttctgatccaggcgagtccatcagatccagagaattttccatttgttccttatccggaaaccaagggtgaccgtggatgatggaaacagcagagtggtttcagagaaaaaggctaaagcttgggtgtgcctcaaanggggacatnccttacctttgagccccctgccaaaggnaggaccnaatgtggnggaaccttccaatgnatttccaaggcccattaagaccggggaananannctntctgccgancaacnntgtgggggggaannnnngggccccggggngatcnaagganc

SEQ ID NO: 97816 - DNA, 932 bp, Arabidopsis thaliana columbia
  unsure (1)..(932): unsure at all n locations
ctatagggttagctggtacgcctgcaggtaccggtccggaattcccgggtcgacccacgcgtccgcgatgccgtcctgtagacgtaccctcctcaaggtcatcatcctcggtgatagcggggtgggaaaaacctctttgatgaatcagtatgttaataaaaagttcagcaaccagtacaaggcaaccattggagccgacttcttgaccaaggaagtacagtttgaagatcgacttttcactttacagatctgggatacagctggacaggaaaggtttcagagccttggtgtagccttttaccgtggtgctgattgctgtgttcttgtatatgatgtcaattccatgaaatcatttgaaaatctgaacaactggagggaagaatttctgatccaggcgagtccatcagatccagagaattttccatttgttcttatcggaaacaaggttgacgtggatgatggaaacagcagagtggtttcagagaaaaaggctaaagcttggtgtgcttcaaaggggaacattccttactttgagacctctgccaaggtaggtactaatgtggaggaagctctccaatgcattgccaaggacgcattgaagagcggagaagaagaagaactatacttgccagacacaatcgatgtagggacgagcaatcaacagaggtctacagggtgtgaatgctaaggagtatcaccagaaggaaacgaggcctctcctcccattatctcttttcgcaagttatgtctacattattactatgttgtaaattttttcttttgtgtggaaaagggatgagaacaaaaaaagaaggaaccctaaaaaaaaaagagatgctggccgggtgttaattttgtggggggtttttcanttaaaaaaaaaannnnnnnnnnnnnnnnnnnnnnnnnnnnnnnnnnnnnnnnnnnnnnnn

SEQ ID NO: 97817 - DNA, 1025 bp, Arabidopsis thaliana columbia
atacgactcctatagggaaagccggtacgcctgcaggtaccggtccggaattcccgggtcgacccacgcgtccggaagaactctcctcaaagtcatcatcctcggtgatagcggggttgggaagacttctttaatgaatcaatatgttaataagaagttcagcaaccagtataaggcaactattggggctgatttcttgactaaggaagttcaatttgaagaccggcttttcactttacagatctgggacacagctggtcaagaaaggtttcagagtcttggtgttgcgttttatcgtggtgctgattgctgtgttcttgtatatgatgtcaactccgcaaaatcaattcgaggatctcaacaactggagggaagagtttctgatccaggcaagtccttcggatccagagaactttccctttgttgttatcggtaataagatcgatgtggatggtggaagcagccgggtggtatcagagaagaaggctcgagcttggtgtgcttcgaaaggaaacattccatactatgaaacctcagctaaagtaggcaccaatgtagaagacgcgttcctgtgcataactacgaacgcaatgaagagtggagaagaggaagaaatgtacctaccagacacgatcgatgtcggaaccagcaatccacagaggtcaacaggatgtgaatgctgaaagtgttcatttgacctatgctctctcatcagttatcccactctgaggttttttaccatattgtaaatctgttgttctgtggtacattaatattttaaaaatttagaaccctaataaataaataattaaaaagccgaattgggttggtcggtgtttgtgggtggccgtatattatggatctctctttttctctacactaacgttatttgttgtccactacatttatgaaaagacttaaatggtttcttttttcaaaaaaaaaaaaaaagggcggccgctctagaggatccaagcttacgtacgcgtgcatgcgacgtcaagactcttctatagttgtcctaa

SEQ ID NO: 97818 - DNA, 614 bp, Arabidopsis thaliana columbia
gaaggaagcgaccccatttattgaggatggggttcacgctcagaatctaatgcggagttaccgtactgcaagcactttggccctggccatgggtaaagaactcgctgttagcattgaggggaagacgtgtacacgaaaagagaggtttattggctaaatgtgctgctacgactctctcatctaagcttatcggtggagaaaaggagttttttgctacaatgggtgttgatgctgttatggccattgggaatgacgacaggctaaatctgattgggatcaagaaggttcctggtggcaatatgcgagactctttcctcgttgatggtgtagcgttcaaaaaaacattctcgtatgctggttttgagcaacagccaaagaaatttcttaaccccaaaattctcttgcttaacatcgaattggagttgaaatctgagaaggaaaacgctgaaattaggctgtcagatccatcacagtaccagtcaatagttgatgcagaatggaatatcatttatgacaaactagacaaatgtgttgagagtggagcaaaagttgttctttctcgattggctattggtgatctagctactcagtattttgccgatcgtgatattttc

SEQ ID NO: 97819 - DNA, 690 bp, Arabidopsis thaliana columbia
  unsure (1)..(690): unsure at all n locations
cactatacatgnactatgacgccgcatgcacgcgtacgtaagctcggaattcttttcgagggaaaacgctcaaattaggctgtcagatccatcacagtaccagtcaatagttgatgcagaatggaatatcatttatgacaaactagacaaatgtgttgagagtggagcaaaagttgttctttctcgattggctattggtgatctagctactcagggttttgccgatcgtgatattttctgtgctggtcgtgttgctgaggaagatcttaaccgtgtggctgctgcagctggaggaacagttcagacaagtgttaacaacataatagatgaggttcttggaacttgtgagatttttgaggaaaaacaagttggtggggagagatttaatatattcagtggttgcccttcaggacgaacagcaactattggtctcccgtggtggagctgatcagttcatcgaagaagctgagcggagtttacatgatgcgattatgattgggagaagagctgtgaagaacctcaactggtggtcctggaggtgggagctttagatatggagataagcaagtacctgaggcagcattcaggaacaattgctgggaagtcacagcttttcatcaactcttatgcgaaggctctanatgttattccacgacattcatgtgataaggctggatttgatgcaactga

SEQ ID NO: 97820 - DNA, 798 bp, Arabidopsis thaliana columbia
  unsure (1)..(798): unsure at all n locations
aatacgactcactttagggaaagctcgtacgcctgcaggtaccggtccggaattcccgggtcgacccacgcgtccgctttcaaaacacattcttggtctttcttgaattactcagaattttcttctctcttcttctctaaaaaacccaaattcaaaaatctgtctaaatcttcccaactcttggtggggttcttgaaagtaaaaaactttgttgaaaaaaagaaatgaagcaaattgttataacagctcttgttttactacaagcttatgttcttcatcaatccacatgtgttatgtcccttactacacaagaatctccttctcctcaaccttctgctttcactcccgccttatctcctgattatcaacagagagagaaggaattgcataaacaagagagtaacaacatgagactggttatttcactagcagctacattttccttagttgggataatcttactttgctctctgctttattggttttgccataggagaagaaacctcaagagctcaggttggtggtgtagtggaatcacattcttgaatcggtttagtcgctcaanacattagacaagagaactacaaagcagggaacagtgtcattgatcgattacaatatactagaagaaggaactnagtggttcaaggagagtaacattttgngtcaagggtgatntggatgtgtatattctgccacattagagacaacatttcagctgcggttaagaagctagactgtgccaatgaagatgcagcanaggaatttaagagtggaggtgagatattgagtnagctc

SEQ ID NO: 97821 - DNA, 569 bp, Arabidopsis thaliana columbia
  unsure (1)..(569): unsure at all n locations
nnnnnnnnnnnnnnnnnnnnnnnnnnnnnnnnnnnnnnnnnnnnnnnnnnnnnnnnnnnnnnnnnnnnntgggtcgacccacgcgtccgtacggctgcgagaagacgacagaaggggagaacgtgtaacacttttgtatatgtagataatagtagaacgaaaaaaaactctttgtagagagattctgcttctatatggctttctcttacgcatcattctctatacccttcaatggtttcgctgcaaatccgtctccgattacttccgcttttctcggcccatcattgagattctccaccagaacatcaaaaactcggaatccgagtaatggggtttcagtgaaatcgtcaaatagtcataggtttctagtcaaatctaaaaatttcagtgtctatgcaagggctgcagcagagaagtctgttcacgatttcactgtaaaggacatcgatggtaatgatgtttctctggacaaattcaaaggaaaacctttgttgatcgttaacgttgcgtcaagatgtggtttgacatcatcaaattactcagagctttctcaactgtacgaaaaatac

SEQ ID NO: 97822 - DNA, 736 bp, Arabidopsis thaliana columbia
cattcttccaatcgcacttcctttaccagatcagacgtcaatttcaactcttcagtgaagagatttctttcaccgaattttctactccgatcgatcaattgaagattgaaatggaagctaattcaggcggaggaggaggagctgaaggcggaagagcggtaaccggaggaggaggaggaggaggagggagcgatgtggaattggtgagcaagacgttgcaagtggagcataagctattctattttgatcttaaggagaatcctcgtggaaggtatctaaagatatcggagaagacgtcggcgacgaggtcaaccatcattgttccttcctccggcatctcttggttccttgatctcttcaactactatgtcaattctgaggaacacgagctttttagcaaagaattgcagcttgattccaaggtgttttacttcgatatcggtgagaacagaagaggacgcttcttgaaggtgtcagaagcatcggttagtagaaatcgaagtaccattattgttccagctggaagctctcctgatgaaggatgggcagctttcaggaatatattggctgagatacatgaagcatcaggactttttgtgatgccaaatcaggtgaaaccttctgatggacaggaacacttggttgatgatgttggagctggttttatacctgggcatggtagtcagcagccatcttcttcagaacataatgtggatcgcacaattgactcgccagg

SEQ ID NO: 97823 - DNA, 803 bp, Arabidopsis thaliana columbia
agtaatcagagctgaccagaacgggttcttctttgatcttgggaacaataacgggggccatttcttaaggatatctgaggtggcaggttctgacaggtcttccatcattctaccgttatcgggtcttaagcagtttcacgaagtaattggtccctttgtggagatcaccaaagataaaattgaaggtatgacaggtgcaaatgtcaggacagttgatcctcctcagagataagtattgattctcttagaggatggaaattttcaatcctctaaccatttgaatctggcaacttcaagtcgactgcctgatcgcggtgtgcaatagtttcacgtaatatctctcgccccttcacatcttctaaaaataattcagcaggatcatcatttgccttaatagtagataaaacaaactttggagtccgcaactgggaataagctgaaaatcatccaccatgtgtatctctctctctctgtatctctctctctctctctccctccctccctcatttgcttctgttctgttttaactttttttgtttttgttcagtttgggtcattgggtgtatatctgttgacggcttgatgcatttcaattgtaaaagaatattggggtttatatgtttgggctaatgcctgttggaataaaagatgaagtgtaagttctatacatgagttacgaattctttttggtcttgtctgaaaaaaaaaaaaaaaaaaaaaaagggcggccgctctagaggatccaagcttacgtacgcgtgcatgcgacgtcatagtcttctatagtgtacctaatagaatcg

SEQ ID NO: 97824 - DNA, 715 bp, Arabidopsis thaliana columbia
tacgcctgcaggtaccggtccggaattcccggttcgacccacgcgtccgcccacgcgtccgcccacgcgtccgcccacgcgtgcgtacggctgcgagaagacacagaaggatacggctgcgagaagacgacagaaggatacggctgcgagaagacgacagaagggtacggctgcgagaagacgacagaagggctggttgcgagaagacgacagaagggcaacacatacatctatacattgaaaacaaaatagtaataatcatcatggctaagtttgcttccatcatcacccttatcttcgctgctcttgttctctttgctgctttcgacgcaccggcaatggtggaagcacagaagttgtgcgagaagccaagtgggacatggtcaggggtttgcggaaacagtaatgcatgcaagaatcagtgcattaaccttgaaggagccaaacatggatcatgcaactatgtcttcccagcacacaagtgtatctgttacgtcccatgttaaatctaccaataatctttggtgctaaatcgtgtgtattttacataaaataagtctctgtcactctatgagtaactttatgacatgcatatttctgttttaatgtttattttcccgttgttgttccaataatataaaaataatttatgtaaaaaaaaaaaaagaaaaaaaaaaaaaaagcagccgctctagaggatccaagcttacgtacg

SEQ ID NO: 97825 - DNA, 451 bp, Arabidopsis thaliana columbia
tacggctgcgagaagacgacagaagggtacggctgcgagaagacgacagaaggggatgaagggaataactctagagacagggacaaaagtactcactcagcaactgttgttgacgatctaaagtatcgtttgatggatactaccaaagagtttaaggatgttcttaccatgagaaccgagaatatgaaggtccatgaaagtagaaggcaactcttctcttcaaatgcttcaaaagaatcaacaaacccattcgttcgccagcgtcctttggctgctaaggctgctgctagtgaatctgttcctcttccatgggcaaatgggtcttcttcatcttcatctcagttagtcccatggaagccgggagagggagaatcttcaccattgttgcagcagagtcaacaacaacagcaacagcaacagcaacaaatggtcccattgcaagacacatata

SEQ ID NO: 97826 - DNA, 1301 bp, Arabidopsis thaliana columbia
  unsure (1)..(1301): unsure at all n locations
gaaatgcagagtccatcagagaagattattgggaaaagttcaatggctacttcagtagatattggnttgatggatgattttntcgagatggaaaagctcgctgctttgccgcattctgaacctggaagaaaacattcagagagtaacaaggagttagagaaatctaatgctcacgttaaccaactaaagcatgaaccccgcgcctggcttcgcagaatttctgaactggaagaaaaagtagagatggtagaggtagagaaactacaattggagatggctttgaacggatccaaagagcagatcgaggcattgcagagtcgactaaaggagatagaggggaagttatcggagatgatgaaactagaagcagagaaccaggaactagagttgttgttgggtgaatcaggaaagcaaatggaggatcttcaaagacagttaaacaaagcacaagtgaatctgtcagaactagagactagaagagcagagaagctggaactgaccatgtgtttaaatggaacgaaaaagcagcttgagacatcgcaaaatcggctaaaggagacagagagaaagttaacagagcttcaaactctgctgcatctaacaaaggatgcaaaagaagcagctgaggatggtttaaaggctgcaaacgggaaaactgaagcgattgaatcaagacttaaagatgtcgaagcagaagcggaatctttgatcttgaaaatcaagtcactggaagacgtcacagagaaggaacgtgctttatcagcaagacacaattcaaagtgcaacgaactgcaagatgagatctcaagactaaaacaagaactcgagcatcatcaagaaacagagcctgcgcctaaccatatcaaaggttttgagctgaagcaggagaaggaactagcagtggctgcttcaaagtttgcagagtgccagagaaccattgcgtcgctggggcagcgattacagtcactagctacatttgaagatttcttgattgaatcttgaggagcaggagcttcgtgaatggtgagaagaatgaatagactctgaaatgtggatgatgttgatgagcagtttatctgcaaaagagacttggagatcccattgatgaacataaaagtgtagtagagaacacatgaacaaaaaggagtctctgtatacatgagaaagtaaacaggattgagattatttgtccatagaagccatggaaagagaaggttattgtctttctaaaaaaagggcggccgctttaaaggatcccagcttacgtacgcgtgcatgcgacgtcataggtttttctaaaa

SEQ ID NO: 97827 - DNA, 587 bp, Arabidopsis thaliana columbia
  unsure (1)..(587): unsure at all n locations
ganccantnnccctctgcggttgccccncaccaaacctgtgaatttcgggggaacacttggaaatgagagaattttcattgatgaagactttgctaaaatcacagtccgtcatcatgcagttgataaaacttaccagtcaggctctcttttcccaaaccagggttatttaccagtagaggctttggttctagatattgaagcatgggggttaggtggaaacaaggctagggaaattcaacaaaaataccagaaaagagaagagcttttcactaaccaacgtcgaaagatcgacttgaaaacgtttacgaactgggaagattcacctgagaaaatgatgatggatatgatgggtaatcctaatgctcctagaaaggaagagaggtaatgaatgaaagacgagaactggtttgatatatacacacatatacgttgttgtctcttaaaatatatatgcaagaaactccttttgctgttcatgagctcttggattcaatgtgtaagttatgtatactagtgttgccttttcttgaaccagccagttgatttgatatttgcctataaaaattggtttttattaaaaaaaaaa

SEQ ID NO: 97828 - DNA, 505 bp, Arabidopsis thaliana columbia
  unsure (1)..(505): unsure at all n locations
nnnnnnnnnnnnnnnnnnnnnnnnnnnnnnnnnnnnnnnnnnnnnnnnnnnnnnnnnnnnnnnnnnccacgcgtccgcccacgcgtccgcccacgcgtccgcccacgcgtccgctttgatgacgttcacccaaacaaggcggatgtgataatggccttggcaggatcaagcggaggctcatgggctacgggtttgtctcagaaaccgaagtcgaagaacaacacaagtgacggtccatacaagctaggccaaatgtatgaaggaggcagctctaaggaaacaccacaaatgcccccggaatttcgtgcaaggccgagtcatcaacctacctccagtgcctgtcaccggatctttacacaaccaggtagagagcatcaaggaagcatcatctcaaggggacgagatatcagagatccggttcacagatcagatcctgaaaaagaagccacatggattaaagtctgaatatgagagacgatgagtgtggctgttcttctaagttgtt

SEQ ID NO: 97829 - DNA, 386 bp, Arabidopsis thaliana columbia
  unsure (1)..(386): unsure at all n locations
ggaagctttgaggaggcaatcggagttatctgagttagaaaaacagtctttaaggaaacaagccataaaagagagtaaacggatacaggaactgtctaaggaagttagttgtctcaagggtgaacgtgatggagctatggaagagtgtgagaagctcaggttgcagaatagtagagatgaggctgatgctgaaagcacattgagatgcatcagcgaagattcgagtaatatgattgaggagattagagatgaactgagttgtgagaaggatttgacgagtaaccttaagttgcagttgcagaggacacaagagtcaaactctaatttgattcttgctgtganggatctcaatgagatgttggagcagaagaacaatgagatatctt

SEQ ID NO: 97830 - DNA, 3189 bp, Arabidopsis thaliana columbia
taccggagaaatggcaagcccacataagccgtggagggcggagtatgcaaagtcgtcgaggtcttcatgtaaaacttgcaagtccgtcattaacaaggagaactttcgtcttggaaagttggttcaatctactcacttcgatggcatcatgcccatgtggaaccatgcttcttgtatactgaagaagacgaagcagataaaatcagttgatgatgttgaaggcatagaatcacttcgttgggaagatcagcaaaagattagaaaatatgtcgaatctggagcagggagtaacacaagcacaagcacaggcacaagcacgagcagtaccgctaataatgccaaactagaatatgggattgaagtgtcacaaacttcccgtgccggttgcagaaagtgtagcgaaaagatcttgaaaggagaggtacgtatattctccaagcctgaaggcccgggtaacaaaggtttgatgtggcatcacgctaaatgtttccttgaaatgtcttcctctactgaactggaaagtttgtctggatggagaagtataccagactcagaccaagaagctcttcttcccttagtgaagaaagctctgccggcagccaaaactgagacagcagaagcacgtcaaacaaattcaagagcaggcacaaaacgaaaaaatgattctgttgataacgagaagtcgaaactagcaaaaagtagttttgacatgtctacaagtggtgctttacaaccttgtagcaaagaaaaggaaatggaggcccaaactaaggaattgtgggacctgaaggatgatctgaaaaaatatgtaacatcagctgagttgcgggaaatgcttgaagtaaatgaacaaagtacaagaggatctgaacttgatctgcgtgataaatgtgctgatggcatgatgtttggcccactcgctctctgcccaatgtgctctgggcatctttctttctccggaggactttaccgatgccatggatacatctcagaatggagcaaatgttctcattccactttggatccagaccgcatcaaagggaagtggaaaatccctgacgaaacagaaaatcaattccttctgaagtggaataagtctcaaaagagtgtgaagccaaaacgtattctgcgtcctgtattgtctggcgagacatctcagggtcaaggttctaaagatgcaactgactcctcaaggagtgaaaggctagcagatcttaaagtttcaattgctggaaatactaaggaaaggcaaccatggaagaagagaattgaggaagctggtgcagagtttcatgctaatgttaaaaaaggtacaagctgtttggttgtttgtggactgacagatatcagagacgctgaaatgagaaaggcaaggaggatgaaagtggcaatcgtgagagaggattatttggttgattgttttaaaaaacagaggaaacttccatttgacaagtacaaaattgaagacactagtgagagccttgtcactgttaaagtaaaaggacgaagcgctgtgcatgaagcgtctggcctccaagagcactgtcacattcttgaagatgggaacagtatctataacacaactctgagcatgtctgatctctctaccggtatcaatagttattacatactccagataatccaagaagataaaggttcagattgttacgtatttcgtaaatggggccgagttggaaatgaaaagattggtggtaacaaagtggaggaaatgtcaaagtctgatgcggttcacgaattcaaacgtctatttcttgaaaaaaccggaaacacatgggaatcttgggaacaaaaaacgaatttccagaaacaacctggaaaatttctcccgttggacattgattatggagttaataagcaagtagccaaaaaagagccatttcagaccagtagcaaccttgctccatcattaatagaattgatgaagatgctttttgatgtggaaacttacagatctgcaatgatggagttcgagataaatatgtcagagatgccacttgggaagctcagcaaacataatatacagaagggttttgaggcattgacggagatacagaggctattgactgaaagcgacccccagcctactatgaaagaaagcttgcttgttgatgctagtaacagattttttaccatgatcccttctattcatcctcatattatccgagatgaagatgactttaagtcaaaggtgaaaatgctcgaggctctgcaggatatcgaaatagcttcaagaatagttggctttgatgttgatagcaccgaatctcttgatgataagtataagaagctgcattgcgatatctcaccacttcctcatgatagcgaagattatcgattaatcgagaagtatcttaacacaactcatgccccaacgcatacagagtggagtcttgagctagaggaagtttttgctcttgaaagagaaggagagtttgataaatatgctccccacagagaaaaacttggcaataagatgctcctatggcatggttctcgattaacgaattttgttggaatattgaaccaaggactgagaattgcacctccagaagctcctgctactggttacatgtttggaaaagggatatactttgctgaccttgtcagtaaaagtgctcagtactgctacacttgtaagaaaaatccggtgggtctaatgcttctgagtgaagttgcattgggagaaatacatgagctaacaaaagctaagtatatggataaacctccgagagggaaacactcgaccaaagggctcggcaagaaagtgcctcaagattccgagtttgccaagtggagaggtgatgtgactgttccctgtggaaaacctgtttcatcaaaggtcaaggcttctgagcttatgtacaatgagtatatcgtctacgatacagcccaggtgaagttgcagttcttgttgaaagtaaggtttaagcacaagagatgagcctgaaccaaacaagaagacgtcacttctgttaactaaatgtttttttgggaaatcgaatccaacacgaagacttaacttttgtaactaaattgcttttgataaattgaattcaacatgtagtcacagatttaactctctggcgttgtagatgtttctggttttaaaagagcgtactctacattttgttatgctttttctcagtaatgacacttcttaagacttaa

SEQ ID NO: 97831 - DNA, 460 bp, Arabidopsis thaliana columbia
  unsure (1)..(460): unsure at all n locations
tttgtttctctatctctttctcacaattagattctgtgcttcttctgcgatcaactaagatccgatccgcgagcgtttcagacttcgatcagatccgattaagagaagcaaatcgggtcgggtatgactcgtcgatgttctcactgcaatcacaatggccacaactctcggacttgtcccaatcgcggcgtgaagctctttggtgttcggctcaccgaagcttcgatccggaaaagtgcaagtatgggtaatcttagccattacacgggttctggatcgggtgggcatggaacccgggtccaacattccggggttctccgggtgatgtcccctgaccatgtcgcttggtgatgggttacgggttctaaggnttttcggttccttgggntctttccccttggcccccggggagaaagaaaaggaacctcccttggccaaagggagggcccaaggttttttt

SEQ ID NO: 97832 - DNA, 617 bp, Arabidopsis thaliana columbia
  unsure (1)..(617): unsure at all n locations
nnnnnnnnnnnnnnnnnnnnnnnnnnnnnnnnnnnnnnnnnnnnnnnnnnnnnnnnnnnnaactctatctcacaatgagattcccacgcgtgcgctgtgcttcttctgcgatcaactaagatccgatccgcgagcgtttcagacttcgatcagatccgattaagagaagcaaatcgggtcgggtatgactcgtcgatgttctcactgcaatcacaatggccacaactctcggacttgtcccaatcgcggcgtgaagctctttggtgttcggctcaccgaaggttcgatccggaaaagtgcaagtatgggtaatcttagccattacacgggttctggatcgggtgggcatggaaccgggtccaacactccgggttctccgggtgatgtccctgaccatgtcgctggtgatggttacgcttctgaggatttcgttgctggctcttcctctagccgcgagagaaagaaaggaactccatggacagaggaaggacacaggatgttcttattaaggtttccagaagcttggggaaaaggtntttggagggntttnaagnaacttttncccctngggacctcaaaagtttngccattttaanannttaatagnanccattntc

SEQ ID NO: 97833 - DNA, 497 bp, Arabidopsis thaliana columbia
  unsure (1)..(497): unsure at all n locations
nnnnnnnnnnnnnnnnnnnnnnnnnnnnnnnnnnnnnnnnnnnnnnnnnnnnnnnnnnnnnnnnnccacgcgtccgctttttttgataggactactgggaaggaacctggagaagcaagctccaccgccactacggcggagactgtggaggagagatcaggctccggaagatggcggcggccgagagatttaaagggtggcggcgatatcgaagggattccacaggttttgggtcgtttggtttcgaatggttcaagtaagattgcatgtctttacacacagcaaggcaagaaagggactaaccaagacgccatgctcgtctttgagaacttttgttcgagagacgatacagtgttttgtggtgtattcgatggacatggaccatttggtcatatggttgccaagaaagtccgagatacattgcccttcacactcttaacccagttgaaaatgacctcagagccagatcaaagcagcttagttggtgccaatggttt

SEQ ID NO: 97834 - DNA, 533 bp, Arabidopsis thaliana columbia
  unsure (1)..(533): unsure at all n locations
ctcgtgggtcgacgcaagactctatactgattcgtattagacagaaggggacaccgtgaaaggcaatggagtcggctaaatcaatcatcggtggccaccaaaatgtcatcctgatgcgtcatggtgatcgactcgacaatttcgagccactctggacttcaacagctgcgagaccgtgggatccaccgcttgctcaagacggtaaggatcgggcctttagaactggtcagagaatccggtctcaacttggggttccgattcaccgtgtcttcgtctcccctttcctccgctgcatccagaccgcttccgaagtcgttgccgccctctcagccgtcgatttcgatcccattgctatgtcatctaaagacgtgctttccatcggcaatactaagatcaaggtggctattgaatttggattgtccgagaaaccggacccaatcttttattcaagagtgaaggttgcttccaaagattggggaaattttggttnnaagatttcagntctttnaagntnttttttccttaaggacaag

SEQ ID NO: 97835 - DNA, 539 bp, Arabidopsis thaliana columbia
attttacctaagagaacagaaaaaagacacttagcaggtgaaacaatgtcgtttagaaaagtagagaagaaaccaactgaaatgggccgaaacatgacccacgagaagtcggactctgattcggacaacgaaggagcccccatgactgttggaggttacactgaattcgttgcccgcagcgactctgactgggacgaaccggtttattctggcaaagcccgttctaattataacctcaccggcaccgcaaaaggaactggtcccatcaatagcttcagccgcaaacacttccctaattactaatcatatggccagggctacgtaaaagtgagaaacgaagacatgcaggctcactagctagttgaataatgcccatataaattatgtactatgtctgaatgtaataaataagaatccaaggatggatgatgacgcatgaacatatcaatgattatagtctcattgtgctttcatgcagtatttatacaaagcacttatggaatgagtatgttacataactctacctatacttctattga

SEQ ID NO: 97836 - DNA, 688 bp, Arabidopsis thaliana columbia
  unsure (1)..(688): unsure at all n locations
tgatctnnnnnnnnnnnnnnnnnnnnnnnnnnnnnnnnnnnnnnnnnnnnnnnnnnnnnnnnnnnnnnnnnnnnnnnnnnnnccacgcgtgcgtgcggctgcgagaagagacagaaggggaaggcaatacattttacctaagagaacagaaaaaagacacttagcaggtgaaacaatgtcgtttagaaaagtagagaagaaaccaactgaaatgggccgaaacatgacccacgagaagtcggactctgattcggacaacgaaggagcccccatgactgttggaggttacactgaattcgttgcccgcagcgactctgactgggacgaaccggtttattctggcaaagcccgttctaattataacctcaccggcaccgcaaaaggaactggtcccatcaatagcttcagccgcaaacacttccctaattactaatcatatgggcagtgctacgtaaaagtgagaaacgaagacatgcaggctcactagctagttgaataatgcccatataaattatgtactatgtctgaatgtaataaataagaatccaaggatggatgatgacgcatgaacatatcaatgattatagtctcattgtgctttcaaaaaaaaaaaaaaaaaaaaaaaaaaaaaaaaaaaaaaaaaagcaaccgctctagaggatccaagcttacgtacgcgtgcatgcga

SEQ ID NO: 97837 - DNA, 884 bp, Arabidopsis thaliana columbia
caatgaattgtaacaacagaagaagatcaagacagctgcaaaccacacaagcttacttgtccgttatgtcgtggacatataagagaatgggtagttgttaaagcagctcgatgtttcatgaactcaaaacatagaagctgttcttgtgagacttgtgatttcagtggaagctattccgatctgagaaagcacgcaaggcttctacatccaggagttaggccatcagaagcagatccagagagacagagaagctggaggaggctagaaaggcagagcgatttaggggatttacttagcacactccaatcttcttttggaggagatgaaataagtaacgatgatgggtttctatttgctgatactcgcttgcttacagtgtactttctcatccgcgtgtttagaccagaatcgagtggctcaaggagtagtagctggtctggtacatctagagctaggacacatacaagtgggagaagaagatcttcaagacctgcaagtctttggggagagagctatgaaggtaatacaggaacatcacctagagatgaggagaataatcaatcttctgatgaacaagtgtctggaactcggagacgtcgttctagaagaagaactgtcattgatgatgatgatgaagaagaagaaccgtgatgctctgcagtttggaaatttggtctttggagtttatgataaaatgggggaaaccttgtagtaataaccccacttatgaaaccctattatgtaaaatttctttggagattgaaaaaagtttctactattgggaaaaaaaaaaaaaaaaaaaacaaagggcggccgctctacaggatccaagcttacgtacgcgtgcatgcgacgtcatagctggtctatagtctaaagggaat

SEQ ID NO: 97838 - DNA, 748 bp, Arabidopsis thaliana columbia
  unsure (1)..(748): unsure at all n locations
nnnnnnnnnnnnnnnnnnnnnnnnnnnnnnnnnnnnnnnnnnnnnnnnnnnnnnnnnnnnnnnnnnnnnnnnnccacgcgtgcgcccacgcgtccggctgcgagaagacgacagaaggggaaggaaaaatagaaacaaaaaatggggaattgtttaaggcatgaatcagaaatgcattgggctggtgaagactgggatgaattcatcacagaagatgaagaagatcatcattatagctctaaaaccacaagagatggcaaaccagtaattgtaacacgtgacagtaaatcctctgttccatctcatgagatcaagatcaggctcacgaagaagcaactccatgatttactgagtaaagtcaacgtccatgacttgaccttccagcaacaaaccttctcatgtccaatcctgaacaatcgcgggtacgaagaagtcaatcaacaacggttatggagaccggttctacagagcataccagaagttaactgagttttgttttcagagatggccatgtttgtatatgcttagggcttcttcactttcttgatatgtgttagggtaagagttttgatgtaaattttggtttggacacatgacgcttctgtttttgtttgttagaatgtaaataaaaaagcataaaagccccaaaaaaaaaaaaaaaaaaaaaaaaaaaaagcggccgctctagaggatccaagcttacgtacgcgtgcaggcgacgtcatagtcttctatagttgcttcctaa

SEQ ID NO: 97839 - DNA, 482 bp, Arabidopsis thaliana columbia
  unsure (1)..(482): unsure at all n locations
ggtccctgaaacctctcttcagaaaactcaggcaccattttctccttccgccgccgccatggaatcacttccccagccgcaaaaccaatcatctccggcaacaactccggcgaagatcctccttgggaaatacgaactcggtcgtcgtctcggtagcggaagcttcgcgaaagtccatttagctcgatcaatcgaatccgacgagctcgtcgccgttaaaatcatcgagaagaagaaaacaatcgaatccggtatggaaccaagaataatcagagagatcgatgcgatgcgtcgtcttcgtcatcatccaaacatactcaagatccatgaagttatggcaaccaaatctaagatctatctcgtaatggaactcggttccggtgggtgaactttttttnaaaaagtcctccgtcggggtcggttttcnnaatnaacggngggggtggttanttttnaanaaantggncncccgnttttgggtt

SEQ ID NO: 97840 - DNA, 630 bp, Arabidopsis thaliana columbia
  unsure (1)..(630): unsure at all n locations
atcgactcacttagggaaagccggtccgcctgcaggtaccggtccggaattcccgggtcgacccacgcgtgcgcccacgcgtccgcccacgcgtccgctcgcttccggtggtgaacttttagctcgatcaatcgaatccgacgagctcgtcgccgttaaaatcatcgagaagaagaaaacaatcgaatccggtatggaaccaagaataatcagagagatcgatgcgatgcgtcgtcttcgtcatcatccaaacatactcaagatccatgaagttatggcaaccaaatctaagatctatctcgtaatggaactcgcttccggtggtgaacttttctcaaaagtcctccgtcgtggacgtcttcctgaatcaacggcgcgtcgttactttcaacaactcgcctccgctcttcgtttctctcaccaagacggtgtcgctcaccgtgatgtgaaacctcagaatctactcttagatgagcaaggtaacctcaaggtctctgactttggtttatcagctttaccggagcatctacaaaacggatttgcttcacaacggcgtgtggctactccggcttatacaagctccggagggtntttnnncgggnggggggtnacggccggggcnaaaannnt

SEQ ID NO: 97841 - DNA, 739 bp, Arabidopsis thaliana columbia
ttccgggttgagcacgcgtcccacctctagttcaaggccaccaagaatccagaatcatctaagacactggcttggcacacaagtgttggaaattgaagattcatctcctgaagtaagggtcttccggggtcccagacgtgttgaaaatgatgtatctgatgtgaatataagacaaatagaagcagatgagatactggcccgtgaattacaagaacagctgtaccgagaagagtcgttgatcagacacgagcagatcgatgaaatcatagccaggtcgatggaacaagaagagaattctctccgggcttcttctagtcgtgcttctactcgtattacccgaagctctaataccatcgcagcaaatccacgtgggagaagtcgcctggaagcacgactgcaacaacattcttcaaggaggcgattcaatcctccacaggcccgtgctcctgttagagcaccagcacggggtcgaggttatcgtttaggcggtgcatctgcttcactacgtacagctctgaatttcagttttccaattgatatgggcttagactcgaaaatggatattctggaggaaatagagaatgctattggacacttcattaccagtagtaatcttctttatatggatcgggactttactgaaaatgaatacgaattgctggtagcttttgatgaaaacaaccttcgacatggcggggcttttgctaatcgcattaacaacttgccagagtctacagtt

SEQ ID NO: 97842 - DNA, 518 bp, Arabidopsis thaliana columbia
  unsure (1)..(518): unsure at all n locations
aaagaaagagaaaaaaaagctttcgtagtgtctattgaaaccagagaaaagccaaaggggatgcaaccaacatccgtcggtagtagcggcggtggtgacgacggaggaggcagaggaggaggaggagggctaagtagaagtggactatctcggatccgttcagctccagcgacttggcttgaagctttacttgaggaagatgaagaagagtctttgaaacctaatcttggtctcaccgatttgcttaccgggaactcgaacgatttaccgacaagtcgcggctcgttcgagttcccgattcctgttgagcaagggttgtatcaacaaggtgggtttcaccgacagaatagtactccggcggattttcttagtggttctgatggatttatccaaagctttgggattcaggcgaattaccgattccttatcggggaaatcgatgtttctccgggaagnaagcggccttgagaaatggaagacttttttttcnccnagtnnttccaaatnaagggnnaanc

SEQ ID NO: 97843 - DNA, 519 bp, Arabidopsis thaliana columbia
  unsure (1)..(519): unsure at all n locations
annnnnnnnnnnnnnnnnnnnnnnnnnnnnnnnnnnnnnnnnnnnnnnnnnnnnnnnnnnnnnnnnnnccacgcgtccgcccacgcgtccgcagcgatttcataaaagccaaaaatcaaataacgatgatgaaagggatctcttcagtttctcaatcgatcaattataatccatacatcgaattcaatcgaccgcagcttcagatcagtactgtgaatcccaatccagctcaatctcgattttcccgccctcgatccctccgtgttctctcactctccgccgatccatcggcaaatcggaatcctaaatcagccgttgacgcacacgcgccgccactggtggttgtgggatctgcgaacgccgatatctatgtggagatcgagagattacccaaggaaggggaaacgatttcggccaagacagggcaaacgctcgccggaggaaaaggcgcgaatcaggcggcgtgtggagcgaagctaatgtatccgacttacttcgttggtcgtttgggagaggacg

SEQ ID NO: 97844 - DNA, 592 bp, Arabidopsis thaliana columbia
  unsure (1)..(592): unsure at all n locations
ggagcaccagctttggctattgcagttgtcttggcttgcgttgttatgtatgatgcctctggtgtcaggcttcatgctggtcgtcaacccgagctgctgaatcaaattgtttgtgagtttcctccggagcatccattatcaacagttagaccattgcgtgaactgcttggccacactcctatccaggttgcagcaggtgggattttaggatgcgtggtagcttacttaatgaggagctcaagctagtcagtctctctacacaagaacaaatcccgaattcttttgaaatcatagacccttcaggtactaagatagattcagcgatatcaagtgacgctagattattggagtaaatggaaattgttaaatctgtgtaatatatagatgatcttagttagacttgtcattgtttaagcttacgccttctcaacattctctctctctctctatatatatatatatataatctctctatttcctcttcctcctnnnnnnnnnnnnnnnnnnnnnnnnnnnnnnnnnnnnnnnnnnnnnnnnnnnnnnnnnnnnnnnnnnnnnnnnnnnnnnnnnnnnnnnnnnnnnnnnnnnnnnn

SEQ ID NO: 97845 - DNA, 708 bp, Arabidopsis thaliana columbia
  unsure (1)..(708): unsure at all n locations
attcgactcactttagggaaagcacgcacgcctgcaggtaccggtccggaattccacgggtcgacccacgcgtccggcgagaagacgacagaaggggatcgaaaacaattcaatactctcttctcctgaatctctttacctttttacgttgacattgatcctcgcagtgtctgattttgatcgaagaagaagaagagatcgggattttttcgcggttgtatatcgcctatggacgaggtgatgacagcggcggacgttggttcgttaggtggcggcaatagggcgttgtacggatctcctccgtcgcataatctgtttcctcacaatctcccaatcttctccgcttttcttgccttcgctcttgctcagttcctcaaagtcttcactaattggtacaaagaaaagaggtgggactctaaacgtatgattagttctggtggaatgccttcttctcattctgctactgtcactgccttagctgttgccattggctttgaagaaggagctggagcaccagcttttgctattgcagttgccttggcttgcggtgtaatgtatgatgccnctggtgtcaggcttcaatgctggtcgcaaagccgagttctgaacaaaattgttttcaagttccccccgnggatncatttnaacagttaggcnatgnggacctgttgcaatccntccggttaacagggggttaggntcgngnta

SEQ ID NO: 97846 - DNA, 564 bp, Arabidopsis thaliana columbia
  unsure (1)..(564): unsure at all n locations
nnnnnnnnnnnnnnnnnnnnnnnnnnnnnnnnnnnnnnnnnnnnnnnnnnnnnnnnnnnnnnnnnnnnnnnnnccacgcgtccgtgcggctgcgagaagacgacagaagggggacgaagacaaaacaaaaaaagcttcccccaagaacaaaaagttagcatagatgaagagtcttcgggttttgtagtttttgtaaaacagaaaaaaaaaaagagaagaagagatgggaggttgctgttgttgttcttcttcacgaagagctgatgtagataatggacctgcgtactactacccaagggcaacagaagagcgtgtgcctttatcttccgctcataacaggacttcctctgcaatctctactggtgttgtagtagtagacacaaacttagagacatcatctcctgatgcttatataccaccgccactgcctacccctttcgatgtgcctatagggattcctcaaacaccagctagtggtgaagaggctacttgtgttgatataagagaggtttcggtggactctgctaataccgagtctgctcaagaaacagttgatggtattac

SEQ ID NO: 97847 - DNA, 604 bp, Arabidopsis thaliana columbia
  unsure (1)..(604): unsure at all n locations
gacgaggaagatgatgactggtgggtagcagctgcagaagagtcactaaaacaaatcgcatctctaagtccttccccaaaatgcccttgatttagacatctacctaagtcaagaccaatctggtattcataccagcagagtcatttccatcgatcctctcacatgaaaccttgatcaatcactttcggaccaatcttccgaaacattcatcaacaatcacaagccctgtccggcaaaactacaccgtttcatcaccttcctctctcctcctcatgccttcttggtcatcttcttcttctctcccttacatgggcgtcaagctcgtgacctatttccctcataactcttctcagaacttacctggcatccatggatcctacacactctttagctccactacaggccaaaccttagctacaatgggatggtactgttttaaccctttaccgtacttcctctgtttcaggcttagggatccaaaatcctaggctaggggacgatagtcaagtgctgatcatggttggttccggtgctntnggaccanacctgatcaaatcccatctagcttgcggaaccaagcttgnnaaggagtgntcatatggga

SEQ ID NO: 97848 - DNA, 860 bp, Arabidopsis thaliana columbia
gagattggcagatagaaataatagtcgcattagagggagtggtagagacggtttatcctctgtcacggcagcagagatgtctcagactgaaacatcaaacaatctcaattctcctgtctctttggagctgttctctggttttccagaatttggcctctctggttccttattgagtcatgacagttttcgcagttataatttagatgggatctccgagattctgccagaacttgataggatcgaacaagatatcgaacttaattatgaggatctgcttatcatggaaacaggtttacttctcggtggactaagcttccatgaccaacaccgagacatgaggctagacatcgataacatgtcataatgaggaactattagctctagaagagaggattggtacagtaagcactgcttttgacagaaggaagcaattatcaaagtgcttgaaaacaaagtttctatcagatgaaacctttgagttatgggtctatcaccaaaagtcctagtgataacaaggaagatgccaaatgcagcatctgccaggaagaatatacgattggagatgaagttgggaggctacactgtgagcacacataccatgtgaagtgtgtgcaagagtggttgcggataaagagttggtgcccaatctgcaaagccacagccgaaacctcctctaaataaccgtcttcttcttcttcctcgttcgttgtattagttctttcatctaaagcctgtgaacaacaatggaacctgcgtaaaaaaggcctcaccatttcctttgtgtacataccaattcacaccggctctgtctctctctcccttttgtctaatgacaaagctatcctgtgtttctctttgtc

SEQ ID NO: 97849 - DNA, 526 bp, Arabidopsis thaliana columbia
gccggcactaatacgactcttatagggaaagctggtacgcctgcaggtaccggtccggaattcccgggtcgacccacgcgtgcgcccacgcgtccgcccacgcgtccgtacggctgcgagaagacgacagaagggtttcgagcaaaatttctgagcaacggcgacgatgggagacaccgccttggagaagacagcggaagagctacggcatgagatcgatgagcttcaccgtcaacagcgtgagattacggagaggcttcgtgaccctcgtggactccgccgtggaggcttctcaaacgtcgctcctcgcaaccaaggccgtagaggctttcctcgacctgcggagaggaatgacgtagaagacgagcctcctgctaaaaggagattgtcttccgccgttgttaaggtcgacggtgaagatgttagtaaagatggagaatttccagttgatggtaatggaacccaggttaaagttggtgagaatgggacttctgatcaaagtgacaagaagcaatctggtcttcaa

SEQ ID NO: 97850 - DNA, 514 bp, Arabidopsis thaliana columbia
  unsure (1)..(514): unsure at all n locations
cctttnaccccnggttaaaacntttgaccggtgtnanaaaaanacacttncncccgctnacanctgtaacaagggatnctaaanctntgaaagaatggatgtgacagccgaaagatggaaagaaagcaggatgagatnatncttattggtagtggaatccggatcagacctgtgattcaatgggatgaagaatttattggtgaaggaaaagaaggtcctatagcaaaggcgcttcttgatctgttacttgaagatatgagatctggtccaccttccgttcgtgttcttgttccttactgagccaatcactctctttgttcatcaaagacaataagctgtggcttttttgtaaagctttgctgttattgtaagttgagtttatcatggggtttttaggtatctgtctttgtaaagatttctccttatcaccttttgaattatgattgtacccattctcaaacnaattcgcggcacgcgtaattgcgnatgatncaagacttaatgcgatgaccgt

SEQ ID NO: 97851 - DNA, 574 bp, Arabidopsis thaliana columbia
  unsure (1)..(574): unsure at all n locations
aaacgcggntccctaccnnaccagcccaaaaaatgcggnacatcncgnccaacccgnagctntcggntcgaaccaccngatcngggaaccacaaccaccaccacccccatataccancgntgcagaccaaaccntagctttgcagancctaacccagaccgtgctactactggagattacgccagcttgatgaactatcatgggtttggtattgatgattacaatcgttacgttggccttggaaaccaacaagatggcagatattctaatccccatcaattacacgactttgttgtctaaaagattcctgagcttttcacaagcttaagaactggcaatgccagttgattgggggagtatgattcttgaagcgcaagaaaatgcgctcttggcatttttatagataggggttatacaaatatgtatatctgtaatatttgttgtggcatatataaaggatagattttgtgaaaactttaggtgttagactttacatttgtatatgaaagttgagctttgtgtacactttggtaagcccatattgtgtttggttagaacctccatggtggntaac

SEQ ID NO: 97852 - DNA, 637 bp, Arabidopsis thaliana columbia
  unsure (1)..(637): unsure at all n locations
ccgnnnnnnnnnnnnnnnnnnnnnnnnnnnnnnnnnnnnnnnnnnnnnnnnnnnnnnnnnnnnnnnnnnnnnnnccacgcgtccgagatattaaaaaacccaaacttttatttcccccaatcaaaaaccctaatttcttcttatcttgtttggatttttcatttcttctgtttgattttattccacaaacacaataaaaaagtttgcattttttcctcttctaagctcgtttcagatcttcgatttcaccatttttataaactattatgcgaacttagttttgttctttgtgattttgtatgacaatgatcttcttctctaagcttaatcgctccatttctcgttcaaagggatttttgtacggtggtggtgttagatcggcggcaaggctacttacttcgccgggacttgaggcggcgtctgtgaatgaagtggaaggtggattagggtttataagaagacactttgcttctttagcttcacggaagggtttagtcaataatgatttgattggtgtttttgctaatccaagacttcgtagattcttctctgatgaagctcctaagaagaagaattatgagaactattttcctaaagataagcaagaacccaagagtgatcagaaatcagagcataa

SEQ ID NO: 97853 - DNA, 961 bp, Arabidopsis thaliana columbia
  unsure (1)..(961): unsure at all n locations
ataccggataaggtttgcatggtctctaagacctcaggttcttcctcacagtcctttctaaagaatcatcatccatggatgtacgttgtttgatctctccaaatcttttgaactcgaagattaaagtttccggcaatactcatcacccttcccttttcttccctctccaagaaacaccaagcttcttccccgatacaggcagccattaatggaggagggagctcaaaaacagtgaagcgtctgatcactttatctcctagtgaaggcaaatggaatggaaattggaagactcagtacgatgtctctctgcgtgatcttcaactccaagaccttgttgaagatggccctcccaattcccgtgtctctgtcgacctctctgtccaaaggcacgcgagcatgggcctctcagtagatggaagaatcatgacttctatcgcaagaaagtgcagcatttgctcttctctttatcctcgactgatcgatacaagtttcaccgtctggattttgccatcaagccgggaaaatcgagcttcaacactgccagaaattggcggcgatgatccttcggtgatatatgtcagacctggatatgaagctaaccttgattcccttgtgcaagacactatccgcctcacaacttatgctaaagatatatgctcggattcctgcgaaaaatcggaaccaacactgcactacgttggtcagacaaatacagcttctgtcgataagagatggtcaagactacttgaacttaagaagaagtagaaacctttttattctttgaatctctctgttcaatgtacttcaaagtcttaaaaagattttgattctgttcatcttccaatatatacaagataatacacacatttacaagaaaaaaaaaaaaaaagggcggccgctctagaggatccaagcttacgtacgcgtgcatgcgacgtcatagttannnnnnnnnnaacga

SEQ ID NO: 97854 - DNA, 727 bp, Arabidopsis thaliana columbia
tatacgactcactatttggaaagctgggtacgcctgcaggtaccggtccgaattccgggtcgaccacgcgtccgtccggttgcgaaaggacgacagaggattcgggctgcgagaagacgacagaagggtacggctgcgagaagacgacagaagggtacggctgcgagaagacgacagaagggggcggaaacaaaaaactaagaacggttccatttgttttcattgtctagaagagaagaagaagaaggatgtgtttggtgttcgtgtgtgatcaggacgagagggtgatcggaaggtacgcagctcctggagcgtgtccgtactgcggaggagcggttcaagtggttgacgtaaatagccagtggagattctgcttcgttcctctctctaataaatccaaacgtcgtcatctctgttccacttgcggcaaagcgactcatcgtccatgggctgaaaacaaaactcccacctcatacgagatcatttctatatgtacatatatccaaatccccgaccaaaaaaagtggatcgggtttctaaacgtttgtaaaaaaaaaaaaagaacatgtcttctcttttaagatttccctggatagggatgaatcaggattatgaaaatgagaatttttagggcaagatctttttttagcaaaaaattaaaaaaaaaaaaccccaaaaagcggccgctctagaggatccaagcttacgtacgcgtgcatgcgacgtc

SEQ ID NO: 97855 - DNA, 557 bp, Arabidopsis thaliana columbia
  unsure (1)..(557): unsure at all n locations
acgactcactatanggagagctagcacgcctgcaggtaccggtccggaattcccgggtctacccacgcgtccgtacggctgcgagagacgacagaagggggaagtcatggaacaacaacctcatcgaagacgacgcccaaacccaaaaaaggtctacattcggagaacattctccttgacgacgaggactcgtcggctacgggaggcatggtcacaccgccagactcagatgctccgtccaaattcaggaagccacgcgcgcaccggaagaggatggaggacttggagagcctcggtatcagtagcccgttcaagaagtcttctcgaagggccagaaccccgtttacggaccaagatgaccgcgaaatcttggaggggctggagaagtacggcccagcttggactaaaatccagcgggaccctgcctttcatctacagagccggcagccgacagatttgagggaccgtgttcgcaacaaacaccccgaggtctacaagcgcatcgatgctagcaagggaagccaagcgaagaatctgacgcgcggcaacgacacgat

SEQ ID NO: 97856 - DNA, 660 bp, Arabidopsis thaliana columbia
  unsure (1)..(660): unsure at all n locations
nnnnnnnnnnnnnnnnnnnnnnnnnnnnnnnnnnnnnnnnnnnnnnnnnnnnnnnnnnnnnnnnnnnnnnnnnnnnnnnnnnnccacgcgtncgcccacgcgtccgcccacgcgtccgctcgcttgccttcttcttccgctcacaatctcttcctttctcgttccttctcttcttcgatcagacgattcaatcgcttctcactcaaaccacttcgctccttcgcatccatgtcttcttcttcccccgacgctgctcagactcctctaaccaccgctccttatggctcctggaaatctccaatcaccgccgacatcgtttccggagcttcaaagcgtcttggcggcaccgccgtcgattctcatggccgtctcgtcttgctcgagtctcgccctaacgaatccgggagaggagttttggtgctacaaggagaaacatcaattgatattactccaaaagacttcgctgtgagaactttaacacaagaatacggtggtggtgctttccagatttcatcagatgatacacttgtgttctctaattacaaggatcagcgattgtacaagcaagacattactgataaagattcatctccaaagccaattactccagattatggtacaccagctgttacttatgcagatggagtctntgattcacgc

SEQ ID NO: 97857 - DNA, 401 bp, Arabidopsis thaliana columbia
gagagaaagaaagaaataaaatagaataagagaacttgttgtagcagttgaagcagaaaataaacagagtaacgaatccaacatcacaaaacagaacacaaactaaaaaatggctctgaatagtgtctcctctgaagaatttaccttcccatcgctagcttctcatgattcttctcaccattccggtcttgattcacctcctttgtggaaacactcaccggttacttcctttcgccggaaagattacgactttggtttggcaagattagtcattggaaaagacggtgatcatgatcagaggaagagcttctcgtacgtggagatgagaagtcgttggatcgacgacaaagaagaggagaaaatggatatgttatgggaagatctcaacgaagaattgcctc

SEQ ID NO: 97858 - DNA, 772 bp, Arabidopsis thaliana columbia
  unsure (1)..(772): unsure at all n locations
tgcatctcaggaaagtatatgctgcctcgatcttgtacggttacttcttgaaatcagcttccctaaggcaccagcttgagtgttccttatcagatattcatggaagcggatatctgaaaagtcccatctttggatgctcattcacaacgggcactgcacagatctccaacaagcagcagctgagacattacatctcagactttgatcccgagacattgcagagatgcgcaaaaccaaggacagaggaggcaaggaatctgatagagaagcaaagtttggctctttttggcacggaagagagtgatgagaccatagtgacatcgttttcgagtctgaagcggttggttctcgaggctgtggcgtttgggacattcctgtgggacacggaattgtatgtagatggtgcatataagctgaaggagaatgggaatgcagaagaacaagaaggaaagaaaagcatatgatgaacaagtctggttagaagaaaagcttcatgatcttctggtagtgtatatatagagaaatgtttctgccgaatctctcaggcagttgttcagttcaatgtatagatcttgcttagaaatattttgatttctgaataagaatgtggtgtggttataaggaataagagatactgtagttgggttcaattttatcgttatgtgttaagtttccttgttcaaaaaaaaaaaaaaaagnnnnnnnnnnnnnnnnnnnnnnnnnnnnnnnnnnnnnnnnnnnnnnnnnnnnnnnnnnnnnnnnnnnnnnnnnn

SEQ ID NO: 97859 - DNA, 1211 bp, Arabidopsis thaliana columbia
accaataaaaccgctctcgagagacgaatcgctctcagcttcttctagaaccttctccttctccttcgacgcatcgtcgccttcaagatcacactacctcgcacaacaatggagttctggggtgttgaagttaagaatggcaaaccacttcacctagatcctgggctagacaggctcgtgcacatctctcaggttgctttgggagagagtaagaacaatgtaaccgaaccaatccagctttacgtgactgttggatcggataagcttctcattggaacgctatctcatgagaagtttcctcagctgtctacggagattgtcttggaaaggaactttgcgctgtctcatacttggaagaatgggagcgttttcttctctggttacaaagttgatgcatctgatcccgagcctgaggatttgattgatgatcaacttgaggctgctggtttcaaagctgctccgaaatctgctgcgaaacaggtgaactttcagttgccaaatgaagatgtcaaagccaagcaagatgatgacgctgacggtagtgaagaagattcttcagatgatgatgatagtgaaaactctggagacgaggaggaagagaaggttactgctgaatctgacagtgaggaagatgactcatcagacgacgaagaagatgactcctcagaagaggaaaccccaaagaagcctgaaggacccaagaagaggtctgcagaacccaactcctccaagaaccctgcgtccaacaaggaaggctaaggtttgtaactcctcagaaaacagattcgaaggaaccgcatgtccatgttgcaactcctcatccctcaaaacaggcgggtaagaattctggtggaggcagcactggagagacatcgaagcagcagcagaccccgaagtctgcaggagcgtttgggtgcaagtcgtgcaccagaacctttacttcggaaatgggattgcagtctcacacaaaggccaaacacagtgcagctgcttgagaagaagaagcagcatgatgactactctctataatatctactctagaactttgatgtcttttggtacttaaatctggaacttgcgagtgagccagttttagttggtcttttttttcaggcatttcttcctgtttaactttatcgttttggtagctgaaactgtgctaaacctttgtttgtgtttagtggtatggatattaagtctaaatgtagcct

SEQ ID NO: 97860 - DNA, 405 bp, Arabidopsis thaliana columbia
cataacgaaacagagtttccctgagctacatttaacgaaagaagattgtatggtcaagaaatggatcgaatctagtgttttctgggcgaattatccagaaaaagcaccgatagagttacttcttaaaagagtatcaaccaacgaatactactggaaacgtacttcagattttgttcaagcaccaatctcaaaacagggtcttgcaaagatttttcaaacaatgattgatcgttcgccacttccacgacgagtttggatgcaatggaatccatggggagggaaaatggctgagatagcgtctgatgcgacggcgtttgtgcatagaggtggtaatgttttcatgattgagcatttcatgaattggtatagacctggagatgagcttgaagagaagttcttggcgat

SEQ ID NO: 97861 - DNA, 429 bp, Arabidopsis thaliana columbia
gaatgacagtagacaagacaaggcaaagaagcaaagatcagataatccattttcatttcctcgccagaagcgttctgtaagacctcggatgtacctctccattgactcggattctgagtaatattcttcctgatttgtctgttctgttgtgtctctcttgggatgattcggtgttccttttaattcttaacgctatgcacagaacaatgaacaggatcatcagacaagacaccggagtttaaacaagatttgcataattctctgtgcaggcaagaattgaaccggtattgatattttcacttgtatgatgttgttgactctctcttcaatatcggttcagaatcttggccttgtctgctacactgcaggatgtaatttgcaaagcgaagcactggctgatttagtttctctgatagaaaagaaaagtgg

SEQ ID NO: 97862 - DNA, 510 bp, Arabidopsis thaliana columbia
  unsure (1)..(510): unsure at all n locations
tcccccngacgtcttagcccggttccccccatgccgntctgggaanacccccggattgccggtctgtgggccccctgggatgaccgngtccttngatcttaccccttgcccngaccaatgaccggntcntcagncaagaccccggngttaaaccaggatttgcataattctctgtgcaggcaagaattggaccccgggattgatactttcttcttgtatgatgttgttgactctctcttcaatatcggttcagaatcttggccttgtctgctacactgcaggatgtaatttgcaaagcgaagcactggctgatttagtttctctgatagaaaagaaaagtgggcgcagtggttccgatttaattagtagtttgtatactcgaaataggttttttttgtgtggacgatgataaaattacttcgaagccaggagctatagagagatatagcaatgtaaattatgggctccaaattttatttattaattagaaaaattcagctcttctcctcc

SEQ ID NO: 97863 - DNA, 660 bp, Arabidopsis thaliana columbia
  unsure (1)..(660): unsure at all n locations
ccaggtctcnnnnactcactatagggaaagctggtacgcctgcaggtaccggtccggaattcccgggtcgacccacgcgtccgtacggctgcgagaagacgacagaagggggagacagggcagcaaacaaagaagaagaagaagaagaagaagaagaagaagaagaggatgagttgcgttacaccagcacttcctccttcactctttgctaatgggtatctttcgtctcctcagaatatctccatgaccaacttgaacagttcggtaaaggttagtgattctggtgcttataaatggcgccttgtgatagcctacgatggcacccgttttgcaggttggcagtatcaggagtcaccaccaactatccaatcaatgttagaaaaagccttaattcagattacagagctcggtagaaaagagcttcagcttattggagctggcaggaccgatgcaggagttcacgcttggggtcaggtagctcattttgtcactcctttcaactatactagtttggatagctttcacgctgctttgaacggtcttcttcctaaagatatccgtgtcagagagctgagtgcagcggttcctgagtttcatgctcggttttctgcctctagcanggttatcgctaccagatataccacgacactttcatggacc

SEQ ID NO: 97864 - DNA, 3532 bp, Arabidopsis thaliana columbia
gaagctgcaggagttacaagttctcatcttctctagtcttttacatttcacctccctttcgtcggcgacccaaatccacgttttgggaattcctccctaaaaatcagaaacccttggcttttccaacatggaagacgcctacgccagatctgtctcagaggtgcttgatttctttggggtagacccaacaaagggtctttctgattctcaggttgttcatcattccaggctttatggcaggaatgtactgcctgaagagaaaggaacgccattctggaaactggttctgaaacagtttgatgatttacttgtcaagatattgattgtggctgcaattgtttctttcgtattggctttggctaatggagagactggtttaacagcatttctggagccttttgtcattctgctgatattggctgcaaatgcggcagtgggggtgatcacggagactaatgctgagaaggctcttgaggagctacgtgcctaccaagcaaatatagctacagtgttgcgaaatgggtgcttctctatcctaccagcaacagagctggttccaggcgacattgttgaagttacagtgggatgtaagattccagctgacctgaggatgattgagatgtctagcaatacgtttcgagttgatcaagccattctaactggtgaaagctgttccgtggaaaaagatgttgactgtactttaacaacaaatgctgtctaccaagacaagaaaaatattttattttcgggaactgatgtggtcgcgggtaggggaagggctgttgtcattggagttggttcaaacaccgcaatgggtagcatacacgattctatgttgcagacagatgatgaggcaactccattgaaaaagaagctggacgagtttggcagctttttggctaaggtaattgcgggtatttgtgtacttgtgtgggttgtcaacattggtcacttcagtgacccttctcatggtggattttttaaaggcgcaattcactattttaagattgcagttgcccttgctgttgcagctattcctgaaggacttcctgctgtcgtgacaacgtgtttagctcttggaacaaagaaaatggctcgtttgaatgctattgtacggtcattaccatctgtcgagacgcttgggtgcactactgtaatttgcagtgacaagactggaacattgacaaccaatatgatgtcggtgtctaagatatgtgtagtccaatctgcagagcatggtcctatgattaatgaattcactgttagtgggacaacttatgcaccagaaggtaccgtctttgacagcaatgggatgcagcttgacttacctgctcagtcaccttgccttcatcatttagcaatgtgttcatcactctgcaatgactccatcttgcaatacaatccagataaggattcttatgaaaaaattggagagtcaactgaagttgctcttcgagttcttgcagaaaaggttgggctccctggttttgattcaatgccttctgctctaaacatgttgagcaagcatgaacgtgcatcatattgcaaccattattgggaaaaccaattcaaaaaggtttatgttttggagtttactcgtgaccgaaaaatgatgagcgtcctatgtagccataagcaaatggatgttatgttctcaaagggtgctccagagagtataatagctaggtgtaataaaattctctgcaacggtgatggttctgttgttcctctaactgctgctggccgtgcagagcttgagtcgaggttttacaggtttggcgatgaaacattgagatgcttagcattagcatttaagaccgtgccccacggtcaacaaactatttcctatgataatgagaacgacctgacgtttattgggttggtgggaatgcttgatccaccaagagaagaagtgagagatgctatgcttgcgtgtatgactgctgggatacgtgttatagttgttactggggataacaagtccacagcagagtcactatgtagaaaaataggggcttttgacaatctggtagacttttctggtatgtcctacaccgcttctgaatttgaacggcttccagcagtgcagcaaactctagcattgcgacggatgacacttttttccagggttgaaccttcccacaaaaggatgcttgttgaagccctacagaaacaaaacgaagtggtggcaatgactggtgatggcgttaatgatgcccctgcattgaagaaagctgacattgggattgccatgggttctggaacagctgtagcaaagagtgcttcagatatggttttggctgatgataattttgcttcaatagttgcggctgttgcagaaggaagggctatatataataacacaaagcaattcattagatacatgatttcttcaaatataggggaagtggtctgtatatttgttgcagctgtactgggaatccctgataccttggcacctgttcaacttctgtgggtcaatttggtaacagatggattgcctgccactgccattggctttaataaacaagattccgatgttatgaaggcaaaaccccgaaaggttggtgaagcagtggtcactgggtggttattcttccgctatttggttatcggagtttatgtcggcctggccactgttgctggctttatatggtggtttgtttactctgatggtggtcctaaacttacttacagtgaactgatgaactttgaaacttgcgcacttagagagacaacttatccctgcagcatatttgaggatcggcacccatctactgtggctatgacagtacttgttgttgtcgagatgtttaatgctctaaataacctcagcgaaaatcaatcccttctggttataaccccaaggagtaacttatggcttgttggttcaattatcctgacgatgcttctgcacgtgctaatattatatgttcatccactggcagtcttattttctgtcacgccattatcctgggccgagtggactgctgttctgtatctttcgtttccagttatcatcatcgatgagcttctgaagttcctctctagaaatacaggcatgagattcaggttcagattgaggaaggctgatttactccccaaggaccggcgtgacaagtaggataagaaagcaagagatggctttttcgtcatacagattttttttttggctatatagatacaacagcacacagagaagggaaccttgggagattctaatttcaatccaaaaagcccccaacaccataaaccataaaactctttcgcttttgattgtaccaaatttcactgtattcttacatcaaatcaatgactagtgctctttgtgtcatgcaagtgaatcggaaattctaacatttacaacttaaaatgtgattcgcagattatttggttttaaaaaaaaaaaaaaaaaaaaataaaaaaaaaaaaaaaaaaaaaaaaaaaaaaaaaaaaaaaagggcggccgctcgcgatctagaaccggacgcgtgggcggacgcgtgggcggacgcgtgggcggacgcgtggg

SEQ ID NO: 97865 - DNA, 410 bp, Arabidopsis thaliana columbia
  unsure (1)..(410): unsure at all n locations
aaggatcattaatagatttccaatcgggtctcgtgtagttggagctttcattatgccttgtggaaccngttcttattgtgctaagggccatgatgatctatgtaaagacttctttgcttacaacagagccaagggaactctttacgatggcgaaactcgtctctttttgcggcatgatgattcaccagtgtatatgtatagtatgggagggatggctgagtactgtgttacaccagctcatggtttagctcctctaccagagtctttgccctactctgaatcttgccattctcggggtgtgctcgtttttacagcaatatgggtgccaatggctcatgctgctggaagatccgncccggggggcttttcttttccagttattcgggtaatttggggggttggggggccca

SEQ ID NO: 97866 - DNA, 640 bp, Arabidopsis thaliana columbia
  unsure (1)..(640): unsure at all n locations
tttcttgaccctggaacccnaacttcagcgnnccctagttgaagntggtggaannctntgatgatggcnctcacagctggtccgttggngaattgccntaatcgacttgttcgtagaaggttaaagttataggatcttatggaggaagagcaagacaggatcttcctaaagtagtgaaattggcagagtccagggattttcaatctcacaaacgcagtctcaagtaaatacaagtttgaagatgcaggaaaagcatttcaagatctcaacgaaggcaaaatcgtgagccgaggtgttgttgagatactataaccaatatagccttttgattctggtttgtgaatgactgcttcacacctgtttcactgaggtctatttttagttgctacaatcttcagacaaggtcattgttaatctgatatttgtgtttgtttagacagtgaaaaggaaaaaaaaaaactgtagtaactggacaaaatttataattttactgtttttcatttctttccaacatttattgtttttctatactgttaatatttttaattaaaaaaaaaaaaaaaaagnnnnnnnnnnnnnnnnnnnnnnnnnnnnnnnnnnnnnnnnnnnnnnnnnnnnnnnnnnnnnnnnngtgtcctaa

SEQ ID NO: 97867 - DNA, 561 bp, Arabidopsis thaliana columbia
  unsure (1)..(561): unsure at all n locations
nnnnnnnnnnatacggactcactttagggaaagactggacgcctgcaggtaccggtccggaattcccggttcgacccacgcgtccgaccgttcgctagtccttgtgttattggtcatgagattactggtgaagttgttgaacatggtccacttactgatcacaagatcattaatagatttccaatcgggtctcgtgtagttggagctttcattatgccttgtggaacctgttcttattgtgctaagggccatgatgatctatgtgaagacttctttgcttacaacagagccaagggaactctttacgatggcgaaactcgtctctttttgcgacatgatgattcaccagtgtatatgtatagtatgggagggatggctgagtactgtgttacaccagctcatggtttagctcctctaccagagtctttgccctactctgaatctgccattctgggatgtgctgtttttacagcatatggtgctatggctcatgctgctgagatccgtcctgggggttcgctatgggggtgtgtggaatgggggcgggtggctcgacggtgg

SEQ ID NO: 97868 - DNA, 940 bp, Arabidopsis thaliana columbia
  unsure (1)..(940): unsure at all n locations
nnnnnnnnnnnnnnnnnnnnnnnnnnnnnnnnnnnnnnnnnnnnnnnnnnnnnnnnnnnnnnnnnnnnnnnnnnnnnnnnnnnccacgcgtccgcggacgcgtccgcccacgcgtccggccattctgggatgtgctgtttttacagcatatggtgctatggctcatgctgctgagatccgtcctggagattctattgcagttattggaattggtggtgtgggctccagttgtttgcagatcgcaagggcttttggagcctcggatatcattgctgtggatgttcaggatgataaattacagaaggccaagacacttggtgctactcatattgtcaatgctgctaaagaagatgctgttgaaaggataagagaaataaccggtgggatgggtgttgatgttgctgttgaagccttgggaaagcctcaaactttcatgcagtgcacactaagtgtgaaagatggtggaaaagctgtgatgattggactctcacaagctggttccgttggagaaattgacataaatcgacttgttcgtagaaagataaaagttatagggtcttatggaggaagagcaagacaggatcttcctaaagtagtgaaattggcagagtcagggattttcaatctcacaaacgcagtctcaagtaaatacaagtttgaaggtgcaggaaaagcatttcaaggtctcaacggaggcaaaatcgtgagccgaggtgttgttgagatactataaccaatatagccttttgattctggtttgtgaatgactgcttcacacctgtttcactgaggtctatttttagttgctacaatcttcacccaaggtcattgttaatctgatatttgtgtttgtttagccagtgaaaaggaaaaaaaaaaaaaaagggcggccgctctagaggatccaagcttacgtacgcgtgcatgcgacgtcatagct

SEQ ID NO: 97869 - DNA, 560 bp, Arabidopsis thaliana columbia
cacgttcatgttgagccgccccccccagccgcccctagtattcgccagctcctatacgactcatatagggaaagctggtacgcctgcaggtaccggtccggaattcccgtgtcgacccacgcgtccgcgagatcagaatgggatttctgtttttatcaaggcagtgtggtcgaacatcttgatggtcacactgatataatccacaaacagctatacagcgattggttaccttgggggatgaagagaagagatttttcgctacggcgttactggagaagggaagacgatggcacatatgttattctctatcattctgtatttcacaagaagtgtccacctcagaaaggctatgtccgtgcgtgccttaaaagcgggcggttatgtgatttctcccatagcacaacggaaaacaatcagttgtgacgcacatgcttgctgttgattggaagtcctggagatcttatgtgaagccgtcggcttagactcgatctaattaccgcgaagaatgctcggaagaatttctgccctgagagagctttttagggcaaaacacggaagct

SEQ ID NO: 97870 - DNA, 883 bp, Arabidopsis thaliana columbia
  unsure (1)..(883): unsure at all n locations
catacacgcgtacgtaagctcggaatncggctcgagcgttgagaagagagacggagatcggagagaaagagaggatgggaacgagacaagtatacgaagagaagcttcggcgtgggaatcttgattatgatccgactatgaatcctggtcttggttctgctcggtgtcctcgttgtctttctctcttaaaccctaattcagagaaaggagagtggacgataactccagttttacacgatgctgctgcagtggctggttctggtattggtggcttgcttagtgccgtccatgctttcaatacagggatcccctatcttcaaaatcggttttccgggtcaaagcggctttcctttcttgtgggggttccattgcttctagtatattcaggtgtaggggctgcttttggaggttatgcacttccaaagtttgctcagctgacagttacctcgtattatgcatcttcaagtgcttcacattatggaatttctatgctaacccggcgtatcgaagaagctcatctctctcgaactcagaaagaagaggtaaaatgaaagtcatgcccagattaatgagaatctattccactcctctagctgagccagcttatttcacgatctccttttctaatttggtttctcgggtacctttcccagtcacaattttgaaaaccacatttataatggtaatttttccacataggtaaacccaaaaaaaagttttttaggtcctttttactgaaaaagccaagggaattgaataaaaaaaaaaaaaaaaaaaaaaggccggcnnnnnnnnnnnnnnnnnnnnnnnnnnnnnnnnnnnnnnnnnnnnnnnnnnnnnnnnnnnnnnnnnnnnnnnnnnnnnnnnnnnnnnnnnnnnnngg

SEQ ID NO: 97871 - DNA, 840 bp, Arabidopsis thaliana columbia
  unsure (1)..(840): unsure at all n locations
ataatacgactccttaagggaaagacggtacgcctgcaggtaccggtccggaattcccgtgtcgacccacgcgtccgctcagacacaaagatatttacatttttgcagacaataatgggtactttggtcaacggtactattccggcgatgaagtgtcccaagaatgtggcgatgatgaagacaacgtctaacggagtgttcgatggagagagtccattagatttcgcttttcctcttgtcattcttcagatttgccttgtcgtcgccgtcactcgctctttggccttccttctccgtcccatgagacaaccacgtgttgtcgccgagatcattggcgggattcttcttggcccgtcggctctcggtagaatcacgtcgtacaagaattcaattttcccggcgagaagtctaacggtgctcgacactctagcaaacctcggcctccttctcttccttttcctcgtcggactcgagatcgatctgacatctctccgacgtaccggcaaaaaagcgatttccatcgccgccgccggatgcttctccccttcggtatgggcattgtcacctccttcgctntccctgaagcttcttcttctggcgacaatagcaaagtacttccgttcatcattttcatgggagtcgcgctctcgatcactgctgttggagttgtggcgagaatactcgctgaattaaagctactcacaaccgtctcggccagatttcaatgaacgccgccgaattaacgactgcgggcttgggttttctagctctcgtgatctcttccggcataagattctcggttgtccttctgggtctgtaagggaatgcgttgggatcggg

SEQ ID NO: 97872 - DNA, 450 bp, Arabidopsis thaliana columbia
gcaagtctccatactgagtcgtaataacgacagaagggggacctcaaactcaaagtcgagtaattgccgatctaaaacacagggggtgattcagaaatccccaaaattcgactaaaaactaaaaccctagccctaattcatcctgattttgatcgccgtataaaagactcgcattttctgggcttagtatggcggttccggtgctgggtggatttccgatcttcatggtagtgagagttttgggtttcatcatcgcggctttggttttgacatggactgttcattacagaggaggcttagctctttcttctgataacaaagatcacatctttaatgttcatccagtgatgatggtgattggactcatactcttcaatggagaagctatgttagcatataagtcagttcaaggtacaaagaacttgaaaaaactggttcatcttacactag

SEQ ID NO: 97873 - DNA, 531 bp, Arabidopsis thaliana columbia
aatacgactcactttagggaaagctcgtacgcctgcaggtaccggtccggaattcccgggtcgacccacgcgtccgtacggctgcgagaagacgacagaaggggatcgaaagaagttgcagaggcaaaggatccatctttgctatcgccactcttctttggggttcgaaagagccagactttgtttaagtatgccgataattatgtgcagagtcgtcgctagttttggtctgtaaggagcagaacagtctcctccatccctctatgtgaagtccacaattgctccacttttcagaagccaaggacttgatgcttggtgtggcgcctgatctcgacacaccggaagcactcgatgctgccattgccagccatcaacctgcgacctgttttggcctctgaaaacggagactctgagagcagccataagagtgatcgagaagggaaagagaagagttgtttgtgtgaatctagccgaaaaacgaaccaatatcatagagctctcataaaacatagcatcttctcaatgcatggg

SEQ ID NO: 97874 - DNA, 399 bp, Arabidopsis thaliana columbia
ccggggggacccacgcgtccgcaaaaaacctttaattaaaaaattgagaactctcttaccttcccatactccggcaacggtaacaacggcggcgagaagaagacacgtcatacattgcgccggtaagagatctgactctttctccattaattccagtagctccgattggcaaagctcctgcgccattctctcaagcaaagttaactcacaagaacaatctgaatccttatcttccaattccaatggatcatcatcctaccacgtttccgccgtcaacggtcacaacaacggcgccggagtctcagatttgaatctagttccattcaacaacaaccaatcgattcaatcgaagaagcctttaagtatttcagatctatctccagctccgatgcatggatc

SEQ ID NO: 97875 - DNA, 439 bp, Arabidopsis thaliana columbia
tttagcttagctcagatttgggttttaggtggaaatttcaactctgatcttaatagtattgaagctggctggcaggtcagcccacaattgtatggtgataataggaccagactcttcacttattggactagtgacgcataccaaggcacaggctgctataatcttctatgctcaggatttgttcaaatcaatagagaaatcgcaatgggtggatcaatctctcctttatcaaactatggaaactctcaatatgacatcaccatacgcatctggaacgatccaaaagaacgacattggtggttacagtttggagagaaatacataataggatactggccagcttcactcttcacttacttatcagaaagtgcaacaatgatcgaatggggaggcgaagtggttaactcacagtccgaagaacgacaatacacatccactc

SEQ ID NO: 97876 - DNA, 800 bp, Arabidopsis thaliana columbia
  unsure (1)..(800): unsure at all n locations
aatacgactcactttagggaaagctcgtacgcctgcaggtaccggtccggaattcccgggtcgacccacgcgtccgagtagatcgctctgttttcttttgttttctgatctctctttagtctttgaatgattggtgaagagtgttttctgggaacttgccttaagctatagctagaaagatacacaaagatatatccatctcaaagctcctgatgtgaagagtgtttgttctgtttttctaatccaagagatattgtccggaactgttcttcagtgtttggtgtcttagaagaaagaaacacttttggagcattatgcataggagtttctgaagatttcaagctaattactatcattaatcagctatgaagtttatgaaacttggatctcgtcctgacactttctacacttctgaagatttaagatgtgtgtcctctgaagcttccagtgattttactattgaagtgtcaggaagcagatatcttcttcacaagtttccactgctcctcaaatgcttgaggcttcaaagaatgtgctctgaatctccagaatccatcatccatcttccagagtttccaggaggagtggaggcctttgagctctgtgccanattctgctacggaataacgataactatcagcgcgtataacatcgtagcagcgagatgtgcagcagagtatcttcagatgtcagaggaggttgagaaaggaacttggtgacaagctngaagttttcttcattcttgcatncttaatggatggagagactccatagtcacacttcagaccacgataagcgtt

SEQ ID NO: 97877 - DNA, 624 bp, Arabidopsis thaliana columbia
  unsure (1)..(624): unsure at all n locations
aaactctgtagagaaaagaaaaaatctcgacttcgcaaattgcgagagacattgagtccaagaccgagttaactcgccagattcaataaccatggctggggttatgcagaagttccttattgcatcaatgtttatgtggattcttcctattgcaatattatatggattcaacaatgatttgcttcctgggtcaacaacgttgtctccacattctctgacactactgagtggatttcttgccgtggtatcagtcaatgtagttattgtgttttacatctgtctggccctgaaagaacctgcggataaacacaagccagacgcttcgtttgttgcagaggctaaagacagtgttaagaaattgacatcaggagtcacaaatactgaccctgcgctgaagaaacaagagtgagagcttgccacatccccttttttgttaaaacaaggaccagtgtcgaggtttcatcagaaggggcagggctcaggttcttcaattnatttgtttggtnnaagaccatnntgtgttgngggttttgggtttgttggnganaaacctttgcatgttnctttttgcaagngnggtgcttttttnngnncaaattccaaaacccnaaagtttccctnggc

SEQ ID NO: 97878 - DNA, 792 bp, Arabidopsis thaliana columbia
  unsure (1)..(792): unsure at all n locations
cagctctattctactcactctagggaaagctggtacgcctgcaggtaccggtccggaattcccgggtcgacccacgcgtgcgcccacgcgttcgtacggctgcgagaagaccacagaagggtacggctgctagaagacgacagaaggggacatagatgagaagaaaagaaaacgcaagttatcaaaccgcgaatctgcaaggaggtcgcgtttgaagaaacagaagttaatggaggacacgattcatgagatctccagtcttgaacgacgaatcaaagagaacagtgagagatgtcgagctgtaaaacagaggcttgactcggtcgaaacggagaacgcgggtcttagatcggagaagatttggctctcgagttacgttagcgatttagagaatatgatcgctacgacgagtttaacgctgacgcagaatggtggtggcgattgtgtcgacgatcagaacgcaaacgcgggaatagcggttggagattgtaaacgtacaccgtggaaattgagttgtggttctctacaaccaatggcgtcctttaagacatgagatttgtgtattagtgtgtgttttactttggtcattttatagtttttgtaatctttttatatcgaattgtttcttctcattactttctgaattctgatacaattgcatatcttattgttttccnnnnnnnnnnnnnnnnnnnnnnnnnnnnnnnnnnnnnnnnnnnnnnnnnnnnnnnnnnnnnnnnnnnnnnnnnnnnnnnnnnnnnnnnnnnnnnnnnnnnnnnnnnnnnnnnnnnn

SEQ ID NO: 97879 - DNA, 810 bp, Arabidopsis thaliana columbia
  unsure (1)..(810): unsure at all n locations
tgatctnnnnnnnnnnnnnnnnnnnnnnnnnnnnnnnnnnnnnnnnnnnnnnnnnnnnnnnnnnnnnnnnnnnnnnnnnnnnccacgcgtgcgcccacgcgttcgcccacgcgtacgtacgggtgcgagaagacgacagaagggggagaaagatcgaatcgaagaatggcagaattcgttgaagctgataacgcagaagcaataatcgcgaggatcgaaaccaaatcgaggaagattgaaagcctactcaaacagtacaaacatgtagaagctttgaaaacggctcttgaaggttcgcctccgaaaactcgcgatgaacgttgcaagtcggctaattggatagttgtgcacagagctttaatggccattaaggatattgacggaatgctcaatgctcttgatgtcgaatattacgacattctcatgaagtacttgtacagaggactttctactggggaccgacccatctgcgatcagtgcctgaagattcacgagaaactcactgagagagctggtctcggttgcattctccgatgtcttactggtaccatcaacaccgtttgatccatcattccctcttatgtattattacttgatgccttgatgtttccaatgtgcatattctccttgaggaaccatgtctcacatttatcagttttagacttgtattttcattaccaaacagttgcttgataaatgataacacaagtcattctttaaaaaaaaaaaaaaaaaaaaaaaaaaaaagcgaccgctctagaggatccaagcttacgtacgcgtgcatgcgacgtcatcagtcttctaagg

SEQ ID NO: 97880 - DNA, 941 bp, Arabidopsis thaliana columbia
ctcttaagcaggcgatcgggttgcttccggagaatgctttggttgggtttgtgtcgtttggtactcaggctcatgtgcatgaattggggttctctgagatgtctaaagtttttgtctttaaaggcaataaagaagttaccacgcgtccggttggggcttgggtcttcttcgaggagagctcctacttctgggttttctaaaggagcgcaaaacggattccagagttccggtgttgacagattcctgctgcccgcttcggagtgtgaatacacactggacttgcttttggatgagctccaatcagaccagtggcctgttcagccaggtcatcgtccccaacgatgcacaggggttgcattgagtgtagctgcaggattgcttggagcttgcttacctggaactggtgctagaattgtagctttggttggaggtccatgtacagagggccctggaacgattatctcaaaggatttgtcagatcctgtgcgctcccacaaagatctagataaagatgctgctccttattataaaaaagctgtaaagttttatgatagtattgcaaagcagcttgtcgctcagggtcatgtgttagaccttttcgcttctgcacttgatcaggtcggggttgctgaaatgaaagtagccgttgaaagtaccggtggtctcgttgttctgtctgaaagttttggccattctgtatttaaagattcctttaagaggatgtttgaagatggcgagcactctcttggtctctgcttcaatggcacgcttgagataaattgttcaaaagaccatcaaattcaaggggttatcgggccttgctcatcattagaaaagaaaggtcccaatgttgctgacacagtcattggagaggggaatccagtgcttggaaatggtggggctcgacagagtacctgcttgactgtattctttgatctatc

SEQ ID NO: 97881 - DNA, 597 bp, Arabidopsis thaliana columbia
tgcgagaagacgacagaagggggagaaagataaaaacagaaaaagataaggaacttgcagagaaagcaaaaaagaaagaagaagcgaagaagagaaactaagattcagatggcttcccagacaaatcaaaccgtggtggataccaagaaaatcgaaaccgagaacccgccaaaaccgcaagtgcctgcatcatcatgcaggaagagggtgaaggatgataacgccactttctttgcaaacctcaaggatcacatggatgaattcatacatgcctcaatggatgaacacaagacttgtttcaaaaacaccatggacaagatattcgggagcttctccaaggcggaggcagttgcagagaagcaaattgaggctaaggaagtggtcgagattcactctcctcttcagacagcagtgactaagtagagattttcacaacttgtgagctcagaaataatcatggagtgtgttttcttttttcatgtatttgggtgttaatactcttagaacctgcttctatctctaacccattctaaatcagacaatttgtttctagaccattgcgtttaatcatctatactaatatcatttaataaaaac

SEQ ID NO: 97882 - DNA, 780 bp, Arabidopsis thaliana columbia
  unsure (1)..(780): unsure at all n locations
cgcctgcaggtaccggtccggaattcccgggttgacccacgcgtccgtacggctgcggaagacgacagaaggggcctgaggaaagaaaaggagctccaaagggctgaacgcgagagacggaaacagcaagaagcccaggagcgagaagctcaggctgcactcaatgacggagaagtgattagcatccactcaacaagcgagctagaagcaaagacaaaggctgctaagaaggcatcacgtctgctcatcctttacttcacagccacatggtgtgggccatgccgatatatgtctcctctgtactcaaacctggccacacagcactcgagagtcgttttcttgaaagttgatatagacaaggccaatgacgtggctgcttcttggaacattagcagcgtcccgaccttttgcttcatcagagatggcaaagaggtggacaaagttgtcggagctgataaaggttcgcttgagcagaagattgcacagcactcttcttctaagtgatgtttttgctcttctctcattacactcctctcgcttgtactgtatctttgcaacacaatgattgtcccgtaatttaaaagtgtagcataacttttaaagtacttgtaattggctagatgacagatcagatcagttgactaagaagagttaagagagctcataaaaaaaaggagttacccgcctggcgaccgctctagaggtccaagcttacgtacgnnnnnnnnnnnnnnnnnnnnnnnnnnnnnnnnnnnnnnnnnnnnnnnnnnnnnnnnnnnn

SEQ ID NO: 97883 - DNA, 481 bp, Arabidopsis thaliana columbia
tccctatcgagtcaaaaggaagaaggaagaaactccacgaggttggatctgtgacagctatatgcttcacctgcttcctcataagatgcgttgtggtggctgtatcagcttttgacaaggatttaacacttgatgttcttgatcatccggttctgaacttaatctactatatggtggtagaagtacttccatcggcactagtcctcttcattctccgaaagctacctccaaagagagtatcagctcaataccatccgatccagtagaaacctttgtcactgaaccatctcacacggtgagtatgatgctgtttaagagaagagtaaagattaaaaaaaaaaattggggcaaaaaatgaaaggtgaagaagaaatcggtgtggaatctgcgtgagtttttggaatgcacgttcatataaacgattttacagcttttagttgttgtagcccgccgggacttttggtttgggagtttatgtctg

SEQ ID NO: 97884 - DNA, 796 bp, Arabidopsis thaliana columbia
  unsure (1)..(796): unsure at all n locations
tctatacgactcactataggggaagctggtacgccctgcaggtcccgtcccgaatttcccggttcacccaagcgttccgacgggtgggaaaaaccaaccgaaaggggagaggtggatcctgggaccagttttttcctcaaccggcttcttattaaaagccgtggggggggctgttaacctttggccaaggattaaccactggaggtcctggaccatccggtcctgaccttattctactatatggtggtagaagtaccttccatcggcactagtcctcttcattctccgaaagctacctccaaagagagtatcagctcaataccatccgatccagtagaaacctttgtcactgaaccatctcacacggtgagtatgatgctgtttaagagaagagtaaagattaaaaaaaaaatttggggcaaaaaatgaaaggtgaagaagaaatcggtgtggaatctgcgtgagtttttggaatgcacgttcatataaacgattttacagcttttagttgttgtagcccgccgtgacttttggtttggtagtttatgtctgttaaaattataaattgctcttctgctactttgaaaaatctggtcagtagtacaagagggttaacatttgttacgtccatggttgattgttatgttatgtttggtaaaaaataaacgaacgctcttctccagtttccnnnnnnnnnnnnnnnnnnnnnnnnnnnnnnnnnnnnnnnnnnnnnnnnnnnnnnnnnnnnnnnnnnnnnnnnnnnnnnnnnnnnnnnnnnnnnnnnnnnnnnnnnnnn

SEQ ID NO: 97885 - DNA, 592 bp, Arabidopsis thaliana columbia
tacggctgcgagaagacgacagaagggtacggctgcgagaagacgacagaagggggactcggtgttgtcctcttggagttggctacagggctaaaagctgtaggaggtgaaggttttaaagggagtttggtggattgggtgaaacagcttgaaagctcaggtagaatcgctgagacattcgatgaaaacattcgagggaaaggacatgacgaagagatctcgaaatttgttgagattgctcttaactgtgtgagttcaagacctaaagagagatggtcaatgtttcaggcataccagtcactgaaagctattgctgagaaacaaggctattcgttctccgaacaagacgacgacttccctttgattttcgacacgcaagagaacgagaaagtgtgaaaatgaaccttttatgatacgaggaggaagtaagagtataattatttgttgtctatatcatcttgtactacttgtagagacactatatgttattgtaaaaacagaaatgtatatgttatttgttttctcttgtgtcaaagtctttagacatgttatgtgttgcaagtgtgtctttctatagtattggaagagtgcc

SEQ ID NO: 97886 - DNA, 898 bp, Arabidopsis thaliana columbia
  unsure (1)..(898): unsure at all n locations
cnnnnnnnnnnnnnnnnnnnnnnnnnnnnnnnnnnnnnnnnnnnnnnnnnnnnnnnnnnnnnnnnnnnnnnnccacgcgtccgcccacgcgtncgtacggctgcgagaagacacagaaggggaaccaaaaaaataaaagatttttacattcgacgagaccgtgatcgaaacggcgatggttgaccagagtcctcgccgtgttgtcgtggcggcgctcctattgtttgtggttctgtgcgatctttcgaattctgcgggagctgcgaattctgtgtcagctttcgttcagaacgccatcttgtccaacaagattgtcatcttctccaaatcctactgcccgtattgtttgcggtcgaaacgtatattcagccaacttaaggaagagccatttgttgtggagcttgatcagagagaggacggagatcaaatccagtatgagcttttagaattcgttggtcgtcgtactgtcccgcaagtttttgttaacggcaagcatattggtggatcagatgatcttggagctgctttggagagtggtcagttgcaaaagcttcttgctgcaagttgatatttgaggacctcgaatgtggaatctacagtatgtgatttacaggaattagaaatctttgctagttgtagactgaataagcgaattgatatgtatgactcagttatgtaagttatgatggcattgataaagtcttgatcttttgttactgcactgctctggtgattgtttcgcttaaataatccatacttgtgtgccttagtgaatggttcatccgatnnnnnnnnnnnnnnnnnnnnnnnnnnnnnnnnnnnnnnnnnnnnnnnnnnnnnnnnnnnnnnnnnnnnnnnnnnnnnnnnnnnnnnnnnnnnnnnnnnnnnnnnnnnnnnn

SEQ ID NO: 97887 - DNA, 1018 bp, Arabidopsis thaliana columbia
  unsure (1)..(1018): unsure at all n locations
gaattgttcactgcgacgttgaatctaagaacgttcttgtttttaacggtggtagctccgttaagctagcggattttggatcggcggttgagtttgagaaatctacgattcatgtttcgccacgtggaagtccgctttggatggctccggaggtggttagaagagagtaccaaggaccggagagtgacgtgtggtctttagggtgtaccgtcatcgagatgctcaccggaaaaccagcttgggaagatcacggtttcgactcgctgagtcggatcgggttctctaacgatttgctttttattccggtggggttatcggaactcgggagagatttcttagagaaatgcttgaaacgtgatcggagtcagcgttggagctgtgatcagctcgtgcagcatccgtttctgtgtcaagatcatcatgactcgttcttcactgagtcgtctccgcgttgtgttcttgactgggtcaactcggagtttgacgaagaagaagagagcgacgaatggagaccagaatccatggtttcggcgatggcaaggataagtaaattagctataaccggaggagcaaattgggaatctaatggttggactgaggttagagacacttccgaagagtcagaggcaaaaaaggaagttcttgtttctccaagggtagaattggaatcttacatatcattggagtcgtcaagcgatgattccgtaagacaaccgaggaatgaagagtcggcgacggagttggcgtcggcagtcacgtgtgaagcaatattgttggtgatgatattggtggtagagaatattccaatatatgccacgttttacaccagtagtattattatgcatattctatattgttgtagttgttgttgttattatcattatcaaaacaataataagaagaataatttttcgtaaaaaaaaaaaaaaaaaaaaaaaaaaaaaaaaagcgacagctctagaggatccaagcttacgtacgcgtgcatgttacnnnnnnnnnnnnnnnnnnnnnnnnn

SEQ ID NO: 97888 - DNA, 563 bp, Arabidopsis thaliana columbia
  unsure (1)..(563): unsure at all n locations
atgatcctgccnnnnnnnnnnnnnnnnnnnnnnnnnnnnnnnnnnnnnnnnnnnnnnnnnnnnnnnnnnnnnnnnnnnnnnnccacgcgtgcgcccacgcgttcgtacggctgcgagaagacgacagaagggggaactcctttcatacgttttctctctactctcatcgcttttcttatctctctcggagctcttccgtcgtccaccattgattacgggagtgtattgagctaaatatggctataatacaacttggaagtacatgtgttgctcaatggagtattcgtcctcaatttgcagtcagagcttattatcccagcagaatcgaatcaactcaccatcaaaattccagtagccaagtaaattgtttgggagcttcaaagtcgagtatgttctcacatgggtcattgcccttcttgtccatgacgggaatgtccagaaatatgcatcctcctcgcagaggatctcgcttcactgttagagctgatgcagattactattcggtactcggagtttcgaaaaatgcaaccaaagctgagattaaaagcgcttatcagaagctg

SEQ ID NO: 97889 - DNA, 605 bp, Arabidopsis thaliana columbia
  unsure (1)..(605): unsure at all n locations
ccnccccncnnagactganggccatggccttggagggttcctggncaaagcccncatgcttccgcgcttgctgcattgcccccctgcgtcttcaaaggaaaacctcttgctgggatcttacctgcaatagatgtcttaagcggtcaagcaattgttgggatattctacttcattggggttgcatttttctgcctcgaatcagtggttagcatctgggttattcagcaagtgtatatgtacttccgaggcagcgggaaacaagatcaaatgagacgggaagcagcgagaggagccttgagagccgctgtttgagagttctccttgtaacattctggtttgtgtatgcactgtttcttttttcagattttcttgaagtctctctctctctctctctctctctctgctctataaacaaaaaaaaaaagatttaatttttcctttgtacctttatgtcatgtaaatttgtttgttcaaaaatcagagttcagattcatacgtattttgaaatcaaaaaaaaaaaaaaaaaaaagnnnnnnnnnnnnnnnnnnnnnnnnnnnnnnnnnnnnnnnnnnnnnnnnnnnnnnnnnnnnnnnnnntcgcctcaa

SEQ ID NO: 97890 - DNA, 1307 bp, Arabidopsis thaliana columbia
aatacgactcctttagggaaagccggtacgcctgcaggtaccggtccggaattcccgggtcgacccacgcgtccgcccacgcgtccgcttagatcgatttctaaagtcttcgtcttcttcttcttctgataactagctttttcaatcttctgaagctttaattttttcatacccatggctaatcgttatgatccaaatcctttcgctgaggaagaagaagtcaatcctttcgctaatgctagaggagttccacctgcgtcgaattcgagactttcgcctttgcctccagagcctgttggtttcgattatggtcgaaccgtagacattcctcttgacagagctggtacacaggatttgaagaagaaagagaaggaactccaagccaaagaagctgagctaaaacgacgagagcaggacctcaaacggaaagaagatgctgctgcacgagctggaatcgttattgaagtgaaaaactggccgcctttcttcccacttatccaccatgacatcgcaaacgaaattccggttcatctccaaagactacagtatgttacctttgcaacgtatttggggttggttctttgtctgttctggaatatcatcgccgttactacagcttggatcaaaggagatggagtgacgatatggcttcttgccttaatttacttcatatgcgggtgttccaggaggctatgtgttatggtatcgaccactctaccgtgccttcagaactgatagtgcattgagctttggatggtttttcttgttcatatgctccacatgctttctgcgtcttgctgagttgctcacctgtcgcttcaaggaaatctttgctggatctaccgcatagatgctagtgtcagcatttcaagcaattgttgggatattctacttcattgggtttgcatttttctgcctcgaatcagtggttagcatctgggttattcagcaagtgtatatgtacttccgaggcagcgggaaacaagatcaaatgagacgggaagcagcgagaggagccttgagagccgctgtttgagagttctccttgtaacattctggtttgtgtatgcactgtttcttttttcagattttcttgaagtctctctctctctctctctctctctctgctctataaacaaaaaaaaaaagatttaatttttcctttgtacctttatgtcatgtaaatttgtttgttcaaaaatcagagttcagattcaaaaaaaaaaaaaaagggcggccgctctagaggatccaagcttacgtacgcgtgcaggcgacgtcataagactcttctatagtgctcctaa

SEQ ID NO: 97891 - DNA, 925 bp, Arabidopsis thaliana columbia
  unsure (1)..(925): unsure at all n locations
gctctatacgactcactatatgggaagctggtacgcctgcagtaccggtccggattcccggtcgaccacgcgtncgccacgcgtncgccacgcgtncgtacggctgcgagaagacgacagaaagggggggattacccttggaacttgatatgcaatgggatggaaacccaaatatagtacttggcgtcaagaccttagttggtgtatccctccccattcaggtgaaaaacatcggattcactggtgttttcaggctaatttttaggccactagttgaggactttctctgctttggagctgtcagcgtttctcttagagaaaagaaaaaattggacttcacccttagggttgttggaggtgatatttcagcaattcctggactttctgaagctattgaggaaacaattcgggatgccgtggaagattctatcacatggcctgttcggaaggtcatcccaattatacctggtgattatagcgatctggagctaaagcctgttggaatgttagaggtgaagcttgtgcaagcaaagaacttgaccaacaaagatctagttggaaaatcaatttatcgtgattcctaagcttaatcggtagaatcaatttatcgtgattcctaagcttaatcggaagattcacaacttcgaatgtacatgttgtctagtagcgtcaaacggatgtgttttgtcaaacaaagacgagtctgcatgtagcccagaagctgtggactcggaatatgagttttcctctttttttctgaaaaccctagacaatactcgtgtacgtttgcctcataagctcagatgtcataaggggtttgatccnnnnnnnnnnnnnnnnnnnnnnnnnnnnnnnnnnnnnnnnnnnnnnnnnnnnnnnnnnnnnnnnnnnnnnnnnnnnnnnnnnnnnnnnnnnnnnnnnnnnn

SEQ ID NO: 97892 - DNA, 732 bp, Arabidopsis thaliana columbia
  unsure (1)..(732): unsure at all n locations
acccgcccgcaggnaccggnccggaattcccgggtctacccacgcgtgcgtacggctgcgagaagacgacagaaggggcaacccaaaaagtaacaatttgaattacttccgcaaatctaaaataatatctagtgaagcgaatatgtgtttctttgataatcggtgcgatcagaatctgacggtggtggtggatgtggcgtggtggatggaggctgttcctccacaaatcatttctccggcgaagccatcggtttctccgattcttgagacgattttagaaggcggagagaccgaagaagacaatcaagaacaagaaaacgaggacgtgtaaattgtaatgatcattttgttactcggtcttgggtttaagatagactcttgttgttgttgttgttttttctataactgtataagatgagattttgtattgtatcttttgtacaatcaaatctcagttctttgtgaaattttcattcaactttcacatccttgtacgcacggtgaactgttgtgatatgagttttttacttaaaaaggggggggccgtttaaaagaatcaaactttacttccggtgccttccaaggtattagtttttttttggggcccctaaattcaattcactgggccgcgttttaaaaccgccggactgggaaaaccctgggggtaccccactttattggcttggaggaccttcccctttttccagttggcgttattaccaaaaaggcccg

SEQ ID NO: 97893 - DNA, 895 bp, Arabidopsis thaliana columbia
  unsure (1)..(895): unsure at all n locations
nnnnnnnnnnnnnnnnnnnnnnnnnnnnnnnnnnnnnnnnnnnnnnnnnnnnnnnnnnnnnnnnnnnnnccacgcgtccgtgcggctgcgagaagacgacagaagggggagagagaacgaagcaaaaaacctcgctcgctagctatgtgaagaaactatcttcgttataaaactttccggcgacgttttccgacttccgagagcaggttttgaggtggttttatgcgccaaaacatctaaccggagtgtcgttgtacggtgcttagtagttttcaataacacgcttcagttatggggaatgcttgttgtgttgctactcgagacaaaatggttgtgcctaatacatcagcagtcgagaattttcaaagaaacaatgtgaggtattctcctaactggagcttccgatgggataatagaggaggacgcgtggcaggggaagagacctctgttagtttgttatctgatcggattagtcgtaacgatgtctctgatgtcaaatctgaaactgctcttgtatcatcacaaggttctcctttggacaattttcagacgcagtcatggcagaaatctcctgcttctggtaaattcctttattgctgcttacaggcaatacctctttgatttgtcaaaaaatgtagacttgatgggaaaatgtaggcaccttctttttgaccaacccgcttagaatttaggattacttttctacagagactgttaatgagtgaaaatgacattgatatgtttgttgacataaactgttctcttgtttgtttcttgacttgcttttattggtnnnnnnnnnnnnnnnnnnnnnnnnnnnnnnnnnnnnnnnnnnnnnnnnnnnnnnnnnnnnnnnnnnnnnnnnnnnnnnnnnnnnnnnnnnnnnnnnnnnnnn

SEQ ID NO: 97894 - DNA, 583 bp, Arabidopsis thaliana columbia
  unsure (1)..(583): unsure at all n locations
nnnnnnnnnnnnnnnnnnnnnnnnnnnnnnnnnnnnnnnnnnnnnnnnnnnnnnnnnnnnnnnnnnnnnnnnnccacgcgtccgtgcggcagaagacgacagaagggtacggctgcgagaagactacagaagggtacggctgcgataagacgacagaagggtataccagatgatacaaaggttttgaaagtctcaccaactgacacagtgttgactgtagcaaagaagatggttgaattccaatcaagctgtgcagtcgtgataatcgaggacaagcttcgagggatatttacttccaaggatatactgatgcgggttgtggctgaaaatcttcctccatctgagactctagtggaaacggttatgactcagaatccagaatctacgatagttgacacaccaattgttgaagctctacacatcatgcacgagggaaaattcttacaccttcccgttactgacaaagaaggagatgtagttgctgttgtcgatgtaatccatgtcactcacgctgctgttgccacagctggaactactgcgggaataggtaatgaggcgacaaacacaatgatgcaaaagtttt

SEQ ID NO: 97895 - DNA, 609 bp, Arabidopsis thaliana columbia
  unsure (1)..(609): unsure at all n locations
cagctctcctacgactcactattnggaaagctggtccgcctgcaggtaccggtccggaattcccgggtcgacccacgcgtgcggctctttgtttccactctctctctctctacctctcacatcgttctacttctagggtttggctaatttagattcaacatctcctttaaaattctctgttcttttgtattcctaatctttaacaatttaagaagaaatggattcgaattcatggatcaattgtccccctgtgttttcatcatcgccttcttcacgccgttaccaatctcgatcagatttgtatttgggagatgttgaaggagaagacgatttgaaagctgagtttatgtgtcctttttgtgcagatgagtttgatattgttggtctttgttgtcatattgatgtgaatcatcctgttgaagctaagaatggggtttgtcctgtctgcacaaagaaggtgggattggacattgttggccatataacaacgcaacacgggaacgtatttaaggtgcagcgaggaggaggttcgtaaaggtggtatagctcaccnatctacnctnaaaaagggttcgngaggtactttcagccttggngggctccctttgc

SEQ ID NO: 97896 - DNA, 599 bp, Arabidopsis thaliana columbia
  unsure (1)..(599): unsure at all n locations
tgactcccggcactaatacngactcactataggagaaagcctggtcccgcctgcaggtacctggtccggaattcccgggtcgacccacgcgtccgatttctacagtctccattcttggatgggtttgctctctgtttctctcttcgctgcccagtgggtgactgggttcatgagcttctggcatagaggagaagtacggactacaagaaccacgtttcttccctggcatgtattcctcggactctatacctatggtttagccattgccacagctgagaccggactgcgtgagaaactgacgttccttcagaccaagaggaatgtccccagacgcggttctgaatcaatgactgtcaatggtttagggcttggcttggctctactcggttgcattgttataactgctgctattctgccaaagtatcagagccattctcgtgatgagaaactcgtttattcatctcaagatcgtcctaaatgtttgtcttcttgagttcttaattntcattctttctagtttagattggtttggggacaaactacacatctctggtgtacaaaaagaacaaattagttcttcgaaaatgtattaccgcatt

SEQ ID NO: 97897 - DNA, 642 bp, Arabidopsis thaliana columbia
  unsure (1)..(642): unsure at all n locations
tatggctgcgagaagacgacagaagggggtcgacccgccggcgacgatggatttacagcaaaagcaggcgtgttggaagcttgaactcgaggttatagataacgattcttcatgggtcagtaaatttgatccttctaagaagaacaagaagaagaagcagaagcctctgatacgcgaagacgacatcttcttccagaatggaggacactttacggaggataacttaccggactgtcaatctagccggaaatttgagccagattatggctacaaagagctcttgagtatggtgtttgataggcttcgtgaggaagatgtcgaggtttctacagagaggccaagaacagtgatgatgcctcctcagctccttgcagaagggacgataactgtttgtttaaactttgctgatctctgcagaacgatgcataggaagccagatcatgttcatgaaattccttacttgcccaaatggagacaaaagtatcgctgaaacaaacagcagccggctaaaanattaaagggttttaatgttctcctaaggattttccaagctgttgttcccggaaatacattgaatgccnttccgtaatctgccttctgcctggcaaaattccctgaacnccgctcctcccccgaaggaaa

SEQ ID NO: 97898 - DNA, 724 bp, Arabidopsis thaliana columbia
gcctgcaggtaccggcccggaattcccgggtcgacccacgcgtccgtacggctgcaagaagacgacagaagggtacggctccgagaagacgacagaagggtacggctgcgagagacgacagaagggtacctttgacggcgaggttgataaagtgtacttgaacacgccgacaaagattgccatcatagatcatgagaggaaaagaactatcgagttgcaaaaggaaggcatgccaaatgcagctgtgtggaacccttgggacaagaaggccaggagtattgcagatatgggagatgaggattacacaacaatgctgtgtgtagattctggtgctatagaaagcccaattgtgttgaagccacatgaagagtggaaaggaagacaagaactctctatcgtctcctcaagctactgcagcggtcagctcgatccacgtaaggttctttatggggattactgataatatatatgaaatcaaacttggaaacatcatcagtcttatattttgatcgtcttcatggataaagcgattgatgcccaaacaaatctgatatgatatgattttgtttggagctattgccctttgtgagtttctgacaggcacacagaaagataggcaaatgtagtattttgtaacgttgccttctgtgtggcggtcagggacttattaatatgtattatggttcacccggaaacatgagtcttatattgaatcgtcttctcc

SEQ ID NO: 97899 - DNA, 636 bp, Arabidopsis thaliana columbia
cagctctatacgactactataggaaagctggtacgcctgcaagtaccgggcccgaatttccgggtcgcccacgcctccggccggtgggagaagaccacagaaccttttagacctagagtctctctgtttcgcttttcataaatcttgaagaataaatggaaaaagcttcaaacagcaacaagtccacgaaattctcgaaaatgcttcaaagagcgatgtcaattggtcacagtgcggcgccgtttagtccacggagagattttcatcagcaccgtacgacttcgacggcgaacagaggaatcttcttctccagtccgttggttcctacggctgctagagttaggagaaatacaaaatacgaagccgtttttgccgaacccacttcgcctaaagtctcctgcatcggtcaggtcaaactcgctagacctaaatgtccggagaagaagaacaaagcacctaagaatctcaaaacggcatcgtctttatcgtcttgtgttattaaagaagaagacaatggaagcttttcgaaactaaagcgtatcttctcaatgagaagttatccgtcgagaaaatccaactccactgccttcgcagccgccggagcgagagaacatccaatcgcggaggttgatgcgg

SEQ ID NO: 97900 - DNA, 806 bp, Arabidopsis thaliana columbia
  unsure (1)..(806): unsure at all n locations
gattgaaactgtatctagtttaccaatggtgcgatcggtttacggcccaacctcggtgaacaagaggaagctgatgggattagggaatcttcaggagacaaaagatactgtggagagcgtaaaacggttaaacagaacaactaatggagttcttgatctgaaccttccggctcaagagaccgaaatcgaggaaaaatatcattgtgaagagaactcaaacgtttggttaatgaacttgaagaatcataaacgtctcattgaggttcctttcaagccttttgattttgaaggactagctgaaaaaatcaaaaagagcgttaaagaaaatttcgacaagtgcgtgagatcggattgcttgctggaggttgaccctaagatcatagaacgattgctagcggctgtttatttctcagatagtagaaaagatatcaaagagttgctggagaatataatgagtccagtgttcttgagaattaaagaaaggtatgaaatcactactagttgtgtagtaaaattagttggtcgagatcttgacatttttcttgaggatcaaatggacttgttctttgtaaaatctcagtaggttaaagagaactttatatggaaagtgtatcatataaggtagagttagtaataggtattattgttcttttgtgttgctatactatgataatgtgtgttcctgtagttatgatgatgagttgatctttctccttgtttaaaaaaaaaaaaaaaaagnnnnnnnnnnnnnnnnnnnnnnnnnnnnnnnnnnnnnnnnnnnnnnnnnnnnnnnnnnnnnnnnnnnn

SEQ ID NO: 97901 - DNA, 855 bp, Arabidopsis thaliana columbia
  unsure (1)..(855): unsure at all n locations
ccggcactatacgactcacttagggaaagctggtacgcctgcaggtaccggtccggaattcccgggtcgacccacgccttccgacgggcgagaagacgacagaaggggttttacggtcctttccgtgaagccctggactcaaacccgcgtttcggagacaagaaaacgtatcagatgaacccagcaaactacagagaggcattgattgaggcacgtgaagacgaggctgaaggagcagacattctcctggtgaagccaggtcttccatatttggacatcatacggcttttgagggacaagtctccattaccgattgctgcataccaagtttctggagagtactcgatgatcaaagcagggggagtcctgaaaatgatcgatgaagagaaagtgatgatggagtcactgatgtgtttacgcagagctggagcggacatcatcctcacgtacttcgctcttcaagctgctacttgtttgtgcggcgagaagcggtagaatagacaacaagactgtgttttaaactgtttgagtatatctgttttaaatcatttgagactattgtgattttgccttgttctgatcccattcttttagtgtcgtgcatatgtgatcttgtgttttgtaatatggattatgatgagtccctagacttcaaaatttggaggccatgatctgagtttctgaatgtggttcttgtagattccattgatattttgcagaccacattatttggttctccaaaaaaaaaaaaaaaaaaaaaaaaaaaaaaaagnnnnnnnnnnnnnnnnnnnnnnnnnnnnnnnnnnnnnnnnnnnnnnnnnnnnnnnnnnnnnnnnnncgtcctcaattagattc

SEQ ID NO: 97902 - DNA, 427 bp, Arabidopsis thaliana columbia
gataagccgcaagtctctctctataaacaccgccattgattagcttcctctctatttttactctcgtcacgtcctccacttttgggtcattattacttctcgaagctcaccaagatcttgaatttgccgacctctcaagattcttgatggtaaaagcatacagacaagagcatgtttacaagcatccgtgggagcgggtgagtgctgcttcatggaggaagtttgcagaccctgaaaacaaacgcatcctttctcacatccttgaagtcgatcccttgaacaggaaactcgacactgagaccgggaaactccacaccacgcgtgctctcaccatccatgctcctggtccatggtttctccataggatcattggtcaggacatctgtcactgtgttgaatcaacagttgtagatggaaatcacgttct

SEQ ID NO: 97903 - DNA, 463 bp, Arabidopsis thaliana columbia
acggacgcatgcgcggtcgcgtgagcgagaaagtcggaatttttccgagaaaattcaaaagggcgaaaaaaagagcttttgcgtacagttttcgaattggtctccttcgtacgggcaagctatggttcaagagaactatgaatgaaactgtggtgtaagagaatatcaatggttgttatctgctataatgttttttggaccaagtgagtttgatgctgatgaaatgggttatgcaatgagtagacttgagatagaatccgatctatgtgatactggaaaagacgtttgtggagttggtagtagtagtggtagtcacagatcaagtgaacatttggctgatctagaccatgaaatcagccaggttactaaattgaaatctagtcctcatcaacggtatagccgtgaagtccctgggagacatcagttacctgtgtctactgtgaggatgttggcaggtcgagaa

SEQ ID NO: 97904 - DNA, 542 bp, Arabidopsis thaliana columbia
  unsure (1)..(542): unsure at all n locations
gatcttnnnnnnnnnnnnnnnnnnnnnnnnnnnnnnnnnnnnnnnnnnnnnnnnnnnnnnnnnnnnnnnnnnnnnnnnnnccacgcgtccgtgcggctgcgagaagacgacagaagggggacgttcgaaattccgaggagaggaatcataccatggaatcgcaccacgcgtctctaggtcgccgtactttggaagagattcgtcaaaagagagcagctcaaaggctaagcaaagcttcttcaggtccagatcttagtgaaattcccaatcctgccgatttcccagtgatcagaaaatctgagagcggaaatcgactttctgagacagatgttggtgctttatattcccagcttaaagaactgcagaagaagaatgcagaaatggaggagcgcaacaaaattttgtcttcaaagcttcaaacgaaggaagttgagaatgaatcacttgagactcggttgaatgtgctggaacaaaacacagtgccatctttgagaaaagccctcaaggaaattgcaatggagaaagatgctgctgttgtttta

SEQ ID NO: 97905 - DNA, 430 bp, Arabidopsis thaliana columbia
gtctgatccaacaagaaggtgaatatagagcacatgttcttcttcatcatgcagccctaccaaactctcaaaggttagaatttgctatcggatcatctgctaagcttggtttactcttcctagaacatcgattgtatcgaggtttactattggatcaaagatgtctgcagaggagaagaaccttatagagatcttggaggaaggtcacaaagtcgatgttgttaagtacattgattatgtcagtgcccctcaagctggtgctattgcgacattctcaggcactacaagagacatgttcgagggcaagacagtgttggagttaaggtatgaagcatatgtgccaatggccacacgatgcctcagctcgatctgtacaactgctagatcaacttgggatatccacaagattgctgttgctcaccgtcttgga

SEQ ID NO: 97906 - DNA, 958 bp, Arabidopsis thaliana columbia
  unsure (1)..(958): unsure at all n locations
atggccgtttgcagtaccggtccggaattcccgggcacccccacgggtccgaatttgctatcggatcatctgctaagcttggtttactcttcctagaacatcgattgtatcgaggtttactattggatcaaagatgtctgcagaggagaagaaccttatagagatcttggaggaaggtcacaaagtcgatgttgttaagtacattgattatgtcagtgcccctcaagctggtgctattgcgacattctcaggcactacaagagacatgttcgagggcaagacagtgttggagttaaggtatgaagcatatgtgccaatggccacacgatgcctcagctcgatctgtacaactgctagatcaacttgggatatccacaagattgctgttgctcaccgtcttggaccagttcctgttggagaaactagcgtgctcattgcggtctcatctgttcaccgtgcagatggtttagatgcttgcaagttcttgatcgacgagttgaaggcatcggttccgatatggaagaaagaggtttacactaatggagagatttggaaggagaattctgagtttatggagaaaagattggagcttgcagagaaaagagacagcattgtaaaaaaaactgtggttgaagaacatagaagaagaggttgctgtggaagcaaagttagagtagaagaagatgaagagcataaagatatttcaggagataacaaatcttcttcttgatcacttgtagcagtaacactgtttcgctttttactttcaatagacaaacttttttaagcccattgttgaatctaaagacttatatgcgttagttggttnnnnnnnnnnnnnnnnnnnnnnnnnnnnnnnnnnnnnnnnnnnnnnnnnnnnnnnnnnnnnnnnnnnnnnnnnnnnnnnnnnnnnnnnnnnnnnnnnnnnnnnnnnnnnnnnnnnnnnnnnnnnnnnnnn

SEQ ID NO: 97907 - DNA, 1016 bp, Arabidopsis thaliana columbia
  unsure (1)..(1016): unsure at all n locations
gaaagattgttacaaggccttgggagtagttcacaagctatggtctgaagttcctggaaagctgaaagattacatttctcatcccaagttcaacgggtaccaatctttgcatactgtagtgatgggtgatggaactattccgctggaagttcaaatacggacaaaggagatgcatttgcaagctgaatttgggtttgcagctcactggagatacaaggccgcgcgccgcaaacactcatcgtttgtgcttcaaatggttgaatgggcaagatgggttgtgacctggcattttgaaaccatgagcaaagacggatcgtcgatctgctcttctgagcccttgtgcagtttcccgtctcacgcagaagactgtccgttttcatataagcctagtggtaaccaagaaggaccagtctatgtgattgtaatcgaaaatgagaagatgactgtgcaagagtttcccgagaattctaccgtgtcggacctgttacgcagagcaggaccagggagctcgagatggtcaatgtacagcatcccggcaaaggaagagctaaggccaagacttaaccagacacctgtaagtgatctgaaatgcaagctgaagatgggagatgtggtggagctgactccagccatacctgacaagtctctgactgaatacagagaggaaattcagcggatgtatgatcgagggcttgcgttttcacggcctcaccgtgcagctactggtaccatggttggctggggaagctaactgattctcttaattacctttgttcatgtatatatactatagttgcatatatagtataatgcttcagaagatttgttgtaccttcggtattgttgattcccacacaacagtgtatataagatatgcctatatgttctaaaaaactgactctggtcattaatatttgattctcttacaaaaaaaaaaaaaggacggccgctctagaggatccaagcttacgtacgcgtgcatgcgacgtcatagtcttcntataagtcacctnnnn

SEQ ID NO: 97908 - DNA, 592 bp, Arabidopsis thaliana columbia
  unsure (1)..(592): unsure at all n locations
ctcactatagggaaagctggtacgcctgcaggtaccggtccggaattccgggtcgacccacgcgtccgtacggctgcgagaaacnacagaaggnggaagaacagagttagttttcaaggtttatccacagatccactgaaatcaacaatggtgaataaagctccgaagaggaaacatgtatcacctgaatctctccttctctctattctcaatgatttgttgtttctaaattctcaaaagcttgactcttgtttccgtagaaaatcgaattcagatgcgtgtagctttatagttagcttaaattttgcaaaagttggaaattttacttcaagatccaatgaaattgctccactgatcaatgaagctgttgctaaaggcaagaactttgatactgggacaagagttggattagatgttggtcatcttcttaaatctgcattagctggaggaatctcatgtgctttctctgcttttttgatgcatccagtggatactgtcaagacacaggttcaagcatcaactacatttgtcgtttctcgaaatattgtcaaagattccagagattggtgctcgaggtttatacaaaggctcg

SEQ ID NO: 97909 - DNA, 893 bp, Arabidopsis thaliana columbia
  unsure (1)..(893): unsure at all n locations
catggcttctaacaaacgctgtctgaatcatatttcgattctgatttttcttcatggattcgtatagccaataagttttttcaatattcaaaacaaaaaccccatcaaaataatctccggaccagtttctctttcgattcagtcggaccggaaaaacaatggcgtctgtgaaccctttcgatctcttggacgatgacgcagaggatcccagccagattgttgcgtctaagccattgaaggttgtggctccggttcagactgctaagtctggtaagatgccgactaagccgcctcctccttctcaagctgtgagggaggcaaggaacgctcctggtggaggtcgtggtgctggacgtggagggagttatggtcgtggtggacgtggtggaaacaatagggattcaaggaacaatgatggtcctgccaatgaaaacggatatggtggaggctacagacgctcagaagaaggagatgggagctagacgtggtgggccttttggtgggtaccgtggtgttcgccgtggaagctacagcaatggtggtgattcaggtgactctgaaagaccacgcaagaactatgaccgtcacagtagaacagcgtacgggaatgacgataaacgtgatggagctggccgtgcgaattggggaaccactcaggatgatattactccggtgactgaagaatccacagctgttgtggacaagaatttgactgttgagaagcaagatggtgaaggtgaagcaactgatgcaaagaatgaaacacctgctgagaaagcagaggaaaagcctgaggacaaggagatgactttggaagagtatgagaaggttttggaggagaagangaaagctcttcagnaaggaaaagcctgaggacaaggagatgactttgg

SEQ ID NO: 97910 - DNA, 873 bp, Arabidopsis thaliana columbia
  unsure (1)..(873): unsure at all n locations
tacgactcactattgggaaagctgacacgcctgcaggtaccggtccggaattcccgggtcgacccacgcgtccgcccacgcgtccgtaggctgcgagagacgacagaaggggaagaacaaagacgattcgattgaattctccataagaggtccgacccgaattcgaaaacccgtaagaaccgaatcgaagatgagcaaggatggtttgagcaacgaccaagtctcatcaatgaaggaagcattcatgctattcgacacagacggcgacggcaaaatcgcaccgtcggagctcggaatcttaatgcggtcactcggcggcaatccaacagaatcacaactcanatcaatcataacgacggagaatctctcgtctccgttcgatttcaatcgattcctagatctaatggcgaaacatctgaaaacagagccgtccgatcgccagctttcgtgatgcgttcaaagtgcttgacaagggaaggtactggattcggtgctgtgccagatctgagacaatatccttacgagtatcggtgagaaattccagccgagtgaggtttgatgagtggatcaaagaggttgatgttggttctgatggtaagatccggtatgaggattttattgctagaatggtgggtaagtaagatctaaatctgtgaaaccctgaataataaaggttggaccaaatcttaggatttgttcagaaagtgtttaattgtaaatgtaattgggaatttggtcataattaagctgtgttatttgaaaagatggttcctttatgatattgaattctgtaaatgttgcaaaaagcaaaaggaaaaaaccccngggggcagccgctctagaggatccaagcttacgtacgcgtggatgcga

SEQ ID NO: 97911 - DNA, 751 bp, Arabidopsis thaliana columbia
  unsure (1)..(751): unsure at all n locations
tatagggttggttggtccgcctgcaggtaccggtccggaattcccgggtcgagacgattcgattgaattctccataagaggtccgacccgaattcgaaaacccgtaagaaccgaatcgaagatgagcaaggatggtttgagcaacgaccaagtctcatcaatgaaggaagcattcatgctattcgacacagacggcgacggcaaaatcgcaccgtcggagctcggaatcttaatgcggtcactcggcggcaatccaacagaatcacaactcaaatcaatcataacgacggagaatctctcgtctccgttcgatttcaatcgattcctagatctaatggcgaaacatctgaaaacagagccgtccgatcgccagcttcgtgatgcgttcaaagtgcttgacaaggaaggtactggattcgttgctgtggcagatctgagacatatacttacgagtatcggtgagaaattgcagccgagtgagtttgatgagtggatcaaaaggggtggatgttggtcctgatgggaagatccggtttggggattttattgccttgattggttgctaagtaaggcctaaatctttgaaatttgaattttttggattagaacaatcttaggatttgttcagaaagtgttgaattcttaatgtaattgggaatttggtcttaataaactgtgttattttgaaagatggttccctttacttagaacnngncccccnnnnnanactccccaaaaaaaattgtaaaaa

SEQ ID NO: 97912 - DNA, 462 bp, Arabidopsis thaliana columbia
  unsure (1)..(462): unsure at all n locations
gcgtttaacggagtaacccagcacgtcgatgccacgcgcccaggacggtttatcccctttcccactnggaatcagctcctctatcgccttacctaatcccaccgccgtctctcgtgccgcttggagtcactgctgagtcctatgggttcttcagaaaatttacctctactttagggggaacaagtggaaaggagataaagaggaagatgatggtaattttcccttacgatataaggtctgaaatatgtgtatctcctatgaatgtaattaccattttaccgtttgatgcgttgtgttgattgaggtaaattctttagttactatagtagcaagagagagtggttgttcggccatttctttatgttttttactctgttcttctctggtctgtaatataccaatatcgtctcttaaaaaaaaaaaaaaaagggcggccgctctagaggatccaagcttacgtac

SEQ ID NO: 97913 - DNA, 828 bp, Arabidopsis thaliana columbia
  unsure (1)..(828): unsure at all n locations
attaagaaattgagatctgacatatcagtgaactgcttgttcgagtccttggaggatgtgaacgagccgtagcatcttttggctaggtcccagagctttcctcctccgggtaaaccgtgtgtcatgagggatccctgcatggtagaacccaaagtcattttgaagtaagaggaggttcaaagaatggaccgacaatccgaaaagagtcaccacggcgtatttctctccttggctatggcggtagattccttcgaggaatacgcagcgattaacgccgagggacgcttaatgccgcccataacttttaaccctcttgccttgcatccagccacaagtttgagagtctgatctctatccaatttgagcctcaccagttgcgatctccggttcgaattctctgcgtccacgaaattcaaattcgaaaaccgaaacgcgttcaacgagtaaccaagcacgtcgatgccacgcgcccagaacggtttatcccctttcccactcggaatcagctcctctatcgccttacttaatcccaccgccgtctccgtcgccgccaccacgggaccgtttccgaaaccatcagccgccgtctctttcataaactctctcagaagcgtaaccgccgcagtacgatcgaccgccgccgtgttcaagccgaaaatgtgaggtattccgtttgctcttccgtcggtcggttagatcgtagaggccttgaccggtaaaaaacggggtgactngggtttttatccaacggtcgtcggtttatccacgtcgtttttttaaancttgtgtttcttaggttantcttttnttgntcancnnattgntntg

SEQ ID NO: 97914 - DNA, 552 bp, Arabidopsis thaliana columbia
  unsure (1)..(552): unsure at all n locations
gattggatttggttcaactaatggtggttttacgattgcaggcggaggtgttaaaatctttttcctggccacaatatatgcattgatcggatgtccactctcttatgtactatggtacaggccactctaccgagccatgaggactgacagtgctttgaagtttggttggtttttcttcacctacttgattcacattggcttctgcatcgttgctgccatcgcccctccaatctttttccatggaaaatcattaacgggtgtgcttgcagcaattgatgtcatctcagacagtttattagctgggatcttctactttatcggattcggtctcttctgcttggagtcactgctgagtctatggggtcttcagaaaatttacctctactttaggggaaacaagtgaaaaggagataaagacgaagatgatggtaattttcccttacgatataaggctgaaatatgngacccccangatgaataccattancggttgagcgtgtgtgatgaggaatccttaggaccaagacaaaaaatggtgccggcatcctaggc

SEQ ID NO: 97915 - DNA, 650 bp, Arabidopsis thaliana columbia
  unsure (1)..(650): unsure at all n locations
ctcactatatggaaagctggtacgcctgcaggtaccggtccggaattcccgggtcgacccacgccgtccgtacgggctgcgagaagacgacagaaggggtagagaatggtgacactcgtgaagcttgtagatgcatcagggagttaggtgtctcgtttttccatcacgagatcgtgaagagtggtttggttctagtgatggagtcccgaacatccgagccgctgatactaaaattgttgaaagaagctacagaagaaggtctcattagttcgagtcaaatggcgaaagggttctcccgagtagcagatagtcttgatgatctttctcttgacatcccatctgctaaaactctgtttgagtcaatagttcccaaggctataataggaggttggctcgacgaagattcgtttaaagaacgctctgatcaaaatgggggcagcgaaaatctaaggcggttcaagaaggatgcagagaccattattcaagagtatttcctttctgatgatatccccgagctaatccgcagtcttgaagatttaggattacccgatataacccggtattcttgaagaaactcatcactcttgctatggataggaagaacanagagaaagaaatggcttctgtttttctcgcttctctcacatgga

SEQ ID NO: 97916 - DNA, 917 bp, Arabidopsis thaliana columbia
  unsure (1)..(917): unsure at all n locations
ctctatacgactcactatatgggaagctggtacgcctgcaggtaccggtcccggaattccggggtcgacccacgcgtgcgtacggctgcgagaagaacgacagaggggggatttgagaaaaagaagagatgacgacgatacgtagattcagctgcaatgaccttctccgattcacttccgtgaatctggaccacctcactgaaacattcaatatgtccttctacatgacctatttagcgagatggcctgactattttcatgttgctgaaggtcccggcaatcgtgtcatgggttatattatgggtaaagttgaaggacagggtgaatcttggcatggtcatgtgacagccgtcactgtctctccagaataccgcaggcagcaacttgcaaagaaactgatgaaccttctggaagatataagtgataagattgataaagcctactttgtggatctttttgtaagagcttccaacacaccagccatcaagatgtatgaaaagcttggatacataatttataggcgggttttacgctattattcaggagaggaagatggattagatatgaggaaggcattatcaagagatgtagagaaaaagtctgtgattcctctcaagagacctatctcacctgatgaattagagtatgattaagaccctaacttggttctccattgttatctgcattaaaaatttctcccagagcccttagatggtggtaccattcctgttgtttcgtatttgaaccattatgtttcgttttcttccacaccaatttataattagttttgattaaaccttaatccatatatacctttttggaggagattttttgaggtttaaaaaaaaaaaaaaaaaaccccaaanagcggccgctttaaaagaatccagcctaaggaaggggcacatccaccttct

SEQ ID NO: 97917 - DNA, 439 bp, Arabidopsis thaliana columbia
tgactgatgaaggaatcgagagtcgggtatgcattatcctaacaacagaaccgaattcgtcggagctccagccccaacccggtatcaaaaggagcagttgtcaccggagcaagagctttcagttattgtctctgctttgcaacacgtgatctcaggggaaaacgaaacggcgccgtgtcagggtttttccagtgacagcacagtgataagcgcgggaatgcctcggttggattcagacacttgtcaagtctgtaggatcgaaggatgtctcggctgtaactactttttcgcgccaaatcagagaattgaaaagaatcatcaacaagaagaagagattactagtagtagtaacagaagaagagagagctctcccgtggcgaagaaagcggaaggtggcgggaaaatcaagaagaggaagaacaagaagaatggttacaga

SEQ ID NO: 97918 - DNA, 597 bp, Arabidopsis thaliana columbia
cggcactatacgactcacttagggaaagctggtacgcctgcaggtaccggtccggaattcccgggtcgacccacgcgtccgacttgattgatctgatcatcagatacttgcagcccccaataattcactatctctctctcttactcttttgttacaattctgttaacaaactttgacgtcaccatttgaattcttatccaattcccatttcctaacagaatttttcctctttttctctttctctttttcattccttagagattcttgattctcccacttccttctttagtcgttacagtctttgctctgttttcaaaaaaaaaaagttggttcctttctcaacttttttcccgggaaagtgaatgagagctaaaagggtttatcatgtttgagattccgggtaatacaattcctctcaaataaaaagtttccatttttaatcttctttccaaattctgtagttttatggataagttagggttgagcaaaaggggttattttgatttcgctctcaagaacaaaaaatggatattattagcagtaagtggttacggtgcttttagggtttatcattctccttcaatttcccagaaacgg

SEQ ID NO: 97919 - DNA, 568 bp, Arabidopsis thaliana columbia
cagctctatacgactcactatatgggaaagctgggtccccttgcaggtcccggtccgaatttcccggtccgaccacccttccgcaaaagacaacaaaaggttcgggttgcaaaaagcaacagaagggacgggttgcgagaagacgacagaagggggattgaaagatgtcaaggcttcttcagattctgttgctttaactgcaaatttcatttttgtggcgcgtgattctaagactggtaaagctgctcctatcaaccgtctttctcctgaaaccgaggttgagaaacttctctttgaggaagttgaagctaggaataacttaaggaagaagaagagaggaggtgacagaagggaatttgatcacggggagtgtaagaagcttgaggcttggttggctgaaggaaggattttctctgacatgccagctcttgctgacagaaacagcattcttcttaaagacactcgtcttgagaattcgctgatatgccaaccgcagcagaggaacatccatggtaggatctttggagggtttttaatgcatagagcatttgagttggctttctctact

SEQ ID NO: 97920 - DNA, 884 bp, Arabidopsis thaliana columbia
  unsure (1)..(884): unsure at all n locations
nnnnnnnnnnnnnnnnnnnnnnnnnnnnnnnnnnnnnnnnnnnnnnnnnnnnnnnnnnnnnnccgggcgaccccacgcgtgctagcggaagacgacagaagggacagagaacaaacatagagaggttatagaccggtttcagatattgaaggagcaggaaacagagcgcaagctcaagtctcagaagctccctgattcagacattgatgttatagaccggtttcagattctcaagcagcaggaaacaaatcgcaaactcaaggctcaaaaatgtccagaaacagaaaagggtgaccaggaggacaaactagaaggttcagtgatggctaatatgggcagaagcagcgatgtgagtgatgttatggatagattccagatactgaaacgccgggaagctgaacaagtgaagaaatctctcaacagcatggatgtagattcggattcagaaaatgaccagccacaaaagcgtgatcatctctggtcagattcgttattcccaatacgtggacattctcagagagaaacatgcgccgcggacactgaacaatctgcatctggcaaaggatacgagagcccgaccttggactgggaacatgtcatcaaggatgattgagtagtgaaatttccttggacaagaagtttcgatcctataatgaaatcttgttatttataaataaaaaggtatttgtaggataacatgaaccggccattatgaaaaacggttgttatgtatgattaaagggataaaactgcttggatgctggttttcaataactatgntcagttttnagttactgnttttcnnnnnnnnnnnnnnnnnnnnnnnnnnnnnnnnnnnnnnnnnnnnnnnnnnnnnnnnnnnnnnnnnnnnnnnnnnnnnnnnn

SEQ ID NO: 97921 - DNA, 383 bp, Arabidopsis thaliana columbia
ggaggtttgtttgtgaagcgtgtgaaggaaatgatttcaatggaggagaaggacacatacggcaaaagaaagactgttcctctgattccggctaactacatcagcatccttcagctccaggagcgttggctcaatgagaaagagaagaagcgaaaggaagaagaagagagacgacggaaactacaggctgaggaagagaaaaagatagaggaagaagatctgaagaaagcggaggaggagaagcgtatgaatcgaagtaatcggaagcatttttgggagaaaaaaggaatctatagacggcggagaagcacgattcgttgagaaggagaaaccggaagtcacggtggcgatcgagagcggtggaagtgaagatgcggcggatg

SEQ ID NO: 97922 - DNA, 949 bp, Arabidopsis thaliana columbia
aacacttctacttgaatcgcattggaagagcatcgtcacgactccatcacacttatatattttgtttattcaaatcttctttcagatttttatacaaaaaatataaattaaataaagaatcccataaatatctctctatcgaactctctctgcttttacaaatctcagaatctccttcagcgaattcacatctcagctgcttttgaatccgccgtaactaaaaacaatcctccttttctcgattcgttaaactatggccccgccggcaggacaaacggcggcggtggctgaagcggctggcgccgatggtgctccaccgcagcagcagcgtggatttggttccacgatttccggcatcgttagaatcgccgtcttttggtattttgcttctaagttcttttctcctaagcagaaacctatggatcccactgctccgtctcagctcatgactaatctcttccacaagggcgaatcattggatatgtggttttatctatcagagcaggagaagttcaatgactttggcaatgatcgtgcgctatattggcatgagacgaatataccttatgctgtatggacaccagagagtattaggaccaagtcacttacgtattatccatctgagacactacagaataatggaagtctgtatgctcatatcttttttgctcgatctggatttcccattgaccccactgatcctgaatatcaacctcttaatagttttagtaggacgcatgctgtggcgacttactttccaaagcagaaaaaaaataagaagaagagtctcttgggcagtcccaaagactctgatgaatccgaacctgaagttgagaaagttggagataagagatcagatcccaaggaagaggtccctgtggaatggatatccctctggaaacctaatgtcacgattaacctggttgatgattttactcactattcacag

SEQ ID NO: 97923 - DNA, 2071 bp, Arabidopsis thaliana columbia
ataacccacaaagataaaaaaaaaaaaaatgggcatagagcttcagaatcaccagagccaccatgaagaagccagtcctgcagaagagcccatgtcacggtggctgataaatacgccggaaccaccaagcatgtggcaagagcttattgggtacataagaacaaatgtcttggccaagaagaaacataagaggaacaagacgaagaactcatcatcaaaccttgtttactcttgtcttaaatcggctttccctatacttagttggggaagacaatacaaactcaacttgttcaggaaagatttgatggcaggtctcactctcgctagtctttgcattcctcagagtataggatatgctaatttggctggacttgatccagagtacggtctatatacaagtgtggtaccacctctgatatattcgacgatgggaacttcgagagagttagccattggtcctgtggctgtagtttcgcttcttctgtcgtcaatggttcgtgaccttcaagatccagtcaccgacccaattgcttaccgaaaaattgtcttcactgtcacgttttttgctggcgcgtttcaagccatctttggactcttcaggttagggtttttggtggactttttgtcacatgctgcacttgttgggttcatggctggtgctgcaattgtcattggtttacaacaacttaaaggtttatttggtttgactcattttaccaataaaaccgatgtagtttcggttttatcttcggttttccactcgcttcaccatccgtggcaacctctgaactttgtcatcggtagctcattcctcatcttcatcctcctagctagatttatcggaaaaagaaacaataagttgttttggattccagcgatggcaccgctaatatcagttgtattagcaacactaatagtgtatttatccaatgctgagtcacgaggggttaagattgttaaacacattaaaccagggtttaaccagctttcagttaaccaattacaattcaaaagtccacatcttggtcaaatcgccaaaattggtcttatttctgcaatcatcgccctaacggaagcaatcgcagtgggaagatcgtttgcgacgatcaaaggatatcgtttggatgggaacaaagagatgatggctatgggatttatgaatatcgctggttctttatcttcttgctatgtagctaccgggtctttctcaagaacggcggtgaatttcagtgctggttgcgagacggtggtttcaaacattgtaatggcgattacagtgatgatttcactagaagttttgacgaggtttctctacttcacaccaacggcgattcttgcctccataatcctctcggcgcttccaggtctcattgatgtctctggtgctttacacatttggaaactcgataaactcgattttctcgtcctcattgccgccttcttcggcgtcctctttgcctccgtcgagatcggtcttcttctcgccgtggggatatcgtttgcaagaataatgttgagttcgataagaccaagcattgaggccttagggaggttatcaaaaacagatatcttcggtgacataaatcagtatccaatggcaaataagactgcaggattattgactcttcgaatcagttctcctttgctatgctttgctaatgccaattttataagagacagaatattgaattcagttcaagaaatagaaggagaggagaatgaacaagaagttctaaaagaaaatggtcttcaagtagtaattctcgacatgtcttgcgtgatgggcgtagatacatcaggagtatttgcacttgaagaactacatcaagagctagcttctaatgacatccggttagtcatcgctagtcccagatggagggtacttcacaaattgaagcgagcaaaattggacgagaaaataaagacagaaaatatatatatgacagtaggagaagccgtagatatttatgtaagagcaagatctacgtcccacgagttgtgttgatatatatatgtaagaaacagtacaactcaaacatataacctagtgataattttattgttttctcat

SEQ ID NO: 97924 - DNA, 594 bp, Arabidopsis thaliana columbia
  unsure (1)..(594): unsure at all n locations
tatacgactcatatagggaaagctggtacgcctgcaggtaccggtccggaattcccgggtcgacccacgcgtccgcggtgatcttcgcttacgcagtcaatttccctatccagaagtttctccaatcacaaagcatcgtcactccaagtgcctacatatcagctgcaacgcttgtgatccatctcatactttcgtggatcgctgtgtatcgtcttggttacggtcttttggctttgtctttgatacatagcttctcgtggtggatcattgttgtggctcagattgtttatattaaaatgagtccgagatgtcgtcggacttgtgaaggttttagttggaaagcttttgaaggtctttgggattttttccgattatcagctgcttctgccgtcatgctttgtcttgaatcttggtactctcagattcttgttttactcgccggacttctcaagaaccctgagcttgctttggattctcttgctatctgcatgtcaatttctgcaatctcattcatggtctccgttggattcaacgcagctgcaaagtgtgagaagtaagcaacgagctaggnagccggaaaccnggagcaagccg

SEQ ID NO: 97925 - DNA, 635 bp, Arabidopsis thaliana columbia
aaattagaaagacgatgatggagaaaattatggagtatctgcaattgagcgatgaggtggttgacgacggtgaggcaccgcgagttgaagaatttttaggtgaagggaaaagcttctacgagaattttagtctcagaggaatccgagtcaaccgagtcgaaccgggtttcatttcctgctctttcaaggttcctcttcgtttgacggacagagacaagaatttagcaaatggtgcgactgcaaatcttgtggatgaagttggtggagcacttgtacatggcgaaggcttacctatgagtgtttcagtggacatgtctattgcattcctttcaaaagctaagcttggtgaggagttggagataacgtcgagattgttaggagagagaggaggttataaaggaacaatcgttgtagtcagaaacaagatgaccggggagattatagcggaaggtcgacattctatgtttggtagacaagctagtaagctctgagtccaacttttaagtcttgtatcactgtaatgtctgttttcaataataagattatggttaggtaaatttggttaggtcctttgttctttctggttgtgaatctaaaaccttggtacatagcccataaagatcaaaccattcagc

SEQ ID NO: 97926 - DNA, 425 bp, Arabidopsis thaliana columbia
tttatgacgacagaagggaaacagaggagtctgagaaaatggatgaagatagccgactgattgaagaactccgccagactaatgaatatcaaaggtctcagatatcacacttggagaaaagtcttaagcaggccatctcgaatcaggaggataacagattgagcaatgacaaccaaatccgaaaattaaaggacacagttgatgacctaaatcaaaaacttacaaattgtttgagaacaatcgagtccaagagtgttgaacttttaaatcttcaaactgctctaggccagtattacgctgaaatcgaagctaaggagcattttgaacgagagcttgcgatggctaaagacgagttgatgaagctttctgctcgtttgaaagattctgatgagcggttagagtcatcaaataaagaaaaggaagat

SEQ ID NO: 97927 - DNA, 615 bp, Arabidopsis thaliana columbia
  unsure (1)..(615): unsure at all n locations
ctcactattgggaaagctggtacgcctgcaggtaccggtccggaattcccgggtcgacccacgcgtccgcgagaagacgacagaaggggcattcgtggaattgtctttcagaaagaaaaaaacttggaagcagcagagaatcacactgaagctgaacaaactgaagattttgatccacagattttcttaagaaatcaaccagaattagctgatgtggtattcaattatttcccggatatgcagcagcctagggactctccgaaaaggaaggcggtaacccttgttcttgatttggatgaaactctggtccattcgactctggaagtctgtagagatacagacttttccttcagagtcactttcaatatgcaagagaacactgtttacgtgaaacaaagaccatacctttataggttcttagagagggtggttgaactttttcatgttgtcatcttcacggctagtcacagcatctatgcgtctcagcttctagatatattgatccagatgggaagtttgatcgcacgttttaccggattatgctttttcaatggatnataccaggattaaccgttgggtttgactacaaagggcttagtgacactgtcacagtgt

SEQ ID NO: 97928 - DNA, 674 bp, Arabidopsis thaliana columbia
  unsure (1)..(674): unsure at all n locations
gatacgtcagctctatacgacttaacttttagggaaggctggtccgcctgcaggtcccggtccggaattcccgggtcgacccacgcgtccgtacggctgcaagaagagacagaaggggacgagagagagtaatgaagagtgaagtgttatattgttctctcgtccacttccactctctcttttatctcttacttacttcttcgtaagatcattacatataataaataatattatttatgtttgtgttatatttaataacagtaaaaagttttaaaacgttgaacaaattagccgacatagaatacaaaagagggttagcatcgggggagaaacgtggaccaacatgatacaccctccaaaatagtccccaagttgaaacattgacatgtttcgctttttcttttctgtgtatactttttttttctgtgggtcacattatttaatatttgtatacaagcagctattttacatggagatttcctgtcggtatagcgtcctcatttctccatcgcttccacttttttcctatactaatttgatctaattaattcatatgtccaaacctttaggnnnnnnnnnnnnnnnnnnnnnnnnnnnnnnnnnnnnnnnnnnnnnnnnnnnnnnnnnnnnnnnnnnnnnnnnnnnnnnnnnnnnnnnnnnnnnnnnnnnnnnnn

SEQ ID NO: 97929 - DNA, 468 bp, Arabidopsis thaliana columbia
cccacgcgtccgcccacgcgtccggcgaagacgacagaagggaggagctgtggaagaaaggccaaaccccatgtttcattgcttgtactacactcgtcgaagggttgaggaaatcaggaagaacagagaaagcgtcagggtttatggagaagatgatgaatgcaggaattcttcccgatagtgtgacatttaacttgcttcttcgggatctctgcagttctgatcattctactgatgcaaacagattgagacttttggcatcaagcaaaggatatgaacccgatgagacaacgtaccatgttttggtttcggggttcacgaaagaagggagaagaaaggaaggagaagttctagtgaacgagatgttggataaagatatgttgcctgatatctttacatataatagattgatggatggcttgtcctgcactggacaattctcaaggaaacaagtccggatgttgtaac

SEQ ID NO: 97930 - DNA, 1115 bp, Arabidopsis thaliana columbia
  unsure (1)..(1115): unsure at all n locations
ggggagggcgcgggcgagggtcccgcgggggcggtagtattcgccggctcctnnnnnnnnnnnnnnnnnnnnnnnnnnnnnnnnnnnnnnnnnnnnnnnnnnnnnnnnnnnnnnnnccaggcgtgcgcgatgatttcgtcttccgtcgtcagctcatgaaactaaatctctcgaatctcagatttctacgtacccgaaaatcgttaatctcccagacgcgagcaatgactcaaaatccggatccaaaacctgatccatcgcaggttctagacgatatcctctgttcggagcagcgtgatgggcagattgaggaaacagtcgacacagcgccggcgagcttgggctctccaagtcgggtcttaagcattgatactagagtagagagagcttgggcacactggaaaaaactgggtagacccaagtatatcgttgctccaatggttgataactctgagcttccgtttagattgctctgccagaaatacggagctcaggctgcttatactccgatgttgcattctaggatcttcaccgagactgagaagtatagaaatcaggagttcaccacctgtaaggaggacaggccattgtttgtgcagttctgtgctaatgatcctgatacgttattggaagctgcaaagagagtcgaaccttactgcgactatgttgatatcaatttagggtgtcctcagcgtatagcgaggcgaggaaattatggcgcattcttgatggataatcttcctttggtgaaatcacttgttgaaaagttagctcagaacctcaatgttcctgtctcctgtaaaatccggatcttcccgaacctggaagatacactcaagtacgccaagatgctagaagatgctggttgctcgctcctagctgttcacgggcgaacaagagatgagaaagaccggaagaaatttagagctgattggagcgcaatcaaggaagggaaaaacgctatgagaatccctgtcttagcgaatgggaatgttagatgcattgaagatggcgataacttgcatcaaaaagaccggtggtgaaaggtggtcttctttggggagacccttctttgaaaacccgggggccttttgcttgggttaagaaccgcttga

SEQ ID NO: 97931 - DNA, 534 bp, Arabidopsis thaliana columbia
  unsure (1)..(534): unsure at all n locations
nnnnnnnnnnnnnnnnnnnnnnnnnnnnnnnnnnnnnnnnnnnnnnnnnnnnnnnnnnnnnnnnnnnnnnnnnnccacgcgtccgtacggctgcgagaagacgacagaaggggaagcaagagagtattttggggaagctcttcttcatggagcttgaattctcactctgctactgctaaatcgatgttagatagtgcccatcgccagtattctactcactctccatcggaaaccaaatcacagaaaatgctctattacctcaccgctgttgtctttggtatggtggggttaacttacgctgctgtgccattgtatagaacattctgccaagctactggatatggaggtactgttcaacgcaaagagactgttgagaagaagattgctaggcattcagaatctggtaccgtcactgaaagggagattgtggtgcagttcaatgctgatgttgcagatgggatgcagtggaagtccactccaacacaaagagaggttagagtaaagccaggagaaagtgcactcgcattttacact

SEQ ID NO: 97932 - DNA, 673 bp, Arabidopsis thaliana columbia
  unsure (1)..(673): unsure at all n locations
ctcactattgggaaagctggtacgcctgcaggtaccggtccggaattcccgggtcgacccacgcgtccgtcacttagacattccttcaaaagaaatgctcgaggaagcgataaacgagtaccaaggtacagtcattgcggtatcccacgatcgatacttcatcaaacaaatcgttaacagagtgatagaagtagaagatggttgtttagaagattatgcaggcgactacaattattacttggagaagaatctggatgctagaacaaaggagctagagagagaagcagagctagaagagaaagcaccaaaagtgaaggcaaagtcaaagatgtcaaaagcagagaaagaagcgaggaagaagcagaagatgcaagcatttcaacaagctaaacagaagtcaaaggctagcaagaactccaagagatggaactgaacaaacattgaaaactgaaaggagtcaagatttataaaaaaggcttcttcacagtctcacaaaatcgtcattgtggaatgtatatagatattacttttagaaatgcagagagaatattaatgtttctacaaaaaaaaaaaaaaaaaaaaaaaaaaaaaaagcggccgctctagaggatccaagcttacgtacgcgtgcatgcgacgtcatagctctttnnnnnnnnnnnnnnnnnnnnnn

SEQ ID NO: 97933 - DNA, 510 bp, Arabidopsis thaliana columbia
  unsure (1)..(510): unsure at all n locations
gccnnnnnnnnnnnnnnnnnnnnnnnnnnnnnnnnnnnnnnnnnnnnnnnnnnnnnnnnnnnnnnnnnnnnnnnccaggcgtccggttggttttggaccttttggttctccatcttcaaaatctcatcaatccgattagagaaattagggcaacgtaattttggcgaaaatcctctctctgttacgaatagattgtttttgattactaaagctggattcgtctctggtgctgtagattttcgagatccggtcagagtcgttcgtgaaaagctccttgtttaagtgttacgggctacatcggacgctgactggcttttcatggaatttgagtgccaagagagacttgaagctgcgaacgatcaaagaagtgagtctggtcttttgaataccgatttgagaataggtaatgatgggtctgttgagattccaaatgtgaagttgtgttgtcagaaaaagaagggaactttagtgcccagtggctcgaaacagttactctcttgacaggatttg

SEQ ID NO: 97934 - DNA, 433 bp, Arabidopsis thaliana columbia
gagagtacagaggctagagagaatgggatgggaataagcttgtttcgcaggttatcagaagcccatcctcaggcaatttcagtgttacaaaaccagtaccgaatgtgtcgaggtattatggaactatcaaatgccttgatatatggagacagattatgctgcggttctgctgaagtagctgatgccacacttgtgctttctacctccagttctacttcgccatggcttaaaaaggttctggagccaacaagaacagttgtatttgttaatacagatatgctgcgtgcttttgaagctagggatcagaatgcgatcaacaatccagttgaagcttccataatagctgagattgtagaggagctagtttacaatggagtggatagtaaagatattggaatcattactccttataactcacaagcgaccctcattc

SEQ ID NO: 97935 - DNA, 785 bp, Arabidopsis thaliana columbia
  unsure (1)..(785): unsure at all n locations
nnnnnnnnnnnnnnnnnnnnnnnnnnnnnnnnnnnnnnnnnnnnnnnnnnnnnnnnnnnnnnnnnnnnnnnnnnnnnnnnnnnnccacgcgtccgtacggctgcgagaagacgacagaagggaatgttagaggtagttgccgtgatttgcattctggtcctgtgagtttgcttcactggtcaggtagtggtaagccatggttaagactcgattccaagcttccatgtcctttagacacattgtgggcaccttatgatttgtataaacactcccattgatgccaatttcgagttcgacatattcatggtcatggggactaaaccgaagatagcagagttgcaatggtggttttcaactggaaacaactatgttgaagattgagtaaaccctgccggaacagagtgctatagtagtattgcttcggacagttcgaccagaccgtagacacaatttagaagagtgaacttcgttttaagtgttgtaccggcggttaaatatgttcttgtgggaagaaaaaaaataaaaatatagttaggtcattcacacatagctcaggttaaagcgtttttgttgtttatgattggtcctataagtaattttgtgcagactctagtccttactttggttctcaaaagtctttagaaatctatggttaaagattttccctcnnnnnnnnnnnnnnnnnnnnnnnnnnnnnnnnnnnnnnnnnnnnnnnnnnnnnnnnnnnnnnnnnnnnnnnnnnnnnnnnnnnnnnnnnnnnnnnnnnnnnnnnnnnnnnnnnnnnn

SEQ ID NO: 97936 - DNA, 715 bp, Arabidopsis thaliana columbia
  unsure (1)..(715): unsure at all n locations
ccnnnnnnnnnnnnnnnnnnnnnnnnnnnnnnnnnnnnnnnnnnnnnnnnnnnnnnnnnnnnnnnnnnnnnnnccacgcgtccgtacggctgcgagaagacgacgatgcagagtttaacgtcaaacgaagttgcgggtttggcagttggggctctgcttcttggtgccaccatcgctgctcctaaagttgatgcttttatcgctgcttctcagagaagatctcttggcatgtgtcgaaaatgtggagatcttaagaatgtagcttgtggccgttgcaaaggaacaggaacaatcaaatcaggaggattctttggtttcagtgactcatcaaacacaagatcagtggcttgcgataattgccaagccaaaggttgtttcccttgccctgaatgctcaaaatcttgaccattttctcggtattttatagttgtttcatcttcttgacactatgataagtgtaatcggtccattggtaatggtaatgttaaagttgaagaatgtcttgtttattcgagaagtctcttattccaattcttgatctgttactgcaaataaggcactttgcttagatgtaccggatgcttatgaattactgagtaggttctctttctagnnnnnnnnnnnnnnnnnnnnnnnnnnnnnnnnnnnnnnnnnnnnnnnnnnnnnnnnnnnnnnnnnnnnnnnnnnnnnnnnnnnnnnnnnnnnnnnnnnnnnn

SEQ ID NO: 97937 - DNA, 798 bp, Arabidopsis thaliana columbia
  unsure (1)..(798): unsure at all n locations
nnnnnnnnnnnnnnnnnnnnnnnnnnnnnnnnnnnnnnnnnnnnnnnnnnnncccgtccccaattttcgtttcgacccacgcgtccggatttcaagagtaatggttccgcgagaagcaagatggtttcggaatcaggagatggggtcaagagtaatgggtggactgaggctatcgcaactacattggcagttccgagcaatcggaggtttatgtttgatgtaacaggaagagtaacactagaaacgacgagatcaatcatcgcatttataatggtgaagacatttcaagggttcagaaaaagtatcaatgtggttcatgaagaggttacagacagaggacgccaagcagttgaatatgttggagccaaatcttctgttataatcactgtgtgccttgcgttgtacttgcacatcataagcggctgtgttcggaattctcccataggcgtaagccagcatttttagttcttcagatgaagagcagatcatcgatttggttggatataggataatatttgttaggtacacaagatttatcagctcgttgtttatagttggagctgagaatattgtaaagattgtgtgcgtgtattagcacaacttgattcttattgatggatcatggatcatatatatatacatattgaaaaggttcttgggacaaaaaaaaaaaaaaaaaaaaagggcggccccttctagaggaatccaagtttaacgaccgcgtgcaatgccaacgtcaatatcttctttttataggtgccacccttaaaattcaaatttcacctgggcccggtcttt

SEQ ID NO: 97938 - DNA, 858 bp, Arabidopsis thaliana columbia
gtttcgtcctcgaagcttttagaacttagccaagcagctgttgtttcttagttgactccctctccgacgaaaatggtgtccacgagcaagatcaaatccgttgatttctataggaaaatcccgagggatttgacagaggcgtctctgtctggtgctggattgtccattatagcagccctctctatgatatttctatttggaatggagttgaataattatttggctgtcagcacttccacatcggtcattgttgacaggagcgctgacggagacttcttgcgcttagattttaatataagcttcccgtcactttcatgtgaattcgcatctgtggatgtcagtgatgtattaggaactaacaggctaaatgtaacaaagacaattcggaagttttctattgattcgaatatgagacccactggttctgagtttcatgccggggaagttttatcactcattaatcatggagatgaaactggtgaagaaatagttgaagattcggtaccacttactggacgcaactttgacacatttacacatcaatttccaatcttggttgttaatttctatgcaccgtggtgctattggtgtaatcgcctgaaaccatcatgggagaaagcagctaaacagagataagagagatatgatccagatctggactgacgtgttattttggcagaagttgactgcaccgaataatgtgatctctgtcggaggaatcatatacaagggtattcatccattcgcattttctgcaaaggcagtgatcttaaggatgataatgcacaccatgaccatgaatccgactatggagatcgtgatacggaaagcttagtgaagatggtggtgaatctggtt

SEQ ID NO: 97939 - DNA, 424 bp, Arabidopsis thaliana columbia
ggagcacttaagtaatggctacaaagacatcaaatttaggtcatcttcttctgtctttgtttattctgctcttgtttatcttatctcaagttggagtcgcccaggccaaacgtctccaacaaaggaacaaattgcgtttggattgcgttcctcttcctcctccccctccacctctccgtggcatcgtcaaacctcctatcgcttcgtttcactctgcatcgcctaaagataaaggcccataagccataagtcatcatagtgcaggataagaggtcaagagagttttataagtattttgttatacaaaaccatgttgtatcatattttttatttatagttaaggtttttttttcgtgtctacaacacatgtacacacacaatcagacgtatatctagaataaaataaaaaagctattatcaaaaa

SEQ ID NO: 97940 - DNA, 1647 bp, Arabidopsis thaliana columbia
cttgctcgaacaaaaaaattctctccgcgatacttacaaagcacaagtgagctagctttgagaaagattcaatttttgagccttaagattgtgatgggagttgtgtctatttcaagttcagctgcaagatctccactcgggttgggcaacgatcttttgacacatcggtcttcacttaaaaagccatccattgttgcttttaaagccgatgattccagcaattcagctttgatcattcctcctcgtgagcaagttttgattcctgctgaaaagcataatgagaagaagagagaagtaacgaggagaaagccttgtaaaaccccgaaaaaaccgctttccttggaacataattcggctccttcgtgttcgttaggagtagattacaatgaagctgctgcaagacttgaaagcatatacaagcttagtcctgcaacaaccacattagtcgaggatgatgttgaagatggcggctctaaagccaaagtttcacggaggagaaaaaggaaagaaagtggtgaggagaagaaagtggttgtgaggaataatgtgaagaaggaaaaacgtatgagtcttgataaacggattgctttgaagagaaacgttcaagagaaaccagtcgttgcttctgttgataagaaagtaacaaagaggcagcaagaagaggagaagatcgagaggcttgtgcgggactattcagcttctaatgatatagtgagcttggactggaaaaaaatgaagatacctcctgttctttcttctactgaacatgcttggttgttcaagttgatgcaacctatgaaggctcttcttgaagtgaaagatgtattgcaaaagagcttgggaagagagcctagggaagctgaaatagccggggagatcaatatgactgcgggtgaagtaaaaaagaaaatcgaaataggtagagctgcaagaaacaaacttattaagcacaatctccggcttgtcttgtttgttatgaacaaatactttcatgagtttaccaacggaccaaaattccaagacctttgtcaagcgggtatgagagggcttatcacagcaattgaccgctttgagccgaaaaggaagtttcgtctttcgacttatggtttgttttggattagacatgccatcatacggtcaatgacaacttcaaacttcactcgtgtcccatttggacttgaatcggttagagtggagatatataaagcaaagactgagctatggtttgagatgggaagacctccaacggaggacgaggtagttgagagactcaagataacacctgagagataccgtgaagtattgagggctgcaaaaccggttttgtcactaaattcaaaacattcggttactcaagaagaattcatcaacggaatcacagatgttgatggtgttggagctaataacagcagacagcctgctcttctcaggctcgctctcgacgatgtgctcgattcattgaagccgaaagagagtctggttattcgacagaggtacggtcttgatggaaaaggcgacaggactctaggagagatagctggaaatctcaacatctctagagaaatggttaggaaacatgaagtcaaggccttgatgaagcttaagcatcaggccagagttgattaccttcgtcaatacatcgtctaa

SEQ ID NO: 97941 - DNA, 746 bp, Arabidopsis thaliana columbia
  unsure (1)..(746): unsure at all n locations
tgcgagacgacagaagggggaccaatcgagagacttgtggtcttcccggagatggtttcgtttacgggtttcgctttcgtatttggaattctacttgggattcttgcgatcgttacggcggaagttgtagggtttttgtatcttctgaagcgattgaatcggaaaagagatcgtcaggaatcgaattcgagttctgatccaaacttcaagagttttgatcctcgccaatccattgattttagtctcaacaaacagggagtgatctggatattggaattagatgaaaatgtaaaagattggatgaaggagaaattaccaaaagagcaaaagaaaatgggggcagcaaaggcgaggatgttcgattttaggaagaaagtgggagagaagtttgaagagaagaaacgtcacgttgaggaaaaaagtagacagattgttgaaaagatgagaggaccttgacacaataacaaggagaagaagcttctttctttctttttcaggtttcagacgcccacaaaactgatagtcagaagaaagtcaatagattagagtataggtattgggacttgtattcatgtttggtaaaaagatatcgagcattgcgaaatcgttctttattttttattattcagccttaagagttgcctnnnnnnnnnnnnnnnnnnnnnnnnnnnnnnnnnnnnnnnnnnnnnnnnnnnnnnnnnnnnnnnnnnnnnnnnnnnnnnnnnnnnnnnnnnnnnnnnnnnnnn

SEQ ID NO: 97942 - DNA, 783 bp, Arabidopsis thaliana columbia
  unsure (1)..(783): unsure at all n locations
gaagagagggagattagggttttttgggtttaggaggaggagagcattgaaagggaaaacagagtttggtagaggtagttatgtgttcccatcttctgtagacagagagagtgaatacagtagaaaggaagaggaagaagaaaaagaagacaaaaggtttggttatgatgatactgatggtattagttgcagccaaagcagcaggttttgtgatgtgaagatctcaagcattagtagaacaggcagcttctctactctgcctgcaccaccttcttcttcttcaaagtctcacttttggacgaatgtgtatgcaggactaaagcaagtggttccatggaagagcaagaagactacagtttgagattctgccatatcaaagattcgaaagataaaacaccaagtaacaagaaagcttctatggtttctacaagtatttttaagcttttgtttatgatttttttcaatatttccaagaaaatgacacgactagtaaaaccattgtgaaacccagttttttttcacgcttgttgttgtgtttgaatgtttttgagacttttgtaaagagaaacagagaatcttacgatgtatcatggcttcatgattatggtacaagggatatttatcatgtttgtaaccacaaaaaaaagcaagaacctccccaggctcttatatatgtaaccgtcttgatcataaaaaaaaaaaaaaagnnnnnnnnnnnnnnnnnnnnnnnnnnnnnnnnnnnnnnnnnnnnnnnnnnnnnnnnnnnnnnnnnnnnnnnnnnnn

SEQ ID NO: 97943 - DNA, 420 bp, Arabidopsis thaliana columbia
gaagccggtttcaaattaaggcgaagagagggtcttgtgagtcagaagagtgttgaagcaatgcttattacaagtcatgtgagaagaaactcccaacacaataatggcgacgctagcgagaaggagaattttgaggatgacattgtattggatgaggtttacagatcttatctcaaacggttagtggaaaattcgaaaagttcaagaactaatcctgaaaaagagataaaagtaaagtgtgaggaggatcatacagtgtctttgtctgattctgattctgatattattgtggttggagattgtccatttctggaagaagaggattctccatttgtgccatcaaaaagttataaagtgattgatttggatgaagagagcagtgatcaacgcaattcttggtttaggagggagataatgaat

SEQ ID NO: 97944 - DNA, 509 bp, Arabidopsis thaliana columbia
agacgacagaaaggatggatagtttattacaagggtttttggatgagcatagagctaacaaagacagattggagtttaagaacaccatgattgctcatttacttgattctcaagaaaaagagcctcataactacagtgatcaaaccatcaaaggtcttatactgatgatggtagtaggaggcacagatacatcggccttaaccgtggaatgggcaatgtcaaatttattgaatcatccacaaatactagagaccacgagacaaaacattgatactcaaatggaaacatcaagtagtcgtcgtttgttgaaagaagaagatttggtaaacatgaactacttgaaaaatgttgtgtcggagacactaagactttaccctgtggcaccacttatggttcctcatgtgccatcttctgactgtgtaatcggtggattcaacgttccacgtgatacgatcgtgttggttaacttgtgggctatacatcgagatccaagcgtgtgggatgatcca

SEQ ID NO: 97945 - DNA, 483 bp, Arabidopsis thaliana columbia
  unsure (1)..(483): unsure at all n locations
cccccttaccgggccctttaacggtggtccatggtgttgtggncttnaaccaaaacnccnaaggatgtanggttgtgtttcttgcacctgtggttccgtttgagactcactgctgctgctgctgctttgaacgtttgttggcccgttattcaggtttgggaagccgtgaccagctgcgaaaccgagccttgtcacatgtgagaaggatcttctctctccaatgtttggagggcttgatgatattggggcagagtttcccagagcttcaaagtcatccaaggataatgggggaaagtcatcgctagaagacgactgcccacacctggccatcaatggtacaagctctgcagctgcagctacttcagctttgattttattttttcgatccttccaagcacgttctttccgctgcttctcacgcttcttaatttcatgtataaatggagcaaatgcatcaggaggcaaggattccttcatatcaat

SEQ ID NO: 97946 - DNA, 1001 bp, Arabidopsis thaliana columbia
  unsure (1)..(1001): unsure at all n locations
gaaagctgggacgccctggcaggacccggcccgaattccgggtcgaccacgcgtccgacggttgcgaaagacaaagagggctgtacgtttgttggctcgttattcaggtttggggagtcgtgaccagctgcgaaaccgagccttgtcacatgtgagaaggaacttctctctccaatgtttggagggcttgatgatattggggcagagtttcccagagcttaagagagacacaacaaaagcttcttattagatcaataaacctaaaatccaattacgagacgagagattcctcttgtttaccttcaaagtcatccaaggaaaatgggggaaagtcatcactagaagacgactgcccaaaactggccatcaatggtacaagctctgcagctgcagctacttcagctttgattttattttttcgatcctgaaatatgaacatcatatgatcttaagtcctgatttttccttaaacaaaggaatacataggagaataagacacaaagcaaacaaagccaataggagttggaatctgaaagatattagatgaagtaggccgtggggttgtgttttatggttagaacgagaataccttccaagcacgttctttccgctgcttctcacgcttcttaatttcatgtataaatggggcaaatgcatcaggaggcaaggattccttcatatcaatctcacatatctgaaaagattaccaaaccaaggataacctcatgagaaaatgtcaagatatagcaacacatgcagaagataggagccccaaagagaaaatatgcctgaagtgtagttgataaagaaaaatgacttaaaaagcggtagcgtctccttatcgcttctgattgggtaatggtttccatttccagtatctttccactcaatctgccgtttaatggatcagtantattaaaaaaaaaacaaacacaaagagcggccgctctagaggatccaagcttacgtacgcgtgcgatgcgacgtcatagtcttctata

SEQ ID NO: 97947 - DNA, 1431 bp, Arabidopsis thaliana columbia
  unsure (1)..(1431): unsure at all n locations
atgatcctgccagcacnnnnnnnnnnnnnnnnnnnnnnnnnnnnnnnnnnnnnnnnnnnnnnnnnnnnnnnnnnnnnnnnnnnccacgcgtccgcccacgcgtccgctctcggactacgtacatgcctacaatgcctgcactcacctgatttaattattggtttagacaaatatcttcagtattatgtctcacaggcgaaatctggctgcggctctcggactacgtacatgcctacaatgcctgcactcaccagatgtacaacgggatcaaaattccaatggaagaagaaagaaaagacacctaccactcagaagagagaatctcaggtttcggctatgaacggtgagaattcttttggggcacgcaaatatgtgtcagaataaacagcttgcacaaaatccgcagtgagcttgatgttgtggaaaaaagagtgatcacacattttacggaactgtgagtcagctcacaccgatgacttttccaacggctaagaaaaaaagtttgagctcacaccagcggcttgcatagaaggcgttcaacagctttctgagtctctggctnataaggtcgtcttccacgacctaagccacacgttatgggacgggttatacatcggagacctctcttcctctagaatcgatcctttcctcaaggaactcgaacagaatttgacagtcatagcagagacagtacatgaaagagttcgaacacgcatcatcaccgatattatgagagcctctttagatggcttcttaccttgcctgcttgccggaggaccctctagggcgttcacaagacaagactctcagataatggaagaagatttccaatcaatgaaagatatgttctggctaacggagacggtctagccatggacctgatcgataaattctcaaccactgtcagaggcgtgcttcctctgttcagtacagatacagacagtttaatagagaggttcaagggaacgaccctcgaagcatatggttcttcagctaagtcgaggcttccgttgcctccaacatcaggccagtggaatggcatggagccaaacacactcttacgtgttttgtgttaccgtaacgacgaatctgccacgaggtttctcaagaagacatataatctacctaagaagctttagtaaacttacggctactactgcaacgtataataacctcacaagatgaagagtgtgtgttccacttgcaggagggagcctccgagatttggattagtgagtttcaatttttttttggttttaatgggttttttttctaatacattcctatacggactatttaattcatttatatcttttgttattattatttttgaagtatccaaataaaaaaaaaaaaaaaaaaaagggcggccgctctagaggatccaagcttacgtacgcgtgcgtgcgacgtcatagactcttctatagt

SEQ ID NO: 97948 - DNA, 444 bp, Arabidopsis thaliana columbia
gaacacaagcgatactgagctgaagtttctctcagagctgataaagacaggagctatctgctcagttgatgaactgtttcttcactgcacaggctacagcgactgcaccggtatcattaaaagcctcagaaacagtggcgtctttgtccatcaatggtgggaagactaataagcttaacaaatgaagctttataaactaaaactatgttgtttggtaagttggtgttgttttgttttccaatccttgctcatgtatagagcaaagccacagaagtttgctccagcgacccagcacttctgtggttctacctaaataagctgtcgtcgttatgaactttgttttgtgtgtttgttcaatgaagtttgctatgttgtgtgtttctactggttttcatgctctgtttcacaaacgcttatagtaccaaagtagcctgacgatttacc

SEQ ID NO: 97949 - DNA, 530 bp, Arabidopsis thaliana columbia
  unsure (1)..(530): unsure at all n locations
nnnnnnnnnnnnnnnnnnnnnnnnnnnnnnnnnnnnnnnnnnnnnnnnnnnnnnnnnnnnnnnnnnnnnnnnnnccacgcgtgcgtgcggctgcgagaagacgacagaaggggaagagggaagacacagtcctctcacaactcttccacttctctctttcctacaaatttctcgttcctccgacctctctcgccggaaattgtgtagcatttgtctataaatgggtttggattctaaaggggctgatttggaggtaataagaaatgaaaaatctgaagcaaacactgtgtgtttacatgcgttttcagatttaacctatgtgtctcctgtggtgttcttatacctactcaaagaatgctataaacatggtagcttgaaggcaacaaaaaagttccaagctttacagtatcaagttcatggaggtctagctaataaacctcacccaggacctgctactttcattattaatgggctcactgtacttcctttattgggggtatatggggaaggctttaatcatttagtatatc

SEQ ID NO: 97950 - DNA, 679 bp, Arabidopsis thaliana columbia
  unsure (1)..(679): unsure at all n locations
cctttacttgcagtgtcactatagttgttgcttacctcatgaagaaacacggtatgactttagctcaagcattgcaacatgttacaagcaaaagacccgtggcaagtcctaatgctggtttcatcagacaattacaagacctcgacaagtctaggcaaggtatgccttactataatatcttgaggtctagactattaggttgagatctctgtggtgaatctaagttggagatactctgtctgtctgattcagtagtgagtgaccagtttttttccttttgaggatgcaaagcaagtggttgtggaggagaagacagttccatgtaaatatctcttacatgcatctcccttcttctctataaaacagggaagcaagttacgattgcacaatgtcaggcgtgaagatcattgatcgtaccattgggagaaacttgtaaatctcacacgaagcatcaatcaaaatgttttgttgtttcttctccttaacaactcgaataataacatggaaacgaatttggaatatgttcatgttctctattcgttttgtatagtttcatcatcatggatataaaagtgaacataaataaaaatttgtaaaaaaaaaaaaaaaagnnnnnnnnnnnnnnnnnnnnnnnnnnnnnnnnnnnnnnnnnnnnnnnnnnnnnnnnnnnnnnnnnnnn

SEQ ID NO: 97951 - DNA, 1083 bp, Arabidopsis thaliana columbia
cacgagaacacatccttccctctcctcctcctccttccccaaaaaacctggagaaccatgcagttgcaatttcctctttaacccatttcaaagattcgtttttttttttttgtaaatctctttctcctttggcgaattcgtattccttcttttccaatgagttctagagacagaggatcaccttcttcttcttcgtcatcttcttcgttaccaggaatagaaaagtataatgaaaaggtgaagaatcagatacaagctcttgttcgtgttattaaagttgctcgtacctatagagacgacaatgtcccttcccttattgaacagggtctttatcttggatctgttgcagcagctagtaataagaatgttttgaaatcttacaatgttacacatattttgactgttgctagttcgttgagaccagctcatcctgatgactttgtttacaaggttgttcgagtcgtggataaggaagatacaaatctagaaatgtacttcgatgagtgtgttgatttcattgatgaagccaagagacaaggcggtagtgttcttgttcattgctttgttggcaaatcacggagtgtcactatagttgttgcttacctcatgaagaaacacggtatgactttagctcaagcattgcaacatgttaaaagcaaaagacccgtggcaagtcctaatgctggtttcatcagacaattacaagacctcgagaagtctatgcaagtgagtgaccagtttttttccttttgaggatgaaaagcaagtggttgtggaggagaagacagttccatgtaaatatctcttacatgcatcttccttcttctctataaaacagggaagcaagttacgattgcacaatgtcaggcgtgaagatcattgatcgtaccattgggagaaacttgtaaatctcacacgaagcatcaatcaaaatgttttgttgtttcttctccttaacaactcgaataataacatggaaacgaatttggaatatgttcatgttctctattcgttttgtatagtttcatcatcatggatataaaagtgaacataaataaaaatttgtaaaaaaaaaaaaaaaaa

SEQ ID NO: 97952 - DNA, 562 bp, Arabidopsis thaliana columbia
cacacgcgtccgggacagtcccctcaaataaaagttgtgagagctgtttcgtcgctttgatcgaaatggcgtcgtcttctccaactcagctagctcacgtcccgattcctccagaaccaggaggaaggtcgccgacacaagaagctaatgagccaccagttccgatttacattgtgacggatccgtttcaacttcctgctgatttcctaaacccttctcctgaaaagaaattggttatcggttttgactgtgagggtgttgacctctgccgacatgggaaactttgtatcatgcagattgcattctctaatgcaatatacttggttgatgtcatcgaaggtggagaggtgattatgaaagcgtgtaagcctgcactcgagtctaattacatcacgaaagttattcacgattgcaagcgtgacagtgaggctctatacttccagtttgggataagattgcacaatgttgtggacactcagattgcttattctctgattgaaggccaagaacgggcggtgggggccctcttgggtggtttccatatcggttgttttaccccctt

SEQ ID NO: 97953 - DNA, 541 bp, Arabidopsis thaliana columbia
ctatacgactcatattggaagctggtcgcctgcagtaccggccgggattccgggtcgaccacgcgtcgggagtgattatgaaagcgtgtaagcctgcactcgagtctaattacatcacgaaagttattcacgattgcaagcgtgacagtgaggctctatacttccagtttgggataagattgcacaatgttgtggacactcagattgcttattctctgattgaagaacaagaagggcggaggagacctctagatgattacatatcgtttgtttcactccttgctgatccacgttactgcggtatatcctatgaagagaaagaagaagttcgagttctcatgcgccaggacccaaagttttggacatacaggcctatgactgagctcatgatccgcgcagctgctgatgatgtccgcttccttctgtatctctatcacaaaatgatgggaaagctaaatcagcggtcactatggcatcttgcagttcgtggtgctttgtactgtcggtgtctctgctgcatgatgatgctgatttgctgatt

SEQ ID NO: 97954 - DNA, 511 bp, Arabidopsis thaliana columbia
  unsure (1)..(511): unsure at all n locations
nnnnnnnnnnnnnnnnnnnnnnnnnnnnnnnnnnnnnnnnnnnnnnnnnnnnnnnnnnnnnnnnnnccacgcgtccgctatttcacaaaatcaggttattgttatctctggagaaacaggttgcggcaagaccacacaaatcccgcagtttattttagaatccgagattgaagcaaaccgtggagctttttccagtatcatatgtactcaaccaaggagaatatctgctatgtctgtttcggagagggttgcttacgagagaggagagcagttgggtgaatctgttggatataaagttcgattggaaggtgttaaaggaagagatacccgcttactcttctgcaccacaggcattttgttgagacgcttgttggtagatagaaatttaagaggagttactcatgttatcgtggatgaaattcatgagcgtggaatgaatgaagacttccttcttatcattcttaaggatctgctatctcgtcgctcagagcttaagctgattttgatgagt

SEQ ID NO: 97955 - DNA, 881 bp, Arabidopsis thaliana columbia
  unsure (1)..(881): unsure at all n locations
actcactatagggaaagctggtacgcctgcaggtacccggtccgggaattcccggggtcgacccacgccgtccgtacgggctgcgagaagacgacagaagggggaacctccgatttgactgcaccgtcggagctcgacgctgagctaagcttaaccaagagctgtcgtatattacactagcagtgaagatcgaatcttaaaaccatggcttctccgaccaattcacagaaaacagtttcggatgacgaggaagttgattactccatcaaaccggagttctatgattcagatattgatgataaagatgagctttggatggataagaagagagatggtcgtacttttgatgctcttcttagctgtccagcttgtttcaccactgtctgcttagagtgtcagaggcacgagcagtatgtgacacagtacagagcagtctttgtggtcaattgcaaagtaggtacagacacagttttgcaacagaatacaatgcccttaaaggttggtaaaagaaggagagattccgagatgcaagaaactggttctgaggatagcgaaaaagttaacccggtcttttgctcagcttgttccacagagatcggagtagttgacagtgaagagatctaccatttctttaatgtcattccaagcgagccttaaaacaacctggttttatgagttatttgtaacgagttctaaacaggtgattaggattaaagtttcgattgtttgcgttaatctttacgttgcatgtatatcgtttgataaaaatcaagtccctnnnnnnnnnnnnnnnnnnnnnnnnnnnnnnnnnnnnnnnnnnnnnnnnnnnnnnnnnnnnnnnnnnnnnnnnnnnnnnnnnnnnnnnnnnnnnnnnnnnnnnn

SEQ ID NO: 97956 - DNA, 740 bp, Arabidopsis thaliana columbia
gaactcagcttatcgatattaggaagctgtccctgcagtccgtcgattccggtcgacacgcgtcgcgtgagagacacgagtacgtcgaagacgacagaagggtacggctgccagaagacgactaagggataaaggcgctattatcagccatgagtaatctcatcagtttgcctgttcccgagaatcgtcaaagcgattccgttgttgagaatgatacttctgagacaaaacctattctactctggagagcactgtacgtgcaagagctagtcaagggtgaatttggaggtacgatcagttccatgcctagtccagatggaaacttgaactacaatgagatagtggaatcagccgtgaagctatatgaaaagctcatggggagtgaagaattatttaaagaagggacctcaccggcggagaacacaacggaggaggaaaacgatggtggtgttgaaatagaagattgattgatgaatgaaaccattggttttaacgacttagaatacccatttatttatttgattgtaacatatagttaccccgttattagaggggaagcaggaagattggcagagggagggtgagcccttttcctttcttattccctagagagccactatgattagggaagaaattaaggatttaggaaaagttttttctcccttataataaaaaaaaaaaaaaccaaaaagccgcccgtttaaaagaatccaggctaaggaaggggtgcatgcaacttc

SEQ ID NO: 97957 - DNA, 696 bp, Arabidopsis thaliana columbia
  unsure (1)..(696): unsure at all n locations
nnnnnnnnnnnnnnnnnnnnnnnnnnnnnnnnnnnnnnnnnnnnnnnnnnnnnnnnnnnnnnnnnnnnnnnccacgcgtccgtgcggcgcgagagacgacagaagggtacggctgctaaaagacgacagaagggtacggctgcgagaaacgacagaagggtacggctgcgagaagacgacagaagggtacggctgcgagaagacgacagaaggggaaagtcttctaaatcatttgggcgaaaagtccaaattaaatcaaaagatgttcaaagttgcaagagcgtcacagtatttggcgatcaccggtgctggtatcgaagacatcaagctttccaagaagtcatgggtgtttccatggcaatcttgcaccgtcttcgacgtttctccggtgaactatactttcaaagtccaagccatgagcgcagagaagcttccttttgttcttcccgctgtttttacgattggtcctcgcgttgatgacgatgacgcgctgattttgtatgctaggttgatttctcctcatgataaagattcaaatcatgtccatgagcttgttgaaggtgttattgaaggagagactcgtgttcttgctgcttccatgactatggaagagatctttaaagggncaaaggagtttaagaaggaggtgtttgataagnttcaactagaattaaaccagtttggtcttgttgatat

SEQ ID NO: 97958 - DNA, 413 bp, Arabidopsis thaliana columbia
aaattaaaacaaatcaatgttgatattgaatccaatagtgcttgggttcaacctaggtgctacagcttggtgagctgtactactgaatttctgagaggagcaagatccatggatttcccgcgggtttgtgcacaagcgtaggcataggtgggtatatgacaggcggtggatacggtaccttgatgaggaagtatggtcttgcgggagataatgttctagacgtaaagatggttgatgcaaatggtaaattactcgacagagccgcgatgggtgaggacctattttgggcgattagaggaggcggtggagcgagtttcgggatagttctagcatggaagatcaagcttgttcctgttcctaagactgttaccgtcttcactgtcaccaaaacgttagaacaagacgcaagattg

SEQ ID NO: 97959 - DNA, 588 bp, Arabidopsis thaliana columbia
  unsure (1)..(588): unsure at all n locations
gcatctagcctcctctcccttcccgtgcccccctgatattcgccnnnnnnnnnnnnnnnnnnnnnnnnnnnnnnnnnnnnnnnnnnnnnnnnnnnnnnnnnatagtgcttgggttccaggcggtccgcaatctggtgccactgttggtgaactttattacaggattgcggagaagagcaaagtccatgggttcccggcgggtttgtgctcgagcttaggcataggaggacacataacaggcggtgcgtacggttccatgatgcggaaatatggtctaggtgcagacaatgttctagacgcaaagattgttgatgccaacggtaaattactcgatagagccgcgatgggtgaggatacattttgggctattagaggaggcgctggagggagttttgggataattctagcatggaagatcaagcttgttcctgttcctaagaccgtgaccgtctttaccgtcaccaaaacgttacaacaagacgtgggtaacaagattatctcaaagtggcaaagagttgcggacaagcttgttgaagagctattcatcagagtgctcttcaacgtagctggaaccggtgggaacaagac

SEQ ID NO: 97960 - DNA, 870 bp, Arabidopsis thaliana columbia
  unsure (1)..(870): unsure at all n locations
atgatctnnnnnnnnnnnnnnnnnnnnnnnnnnnnnnnnnnnnnnnnnnnnnnnnnnnnnnnnnnnnnnnnnnnnnnnnnnnccacgcgtccgtgcggctgcgagaagacgacagaaggatacggctgcgagaagacgacagaagggtacggctgcgaaaagacgacagaagggtacggctgcgagaagacgacagaagggcacggctgcgataagacgacagaagggggagacaaaaacacacacgacgaagaaatctccgggcggtcgaagaagatgaaatcgttcaaggaacaatacacgttggatgaaaggctcgcggagtcgcgggagataatcgctaagtaccctactcggattccagtaattgctgagaagtattgcaaaacggatctgcctgccatcgagaagaagaagtttctggttccaagagatatgtcagctggccaattcatctacgtattgagtgctaggttacatttgtctcctggtaaagccttattcgtgtttgtcaacaacactctccctcaaactgctgctctgatggactcggtctacgaatcttacaaagatgatgatggattcgtgtacatgtgctatagcagtgagaaaacctttggttgatccaataatgatgttagtgtctgtgtacatatactttaaacataagatgttcactacatcaaaagacatcaaacacttgttaagctttatatgactgctgcttgttttatccttagactttgttcatctgtgcacaatcgttctcctnnnnnnnnnnnnnnnnnnnnnnnnnnnnnnnnnnnnnnnnnnnnnnnnnnnnnnnnnnnnnnnnnnnnnnnnnnnnnnnnnnnnnnnnnnnnnnnnnnn

SEQ ID NO: 97961 - DNA, 410 bp, Arabidopsis thaliana columbia
cgttcggaatccttgtggttggagcttgtatggatagctgactggtgggctggagttaagatccgggtgggtgctgataatgagaccggtcaatcgaatgggcaaagaacatgctcttgtcgtttgtaatcaccgaagtgatattgattggcttgtgggatggattctggctcagcggtcaggttgcctgggaagcgcattagctgtaatgaagaagtcttccaaattccttccagtcataggctggtcaatgtggttctcggagtatctctttctggaaagaaattgggccaaggatgaaagcactctaaagtcaggtcctcagcgcttgagcgacttccctcgacctttctggttagccctttttgtggagggaactcgctttacagaagccaaacttaaagccgcac

SEQ ID NO: 97962 - DNA, 661 bp, Arabidopsis thaliana columbia
  unsure (1)..(661): unsure at all n locations
acaaaattttcccattaaatcgcaaagttaattttgcgattttttttctctttttttctggttgggttatttattttccccttttaaaaaacttctgcaacttgtcttgaaatctggggtaaaatatttcttcattggtttctggaaatctcggggaacgatttgttgggttttcttctttgtactctctcctcacattagcttttgttggtgggattttttgaggatggtgattgctgcagctgtcatcgtgcctttgggccttctcttcttcatatctggtctcgctgtcaatctctttcaggcagtttgctatgtactcattcgaccactgtctaagaacacatacagaaaaattaaccgggtggttgcagaaaccttgtggttggagcttgtatggatagttgactggtgggctggagttaagatccaagtgtttgctgataatgagaccttcaatcgaatgggcaaagaacatgctcttgtcgtttgtaatcaccgaagtgatattgattggctttttgggatggatttttgggctcagcgggtcaaggtttncctgggaaagccgcattaagccttgtaaatnnaaggaggttttncccaaattnccttnccngntaaatagggcttgnccaaaantggggttnnccggggntnt

SEQ ID NO: 97963 - DNA, 641 bp, Arabidopsis thaliana columbia
  unsure (1)..(641): unsure at all n locations
ctactataggaaagctggtcgcctgcaggtaccggtccggattccggtcgacccaccgtcgtacggctggagaagaaacagaagggggggcccaaccgcgcatacgatcgtcgacatcatggcggcaagagcccactagccaccccccccgaaccattgcgcctgggaccaataatccgccagatgattcacatttcccgagagaaccgattgtagttccgattccgacaaggtctctcgtttccacgtgtctgacagtcggaatgccgtttccatgctttgcgatccgtacatgccgacgcggcgcgattgggagatttccggattgcagtatcagccgggtcgacagtctcgtcccacgatgtgtgaccgtcgttctcatggtgcattctggtgcttcaccgcgcaatggactcggaatcccgatctcgctggccggtcgagaggggaccctggatgccgtctgacccctgggcgtcatgacagtgctctgctangcgactccgatgccgtcgtcaggtgacgtcgatacctttagctctctgcatctctagctcgttacccgatcgagagggctgacaatgtacgccgtacgggagtatcgaaccggactgtgaccgtactgtactgtcgatgcacgg

SEQ ID NO: 97964 - DNA, 882 bp, Arabidopsis thaliana columbia
  unsure (1)..(882): unsure at all n locations
nnnnnnnnnnnnnnnnnnnnnnnnnnnnnnnnnnnnnnnnnnnnnnnnnnnnnnnnnnnnnnnnnnnnnnnnnccacgcgtgcgcccacgcgtgcgcccacgcgtacacccacgcgttctgccacgcgtacgtccactcttgcgtacggatgcgataagacgacagaagggggacttcgaaactttccgttaaaacttaaaagcaccttcctcataatctctggttactttgggaagaaaaatatcaattttggcgccatgtcagccttgtctgtgatcgaacaacgattgttaaagtgggacaagctcgcgtctttagtacccaaatcaaaaaaaactccttttccgattgatcgtctaaacgagcttttgaaagtctgtgctaattcaagttatctaagaattggagaatcgattcacgctcatttgattgttaccaaccaatcatctagagctgaagacgcgtatcagatcaattctctgatcaatctctatgtgaaatgcagagaaactgttcgtgcacgcaagctgttcgacttaatgcctgagagaaatgttgtttcttggtgtgcgatgatgaggggatatcaaaattctgggtttgattttgaagttttgaagctttttaaaagtatgtttttttctaggtgtaaatagtgtataataacaccttttggcagattattcatgtctgtgacaattatttccaaactcattggtttttacgctctatagcagagcttttgatatgaaagtttggtagtttatccaaaaaaaaaaaaaaaaaaaaaaaaaaaaagcggccgctctagaggatccaagcttacgtacgcgtgcatgcgacgtcatagtcttnctatagtgtgtacctaataggaatcg

SEQ ID NO: 97965 - DNA, 743 bp, Arabidopsis thaliana columbia
  unsure (1)..(743): unsure at all n locations
gccttttgcatggcaggtatcaaggaattgggcggagcagttctccttcccactgggatggatgtcaatagcacactaaaggggcttgccccatatgccgcaagttttcgtattttgttgttcctagtgtaatctggttttcagctccagaagagaaaaaagaaattatggataactacagggaaaagctcaggtcaatcgattgtaaacactttagttttggagatgggaattgtccattcgggacaagttgcttctacaagcatgcgtatcatgatggtcgtttggaggaagtggttttgcggcatctggatgcagaagatgggcagactgtgatagcaaaggatataaggttgtccgacttccttgagaacatgcacatatgaacagagtctctcttagcacaataagggagaaggcaaagatgttgtgatgacatctttttttctttcttcctggggtgtttcccattcattgtaacgatttgatttgagttggaagattatgtcttagaccccaacgcattatgacttgcgttaagaggggatcattttattaattttgtatttttaacaaatatcactacttcctgcaaatcaacgcacatgagctatacggatgtagtaacgtggggctataatatttatcaaaaaaaaaaaaaaaagnnnnnnnnnnnnnnnnnnnnnnnnnnnnnnnnnnnnnnnnnnnnnnnnnnnnnnnnnnnnnnnnnnnnnngaaatcca

SEQ ID NO: 97966 - DNA, 549 bp, Arabidopsis thaliana columbia
atttgactattttcctcttgaaatgtatatttgttggtgttgatatggatgcccctttaaaactcaaaaggggggttgtgggtgtgattccagcatgcgtatcataatggtcgtttgaagaaagtggttttgcggcatctggatgcagaagatgggcagactgtgatagcaaaggatataaggttgtccgacttccttgagaacatgcacatatgaacagagtctctcttagcccaataagggagaaggcaaagatgttgtgatgacatctttttttcttcttcctggggtgtttcccattcattgtaacgatttgatttgagttggaagattatgtcttagaccccaacgcattatgacttgcgttaagaggggatcattttattaattttgtatttttaacaaatatcactacttcctgcaaatcaacgcccatgagccgtaaaaaaaaaaaaaaaaaaaaaaagaaaaaaaagcggccgctctagaggatccaagcttacgtacgcgtgcatgcgacgtcaagactcttctatagtggatcctaat

SEQ ID NO: 97967 - DNA, 606 bp, Arabidopsis thaliana columbia
  unsure (1)..(606): unsure at all n locations
tccnnnnnnnnnnnnnnnnnnnnnnnnnnnnnnnnnnnnnnnnnnnnnnnnnnnnnnnnnnnnnnnnnnnnnnccacgcgtccgtgcggctgcgagaagacgacagaagggtacggctgcgagaagacgacagaagggtacggctgcgagaagacgacagaagggaagagaaaaaagaaattatggataactacagggaaaagctcaggtcaatcgattgtaaacactttagttttggagatgggaattgtccattcgggacaagttgcttctacaagcacactgtgaagccaggttcatatgcatggaaatatcacaggccacctccaaggcgtccacgtccctatggaactaacttctcagacgtggatacacttgtaaatatgatcgggaatataatttcagaaggtgaatatggtcctattgggtttagagatactgacgatgacgaactgactacaacggatatgatgatgttactgatgcacatggatatcgaatctgaggactcgtccaatgaggatagctattagctacccatatcgaagttagttaactaaagtgagagtcttaggttatatggctatattatggtgttgggaattc

SEQ ID NO: 97968 - DNA, 1050 bp, Arabidopsis thaliana columbia
  unsure (1)..(1050): unsure at all n locations
tgatctgccagcactaattcgactcacttatggaaagctggtacgcctgcaggtaccggtccggaattcacgggtcgacccacgcgtccgtgcggctgcgagaagacgacagaaggggagatttgatttctttgcgggcttgttaatggcgaacccagggcaatcaaagggatggataaagaaatggacgtctatggcttcatcggtttacttcgtcttgatcttattccagatccctctcttcagagttccatgtagatctggtatgtgttcatcgccaatccatgtgacatcgtctcagttgatttctagtgagatctttcctgttccgatgattaaggctctcttataccctggtgctgtagtcaatggccttgccatcaacatgacatttccaaagtgggaaaatgtgttagatatctacaatctcaccaatgtgaaaggagcttctgcagtgaccgatcttcaacgcctagaggttcttgcagggagctacttttctgtagctggggcgtttgtgggtttgctaaagcctggaaggatgagcatgtttgggtcattgctactagtatggggtcttgttaaagaagggatcttagggaagccagtaaatactgacccagccaaaactgtttatgtgtacccaactatggtgcttgcgatgatctgcgctttctctatgataaagtatgacttgaggaaagccacgagggcagctccagctcgtcccattgctaaacctctaatgagctcttcaaaatctaagctgaagtgagttttttgagacttaatagggcttgtgtcctgtctttgtaccaacacccgggaaaggaaaatgtcccggaaaatggcattgtcactatattttgctctcagttaccttatgtttcatgaattgtctattttctgggccactgctcagtagtcaatatcttcccataaaaaaaaaaaaaaaaaaaaaaaaaaaaaannnnnnnnnnnnnnnnnnnnnnnnnnnnnnnnnnnnnnnnnnnnnnnnnnnnnnnnnnnnnnnnntgtcctaatagattc

SEQ ID NO: 97969 - DNA, 531 bp, Arabidopsis thaliana columbia
  unsure (1)..(531): unsure at all n locations
nnnnnnnnnnnnnnnnnnnnnnnnnnnnnnnnnnnnnnnnnnnnnnnnnnnnnnnnnnnnnnnnnnnnnnnnnnnnnnnnnnnccacgcgtccgcccacgcgttcgacggctgcgagaagacgacagaaggggatggaagccatcaagaaaatgaactacagaggctggcggactaaagttctggatataacttatgcaaaagaaagaggtacaaaagggttagaggagactttggaccgaatttgtgatgaagcaaatgaagcaataaaggagggctacacattactggttttgtctgatcgagctttctctgcaacacgtgttgctgtgagctccctcatggctgttggtgccgttcatcaccacctggttaagacacttgcgcgcacccaagttggtttggtagtggaatctgctgaaccacgtgaagtgcatcatttctgcacacttgtcggatttggagcagatgctatctgcccatattgggctgtagaggccgttataaattacaggttgatgggaaaatacca

SEQ ID NO: 97970 - DNA, 395 bp, Arabidopsis thaliana columbia
  unsure (1)..(395): unsure at all n locations
tacggctgcgagaagacgacagaaggggaagataaaagattcaacgggaaaaaagctttatctgaagcctctgtgattgtaagggaacacactccattgacaaatctattcatgtgcctctggttcaatgaagttgtccgcttcacttcgcgtgatcaattgagtttcccatacgttctttggcgtttgaaagttctcaagaacatcaacatgttccctgtctgtacacgtaaagatctcgtcaatagcataggccatgtacgcaaggctaaaccgttagttaccctatgaatttactgtaagcttccaattcattggttattttagaatcttttttgtatttagcgtgtagacatagaaacagaactgacatgttttanactgaaaccgaacta

SEQ ID NO: 97971 - DNA, 454 bp, Arabidopsis thaliana columbia
tttactttcttgaacttgtcttgtgccctctttccaatacactgaaatccacttcaaaatatttatttaataaaaagaaaagaaaagaaaaaaactctgccaggatggcttctttgatcacaaccaaagcaatgatgagtcatcatcatgttttgtcgtcaactagaatcactactctttattccgacaattccatcggcgatcaacaaataaaaacaaaacctcaagtccctcaccggttatttgctcggaggatcttcggtgtaaccagagctgtaattaattcagcggcaccgtctccgttgccggagaaagagaaggtggaaggtgagagacggtgtcatgttgcgtggacaagtgtacaacaagagaattgggagggtgaacttactgtccaaggaaagatacccacttggctgaatggtacgtacctaagaaacggtcctggtctatg

SEQ ID NO: 97972 - DNA, 477 bp, Arabidopsis thaliana columbia
  unsure (1)..(477): unsure at all n locations
tgccgtcttatntggtntcntnatggnccnggncgaattcccgggtnacgagntacnagtgagactaagcngcgtccgagaaataatgattagagcgctgaccacgaggaaggttcgaggcagctacaagaagctcggcgacgaagaagaagcaggcgcagggcttttagaagtgaaaccggagagcgttcctacaaatccccatggtcaatccccgaaggtgaataaaccggtggagaaaaccaggggttcggctcaccctctatttagtttcttcgaaatgagtctaaagaggaagaagaagaagaagagcacgacgactgcaaaaccagaatttcgctaaggtactttggagtatgtcaaggaaggaggtgttttgggataacccttcacatggacctgccatattttccagatagatcggggaaaggtttccccgnggtnttaaattattnccgttnggaaaccctncctttt

SEQ ID NO: 97973 - DNA, 1385 bp, Arabidopsis thaliana columbia
accacgcgtccgaccagtcttcgggtctctcctcctcgcggctcgaaacgcaagcttcacgcttgaaaatctccgttcgttttctacctcgtttagatcggagatggcggagaagccggcgcaagagcaagagcagaagcgagcgatggaacctgcagttctcgacgatattattcgtcgtttggttgagtttcggaacacgagacctggatcggggaagcaagttcatctcagtgaaggtgaaattcgtcagctttgtgctgtctccaaagaaatatttcttcaacagcccaatctgcttgaattggaagctcccatcaagatctgcggtgatattcatgggcagtattcagatctattgaggctttttgagtatggagggttccctcccgaagctaattatttgttcttgggtgattatgttgaccgtggcaagcaaagcttggaaacaatatgtcttcttctagcttacaaaatcaagtaccctgagaacttcttcttgttgagagggaatcatgaatctgcttccattaatcgtatttacggtttctatgatgagtgcaaacgcaggttcaatgtcagactctggaaaatattcaccgattgctttaactgtcttcctgtggccgccttaattgatgacagaatactatgtatgcatggtgggatttccccagagctgaaaagtttggaccagattagaaatattgcacggccgatggatattccggagtctggtttggtatgtgatttactatggtcggatcctagtggagacgtaggctggggcatgaatgatcgtggtgtttcatacacttttggagctgacaaagtcgcagagttcttggagaaacatgacatggaccttatctgtcgtgcccaccaggttgttgaagatgggtatgagttctttgcagaaagacaacttgttacagtattttcagctcccaactattgcggggaatttgacaacgctggcgcaatgatgagcattgatgagagcttaatgtgctcattccagattctaaagccgtcagaaaagaagtcgccttttctgtgacaccgattatccagtgaccaccattgcttcaaattaacaattctacaaaagttgtatactggcaagaggatctagagacggaaactgctcaattgggaccttaatggtactgataatagagcattagacatgtagctgttgacagtgatggcatcgagcagaaggaacaagtcaagtctgtactgtgattttagcatctctcacatctatgtttgtctaaaatgtgtgtgtgtttttagtcttctctctgaataatattagattctcatttgtactctctatttatttaggagaacccaaattcaaaactttttttagtctcttc

SEQ ID NO: 97974 - DNA, 544 bp, Arabidopsis thaliana columbia
aatccgactcactatagggaaagccggtacgcctgcaggtaccggtccggaattcccgggtcgacccacgcgtccgcttaactctaacggagttaactaacgtcgacattatgctagagggagatgagaaacagagccgagctctggatttcaatcgactcgaggttttgtcattactaggtcgtggagctaaaggagttgtgtttcttgtccgcgacgacgacgctaaattgcttgctttaaaagttatacttaaggaagccatcgagaagaaaaagaagggtagagaaagtgaagatgatgagtataaacgcgtgagtttcgagcaaggagtattaagcagattcgaccatcctctctttccgtctcttcacggtgttttagctaccgataaagtcatcggttatgcgatcgattattgtccgggacagaatctcaattctttgaggaaaatgcaatcggaaagtatgttttccgacgagattatcaggtaaatttgttgttgtttgacctaaatctttcatgtatacgtcttttttttttt

SEQ ID NO: 97975 - DNA, 683 bp, Arabidopsis thaliana columbia
tacggctgcgagaagacgacagaagggtacggctgcgagaagacgacagaagggtacggctgcgagaagacgacagaagggtacggctgcgagaagacgacagaagggtacggctgcgagaagacgacagaagggtacggctgcgagaagacgacagaagggccacgacagttatgtgataatgctggatttgatgcaactgacgtcttgaataaacttagacaaaaacacgccatgcaaagcggtgaaggagcttcgtatggagtggacattaacactggtggcatagcagattcttttgctaacttcgtttgggaaccagcagttgtgaagatcaacgcaataaatgctgcgactgaagcggcttgcctcattcttagtgtcgacgaaaccgtgaagaaccctaaatctgagagcgcacagggagacgccgcaggtgcaatggggagaggacgcggtggaggtcgtggccgtggaatgcgaaggcgataagctccgtctctaatgccaaacttgtgggattcttcttcttcttctctaatttcgattttgttgaatttttgttttgaagttaaaaaacctattattgggtttgtgtttgttcaattagaatactggttgggtatgtatgtctatacaatctgtgaaacataagttttagtgttgttttggttaaggagtta

SEQ ID NO: 97976 - DNA, 542 bp, Arabidopsis thaliana columbia
  unsure (1)..(542): unsure at all n locations
atgannnnnnnnnnnnnnnnnnnnnnnnnnnnnnnnnnnnnnnnnnnnnnnnnnnnnnnnnnnnnnnnnnnnnnnnnnnnnccacgcgtccgagcaaacaacaaatggctctttcaatcgttcttcttcccttcattctcattctcataccgacttttctcagttcggttttcgccgtttcaccactcaaaactgatacgttaaaaccggggcagcagctcagagactgggagcagttgatctctgcggatggtatcttcactctcggattctttacacctaaagactcatctacttccgaactcgggtcagctggtcttagatatcttggtatttggcctcaaagtattccaataaatctagtttgggtgggtaacccaaccgaatcagtttctgattcatctggttctctatccattgacaccaatggggttctaaagataacacaggcaaacgctattccaatcttggtgaaccaaagaccagccgcgcagctttcattggtcgggaatgtgtctgccattttactcgataccgggaac

SEQ ID NO: 97977 - DNA, 787 bp, Arabidopsis thaliana columbia
  unsure (1)..(787): unsure at all n locations
ctcactatattggganagctggtacgcctgcaggtaccggtccggaattcccgggcggctgcgagaaacgacagaagggggagagagagagatgtcgttcatgtatgagaagagcaatacatggagatggctagtgatgaagacgcgagattcgagatccttcttcttcacgttcgctgctttatgtggtgtcattcctggcgttattggctatggagttatgcaggtcaccaattccagtaaccctgagctcgaagcccgcctccgtaaatctgctcgcccagatactctcatgatgggtaaagtaaaccaagagaggctagctgaatatcttggtgagttgaaacagaagcaggatacaaacgacagatacgttgctgctcttaggggagagactcttaccaggaagccttatcaaagaatccaaccaatgccaaagccagatgacacggtgacaaccaaaactcagtaaggatgaattattttaagagtcaatgttagtgaatgcctctcactcgaatcttttgtcgatacaaaaatggcgtgtttcctggccgtaatatcttttgtttttgaaaccggcatctagcgacacaacttttgtgctatgcaaacggctacaatgtcaatcacttcaaaccttttgttatgatgaataaaatgtaaaacttatgttttgtnnnnnnnnnnnnnnnnnnnnnnnnnnnnnnnnnnnnnnnnnnnnnnnnnnnnnnnnnnnnnnnnnnnnnnnnnnnnnnnnnnnnnnnnnnnnnnnnnnnnnnnnnnn

SEQ ID NO: 97978 - DNA, 761 bp, Arabidopsis thaliana columbia
  unsure (1)..(761): unsure at all n locations
tnnnnnnnnnnnnnnnnnnnnnnnnnnnnnnnnnnnnnnnnnnnnnnnnnnnnnnnnnnnnnnnnnnnnnnccacgcgtccgtacggctgcgagaagacgacagaagggggttctggatatattgatggatttttatgtttttggtgaaaaggtgagaacttggttggagcaattgatcacgccttgaaagtgtttgataaaatggctcaggcaattggtccaagactgtatagttgctgcaactgcagaaaccatgttggacttcacgatgatatcatctctaaggcttttcagggaagaactgggcgagccttcttgttctcccacgcaatgaacattgtggtaggacctaaagaagaccggaatcttctaactggtctacacaccgtggctgatatatcttgtgttgactgtaacgaaccattgggttggaaatacgagcgagcttatgagacctcacagaagtacaaggagggcaagttcatattcgaaaaggctaagattgtcaaggaggattggtagagctgaggaacatgatgaattcattattggattggctcaaaaatgtatatagataaaatttggctttgtgatttcccaagtcatcatcagccatttttccagttcttcattgtctctctctgtatgttaattaagtcgtctcttgtgttcaaactatggatttgttcgaacaaggtttctctgttaataaacatgttaatagcttnnnnnnnnnnnnnnnnnnnnnnnnnnnnnnnnn

SEQ ID NO: 97979 - DNA, 661 bp, Arabidopsis thaliana columbia
  unsure (1)..(661): unsure at all n locations
taatacgactcatatagggaaagccggtacgcctgcaggtaccggtccggaattcccgggtcgacccacgcgtccgtgtaactcaaagccctcgctttaccgaagaaataaaagaaataagtgttgatcatggttcatctaacaacaatggtacttcttaccaaactcttgatgagaaattcgttgaggacatcgagaatggcgataagttctctggttctttggagaaaaaacccctggttgggtcacatttgcctcctagtactccttcaacaacagctccttcacctctcttgggtcttcctgaggtttctcacattggttggggtcattggttcactctccgtgaccttcaactcgcgactaatcatttctccaaggagagtatcatcggagatggtggttatggagttgtttaccatggaactttgactaacaaaacccctgtggctgtcaaaaagttgctcaacaatccaggtcaagctgataaagatttcagagttgaggtggaagctataggacatgtccggcataagancttagttcggcttcttggatatttccgttgaaggaacacatagggatcctggtttatnggtacatgancattgggaccttngggcattggntttcttggggcnttgtttcnnaanggggnttt

SEQ ID NO: 97980 - DNA, 568 bp, Arabidopsis thaliana columbia
  unsure (1)..(568): unsure at all n locations
nnnnnnnnnnnnnnnnnnnnnnnnnnnnnnnnnnnnnnnnnnnnnnnnnnnnnnnnnnnnnnnnnccacgcgtccgaaaaaaaactcaaaactcaaaaccatctttgtgaaaaaaaaatggaaggaagacaatattaccctccgagagaaaacgttgaaggaaacagaaccaccatgggaggaggacctcactcaccgtggcattcaccggttccttatctctttggtggtttagcagcgatgcttggtctcatagcttttgctcttctaatcctcgcttgctcttactggcgtctctccggttatctagacggcgaggaaaaccagagcagagagagagatcttgaagtcggagatgtgaaacctgacaaaacggcggtgaagcctgtagctttgccggagaagttcttggtgattatggccggaaatgtcaaacctacttacttagcaacgccgtcggtaaaaacgtgtacttgtgacgatgatgaccatgaagatgatgacctggagggaagtgatcaggtggtgccgcggagtagtgaaagtaacggtgagacacattgacaaa

SEQ ID NO: 97981 - DNA, 323 bp, Arabidopsis thaliana columbia
  unsure (1)..(323): unsure at all n locations
tggcacaccatccgtaccggctcagtttttatccaagacattgctacgagaaagaagagcagatgaggagtatgataaacttgtgccttagtttgtgcttggcgatatatgggactcatttgcagagtggagtgcttacggcaccggtgtgcctcctgttttgcataccaacaacgatcgtgtgatccaatactaagtcccttctttgacagacattcagtgctatgctcattcccatgccttganttcatctcttaaatcaatgggtcctgctgctactaccgacagtgcattgcaggatgctgctaacgatggtttcagcg

SEQ ID NO: 97982 - DNA, 797 bp, Arabidopsis thaliana columbia
  unsure (1)..(797): unsure at all n locations
tagggaaagcctgtcgcctgaggtacncggtccggaattccgggtcgcccacgcgtccgtacggctgcgagaagacgacagaagggcaataagaaaggaacaatggagaagtatttaccggcggcggctgagaaaccgacggaaaagatgagtacgtcggactcaagatgctcaagtcacgtgatttcaccggacgtcacgtgttctgataactgggaggttgagagtgagcccaaatggattaatctggaagacgcgttagaggcatttaatgatgacacgtccatgtttagttccattggtttgttgcaaaatgacgcctttgttcctcagtttcagtaccagtcctccgatttcgtcgattcgtttcaggacccgttcgagcagaaaccgttcttgaattggaattttgctcctcaagggtaaaaataatcggcaaaaagttgaagcttttcagagtcttcgatcaccggcattgtgtcggatcctgacccggagacccagtcgggtcatacgaattacataatcgggttattgagatttccccactttggatttccgagactaaccaacttaacggattctggggtaattgggggggtttgcccaggtgaatccccctgagtcagccagtttcgattttttggttttggtttgtaatgattcattaaatgtctaaaggtatccccaagtagaccccgaagaactgtaaaaacaatcgcggccaacccttatgggtcagggatagataacatggaaaaaaaaaaaaaaaaaaaaaaaaaaaaaaagggcggccg

SEQ ID NO: 97983 - DNA, 528 bp, Arabidopsis thaliana columbia
ggtgatgccaaagtagacgactacttgtagtaaacaaaacctttggctttaacactctcctccaaatcccagatctctctctgtctctgtcccgcggagtccccgagagattgatcaccatcacttttgtaccttccttgtactacctatggcgtctgctagcttcgttaagcctaacaccctctcttctccatggatcggccaacgctcctttgctcacacctctgcttcttcttctcctcctcctcgagtctccttcgcgatccgcgccggtgcttactccgacgagcttgttaaaaccgccaaaagcattgcatcccctgggagaggtatcttggcgatcgatgagtccaatgcaacctgtgggaagaggcttgcttctatcggcttggataacaccgaggacaaccgtcaggcctacaggcaacttctgcttaccactcctggcctcggcgattacatctctggttccattctcttcgaggagactctttaccagtccaccaaggacggtaagacctttgtcga

SEQ ID NO: 97984 - DNA, 849 bp, Arabidopsis thaliana columbia
  unsure (1)..(849): unsure at all n locations
cttcttgacgattttgaatttgttactcagatgcagaagcttgtgcaacttccgcgttctccaaatgtggatggcatcttgaagaagtacattgacagccaaatgaagaaacatggcagggtaacagattcattagaggaaattctgaaaggcttgcgttgctactttgacaaagctttaccggtgatgttgctttacaacaatgaacggaagcagtacgaggaatccgtatcagggggtgtttctccttcaactgtgtacggagcagagcatttgttgcgactctttgtgaaattaccggagttgctagtacatgtgaatatggcagaagagacattgaaggaattgcaggacaactttgttgatattctcaggttcttgaggaagaatcagagtgtgctttttgtatcgacatacaaagcagtggaagaaatggagaagaaagaaggttaggaaattgtgcctaatgacgtgttcttgtaagtatgtgcagcgaatcttctctttgtagtattttgtaacgagacctaagaccatcctgaccatccttattgatggtctcttaacataactcttatgttaagagatatgtcttataattaacaaaagtgacttaaagtctcttatataagaaattttgttagttataaaacatgtctcttagcataagaattgttttaagagatcatcaataatgatgatctaagaactattatactatgttccgtctcgattttgaaagtacttaaacgtcgttaaaaaaaaaaaaaaagnnnnnnnnnnnnnnnnnnnnnnnnnnnnnnnnnnnnnnnnnnnnnnnnnnnnnnnnnnnnnnnnnnnnnnnnnnnn

SEQ ID NO: 97985 - DNA, 556 bp, Arabidopsis thaliana columbia
  unsure (1)..(556): unsure at all n locations
ttgggntcccgggtctgggggnaanaccggggggcctttttttcccgccataccaagcccggggagaaatggggaagacaagaaggttagggaattggccctaaggccgggttctggtaaggatgtgccgcggatcttccccttggtagtattttgtaaccgagccctaggcccatcctgcccacccttatggatggtctcttaaccataactcttatgttaagagatatgtcttataattaacaaaagtgacttaaagtctcttatataagaaattttgttagttataaaacatgtctcttagcataagaattgttttaagagatcatcaataatgatgatctaagaactattatactatgttccgtctcgattttgaaagtacttaaacgtcgttatcgtgtttgtctcggcgttttaaattcccctgtattagtaagaatttatttttaaaataaaaaaaaaaaaaaaaaaaaaaaaagnnnnnnnnnnnnnnnnnnnnnnnnnnnnnnnnnnnnnnnnnnnnnnnnnnnnnnnnnnnnnnnnnntgtcctaa

SEQ ID NO: 97986 - DNA, 427 bp, Arabidopsis thaliana columbia
tggggagagggggcttttgaatttttttgctcaacttccaaatcgtcgccggcgatagaaaccctagatttgattctccgtcggttatatccagcaatgtcgttttttcccccacagcaacaacagacgcctcagccgctgtttcaaactcagcaaacgtcgttgtttcagccgcagcaaaccaattccatcttctcgcaatcgcaaccacagcaaaccaattccatcttctcgcaaccgcagcaacaacagcaaacgtcgttgtttcagccgcaacagttccagcagcagcagcaacagctaaatcagcaacagcagcagcaagtacaacaacagttgtatttgttcaccaacgataaagctccggcgaattacagtactaagtgggccgatcttcatcccgattctcagaaactcttgcttcaga

SEQ ID NO: 97987 - DNA, 635 bp, Arabidopsis thaliana columbia
  unsure (1)..(635): unsure at all n locations
gcctgcaggtaccggnccggaattcccgggttacccacgcgtccgacacgcgtccgcccacgcgtccggcgagaagacgacagaaggggacgcttgagatatctttccccaaattcgaaagaaccctaattttttccgattccgattgatcaaacaagcgaatcccgattaactgatcgaggagatgggtaatacagataagctgatgaaccagatctttgaattgaaatttacgtcaaagtctctgcagaggcaagctaggaagtgcgaaaaagaggagagatcggagaagctcaaggtaaagaaagccattgagaaaggtaacatggatggtgctcggatctatgccgagaacgccattcgcaaacgcagcgagcagatgaactaccttcgtctctcttctcgattggacgctgttgttgctcgactcgataccccaggctaagatggctaccatcaccaaatcgatgaccaacattgtcaaatccctcgaatcgtctcttaccactggcaacttacaggagatgtctgaggccgttgggttgcgttttnggaaaaagtttttnaccatgggaggcccacctgngttntgggtaatcantnggtgngnttcttnattttngctcccaggggng

SEQ ID NO: 97988 - DNA, 468 bp, Arabidopsis thaliana columbia
  unsure (1)..(468): unsure at all n locations
caaaaaacacacttcactcgctaccgaagaagagagatagagagagggagatggctacgtcaggaacatatgtgacggaggttcctttggaaaggatcaagcggagacacactacaagcggtggagggaatgagaaccaccttttccccgacgccatcggccaccacatccaaggtgtcaccgtccacgacggcgaatgggactcccatggagccctcaagatttggaactacacattagtagatgggaaaccggagatgttcagggagaggagagagatagacgatgaaaaacatggcggtaacgttcgttggactagaacgtcacgtgatggagcagcttagcctgtgtgatgctaccatttttacagttcattcaaaagtccccggttgattttgtttcaagtncctttnncctgggggaagnganccgtttgntngcttnaccccngaacttcntttnngtttg

SEQ ID NO: 97989 - DNA, 729 bp, Arabidopsis thaliana columbia
gaaacaaacaaacaaacaaaaaacacacttcactcgctacacaaggaagagagatggcgacgtcaggaacatatgtgacggaggttccattgaaaggttcggctgagaaacactacaagcggtggaggagtgagaaccacctcttccccgacgccatcggccaccacatccaaggtgtcaccatccacgacggtgaatgggactcccatggagccatcaagatttggaactacacatgcgatgggaaaccggaggtgtttcaaggagaggagagagatagacgatgagaatatggcggtaacgttcagaggactcgaaggtcacgtgatggagcagcttaaagtgtatgacgtcatctttcagttcattcaaaagtcacctgatgatatcatctgtaagatcactatgatctgggagaagcaaaacgatgacatgcctgagcccagcaactacatgaagttggtcaagagcctcgctgctgacatggacgcccacgttctcaaagcctaatccttctcacctaaacccatcatcatcgtgtgtgtaacttttgtatgatgttttcaatataataaatggggtttgcatgtatggtttcatctactgtaatatgctttgatgttgtttataataattaatgatttaaagagtaaaaaaaaaaaaaaaaaaaaagggcggccgctctagaggatccaagcttacgtacgcgtgcatgcgacgtcatagctc

SEQ ID NO: 97990 - DNA, 806 bp, Arabidopsis thaliana columbia
  unsure (1)..(806): unsure at all n locations
cgcgtccgaacgaaggaagatcacacgtgaaaatagtcatcaaccaaagtaagaagcgcacacacacaaacatatttctttcactacccaaagagatggcgacatcgggaacatatgtgacggaggttccattgaaaggatcggcggataaacactacaagcggtggagagatgagaaccacctcttccccgatgccatcggccaccacatccaaggtgtcactgtccacgacggtgaatgggactctcatgaagccatcaagatttggaactatacatgcgatgggaaaccggaagtgttcaaggaaaggaaagagatagacgatgagaatatggtgataacgttcagaggactagaaggtcacgtcatggagcagcttaaagtgtatgatctcatatatcagttcagccaaaagtctcccgatgatatcgtatgcaagatcacaatgatttgggagaagcgacccgatgattcgcctgagcctagcaactacatgaagttcctcaaaagcgttgttgctgacatggacgagcatgttctcaaagcctaaatccctttcgaaccatcgtcatcacctatcatcatcatcatcatcatcatcatacatctccctttgtgtgtgaacttgtatgggtgtttatatctttcatttgcgtagtgcaaaatcatttttaaataaattatggtttgagaaaaaaaaaaaaaaaaaagnnnnnnnnnnnnnnnnnnnnnnnnnnnnnnnnnnnnnnnnnnnnnnnnnnnnnnnnnnnnnnnnnnnnnnnnnnnnctactccaactttttctt

SEQ ID NO: 97991 - DNA, 724 bp, Arabidopsis thaliana columbia
  unsure (1)..(724): unsure at all n locations
anggggtttgggaggggtttccttgggccggaagggnctggttccccggntttaggccggacccctttttgggnagntcccaggcgggaccgggganggaggaaggttggtgatttttccaaccagggaggaaggcaaccgggggntnggcttccaaaaagctcttgccagggagtgaaatcccatggttcaatatccctgangcttggagatcantncccgtaggattgcttaaatggttgtcaacggccatcccaagaaagcaaggttgaaaaagctcttgaaaattcagaagcaacttgttttgatgatgatgatgatctgatagatattgaagcattgttggaagatgatgacacattgatgttgcctatgtcctcatctttgtggaccagttaaatcactctcaagctttgttgtgatattgtgtcacagtattattgactcattaaacttgtaaattcttgtgtaatcactcttctcatatactgtaactgcattcatgactctaatttaaatgatatatatttgaaacataaatcaaacttatgtnnnnnnnnnnnnnnnnnnnnnnnnnnnnnnnnnnnnnnnnnnnnnnnnnnnnnnnnnnnnnnnnnnnnnnnnnnnnnnnnnnnnnnnnnnnnnnnnnnnnnnnnnnnnnnnnnnnnnnnnnnnnnnnnnnnnnnnnnnnnnnnnnnnnnnnnnnnnnnnnnnnnnnnnnnnn

SEQ ID NO: 97992 - DNA, 1886 bp, Arabidopsis thaliana columbia
atttagttataaaatgttgctatttgttgatctagtgctctgaatcttttagtgaggcagatgatgaagattatgaatttcttcatgaaattattgtaagaaaaagaacatagagaagctgcggaatgaaagtacactgttctttcacggagaaagaagataaataagcattatcttcttcttcagtttttaacacacattttggaaattttgatgtaaaaattctctttggaacgttgtgttgtctgaaatcttcccaaaggttctatcagaagaagaaggataaagtttcatagaaacccaatggacaacaacaacaacaacaacacttttagttctctggataatgtcatgactaaccaaaatcctcttctcatggattttataccttcaagagaagattcaacttcattctcaacaatgcttccatggaataccatcagatcagatcctctacaaatgggtggctttgatattttcaattctatgctgactaacaaatacttatcatcttctccacggtctatcgatgttcaagataaccgcaatgttgagttcatggctcctcctcctcatcctcctccacttcatcctttggatcatttaagacactatgatgattcctcaaacaacatgtggggttttgaagcaaatagtgagtttcaggcattttcaggtgtagttggtccaagtgaaccaatgatgtctacattcggtgaagaagatttcccgtttctaatttcgaataaaagaaacaatgagctttcattgagtcttgcatcagatgtttctgatgaatgctcggagataagtctttgtgcagctacaagattagcctcagagcaagcttcttgcagcagcaaagacatttctaataacgttgttactcaaggtttctctcaacttatatttggctcaaaataccttcactctgttcaagaaatactatctcatttcgccgcatactcgctcgattattcatctcgaggaaccgagtcaggagctgctagttcagcctttacttcacgttttgagaatataactgagtttcttgatggtgattctaataactcggaggcgggtttcggatctacatttcaaaggagagcattagaagcaaagaaaacccatctcttggatcttcttcaaatggtggatgatcgatatagtcattgcgtagatgagattcatacggttatatcagcgttccatgctgcaaccgagttagatccacagttacacacccggtttgccctccaaaccgtttccttcttatacaagaacctgagagagagaatctgcaagaagataatctctatgggatctgtattggagagaggcaaagacaagactcaagaaacctctatgttccaccagcattgccttcttcagcagctgaaacgaaagaaccatcagatttggagacctcaacgaggtttgcctgagaaatctgtttcggttctacggaattggatgttccaaaacttccttcacccttacccgaaagattcggagaaacatcttctagctatacgaagtggcttgacaagaagtcaggtatcaaactggtttataaatgcgcgggttaggctatggaagccgatgatagaagagatgtatgcggaaatgaacaagaggaagctcaataacagtcacattcaacccaacggaccaactcttcgaatgccaaaatctgttatgatgagccaagcaatgcataaataagacaacaattgtgtttaccaactttgtgataattaggcaattgctactctatgattgcccaaaacctaaaccatgtacgactatcattacgtatgttataattgtatatacaactcctttatctttgactatttcattttattaaaaaaaaaaaaaaaaaa

SEQ ID NO: 97993 - DNA, 901 bp, Arabidopsis thaliana columbia
  unsure (1)..(901): unsure at all n locations
caaaaaacttctctctcttctctccgaaaaatcttttagagagagaaggttgataaaacttcttgccgtccggaggtttttccggtttacatgtcccgagtatgcgggcttatcatctggcagctcctcactcctttagtgatgttggccagctctcgtccggtattgatggctttcaaagcagcgatggccggcttcgtatcggcttctttgccgtttgcttcttcatgtttactgtttttgtttcctgtgcggtttctcctatagtttgctctgttggatctgccgcttcatctttgtcttaaactcaagacggttcatggtttcgattatgcctttgtttggtgattataagcttcttttcctatgctgatgttaattgccttttcgtcgctggttctatggttttaagagtttcaatatgggaggccatcagttatggactcttcaatttaatcaatttatctttacccaagtttgctggaatttatagcaactagttaaaattggttaattgatgtttgtccttttttacccggtgagcaaaaacaaaatttcattgttaggataagttttccggcgatgatcaattgaccggagttgagctctttgtgcgatggaggttggtgggataacacgtgtcctcatacgtatcgttagacacgtcctttgaagcatatcttcttctttggttttttgcttgggcttctttgtaagcttttgttgtaattggactggcttgttgggcttgtaaaagtttatcaataataaaacagttgagacaaaaaaagaaaaaaaaaaggtcggccaccgaaaagtgagctggtcgacccggcaatnnnnnnnnnnnnnnnnnnnnnnnnnnnnnnnnnnnnnnnnnnnnnnnnnnnnnnnntagctg

SEQ ID NO: 97994 - DNA, 524 bp, Arabidopsis thaliana columbia
  unsure (1)..(524): unsure at all n locations
agagactaaaaggttctgtttcagattctcaaattttttttttttattgaaaaagatctttgaatctcccacacccattcgaatttcctcttatgatttaggagattctgtgacaccacaagcttatttcataagaaacttcaaattagaatcagaaacaagagcatccttcttcatttacacaggtaaattaggtgtaaaaatggtgatgagaagtgtggatctacgatcagataccgttactagaccgacagatgcgatgcgagaagcaatgtgtaacgcagaggtggatgatgacgtcctcggatatgacccaacggctagacgtcttgaagaggagatggctaagatgatggggaaagaggctgctctgttcgtgccatccgggacaattggggaatctgatcagcgtgatggttcactttcggccgtgagaggccaagccagggtgattctttggggcaattatcaccatccctctttccggganttgggggggnttcgctttncggggggnncatnct

SEQ ID NO: 97995 - DNA, 1567 bp, Arabidopsis thaliana columbia
  unsure (1)..(1567): unsure at all n locations
atgannnnnnnnnnnnnnnnnnnnnnnnnnnnnnnnnnnnnnnnnnnnnnnnnnnnnnnnnnnnnnnnnnnnnnnnnnnnnnnccacgcgtccgcggacgcgtgggtcacttttttgcatctttctcaaaatatatcaaaggagacttcataaagaaagaatctttagtgtggagagactaaaaggacaccacaagcttatttcataagaaacttcaaattagaatcagaaacaagagcatccttcttcatttacacaggtaaattaggtgtaaaaatggtgatgagaagtgtggatctacgatcagataccgttactagaccgacagatgcgatgcgagaagcaatgtgtaacgcagaggtggatgatgacgtcctcggatatgacccaacggctagacgtcttgaagaggagatggctaagatgatggggaaagaggctgctctgttcgtgccatccgggacaatggggaatctgatcagcgtgatggttcactgcgacgtgagaggcagcgaggtgattcttggcgacaattgtcacatccatgtttacgagaatggagggatatcgactatcgggggagtgcatcctaagacagtcaagaatgaagaagacgggaccatggacttggaggccattgaagcagctattagagatcctaaaggaagcacgttttatccatcaacaaggttgatttgcttggagaacacacatgccaactctggtgggagatgtttgagcgtggaatacactgagaaagttggagagattgcgaagagacatggcgtgaagctccatatcgacggagcccgtcttttcaatgcttccattgcacttggagttccagtccataagcttgttaaggctgcggactccgttcaggtgtgtctctctaaaggtcttggagctccggtaggatctgtaatcgttggttcgcaaagcttcatagagaaggcgaaaacggttaggaaaacattaggtggaggaatgagacaaataggtgttctgtgcgcaaccgctttggtcgcactcctagaaaacctcccaaggctacaccttgcccacaagaaggcttaagttgttagcttgggttgattcaaatggaagggtttggagtaaatgttgcagccgtggagaccaacatgattttcatggatatggaggatggttcaagacttacggctgagaaactgcggaagaatctagaggagaatggcattctccttatccggggaaactcatcccggatcagaatagttatacaccacccagataacaacaagtgatgtgcattacacattgtcttgctttcagcaagcaatgctaacgatgcaggaaccaagccgaacctaatttggcgaaaccgaaatgcttcttcttttcttttcaacttattaaatattgttgtctaaagtacattttaattaaaactataagcatttcaatgaaattgtcaccctcattcctggatgtttgagtttttaattgataagttgttttacctttgattatgaagattatcaatcattatttgctcatcnnnnnnnnnnnnnnnnnnnnnnnnnnn

SEQ ID NO: 97996 - DNA, 769 bp, Arabidopsis thaliana columbia
tatgttgatatgcttaagttccaagaccgattgcactcattcccatatttccacaaagcagcaatcagagctatcaggtgctacctgaaattgcatgactctcccaagtcaactgctggagaagatgaaatgtcaaagttggctcctgctcagaagaagaaaatcaagaagcagaaaaaggcagaagcccgagctaagaaagaagctgagagtaagagtgaagaatcaactgccagtggtgcctctaagtctggcaaacgaaatgtgaaacctgtagacccagatcctcatgggcaaaagttaattcaggttgaggagccaatggcagaggcttcaaagtacttgagactactccagaaacattcacctaattctttggagactcatttactttcctttgaggtcaatatgagaaaacagaagtttctgcttgcattccaggctgtcaagcaattgcttaaattgggtgcagagaaccctgattcacatcgttccttggttaaattctttctcatgacagaatcgataagtgctccaacgactgaagctgagaaacttcgttggagggtcctagaggctgagcgcccatcaatcagtcaattgcagaataaatcactaatggaagcaaacaaagagtttcttggtagacacgaagattctttggtgcacagagctgcatatgcagaaatgctgtatattttagatccaagcaagaaaaccgaggcaatcaaaataattgaagactcaaccaataaagtagtgcaaacaa

SEQ ID NO: 97997 - DNA, 496 bp, Arabidopsis thaliana columbia
atacgactcactttagggaaagccggtacgcctgcaggtaccggtccggaattcccgggtcgacccacgcgtccgtgattgtatttcgctaccagatgaagttgtagaaacacaacacgtcaatacctctgttgaatcagacacatctgcttatggaacagcatttgatgcatttggagggggtgaaagtggaaaggaagcttgccatgctattgctgcattatgtgaagtttgctccattgattccttaatatcaaattttatccttcctttacagggaagtaacgtgtcaggaaaagatggtcgtgtccactgctccctgaatatcaacactgaaactggacgcttatcggctagaaggccaaatttgcagaaccaacctgcattggagaaagatcggtacaaaatccgtcaggccttcatagcatcacctggaaattcacttattgttgctgattatggacagctggaacttaggattctggcacatctttgt

SEQ ID NO: 97998 - DNA, 759 bp, Arabidopsis thaliana columbia
  unsure (1)..(759): unsure at all n locations
agctaccacgcctgcaggtaccggtccggaattcccgggtctacccacgcgtccgcgcgcgcgtccgggagaggagatcagctttggatgagttgatgaaggaggaagtatgaagaagaaggagaggatgaatcggaaagattactggttgttcgaagggatcattgtgaaggtgatgagtaaggctttggcagagaaagggtattataagcaaaaaggtgttgtgaagaaagtgattgataattatgttggggagatcaaaatgcttgattctaaacatgtgttgagagttgatcaaaaggagctagagactgtgcttccacaaattggagggatggtgaagatagtgaatggggcatatcgtggttcgaatgcaaggttgttgggtgtggatacagagaagttctgtgctaaagtgcagatcgagaaaggtgtctatgatggaagagtcatcaagtccattgagtacgaggacatatgcaaacttgcttagttatatcttttagaccatatcgggttttacgatgccttgtatttctgcttgaacctctttttttttatatacaagtgaagcactctgtttcctgatagctagccgcgttaaaaaggtactgcagatgaatctatttcacacatgttattcgatctggtttgtagaacgaattgttttatgtaaaaaaaaaaaaaaagnnnnnnnnnnnnnnnnnnnnnnnnnnnnnnnnnnnnnnnnnnnnnnnnnnnnnnnnnnnnnnnannnnn

SEQ ID NO: 97999 - DNA, 384 bp, Arabidopsis thaliana columbia
cggacgcgtggggtggaatgctttacgtctactatcccgaggactcagttggtggtggtttcaacaatatatacgagtttaggggtcttatatcaggaaagcagtattatcctgctgattctctttctgacaatcaaaagggttacgtcgatggactggtgaggaaagcctatgaaaactgggatcaggttgttgagtatgacagcaagtcacttatgaacttcaatcaagttagcaaaacagatgccattaactactctatgccaatttcagttccaagccaaccatctacttcttattcagacgtaactgttgaagcatataatcagagtccggctttaaagtttcccggtcaatctcagctagctgatactcaatacatgc

SEQ ID NO: 98000 - DNA, 444 bp, Arabidopsis thaliana columbia
gtgaatttggtggtgttctgtctagacaagaaattaccagaattaccagatcggactgctgtgttgctcccagtaatctcaaaagacagaacaaaagaagagaaccacaagctgttgaatggaaacggtgttgaccctgctgattggagaccgagggctcaggtgaacgggaagattgacagcaacggagttcacacggataacacaatgaatggcgcgtgaaaagatctaattatatgaaaagatggacagcaacagtgtgtagtttttatctgctgtgatgaagaaaatatcacaattcttggcttaagatttccttgtaagcattttttgttatagactttacaacagtagtcatggatattgttagcccgtgccactccggttttctggaattggcaacccacaaatgattgtcgtctgtgatattaatatatataccca

SEQ ID NO: 98001 - DNA, 475 bp, Arabidopsis thaliana columbia
tatgtttagaatatggtacctgcgttccaccagagctgttgggaagttgttggcgaatgggatcagttagtatcggataaagggtcgtcatgtgaggtagacgtttggcctgggcttgtgagtatgactgcagatgtgatctctcgtactgcagttaggcagcagctacaaagaagggcagaggatatttgagctccgagcaggactagcacagctcatcattcaagcttttaggagagcttttcatccctgggtatagggtaaatgaaaaacttacacttcgtcttctaggtactgcaattctatttaatagtaggaccgggtgctctccacaatcctttttgagccaattttttgtgtcgttatctcccaacacaatgtaacagaagaatgaaagcagcagccagagaaatccaagttatactaagagggatcgtaaacaataggttatgggccagagaagctgttgaagcac

SEQ ID NO: 98002 - DNA, 1086 bp, Arabidopsis thaliana columbia
  unsure (1)..(1086): unsure at all n locations
atcttctccgatattctaaaccctgagaatggtcacaaattctctaactctctctctctctctctagtagaaaacatggagatatcagttgcatcggtaacagtttctgtagctgtagttgttgtgtcgtggtgggtatggagaactttacagtgggtttggcttaaaccaaagatgcttgagagttacctgagaagacaaggtcttgccggaactccttacacgcctcttgtcggtgatttgaagaggaattttagcatgcgggctgaggcaagatccaaacccatcaacctaacggatgatatcacaccacgtatcgtgccttatcccgttgcaaatgctcaagactcatgggaggactttctttacatggtttgggcccatacccaccaatcaccataaatgggtccctgacgcaaatcaaagaagtgttcaacaaagtttttggtttccagaaggcacatacgtttcctctgggcagattaatagcggctggactcgttagttatgatggtgataaatggacaaaacaccgaagaatcatcaacccggctttccaccttgagaagatcaaaaatatggtacctgcgttccaccagagctgcagcgaggattgttggcgaatgggacaagttagtgacgggataaaccagtcatccctgtgaggtggatatttgggccttggctttgtgacgtcatgactgcagatgtgatctcccgtactgcatttggcagcagctacaaagaagggcagaggatatttgagctccaagcggaattagcacagctcatcattcaagcttttcggaaagctattatccctggatatcgttatttccctacaaagggtaatagaaggattgaaaagcagcagcttagaggaaatcaaatttatacttagnggggntccntaaacaaaaggcttnggggcaaagagaaagctttgggaagcaccaagtgncnggttttcttgggnattacttcttnnaatccgatttttgggccaaaccaaangngattggatnggtnccccgggncctnnttggggggtccaagttttntnntttcnttgggaaagggcntctt

SEQ ID NO: 98003 - DNA, 606 bp, Arabidopsis thaliana columbia
  unsure (1)..(606): unsure at all n locations
tatagggcgaattgggtaccgggccccccctcgaggtcgacggtatcgataagcttgatatcgaattcgcggccgcggtatggagactttacagcggtttggcttaaaccaaagatgcttgagagttacctgagaagacaaggtcttgccggaactccttacacgcctcttgtcggtgatttgaagagaaattttagcatgctggctgaggcaagatccaaacccatcaacctaacagatgatatcacaccacgtatcgtgccttatccgttgcaaatgctcaagactcatgggaggactttctttacatggtttggacccataccaacaatcaccataatggatcctgagcaaatcaaagaagtgttcaacaaagtttattaattcccagaaggcacatacgtttcctctgggcagattaaatagcgggctgggactcgttagttatgatggtgataaatggccaaaacacccgaaggatcatcaacccggctttccaccttgaggagatccaaggttataagcgttcttttccgtagtcccagtttaggttatgatggatggccatttgtnctnaccaantngtggccnntnctttntgncaga

SEQ ID NO: 98004 - DNA, 642 bp, Arabidopsis thaliana columbia
  unsure (1)..(642): unsure at all n locations
cgccaacctctaattcgattcactctagggaaagctggcacgcctgcaggtaccggtccggtattcccgggtcgacccacgcgtccgtacggctgcgagaagacgacagaaggggccccgaaattttttagcaaattctctacctctatctctctcttctctgggaggaaaaatggagatatcggttgcatcggtaacaatatcagtagttctagctgttgtgtcatggtggatatggagaactttacagtgggtttggtttaagccaaagatgcttgagcattacctgagaagacaaggtcttgccggaacaccttacacgcctctagtcggcgatttgaagaagaatttcaccatgttgtcggaggcaaggtccaaacccctcaaactaacggatgacatctcacctcgtgtcgtgccttatcccttgcaaatgttcaagacttacggaaggacttactttacatggtttggacctatcccaaccatcacaataatggatcctgagcaaatcaaggaagtgttcaacaaagtttatgatttcccaatttataacaaccctaccaacccaaaagcggccccnnnnnnnnnnnnnnnnnnnnnnnnnnnnnnnnnnnnnnnnnnnnnnnnnnnnnnnnnnnn

SEQ ID NO: 98005 - DNA, 504 bp, Arabidopsis thaliana columbia
  unsure (1)..(504): unsure at all n locations
actacagggaatccagcaagcctgcttatgcaagcaaaacccgcttttctcatcgagaactatgcggatccaaaactgtgggctgtgttggaagaacttgataacaagtcttaagtctcacttgtttggcttatggaaacccacacatgcatgagcagcctctgaagtttaccttatgtcttagatgatcattgttgaataattcattgggagtttatgacaatgggagctttcaaatatctgattattttgtattgatacatgcacaatgctagatttgtatccaggagatagttgcataaaccaatatactataccctcggatcttagcttattttcattgatatcttgttgttttgtgctgtaaacatatcagcttttgaatacatttggtccatggcgtnnnnnnnnnnnnnnnnnnnnnnnnnnnnnnnnnnnnnnnnnnnnnnnnnnnnnnnnnnnnnnnnnnnnnnnnnnnnnnnnnnnnnnnnnnnnnnnnnnnnn

SEQ ID NO: 98006 - DNA, 1615 bp, Arabidopsis thaliana columbia
  unsure (1)..(1615): unsure at all n locations
tgccgcaaaagcaaaagctatcgccaccaccgtgtcataaatctcagatctctctctctctctctctctctctctctctctctctctctctctctctctctctctctctcttgcgataacaatggccgaaactatgaaagatattacgatgaagaacgatgaatcacaggaagaagaaatccccgatcaatttctctgctgcgtttgcctggaacttctttacaagccaattgtgttatcttgtggtcatctatcatgtttttggtgcgtacataagtccatgaatggctttcgtgagtctcattgtccgatatgtagagacccgtatgttcactttccctctgtgtgccagaagctttattttctgttaaagaagatgtacccacttgctcataagaagagagaagaacaagttttaaaggaagagcaagaacgagaatgtttttctcctcagattgatcttgttttggatttgtctgtgtgtagtggagattctctcaatgtctctgataaacagaaggtggaagagtgttcgaatgcagcgaacttattatctagttcatcaagtagaggtgacattccatgtatccccaaaaatcaagaacccacagatgcaaaagctcttaatgttcatgaaaatgaattacttaaggataacaaagtcagtaagcagatttcgaaagatgatttgctctgttcagcatgtaaggagctgcttgtacgacccgtagttctcaattgcggacatgtgtattgtgaaggatgtgtagtagatatggctgaagaaagcgaaaagatcaaatgtcaagagtgtaatgtttgtgacccaagaggatttccaaaagtttgtttgattcttgaacagcttttggaggaaaactttcctgaagaatacaattcaagaagcagtaaggttcagaaaacgctcgcccataatagcaaaggaaatattcaaagctatctcaaagaaggcccgtccttatcaaacgacaataacaatgatgatccctggttggcaaaccctggatcaaatgttcactttggagctggttgtgattcttgtggggtgtatccaatcataggggatcgatacagatgcaaagactgcaaggaggaaattgggtatgacctttgcaaagactgttacgagactccttcgaaagttccagggagattcaaccagcaacacactcctgaccacaggcttgagcttgcacggtctcctcaggttctgatcaatttcaattctatcggtatccttctcggacccgttatctcaaatgaaggcatggatacagatgaaggcgaggaagggcctcctggttcttctaatgagtcatcaagcacagaatgaaatagcagtcaagtattaatgcatatgctttcgctttgtgtttgcgtttgttattgtatttatacttcataatatattttctcctgagaagtctatggttttaacattttaaacaaagtttatttcttaacaaagtttgttcgcatttgtggttgttaaaaaaaaaaaaaaaaccccaacccccaagnnnnnnnnnnnnnnnnnnnnnnnnnnnnnnnnnnnnnnnnnnnnnnnnnnnnnnnnnnnnnnnnnnnnnnnnnn

SEQ ID NO: 98007 - DNA, 495 bp, Arabidopsis thaliana columbia
  unsure (1)..(495): unsure at all n locations
tcggaattcagggtcgaccacgcgtccgcccacgcgtcggcccacgcgtccgccaacgccttccgttacggcttgcgagaaagacgaacaagaaggggtttcacacgagaatttgaaaaccggaaaaacattcttatggccacaatgtcttcttcgtctcctatcaaattggctgattttggactggcaacctatataaagcctggcgaaaagctgagcggaacagttggtagtccgttttatatagccccggaagtgttagcagggggatataaccaagctgctgatggctgccgatttgagattttctgcagagccatgggacaatataacttcatacgccaaggatttgattcgcgggatgctttgtgtggatccttcccaaaggttatcagctgacgaagttctagctcactcttggatggagcagttatctgaatcaggtcaagaacantatgatcaggatgggtttggttgtgaaggatggagaatggg

SEQ ID NO: 98008 - DNA, 1061 bp, Arabidopsis thaliana columbia
  unsure (1)..(1061): unsure at all n locations
acgggtgtttgctcttctcgtggctctattttttttgacatatttgttagaagggcaagtcagaattaaaaacgatctgaacgaaaatgttacctgtggttggtacacaagggaggaggataataaagtcacaaccattttggccattgaaggtgcaagaacatctcttctaggtctctatgcagcgatatttatgcttatagctctcctgattaaatttgagctcacttcgcttttgcgtgagaaattctctgagaggagtggtcagtcaaaaacccaaggaggcgcaagagggattttcccgacacgaatgaggttgatgcagcaacgccgagccacctcgatccaaagctttgcagtagagaaaatgtcagaagagggagcagcatggatgccttctgttggtaatgtcgccaccatcatgtgctttgccatatgcttaatcctcaacatccacctctcaggcggctcaagcaagcgantattcttcctggctccaatcttacttctcctgaaccaagactctgatctcttatccgggtttggtgataaacagagatacttcccggttacagtagcctttccatacatatttggcattatcctcgctctacactgtatgggaagaagtttggtttggtggaaacacagggtggggagtcgaaattggaggccgtgaatggttttttgcggtgaaggaacctggctctcctaatactcacagcaccaggtcacatcatattcaacaggtacgtttggagttacaccaccaaacacacagacgcgtcgccgatgctgaccgtgccactttgctttgcagccgtaataataacagacgtgtttcaagttagggttctgggagttttaggcattgtttactctgcggctcagtatgtgatatctaggcaacaatatatgaaagggctgaggtatatttagacagtcgtaggattgattagtaatgttttcgaccctttttgtaacagaatttgtgaaacagtgttttcatttcccagctttgtttctcagtggatgcattggaaattgccaatatacgacgt

SEQ ID NO: 98009 - DNA, 1043 bp, Arabidopsis thaliana columbia
  unsure (1)..(1043): unsure at all n locations
actgagtactctgtgtttggttctctttccaatgtgggtgctatggttggtgcaattgccagtggtcagattgcagaatacattggacgaaaagggtctcttatgattgctgcaattcccaatatcattggatggctttgcatatcatttgcaaaagatacttcgtttctttacatgggaagacttttagaaggctttggcgttgggatcatctcttacactgtacctgtatatatcgctgagatagctccacaaaatatgagaggaggattgggttcggttaaccagctttctgtgacaattggaataatgttggcgtatttacttggcctctttgttccatggagaattcttgcagttctggggatattgccgtgtacattattgagaccaggtctctttttcatccccgaatcccctcgctggctggcagaaatgggtatgacagatgaatttgaacttcattacaagttcttcgaggatttgagactgatattaccgttgaagttaatgaaatcaagagatctgtggcatcatctacaaagcgaaatacagttcggtttgtagatctcaaacgcaggagatactatttcccacttatggttggtatagggttgcttgtacttcaacaacttggtggaattaatggtgtcctattctattccagtacaatatttgaatctgcaggagttacatcggagtaaccgcagcaacatttggggtcggggctattcaggtagtagcggctgcaatatccacttggttggtggncaaagcagggtcgtcggcttcttgttactatctcttcggttgggatgccggtngccttgnattgttcagctgcttctancttaaggaattngtgccnctgtcaggcatgncagntggtngnatattgcagaagtgggtntgaatggtgccttttnccattnggattggccaaacccggggcatatgctngccccctgnacaaaaggttnctgagnttnacttccaattggcttttggtnccctcanaattcttacctggnggggggctnntc

SEQ ID NO: 98010 - DNA, 1483 bp, Arabidopsis thaliana columbia
  unsure (1)..(1483): unsure at all n locations
atgatatgccnnnnnnnnnnnnnnnnnnnnnnnnnnnnnnnnnnnnnnnnnnnnnnnnnnnnnnnnnnnnnnnnnnnnnnnnccacgcgtccgaaaagatacttcttttctttacatgggaagacttttagaaggctttggcgttgggatcatctcttacactgtaatactgaacttaactagctatttacttatggaataacggttcagtatattaatgcaactcggttcgtgattttaggtacctgtatatatcgctgagatagctccacaaaatatgagaggaggattgggttcggttaaccagctttctgtgacaattggaataatgttggcgtatttacttggcctctttgttccatggagaattcttgcagttctggggatattgccgtgtacattattgataccaggtctctttttcatccccgaatcccctcgctggctggcaaaaatgggtatgacagatgaatttgaaacttcattacaagttcttcgaggatttgagactgatattaccgttgaagttaatgaaatcaagagatctgtggcatcatctacaaagcgaaatacagctcggtttgtagatctcaaacgcaggagatactatttcccacttatggttggtatagggttgcttgtacttcaacaacttggtggaattaatggtgtcctattctattccagtccaatatttgaatctgcaggagttacatcgagtaacgcagcaacattggggtcggggctattcaggtagtagcgactgcaatatccacttggttggtggacaaagcaggtcgtcggcttctgcttactatctcttcggttgggatgacgattagccttgtaattgttgcagctgctttctatcttaaggaatttgtgtctcctgattcagacatgtacagttggctgagcatattgtcagtagttggagttgtggcaatggttgtctttttctcattgggaatgggaccaataccgtggctcattatgtctgagatccttcctgtgaacataaagggtttagctggaagtattgcaactctagccaattggttcttttcttggttgatcaccatgacagcaaatttgctgttagcctggagcagtggaggaactttcactctgtatggattggtttgtgcattcacagtggtgttcgtgactctatgggttcctgagaccaaaggcaaaactcttgaagaacttcaatccttgttcagatgaacaaattgaaacaacttcattctttgtcaccctctctctccctctctgttttggccaagaacaagaagaaacaagagattttccagctttgttaattgggctgagaacgttactaagatttgtttgtttgttcgttgtgtgtcaataatcgcattatcttcaaaaaaaaaaaaaaaaagnnnnnnnnnnnnnnnnnnnnnnnnnnnnnnnnnnnnnnnnnnnnnnnnnnnnnnnnnnnnnnnnnnnnnnnnnn

SEQ ID NO: 98011 - DNA, 505 bp, Arabidopsis thaliana columbia
  unsure (1)..(505): unsure at all n locations
nnnnnnnnnnnnnnnnnnnnnnnnnnnnnnnnnnnnnnnnnnnnnnnnnnnnnnnnnnnnnnnnnnccacgcgtccgatttgcaaattcctttgatcagatagtgaaaacgattctctctatattgccgatcgatctccaagtttgctaaatcgccgggaactttactgaaatttggagctagtcatgtcttcggatcctgacaaaatgatgtccaaagccgacaaaatgacaaagctcacgcttactagatggagtgctgattggagaggtgctactgagttgtatgagcaagcagcaaatgggtttagagcatcaaacaaatatgagaaagctaaagtggctctcgagaaagcttcaaaaggacaagagatgcaagcttctccttgggatgctgcaaagcatatggagtctgctgctgccttagcacagaagctaagtatttggaatgaagttgctgatttttatagaaaggcgtcggagctgtatgttgagtgtggaagggc

SEQ ID NO: 98012 - DNA, 688 bp, Arabidopsis thaliana columbia
acttccggtggtgggattcgccgtagggaggtttaacccagcaatgagagacggagagagagttttgccagtggtgttaacagaaatggatggtggtgggattggtaatagccaggatggtcctagccggatctcatgggttaggtcacacggtacactcgaatcggatagtaacggtactggctcaggttccggctccggtggaagattgaggaggatggttcgtggaatggtgtcgttaatgaggagagtgagaccaaaccgtagctcttcttcttcatcagctgcgatatcaacttcttctgataatctggatttgaacattgaagtagaatctagggttttggataggtcaaattcagtgatgagaagatacttcagaagaaacagaagtaacagggattcttcgtcttcagttcttcattgattcagaaatatatatatattattttttggtttgttcattcaacaatgtaaatataagattcagaagaaaaagattggtgcttcgttttctattatcaattcgattaattcttccttatgttgttacatcaaaatgtataatgttcatatagaagtgttcatctttaaaaaaaaaaaaaaagaaaaagggcggccgctatagaggatccaagcttacgtacgcgtgcatgcgacgtcatagtattctataggtcgcctaaat

SEQ ID NO: 98013 - DNA, 1542 bp, Arabidopsis thaliana columbia
  unsure (1)..(1542): unsure at all n locations
nnnnnnnnnnnnnnnnnnnnnnnnnacccacgcgtccgcccacgcgtccgcccacgcgtccgcccacgccgcggccagcgattcttctttcttcttcttctcagatcctttcaccgagtaagaagattttaaagatgccgtcaacgccgacgacgccgactacaacaacgccgatcacggcttcgtattggtgttacagctgtacgcgtttcgtcagcgtttgggctgatcaaggcacaacaaccgtcggtagcgtcgcttgccctcactgcgacggcggttttatcgaacagattaacgattcttcctccgccgctaccgaattaacgattccggcttctactgaagtaagatcgatcaataacaaccgtagatccgtgattagacgccggagatccggtcgtcgtccgtcctttaatccggtcatcgtacttcaaggaggcgccggcgagagagaagagggagaagaaggagatgcggctagagatcgacgcgcttttgagttttattacgatgacggatccggatcgggtcttagaccgcttccggattctgtatctgagatcttgatgggatctggattcgagcggttacttgaacagctaagccaaatcgtagcgtcggctactggaattggtagatctggaaaccctccggcgtctaaatcggcgattgagtctttacctagagtcgaaatctcggattgccacataggctcggaggctaattgcgctgtttgcacggagattttcgagacggagacggaggcgcgtgagatgccgtgtaaacaccttttccacgacgattgcatcgtaccgtggctatcgattcgaaactcttgtcccgtgtgcagattcgagctaccttcagagcctaatcgacggagcaacaacaacgaggaggataacgccgtggggatgacgatttggagacttcccggtggtggattcgccgtagggaggtttaacgcagcaatgagagacggagagagagttttgccagtggtgttaacagaaatggatggtggtgggattggtaatagccaggatggtcctagacggatctcatgggttaggtcacacggtacactcgaatcggatagtaacggtactggctcaggttccggccccggtggaagattgaggaggatggttcgtggaatggtgtcgttaatgaggagagtgagaccaaaccgtagctcttcttcttcatcagctgcgatatcaacttcttctgataatctggatttgaacattgaagtagaatctagggttttggataggtcaaattcagtgatgagaagatacttcagaagaaacagaagtaacagggattcttcgtcttcagttcttcattgattcagaaatatatatatattattttttggtttgttcattcaacaatgtaaatataagattcagaagaaaaagattggtgcttcgttttctattataaaaaaaaaaaaaaaaaaaaagggcggccgctctagaggatccaagcttacgtacgcgtgcatgcgacgtacatagctgttctatagtg

SEQ ID NO: 98014 - DNA, 339 bp, Arabidopsis thaliana columbia
ggctcacaaatgtttgaaagaagaaaaaaccctaaacccccaaaatttgcttcgagaagaaaatgaatggtgtctctcgtcatcttcgagcttcttcacttctttcattaattcgcagctatggtggaatcaattcggtctgtcgattttcgtctcaatctgatggcttctctggagggagattcagagagcaagtgccagtttctggagagtctgcaaataattcaggcttatcaaacacgggaagaatcggttcctctccggagcctaatccttcgactttgagaacttttggtgatatgatagcaggcttgttaaacagaggagtcaatggtttct

SEQ ID NO: 98015 - DNA, 789 bp, Arabidopsis thaliana columbia
tcaagttgttcttgtagttgtgggcgatagtgtagatctcaacgccatcgaagaagaaattgccaagctgtgcaaaagccttcctagaggagagtttgcttcaaaagcactaagtcacagtttcacagtgtttgctcgagatatgattgaggcaatatctttctcaaaatctatatgcaccccgaacattttgatcatcaatgtcaaagacgctgagaaatgggggggcctgattgagaacgcaggctcggttttcataggaccatggactccagagagtgttggggattatgcgagcgggacaaaccacgttcttccaacatatggatatgcaagaatgtacagtggcgtctctctcgactctttcctaaagttcatgactgtacaatctttgacagaggaaggtctgagaaacctcggcccttatgtagcaactatggctgaaatcgaaggtttagatgcacacaagagagccgttactctcagactcaaggatatcgaagccaaacagcttgcataatccaattgagatttatattcagacaaaagaggcaaaaattcgttttgtattgtatgaacatatttggtttcctgagatggcataacaataaaataagagatgttggaaaactcttaccataatcttgtttttcattctttaaatctaaatccttccgtatgtttgaacccaaaaacccaaaaaaaaaaaaaaaaaaaaaagggcggccgctctagaggatccaagcttacgtacgcgtgcatgcgacgtcaagcttttttatagtgtca

SEQ ID NO: 98016 - DNA, 532 bp, Arabidopsis thaliana columbia
ctcctcttctctctctctcaatctcaatggctctgttttaaaaagggcaaattagagagatttctccttcaataacaaaaaatcgccagctttatctctctctttttcacatcccatggctagatggtgacgacgattcacgcataaactagggttcccccacaaatcatcttacacgtatcctctattccttccttcctttctccgtcatcatcatttttcccaccgacaacaatctctcggagtttgggtattattacttctctcatcaaccaattgtaccactagatctcccagattccttcattatctctatcaataatggcgttgaagtctagttctgctgatggtaaaaccagaagctctgttcagatcttcattgtgtttagtttatgttgcttcttttacattttgggagcatggcaacgaagtggttttggttaaggagacagtattgctcttgagatgaccaacagtggagctgtttgcaacattgttcctagcttgaatttcgagactcatcacgctggcg

SEQ ID NO: 98017 - DNA, 1655 bp, Arabidopsis thaliana columbia
gttttaaaaagggcaaattagagagatttctccttcaataacaaaaaatcgccagctttatctctctctttttcacatcccatggctagatggtgacgacgattcacgcataaactagggttcccccacaaatcatcttacacgtatcctctattccttccttcctttctccgtcatcatcatttttcccaccgacaacaatctctcggagtttggatcaataatggcgttgaagtctagttctgctgatggtaaaaccagaagctctgttcagatcttcattgtgtttagtttatgttgcttcttttacattttgggagcatggcaacgaagtggttttggtaaaggagacagtattgctcttgagatgaccaacagtggagctgattgcaacattgttcctagcttgaatttcgagactcatcacgctggcgaatcaagtcttgttggtgcttctgaagctgcaaaggtcaaggctttcgagccctgtgatggtcgttacacggattacactccttgtcaagatcagagacgtgccatgactttcccgagagatagtatgatttaccgagaaaggcattgcgctcctgagaatgagaagctccattgtcttataccggctcctaaaggatatgtgacacctttctcttggcctaagagtcgagactatgtgccttatgctaatgcgccgtataaagcattgactgttgagaaggctattcagaattggattcagtatgagggagacgtttttagattccctggtggtggaactcagttccctcaaggtgctgataagtatatcgatcagcttgcttccgtgatacctatggagaacggaactgttaggactgctttggacactggttgtggggttgcaagttggggagcgtacttatggagcagaaatgtgcgtgcaatgtcttttgcaccaagagattcacacgaggctcaggtccagtttgctctcgagagaggtgttcccgctgttattggtgttcttggtaccataaagttgccatacccaacacgtgctttcgacatggctcattgctctcggtgtttgattccatggggagcaaatgatgggatgtacttgatggaagttgaccgtgtgcttagacctggtgggtactggattctgtctggtcctccaatcaactggaaagtcaactacaaggcatggcaacgtcccaaggaggaccttcaagaggaacaaagaaagattgaggaagctgctaaacttctttgttgggagaaaaagtatgaacacggtgagattgcaatttggcagaagagagtcaatgatgaggcatgccgatcaagacaagatgatcctagagccaatttctgcaaaaccgatgataccgatgatgtctggtacaagaaaatggaggcatgtattacaccgtatccggagacaagtagctcagatgaagtagctggtggtgagcttcaggctttcccagataggctcaatgcagtgccgcccaggatctctagcggttcgatctctggtgttactgttgatgcctatgaagacgataacagacagtggaaaaaacatgtgaaagcctacaagagaatcaacagtctacttgacactggaaggtaccgtaacatcatggacatgaacgcaaggtttggtggatttg

SEQ ID NO: 98018 - DNA, 545 bp, Arabidopsis thaliana columbia
  unsure (1)..(545): unsure at all n locations
gacactgagaagaaaaatccctcaggttatcgaaaattcccggattttactctttgggcggtggccgatttcttacgcgctctttttgtggcgactgttgtatacgcgcgagccttcatggacacgaaggcggttggagtttctaaggatacggcggcgtcgatggaagcgtcgacggtgtttcctgggtttaaattctcgccgacggatgtggagttgatttcgtattacctgaagcggaagatggatggcttggagaggtccgttgaggttataccggaccttgagatttacaatttcgagccttgggatttacccgataagtcgattgtgaaatctgatagcgagtggttcttcttctgtgcgcgtgggaaaaagtatccacatggttcacagaacaggacgagcaacgaagattgggtacttgaaaagcaacttgggaaaaagcgtattttaagncttggttntaaggcatttgncaaagnggccgtttntttcnanattnggcggtcnccaaangngaaaacntncctggttttnnccag

SEQ ID NO: 98019 - DNA, 787 bp, Arabidopsis thaliana columbia
  unsure (1)..(787): unsure at all n locations
nnnnnnnnnnnnnnnnnnnnnnnnnnnnnnnnnnnnnnnnnnnnnnnnnnnnnnnnnnnnnnnnnnnnnccacgcgtccgcccacgcgtccgctttcgtcctttttttccttttgcattctctcgtcgtcgtctcaagatctagaagaaggaaacaacaatttcaagagacatggcaggcaaaggtggaaaaggactcgtagctgcgaagacgatggctgctaacaaggacaaagacaaggacaagaagaaacccatctctcgctctgctcgtgctggtattcagtttccagttggacgaattcacaggcaactgaagacccgagtctcggcacatggcagagttggtgccactgcagccgtctacacagcttcaatcctggagtatctgacagcagaggttcttgagttggctgggaatgcgagcaaggatctcaaagtgaagaggataacgccaaggcatctgcagttggcgattagaggagatgaggagctggacacactcatcaagggaacgattgctggaggtggtgtgatccctcacatccacaagtctctcatcaacaaaaccaccaaggagtgatgtgtagctttttatggggtttggatttctgtagtcttggactcattttcctttatccttttcttagttctttgactagtgttgacctcttctggacatcctcaggtgtacattagttaatttgaactctttaggtttccttgttcaatcatatgttctctttctatgctattgtgatttgcttgnnnnnnnnnnnnnnnnnnnn

SEQ ID NO: 98020 - DNA, 781 bp, Arabidopsis thaliana columbia
gagaaagtcgtacaacaactacaacgaagaagaagagtaaagaaaatggtcgtcgaggagtcatcatgcgtttacaagaacggagacgcgccagtggaggcgcgtgtgaaggaccttctctctcgcatgactttgccggagaagatcggtcagatgactcaaatcgaacgcagagtcgcttctccctccgcctttacagatttcttcatcggaagtgtactaaacgctggaggtagtgtaccgttcgaggacgctaagtcatcggattgggctgatatgattgatggttttcagcgatcagcgttagcgtcgcgtttgggaattccaattatctatggcactgacgctgtccacggcaacaataatgtctacggcgccactgtcttccctcacaacattggcctcggagccaccagagacgcagatttggtcagaagaattggagcagcaactgcacttgaagtaagagcgagcggggttcattgggcattttctccttgcgtggccgttttgagagatccgaggtggggaagatgctatgagagttatggagaagatcctgaacttgtctgtgagatgacttctcttgtctcgggcctacaaggtgtgccaccagaagaacacccaaatggttatccttttgttgcaggaagaaacaacgtcgtcgcgtgtgtcaaacactttgttggagatggtggtactgacaagcgcataaatgaagggaacaccatcgcttcatatgaagaattagagaagatacatattcctccttatctgaagg

SEQ ID NO: 98021 - DNA, 431 bp, Arabidopsis thaliana columbia
  unsure (1)..(431): unsure at all n locations
ggtagtatcgtcgggattttttgaccggagaaatggggaggaggattttgaacgatgcgttgaggacgattgtgaatgctgagagacgaggaaaagcttcggtggagctcaaaccaatctccaccgttatgtcttcgttcttgagaatcatgaaggagaaaggttatatcaagaactttcaagtgtatgatccacatagagttgggagaataacagttgatctgcaagggagggttaatgactgcaaagctcttacctacaggcaagacgttagggcaaaagaggttgtagaaatacacttgaacgcacacttccaaccacgtcagtgggggtttatgttgtaatcacaactccggatgggattttttggcccctgatgnngcattcaaacgggatnttnggtgggncaggttctttggcttcttttactt

SEQ ID NO: 98022 - DNA, 739 bp, Arabidopsis thaliana columbia
  unsure (1)..(739): unsure at all n locations
gcctgcaggtaccggnccggaattcccgggttgacccacgcgtgcactacccgagaagacgacagaagggggtagtatcgncgggattttttgaccggagaaatggggaggaggattttgaacgatgcgttgtggacgattgtgaatgctgagagacgaggaaaagcttcggtggagctcaaaccaatcttttttgtttgtttggcggggggagaancangaaggagaaaggggataccaagaactttcaagtgtatgacccccatagaggtgggagaatcccagttgatctgccagggggagggttaatgactgcaaagctcttcccctacaggccaagaccgttaggccaaaaggaggttgagaaatacactgaacgcacacttccaaccacgtccagtgggggttatgttgtaatcacaactccggatgggattttggaccatgaaggaagcaatcaaacggaatgtgggtggtcaggttcttggcttcttttactgaatagcttgagctagcacatggcaagaaccttctagtgtcaaaggattcaacaaaagattgaagtttcggtccttctcctgttgctttttgttttttgtaacttgcattgtctttgaacagattggcaattattagataacacatttgttgctaaattcaaagatcttgttgttagtttatattttggacgagaaatttgttcttccatagctatctgaataatctatatttcttctat

SEQ ID NO: 98023 - DNA, 428 bp, Arabidopsis thaliana columbia
gaaaggcgggaccgatccgccattaatgctaccacccaactacaaggcttttctcacacactctcttctctcaatctcttggctcagaacaaagaagataaaaaaaaaagtgtgatatattgtgagaagattgcagaagcgtgtccaacttggttccctctctctctgaaattactcaatcatggggatttgcttgagtgctcaggtcaaagctgagagctcaggagcgagtacgaagtatgacgccaaagatataggaagtcttgggagcaaggcttcgtctgtgtctgtaagaccaagccctcgaactgagggtgagatcttacagtctccaaatctcaagagttttagctttgctgagcttaaatcagcaaccaggaattttagaccagacagtgtgcttggtgaaggtggattcggttgtgttt

SEQ ID NO: 98024 - DNA, 514 bp, Arabidopsis thaliana columbia
  unsure (1)..(514): unsure at all n locations
nnnnnnnnnnnnnnnnnnnnnnnnnnnnnnnnnnnnnnnnnnnnnnnnnnnnnnnnnnnnnnnnnnnnnnnnnnnnnnnnnnnccacgcgtccgcaaagctaaggataaagaaaataaatagtaaatggaagggtttcttcgctttcttgtagcgaaagccatcttattggctttagcatcttcatttgtatcttgttacgacccaagtcctcttcaggacttttgtgttgccgtcgatgacgctagtggtgttttcgtgaatggaaaattctgcaaagacccaaaatacgtgaaagctgaagacttttttacttccggactaaacatcgccggaaacacaataaaccgcgttggctccaacgttacaaacgttaacgttgacaaaatccctggactcaacaccctcggagtgtctcttgtccgaattgactttgccccgggaggtcaaaacccgccacacacgcacccacgagccactgagatcctcgtggttgtcgaaggaacactcttagt

SEQ ID NO: 98025 - DNA, 604 bp, Arabidopsis thaliana columbia
tgcgtctctaaactctcgcattctcaaaatcactaaaatcaaactcaattttcatcaaatatctctaatggcgccgaaagcagcggagaagaaaccggcagagaagaaaccagccgggaaagctccggcggagaaactcccaaaggcggagaagaaaatcagcaaagacgccggaggaagcgagaagaagaagaagaaatcgaagaagagcgtcgagacttacaagatctacatcttcaaggttctgaaacaagttcatccagatgttggaatctctgggaaagctatggggattatgaacagtttcatcaatgacatcttcgagaaacttgctcaggaatcgtcaaagctcgctaggtacaataagaagccgacgattacatcgagggagattcaaaccgctgtgagacttgtgttgcctggagaactcgctaaacatgcggtttctgaaggcacgaaggcggttaccaaattcaccagttagggttttcctgtaaatttccggttaagtgtttggtttagactcggtttgtttagatgttttgagtttcgtgaattgtttgatgatcactctaatggttcaaaattgatggttgaatttgat

SEQ ID NO: 98026 - DNA, 836 bp, Arabidopsis thaliana columbia
acaaaaatccaaatcccaaaactttcccgagaaaactaaaaaaatggcaccaaaagccggaaagaaaccagcagagaaaaagcccgcagagaaagctccagcagaagaagagaaagtagccgaaaaagcaccagcagagaagaaaccaaaagccggaaaaaaactaccaaaagacccagtccaccggagggagtcgagaaagaagaagaaacgagtcaagaaaagcccagagacatccaagatctacatcttcaaggtgttgaaacaagttcatccagatattggaatctcaagtaaagctatggggattatgaacagttttatcaatgatatattcgagaaacttgcgcaagaagcttcaaaattagctaggtataataagaaacctacgattacttctagggagattcagacagctgttagactagtgttacctggtgaacttgctaagcatgctgtttctgaaggaactaaggctgttactaagtttactagctcttaggtttagccgtttaggtttcgaatcttggttcgttttgatatggaatctgatggtttttatgtaatttgttgaagattgtaatggtgttaatgttttctttttaatttggattttgtgtttagtgacttgggattctccaagaagtttgatatttatgaatgttaaattaaaatttggattttggtggatgattttgtacgatgaatcggtaattttgttgtgaattattcttgagcttagcttttgttttttccaaaaaaaaaaaaaaaaaaaaaaaagggcggccgctctagaggatccaagcttacgtacgcgtgcatgcgacgtcatagct

SEQ ID NO: 98027 - DNA, 418 bp, Arabidopsis thaliana columbia
atacaacttccttttcccgagaaaatcagaaagaaaattcacgatggcaccaagagccgagaagaagcccgccgagaaaaaaaccgccgctgagagaccggtggaagagaacaaggctgctgaaaaggctccggcggagaagaaacccaaggcggggaagaaattgccaccaaaggaagccggtgacaagaagaagaagcgatctaagaaaaacgtcgaaacctacaagatctacatcttcaaggtgctgaagcaggttcatccagatatcggaatttcaagcaaagccatggggattatgaacagtttcatcaacgacatattcgagaagctagctcaggaatcttcgaaactcgctaggtacaacaagaagccgaccattacatctcgcgagatccagacggctgtgagactcgtc

SEQ ID NO: 98028 - DNA, 815 bp, Arabidopsis thaliana columbia
  unsure (1)..(815): unsure at all n locations
gcatcaagcaatccaaagcgattaaacctactcaatctcagatctcgttaaacctagaaacctcgagaaaaaccgtatcaatggcgccgaaagcagagaagaagcccgctgagaagaaaccagcttccgagaagccggtggaggagaaatcaaaagccgagaaagctccggcggagaagaaaccaaaggccggaaagaagctcccgaaggaagctggtgccggaggcgacaagaagaaaaagatgaagaagaagagtgtcgagacttacaagatctacatcttcaaggtgcttaagcaagttcatcccgatatcggaatctccagcaaagcgatggggatcatgaacagtttcattaacgatatcttcgagaagcttgctcaagaggcgtcgaagcttgcgaggtacaataagaaacctacgatcacttctcgggagattcagactgctgtgagattggtgcttcctggagagttggcgaagcatgccgtttctgaggggactaaagccgtcacgaaattcaccagctcttgaataattgagttagggttcttatcatatggatgttgctctgctttagggttaatggaatttggaagatctgagttagggttttagaatgtcctttaagtatctctgtttcgtttggaatttctacgttttgtaagtactgctgctattgataatgtttggagtctatatttgctctttgtgtcccaaaaaaaaaaaaaaagnnnnnnnnnnnnnnnnnnnnnnnnnnnnnnnnnnnnnnnnnnnnnnnnnnnnnnnnnnnnnnnnnnnnnnnnnnnngaatcg

SEQ ID NO: 98029 - DNA, 648 bp, Arabidopsis thaliana columbia
  unsure (1)..(648): unsure at all n locations
aaacttgatctcacgactccatcttctaaaattcagaatctttctttgaaacttttttcgtgtgaagaaaatggcaccaaaggcagagaagaagccggcagagaagaaaccagtagaggagaaatcaaaagccgagaaagctcctgcagagaagaaaccaaaagccggcaagaaactcccgaaggaagccggtgccggcggcgataagaagaagaagatgaagaagaagagtgttgagacgtacaagatctacatcttcaaggttctgaaacaagttcatccagatattggtatttcaagcaaagctatggggattatgaacagtttcatcaacgacatctttgagaaattggcatcggaatcgtcgaagctcgcgaggtataataagaagccgacgattacttctcgggagattcagactgctgttagaccttgttcttcctggtgacgcttgcgaaacatgctgtttttgaagggacctaaggcggggacctaaggttacctagcctcttgaattgtggatcttgttgaaaatcgatgtttgtaaaattagggttttttagatttgatggttgttgttgactctttgatcgatttctgttccgtttccttgttncgatgtaaacaaatcgnnnccgattccttctt

SEQ ID NO: 98030 - DNA, 718 bp, Arabidopsis thaliana columbia
  unsure (1)..(718): unsure at all n locations
ccggaacggaatgcccggtcggccacgcgtccatctgtgcttcttcttcttcacccagaaaagtaaaacaaaagtcaaaacaatggcgccgagagcagagaagaagcccgcggagaagaaaccagccgccgagaaaccagtagaggagaaatcaaaagccgagaaagctccggcggagaagaaaccaaaagccggcaagaaactcccgaaggaagccggggccggcggcgataagaagaagaagatgaagaagaagagtgtggaaacttacaagatctacatcttcaaggttctgaaacaagttcatccagatattggtatttcaagcaaggctatgggtattatgaacagtttcatcaacgacatcttcgagaaattggcatcggaatcttcaaagctcgctaggtataacaagaagccgacgattacttctcgggagattcagactgctgttagactcgttcttcctggtgagctcgctaaacacgctgtttctgaaggaaccaaggctgttaccaaattcacaagctcttgaattagtaaattagggtttgtatactctgaatttgattctgatgttgtcataacttgtgttaggatttctctttcgttttattaagctttaattatcattctccgttgtaaaggaatcttatgaatctgtcttcgaatcaaaagttctggttgttaatggctcnnnnnnnnnnnnnnnnnnnnn

SEQ ID NO: 98031 - DNA, 857 bp, Arabidopsis thaliana columbia
  unsure (1)..(857): unsure at all n locations
nnnnnnnnnnnnnnnnnnnnnnnnnnnnnnnnnnnnnnnnnnnnnnnnnnnnnnnnnnnnnnnnnccacgcgtccgcccacgcgtccgcccacgcgttccgaaaatgtttaactatgtgattattcttcctttagctctcttcctcttggcttacaaattcttctttacatctaaaaagcagcgttactatctccctccctctccatcttactctctcccaatcctcggccaccacctcctcatcaaaccgccggttcaccgtctcttccaccgcctttccaatatccatggcccaatcttctacctccgacttggttcccgccgtgccgtcgtcatatcttcctcctcgctggcaagagaatgcttcacaggtcaaaacgatgtcattgtatcaaaccgccctcgttttctaacctccaaatacattgcttacaactacacaaccatcgcaacaacatcttacggtgaccactggcgtaacctccgccgcatttgctccctcgaaatcgtctcctcaaaacgtctcgccaactttctccacatccgcaaagaggagatccagcgcatgctaacgagactctcacgtgacgcccgtgtcggcaaagaggtcgagctcgagtctatcttgtacgacctaacgttcaacaatatcgtgaggatggttacagggaagatatactacggcgacgatgtcagcgacaaagaagaagcagagttgttcaagaagctttttactttcatcaccactaatagtggcgcgaggcatcctggagaatacttgcccttcatgaagatattcggagggagctttgagaaggaggtgaaagctgcaacaaaagtcatcgatgaaatgttg

SEQ ID NO: 98032 - DNA, 568 bp, Arabidopsis thaliana columbia
  unsure (1)..(568): unsure at all n locations
aaaaacctctaatctcatgtctatgtcttgtctttagatactatcttactctctcttcgagaacttatgtctttagaacggtcggagttcgtcgacggtgttgcggcacggagtctcagtgagatctcagaagttgacgccgtgagaattggaggtgatattatatcttcagcgagacgtctcatcgcacttttaaggtccgtaggagattgtcaatggcttcatcatccacccgttattgctgaagctattagaaggtatgatgagctatggatgccgttgatttctgatctaacggttggtttaaagccaccgatgattttgcctcctccttgatgttgaatggggttgggttttgtcactggtttgaatccagtgagttaaagngattactgggnaaaggggnatcccaaaaccttttagggagcctgcgnattnccgccgaanaaacgagggttacccgggtttccatgngnaaannnctgggggtnccgnaaccctttaaggggttttggaaaagngggcccgggncccttnaacggtccttagtaannanataaagcnggna

SEQ ID NO: 98033 - DNA, 510 bp, Arabidopsis thaliana columbia
  unsure (1)..(510): unsure at all n locations
gcannnnnnnnnnnnnnnnnnnnnnnnnnnnnnnnnnnnnnnnnnnnnnnnnnnnnnnnnnnnnnnnnnccacgcgtccgcaacacacgactagataaactctaaatcctcacagcagatcacgtgctaatcacatggctccggggcttactcaaaccgctgatgctatgtccaccgtgacgataacaaaaccgtcactgccatcagtccaagacagcgatcgagcttacgtgacgtttcttgctggaaacggtgattacgtgaaaggagtcgttggtttagccaaagggttaaggaaagtcaaatcggcttatccactcgtagtagcgatgttacccgacgtcccggaggaacaccgtcgtatacttgtggatcaaggatgcatcgtccgtgaaatcgaacccgtttacccacccgagaaccaaactcagttcgccatggcttattacgtcatcaactactctaaactccgtatctggaagtttgtggagtatagtaaaatgatatatt

SEQ ID NO: 98034 - DNA, 470 bp, Arabidopsis thaliana columbia
cgaaattcgcgggtcgacccacgcatccggaagacgacagaagggggaactgcacgatatgcaagttgcaatacacatcttggaattgagcaaagtcgacgggatgatctagaatcgctgggatatgtgcttccgtatttcctaagaggaagtcttccatggcagggtcttaaggctgttgacaagaagcagaagtatgataaaatctgtgagaagaagatatcaactcccattgaggtgctatgcacaaatcaccctgtggagtttgcatcatattttcattactgccatacactgacatttgatcagcgcccagattatggattcttgaagcggctttttcgtgatttattttcgcgggaaggatatgagttcgactatatatttgactggactatcataaagtatcaacatgcacataaatctagaaatcagtctcaggcagttcctgagtctagcaatcctcgtgg

SEQ ID NO: 98035 - DNA, 448 bp, Arabidopsis thaliana columbia
cgcctgcatgtaccggtccggaattccttgttcgacccacgcgtacagttcggttgtgagaagacgacagaatgaataccagaaaagcgaggaagaagtacaagaacgagcacagcgagccgccgcagcagccaggagatggagggaatactcacgaagaggcgtggataagcgccccaccttcaaactcccagactccgcctccagaggagacaactgaaaccataggcagaaatcacttatagtttatataggtaagcaggtttcttactagattatatatctatatatgtaaatgtcatgtcgcgttctagacctgtatagctttgttctcacatcgattaaggaagaaaaaaacaagtgtatttaacgttttcgatttctgtattatactatttaaaaaaaaagtttgcaacgcctagataaaattaaaatacattagttatgt

SEQ ID NO: 98036 - DNA, 540 bp, Arabidopsis thaliana columbia
  unsure (1)..(540): unsure at all n locations
gagcagttgatgttttcagaatggcgagatctcgatgggaaaagaggcaagcaaaagttttgaatcaagctagaagtagaatgatgaagaggaaaaacacagatgaaacaccttcctattgggataacctctggggcaaacagaatgaataccagaaaagcgaggaagaagtacaagaacgagcacagcgagccgccgcagcagccaggagatggagggaatactcacgaagaggcgtggataagcgccccaccttcaaactcccagactccgcctccagaggagacaactgaaaccatagccagaaatcacttatagtttatataggtaagcaggtttcttactagattatatatctatatatgtaaatgtcatgtcgcgttctagacctgtatagctttgttctcacatcgattaaggaagaaaaaaacaagtgtatttaacgttaaaaaaaaaaacccaaagctatttnnnnnnnnnnnnnnnnnnnnnnnnnnnnnnnnnnnnnnnnnnnnnnnnnnnnnnnnnnnnnnnnnnnnn

SEQ ID NO: 98037 - DNA, 670 bp, Arabidopsis thaliana columbia
  unsure (1)..(670): unsure at all n locations
aaaaagaatcagaaagaagaagaagaagactccaaaaacgatgccgtattacaccaacgacgacaatgacgtcgacgatttcaccgaatacgatccgatgccttatagtggaggctacgacatcaccgtgacatacggccgttcaattccaccgtccgacgagacttgttaccctctctcctctctctccggcgacgcctttgagtatcagcgacctaatttctcttctaaccacgattcttctgcttatgacgaccaagctcttaaaaccgagtacagtagctatgcacgacccggacccgttggatctggatctgattttggccggaaacctaattctggatatggagggagaacggaggttgagtatggccggaaaactgaatcggagcatggatctggctatgctaatggtggaagaaatttgggagcgattaaccgtgaagccttagctaattggcgggcaccaacggttgttggtgacgatggtcacaaaaaacatagtggtaaggattatgatgatggagatgagaagagtaagaagaaggagaaggagaagaagaaggataagaagaaaggtggtaataactctgaagatgatgagtttgagaagaaggagaagaaagagcagaacaaggagcatcatgatgatgatggttatgatantaac

SEQ ID NO: 98038 - DNA, 358 bp, Arabidopsis thaliana columbia
ggtacataaaagcttaaaagaaaacacaaagaatggggagagcaagagaaataggagaaggaaactcatcgtcgttaagggaacaacgaaacctcagagagaaggatcgaaggatgcgcatgaaacatctcttctctatactttctcctcatgtttctcccactcgcaagttaccagtgcctcaccttatagatcaagcgacatcatacatgatccaattgaaagagaatgtaaattatttgaaagagaagaaaaaggacattgttacaaggagaactcgggaatctctacgaagggtcgtttcttctacccaaactcagtattcattcgcgggatttcgacatagaaatgaatctga

SEQ ID NO: 98039 - DNA, 635 bp, Arabidopsis thaliana columbia
  unsure (1)..(635): unsure at all n locations
ctttctttgagtcggcttcacttctcttgcatccttcaaactcatccacagcaaggaatggcgacagcagcagcaccagcagtgatttcatggacaagatcaggcattgtgtccaaatccggacaaacccagaagaaatctgagatgaaagtttcttacataactggacttaactcatatggtggtctcaaggcacagaacaacaaggttgtctcaatgggatcaccactctgcacagaacagtgttttgctaacgttgtgatgtctctcaaaggaagaagaggtaatggaggagccttatccaccacgtgtaacgctgtcggagagattttcaagattgcagcaatcatgaacgctcttactcttgttggtgttgcagttggattcgttcttcttcgaatcgaaacttctgttgaagaagctgaagcagagtaaatagagtaaattgctgctcttataattatatatttttggttattgttgttgtcaagctttggtaaaacttgatggatacatgttacatttgtttatgaagaagctcttttcttggtggatgaaaaaaaaaagggggcccctngggncccngtntggccgntnattgnnnnnnnnnnnnnnnnnnnnnnnnnnnnnnnnnn

SEQ ID NO: 98040 - DNA, 654 bp, Arabidopsis thaliana columbia
  unsure (1)..(654): unsure at all n locations
tacgactcacnatagggaaagctggtacgcctgcaggtaccggtccgcgatcccgggtcgacccacgcgtccgcccacgcgtccgcccacgcgtccgcggacgcgtgggcggccgcgggggccgcttttaacaactctcgtcgtcatctccaccgtccgttttctctcagctatattttaatggcgacaattcagaagcttgaagaagttgcaggcaaagatcaaactctaagagccgttgatctaaccatcatcaacggcgtcagaaacgtcgaaacttcaagacctttccaagtaaatcccacagtgagtctcgagcccaaggcggagccggtgatgccgtcgttttcaatgtctttagctccaccgtcttcgacaggaccaccattgaagagagcttcgactaaagaccgtcacacgaaggttgaaggaagagggagaaggatacggatgcctgccacgtgtgcggctaggatttttcaattaactcgagagttaggtcacaaatccgacggcgaaacgattcggtggttgttggagaacgctgagccggcgattattagccgccacgggtacgggaacggtttcccgccatcggccatgttcggtttaacgggaacctttaaaattcccgacggacggacggaacgttga

SEQ ID NO: 98041 - DNA, 644 bp, Arabidopsis thaliana columbia
cgcctgcaggtaccggtccggaattcccgggttgacccacgcgtccgtacggctgtgagaagacgccagaagggcacagaactttggctggagtatgagaacaatgcttctttagaagcaaatattgtaaaagacttcgataaggttgagatgattctccaggcgctagaatatgaagctgaacacgggaaagtgctcgacgagtttttcatatcaacagcaggcaagtttcaaacagaaattggaaaaagctgggctgctgagatcaacgctaggagaaaaagccaattgacaaacaggcagagatagtaaaatccagttgcatcataccttcaatcttcctcaactatcaacagtagaatctcggaaactaagcagactcctcatgaaccaaaaggtacaagcttctagtgaaattttcagttttgtagttcaacgaacacaaagtccttgtttttttaacttccccttttggttactagttgaagtagaaaatgctttttttttgagaaaagtgatcaaagtttcttatgaaaatctgaagttcgaggttcctaatatgattaggttgtagtccccaaaaaaaaaaaaagggattaacccacccagcgaccgctctagaggatccaagcttacgtacgcgt

SEQ ID NO: 98042 - DNA, 602 bp, Arabidopsis thaliana columbia
  unsure (1)..(602): unsure at all n locations
nnnnnnnnnnnnnnnnnnnnnnnnnnnnnnnnnnnnnnnnnnnnnnnnnnnnnnnnnnnnnnnnnnnnnnnnnnnccacgcgtccgcccacgcgtccgaaagcaatctgggttgtctgattatttccaatgacttccttctctgtctgattcgtttgtttcggcgattcaactcttcttcaacgccctgagagtcacgcacgagaattggattgatggtttttcacacgcaggagaggcgattcgttgtcttcttcttgtcccgttgacctgtttcgatctcagatggtgattatgcagcagctgattctaaattagggcatttaaatccgccttccaggtgaatttttgaaaagtaattaaagggtgttcttgaatggacttgaaaatggataatgttattgggggaaagtttaaacttggtcggaagatcggtggtggctcttttggagaactttttcttgccgtaagtttgcaaaccggagaggaagcagctgttaagctggagcctgcgaaaacttatgcatccccaacttcattatgagtcgaagatatacatgcttctacaaggaggaagtggcatccccagccttaagtgggttg

SEQ ID NO: 98043 - DNA, 620 bp, Arabidopsis thaliana columbia
cgcctgcagtgtaccggtccggaattcccgtttcgacccacgcgtccagcgcgctgcgagaagacgacagaaggatagagctgagcttgatgggatgtatgaatgtattctttgtgcttgttgtagcacatcttgtcctagttactggtggaatcctgagtcttaccttggtccagctgctttgctacacgccggctccgtggaggaggcgacagtcgtgatgagtacactaaggaaagacttgacgctattgacgacgaggtcaagctttaccgttgccatacaatcttgaattgtgctcgtgcctgtccaaagggtttgaacccaggaaaacagattactcacatcaagcaacttcagcgctgaaacagctaagttttgtgtgcgggactccgttgggaaactcatcagtcttaacgtttgaagctaataatcttcacaaaacctcttcggattttcaaatcattcttgtattgttgttgccaaatattagcgccttaaaaaaactcgtttgcaagtcttcccaagtagatgagctttgtggttgtatcttgctgaaaatctcctctttaagtaataaaactcgagtaaacttaaacctaaaaaaaaaaaaaaaaaaa

SEQ ID NO: 98044 - DNA, 482 bp, Arabidopsis thaliana columbia
  unsure (1)..(482): unsure at all n locations
gtccggaattcaagggtcgaccacgcgtccgcccaagcgtccgtacagaagacgacagaatgggactgtaagctcaagagatgctgagtacactgagctgcgatcggcgactgtctcttgtccgggatagtgaaagatgaagctgaaggttgtgtatcgtaaggtctccgattacatctgttacgatctgaaagaaatcgtcttaccttcatcacttcccgatcctcctcacgtcgttaaacgccgcaaattgacttggcacgagcgattcctcgtgttgaaggaagcttcaaggctttatgctgcaagctgggtaagagatataggtcctgaacttcgtccaaatgattacaagaagcaaggggatgctgagcctaaaaaacaagcgaaagaggcagagaacgagccctcttgttttggaagatctttgcgntanctgcaaagaggtggcaatggagactttaagggcctttcttttacat

SEQ ID NO: 98045 - DNA, 463 bp, Arabidopsis thaliana columbia
cactacatatatatatacgcacatacgtacacagttcgaaggttttagctgcgagtatgaggaaggaactgtgtagaaactttcagcgtggcagttgtaggtatggggaaaactgtagatttcttcatccacaacaagctaagccaaataatccctttggctttggtacacaaaaccaacaacaacaacagcagcagcagcaacaaaatagttcgaacccttttggatttggtgtacaaagtggtggttccagcagaccgaatcagttccagaatacttggtcacgaacggcttctacacctactggtggtggtgctgctgcttctacacagcagactggtaaacagacgcagccggcagatcataaatgcacagatcctgctgcgtgtaagcgggtaatgcaagacgattttaagaatgagagacccatgtggaagctcacatgctacggccactggaaata

SEQ ID NO: 98046 - DNA, 434 bp, Arabidopsis thaliana columbia
  unsure (1)..(434): unsure at all n locations
ctttttcgtccgaagacgacagaaggggggccgactcttactgacctcagagctcagcaaaaatggttcaacgtcttgtttaccgatcacgtcactcttacgccaccaagtccaaccaacaccgcatcgtcaaaactcctggtggaaaattgacttaccagacgacgaacaagagagctagtggacctaagtgccctgttactggcaagagaatccaagggattccgcatttgagacctgctgagtacaaaaggtcaaggttggcaaggaacgagaggacagtgaatcgtgcatatggtggtgttctatctggagttgctgttagggagaggatcgtcagggccttcttggttgaagaacagaagattgtgaagaaggttttgaagcttcagaaggcganagagaagactgcacaaagagttagagaaaacttt

SEQ ID NO: 98047 - DNA, 508 bp, Arabidopsis thaliana columbia
cgactcacttttagggggactaccacgcctgcaggtaccggtccggaattcccggttcgacccacgcgtgcgcggccgcgtgggtgcgagaagacgacagaaggggaagaacattggaccggtggttccatcgaagttcttggataaccggttgccagatgacaaagattacgaactcgagaactccaagacagagccagacgagtctggtttgatggggttgggaaacaggccggcgaagtcggtggtttacgtggcgtttgggacattggtggctttgagcgaaaaacagatgaaggaaattgcaatggcgattagccaaaccggatatcacttcttgtggtctgttagagaatccgagagaagcaaactaccctctggttttatcgaagaggcagaggagaaagactctggacttgtggctaagtgggttcctcagctagaggttttagcacatgaatcaatcgggtgtttcgcgtcacactgtggatgggactcgacattggag

SEQ ID NO: 98048 - DNA, 1198 bp, Arabidopsis thaliana columbia
  unsure (1)..(1198): unsure at all n locations
cgcgtccgcgctgtcgtcggagtcatccatggcttctggaacctagatgaagatcgaaaggctctacgagttctccagccggatttggtgctcttcacaggcagcttctctgttactgacgtcaaattgatttccttttttttttgaatttctccatttctcttcacactacctctaatgattttaattaaagttagaacatttgaatccaattccaaattctgtcaggtgattttggtgaagaaaacgtcccactggttcaaagtgttgccgctcttactttccctaaagcagtcatattggggaatcatgatgcctggttcacccaagattttccaaggaaagaaaaacaaaaacaaaacggtgttcaaatgcaactcgatatccttggtgacgggcacatagggttatcaacgcatggacttcccatcttttaagctcagtattgttggggggtcgacccttttcacatgggggggatcgattgtttcggaaaaatctgcttgtccagaggtatggagttcatgatatggaagccagtgctgggagtatttgtcgagctgcacatggaacaccggaagatcacgtggctataattctngctcacaatgggccaacaggtcttggttggcaagcagaggatatatgtggaaaagactggggggctgaaggcggtgaccatggtgatccagatctagagcaggcgatacgacagttgaaggagacgactaagttgtcgattcctttagttgtgtttgggcacatgcataaggagctgcaacgggggaaaggaaatcggaaaatggtagtgcaagatagtgacaaccagactgtgtatgtgaacggtgcaatagttccaagggttaaagaggcaaagaaaagaggagcagcagagtctgagagtggtggcacaacaagagctttcacattggtggagattttagatgggaaaatcaagaaaatagcagaaatttgggtacatgtaaatggaagtatggctaagattgtggaggaaaatactttgtttgaagatgtaacctgatttgaaatttaaacaattaattcgggacaagactgtaataactaattatacatttgtcttggcgaacaagtcccttttagaaaaaaaaaaaaaaaaagggcggccgctctagaggatccaagcttacgtacgcgtgcatgcgagcgtcatagcttc

SEQ ID NO: 98049 - DNA, 338 bp, Arabidopsis thaliana columbia
ggttctaggtggattcttaagaaaaagaaggaaacgaaaacagaggaataacaatggcagggagaataagctgctgtctaaatcttcctcccctagattcaaattctgcacaatcattagcttcactgctcaagacaacgtcaaagatctcttgtaggagaacagaaaatgagacagagccacggaaaaacaagtgttcttttgtcttgggggtggcggcaactgtcgtaatcggcgggattcagatcaatgatgttgcatcagtggaagctgcggttgtgaaatcgccggtagaagagatggctgcgggtgtggtgccgccgcggaggtggagtgac

SEQ ID NO: 98050 - DNA, 911 bp, Arabidopsis thaliana columbia
  unsure (1)..(911): unsure at all n locations
cttcctttagctcggtcgtattggtggaatgtacggatacaattacacagaacactatgccatgatcgcaagctctatcgctctctatagaaagctggacgcctcaggtccggtccggaatcccgggtcgacccacgcgtccgcaagagttcagcaaccacaagtgtatccatctacatcttcttctacttcatcatctttctcgccttcatcctccggttcaagtggctcgtttggtacagcattcataggtctagccgcaattcttgttctggcagcactggcttgtgtgtttggaagactatgcaaccgcggtggaaagcaacccaaagacaaaaacaacaacaaagcttcgaagcatgagaaaccatcgtcaaagaagagccgtgagattagacctgtggagcgtgaaccaagagaaagaggtgatgtggagtttggtttcgatatgaagcggcctggtcctatgagcaaacccactggtcgaaacggaggggacatagaatttgggtttgataacaagagaggagaaggtggtggtggaggaggtggaggaaaaggagggaaaagaccacctccggttatatattaaccatgtgtaaggtgacctcagacacggaggtttccgacttcaagctccggtcagaacattgtcttaataagacaagagaattcatcaatgcttgttcactttatcttattcttgcttgtttgtttttggtcttgttttgggtcgtttggttttgtttcatatgggtatgaaacttaggtatcaaatatatatgaaagcaagaaaaaaaatatgagataacaagtaacaaaaaaaaaaaaaaaaagnnnnnnnnnnnnnnnnnnnnnnnnnnnnnnnnnnnnnnnnnnnnnnnnnnnnnnnnnnnnnnnnnntgtcctaa

SEQ ID NO: 98051 - DNA, 808 bp, Arabidopsis thaliana columbia
  unsure (1)..(808): unsure at all n locations
nnnnnnnnnnnnnnnnnnnnnnnnnnnnnnnnnnnnnnnnnnnnnnnnnnnnnnnnnnnnnnnnnnnnnnnnnnnnnccacgcgtccgtacggctgcgagaagacgacagaagggggtcgtgcgatacagttctgggtttgctgaagaagactctggaaaaaagttcatccatcacaattgattcgtgttcttggaacgaatctatcgattcaaacacatgaaacattcggtgaatcggcctccgacaccagatgaagacgatgtggcggatggtttcgagaaagacaaggtcacgcttcgagaaatcatcaacgtcaagttggtggagagtggagagaaggagaatctaatggagcttgtgagagatagattggtggagtgtggttggaaagatgagatgagaattgcttgcagggagcatgtaaagaagaaagggagaaaagatgttacagtcgatgaactgatccgagtgatcactcctaaaggcagagcttcagtaccagattctgtgaaggcagagctgttgaacagaattcaaaacttcattgtatcagctgctctttgatggtgttttgacaattttactacgaacatggtgtcgttgtctctatgttgtggtttttagttgtatccaaactcctaccagatagcagccaaattttttttatcaaatgtatcatctttgctgttgtagaaatataaaaaaaaaaaaaannnnnnnnnnnnnnnnnnnnnnnnnnnnnnnnnnnnnnnnnnnnnnnnnnnnnnnnnnnnnnnnnnnnnnnnnnnnnnnnnnnnnnnnnnnnn

SEQ ID NO: 98052 - DNA, 500 bp, Arabidopsis thaliana columbia
gcttattcgattttcttcagatttgaaatggtgtcgttcaaggtctctctcgtctctacttcgcctattgatggccagaaacctgcgacttctggactccgtaagaaggtgaaagtgtttaagcaaccaaattaccttgaaaattttgtccaggcaacgttcaatgctcttactacagagaaagttaaaggtgcgacacttgtggtttctggtgatggtcgttattattcagagcaagctattcagattatagtaaagatggcagcagctaatggtgttagacgtgtgtgggttggtcaaaacagtctgctatcaactcctgcagtatcagctattattcgtgaaagagtaggggctgatggatctaaagccacaggagcatttatcttaacagcaagtcataatcctggtggcccaactgaggatttcggaattaagtacaatatggaaaatggtggaccagctcctgaatcaatcactgataagatttacgagaacac

SEQ ID NO: 98053 - DNA, 793 bp, Arabidopsis thaliana columbia
  unsure (1)..(793): unsure at all n locations
cgcctgcaggtaccggtccggaattcccgggttgacccacgcgtccgtacggttgtgagaagacgacagaagggatcgctgtggagccatggaatgcaggaaactatgttcaattatccaacatatactctgttggtggcagatgggacgaagctgctgaagtaagggacatgatgaacaagaaaggtatgaagaagatcccgggatatagttggatcgagttggaagggaaggtccatgagtttctagcagatgataaatcttatcctctaagcgacaagatatatgcaaagctagaagatttgggtaatgaaatgaggcttatgggttttgttccaacgacagaatttgttttcttcgatgttgaagaggaagaaaaagaaagggtcttggggtatcacagcgagaagcttgcggttgcgttagggctgatcagtacggatcatggccaagtgattcgggtggtgaagaatctaagggtatgtggagattgtcatgaagtgatgaagttgatatcgaagatcacaagacgagagatcgttgttagagacaacaataggtttcattgttttacaaacggctcttgttcttgcaatgactactggtgagctcgctatggtaaaacaaactgatgtgaaaacgtaattgttttgtagctttgacacctccggaagaaataaacatatttttggtgttaaaaaaaaaaaaaaagnnnnnnnnnnnnnnnnnnnnnnnnnnnnnnnnnnnnnnnnnnnnnnnnnnnnnnnnnnnnnnnnnnnnnnnaagttaatcg

SEQ ID NO: 98054 - DNA, 474 bp, Arabidopsis thaliana columbia
  unsure (1)..(474): unsure at all n locations
gaaagaagaaagaagaagaataaaagacaaggcttgaacgtccggtgaaagaaagaattcagctttccgcactaaccacttctgaatcctaaccaacaagcttctccatttcgtttttcgcgtctcgattccaaattccacttaagacggcggattttctcaccgggaaattggttttagatggataggactgaggaaatcgaagaatcccccgccggaccttcttccggatccgcgaaattgaagctcggaaacagagcagatcctttccttgttgtttgtagatgcttcagcctcgttacctctctcatcgccattctctgtgttgtcgttaacgttctcgctgccgttcgctccttccgtgacagccacgatctcttcgatggaatattccggtgttatgctgtggtgattgcttgttttgttgttctcgttgagactgaatgggggttaatttccaaaattttncaaggg

SEQ ID NO: 98055 - DNA, 440 bp, Arabidopsis thaliana columbia
agagagtagtagcttatgggagttggagaaaagaacctattgtccaagaaaacgagattcatcgtcagatgtcaaaaaccgattccttacactaacacttgcacctgaagatgtcaaggatggtaatttgcatcttccttgtcaattcatgagaattaatggcatcaacaagcctgggcagataactttgttgggtagaggcggtatgaagtggtttgcatatttactgtcaggagatggaactgccgttgtgggaaatggttggaaaggtttttgtgaggcgaatggtgtgatgttaggagagacttttgttttggaattcattcccaaagatgatacaaatcatgtagttaagttctacaccaagtaggggggaccaaatacgtaaatgttagttagcactttttcaagatttctcaaatgttttctccggatatcaa

SEQ ID NO: 98056 - DNA, 813 bp, Arabidopsis thaliana columbia
  unsure (1)..(813): unsure at all n locations
nnnnnnnnnnnnnnnnnnnnnnnnnnnnnnnnnnnnnnnnnnnnnnnnnnnnnnnnnnnnnnnnnnnnnnnnnntcgccacgcgtccgtagagaagaccgacagaaggggttcttcagttggggaagaggattctgcggcggccctgatgttcatgcccctcagagcttgccttcacctctatctttcagagaagttgctgtaggatggaatcatgctttactactgaccgtcgatggtgaggtgttcaagcttggtagcactcttaataaacaacctgagaagcaacaactgcaaatagattcctctgaagctctctttgagaaagttccggattttgatggagttaaagttatgcagatagcagcaggagcagagcattctgctgccgtaacagagaatggagaagttaagacatggggatggggagaacatggtcagctaggccttggaaataccaatgaccaaaccagtcctgaattggtgagcttaggaagtatagacctgcgaacgaaagagatcaaagtatattgcggaagtggatttacttatgcagtaaaacgaaaacaagagctttcaccaacctcgtcatagccatcttaatgtgtaaaattgtacaatgcaataagccaattgtttacatgcctcttgtgactcttgtcagaggaccacagtggtcgtatagtacaatatacagatcattcttaaaaaaaaaaaaaaaaaaaaaaaaaaagcgccgctctaaggatccagcttacgtnnnnnnnnnnnnnnnnnnnnnnnnnnnnnnnnnnnnnnnnnnnnnnnnnnnnnn

SEQ ID NO: 98057 - DNA, 1088 bp, Arabidopsis thaliana columbia
  unsure (1)..(1088): unsure at all n locations
gttttctagggcaatctcggccacttttacttacagaaaaccttctctctaaacttcttcgaaaatctcacagagcttcttcttcttcgcttttagggtttttgctctattgtttcgagtgacccaacttcgaagcttatagatcgttaccttagaaaatggtgggtatgtcgatgcagccatatggtattcaatcgatgcttaaagaaggttacaggcatctctctggtctcgacgaagccgtcattaagaacattgaagcttgcaaggagctctccaccattactcgcacctctctcggtcccaatggaatgaataaaatggttatcaatcatttggacaaactgtttgtcacaaatgacgctgctactatagtgaatgagctcgagattcagcacccggctgctaaacttctggttttagctgctaaggctcagcaagaagaaatcggagatggagctaatctgacaatctcctttgctggtgaacttcttcaaaacgctgaggagcttatcaggatgggacttcatccgagtgagatcattagtggatatactaaagctgtcagcaaggctgttgaaatactggaacaactggttgagactggttctgagaccatggatgtacgtaacaaggatgaagttatttctcggatgagagcagctgttgcaagcaagcagtttgggcaagaggaaataatttgctctttagttactgacgcatgtattcaagtctgcccaaagaatccaacgaatttcaatgtggataatgttcgtgtttccaagcttttgggaggaggcttgcacaattcttgcatagtccgtggtatggtcttgaaaagtgatgctgttggtagcattaagcgaatggagaaagcgaaggttgctgtatttgctggtggcgttgataccactgcaacagagaccaaaggaactgtcctcattcatagtgctgagcagctagagaactatgcaaagacagaggaagctaaagttgaggagttgattaaagcagttgcggaattccaggggccaaagtcctttttagtggggggtccatttggggaaaantggnnttcctttttttnt

SEQ ID NO: 98058 - DNA, 845 bp, Arabidopsis thaliana columbia
tccgggtcgacccacagccttccatcgattcaatggtggatgggattcattaaccaggagaggaccatttcttaaaacttaccattgatcattttaaggggtttcttgccaatttttttcttggcaggattgaccccggggcccttaaccttatttgggccgtggccgagcttggttaaaaccccaaactggttaaaaaaggttcagggcaatatccaaaaccacctggccaccattaaggaaagattcaccgaggagaatatggaaaaggttccttccttgaggatggtattaaaagaaccattcaggttccacccagcagctccttttatacttccaaggaaaacattggctcacatcaaagtccaaggggtatgatattcctcccaagaggcgggatcttggtcaatgtttcggctatcggaagagatcccaaactctggacaaacccggaagagtttgaccctgagaggtttatggatagctctgttgattataggggacaacattccgagctcttaccatttgggtccggtcgaaggatatgtcccgggatgccaatggggattgctgccgtcgaattgggactcttgaacttactttacttcttcgattggaagttgcctgatgggatgacacataaagatattgatactgaagaagctggtactcttacaatcgtcaagaaagtacctctccagctcgttccagttcgagttcagtgatcagaccaaactccaaacggtttggaccaaaccttttgaataaatatatcatgcaaatcatgtaagcttctctgatgatgtatgaagtatatttttctgtaaaatactaaattgaacgtt

SEQ ID NO: 98059 - DNA, 934 bp, Arabidopsis thaliana columbia
  unsure (1)..(934): unsure at all n locations
gcctgcggtaccggnccggaattcccgggttacccacgcgngcgaacgcctgcgagaagacgacagaagggagacacaggggccatcaccatgatatgggcagngacggagctcgttaaaaacccgaaactgttaaagaaagttcaaggcgatatccgagaacaacttggcagcaataaggagagaatcaccgtttaaatatcgagagagnnccttacttgaagaatggaatcaaagaaacattcacgttacacccagcagttcctcttatacttccaagggaaacaatggctcacatcaaggttcaaggctatgatattcctcccaagaggcggatcttggtcaacgcttcggcgataggaagagatcccaaactctggactaacccggaagagtttgaccccgagaggtttatcgatagccctgtggattataggggacaacatttcgagctcttaccgtttgggtccggacgaaggatatgtcccgggatatcgatgggtatggctactgtagaattgggactcttgaacttactttacttcttcgactggaagttgcctgatgggatgacacataaagatatcgatactgaagaagttggcactcttacaatcgtcaagaaagtaccactaaaacttcttccagttcgatttcagtgatcaaaccaaactccaaactttgaagatgttttgaataaaaatactatgcaaagtatgtaaccctagcttctctaatgtatgtgaagtacgttttccagtaaaatactaagttaaaatttcatatctttactaaaacatgtactgtgtttcctgtgtttcatatctttggaaaataattataaataaatttttctagacaaaaaaaaaaaaaaaagggcggccgctctagaggatccaagcttacgtacgcgtgcatgcgacgtcatagctct

SEQ ID NO: 98060 - DNA, 855 bp, Arabidopsis thaliana columbia
aagatagttccttagagctcacaatagatcatattaaggggtttttcgcgaatatatttctcggagggatagacaccggagctcttactatgatatgggcaatgacggagctcgctagaaacccggaagtgatgaagaaagttcaaggcgagatccgagaccgccttggcagaaataaagagagaatcaccgaagaagatatcaataaagttccttacttgaacctagtgatcaaggaaacattcagattacaccatccagttcctcttcttctcccaagggaaacaatggctcacatcaaggttcaaggctatgatattcctcccaagagacggatcttggtcaacgcttgggcgataggaagagatcccaaactctggacaaacccggaagagtttgaccctgagaggtttatcgatagccctgtggattataggggacaacatttcgagctcttaccgtttgggtctggacgaaggatatgtcccgggatatcgatggggatggctactgtagaattgggactcttgaacttactttacttcttcgactggaagttgcctgatgggatgacacataaagatatcgatactgaagaagttggcactcttacaatcgccaagaaagtaccactaaaacttcttccagttcgatttcagtggtcaaaccaaactccaaactttgaagatgttttgaataaaaatactatgcaaagtatgtaaccctagcttctctaatgtatgtgaagtacgttttccagtaaaatactagttaaaactttcaaaactttaaaaaaaaaaaaaaagggcggccgctctaaaggatcccagcttacgtaagcgtgcacatgaagtg

SEQ ID NO: 98061 - DNA, 1894 bp, Arabidopsis thaliana columbia
  unsure (1)..(1894): unsure at all n locations
tacggctgcgagaagacgacagaagggggcagcaaaacaaacaatcatggcggagaaactcagtgatggcagcatcatcatctcagtccatcctagaccctccaagggtttctcctcgaagcttctcgatcttctcgagagacttgttgtcaagctcatgcacgatgcttctctccctctccactacctctcaggcaacttcgctcccatccgtgatgaaactcctcccgtcaaggatctccccgtccatggatttcttcccgaatgcttgaatggtgaatttgtgagggttggtccaaaccccaagtttgatgctgtcgctggatatcactggtttgatggagatgggatgattcatggggtacgcatcaaagatgggaaagctacttatgtttctcgatatgttaagacatcacgtcttaagcaggaagagttcttcggagctgccaaattcatgaagattggtgaccttaaggggtttttcggattgctaatggtcaatatccaacagctgagaacgaagctcaaaatattggacaacacttatggaaatggaactgccaatacagcactcgtatatcaccatggaaaacttctagcattacaggaggcagataagccgtacgtcatcaaagttttggaagatggagacctgcaaactcttggtataatagattatgacaagagattgacccactccttcactgctcacccaaaagttgacccggttacgggtgaaatgtttacattcggctattcgcatacgccaccttatctcacatacagagttatctcgaaagatggcattatgcatgacccagtcccaattactatatcagagcctatcatgatgcatgattttgctattactgagacttatgcaatcttcatggatcttcctatgcacttcaggccaaaggaaatggtgaaagagaagaaaatgatatactcatttgatcccacaaaaaaggctcgttttggtgttcttccgcgctatgccaaggatgaacttatgattagatggtttgagcttcccaactgctttattttccacaacgccaatgcttgggaagaagaggatgaagtcgtcctcatcacttgtcgtcttgagaatccagatcttgacatggtcagtgggaaagtgaaagaaaaactcgaaaattttggcaacgaactgtacgaaatgagattcaacatgaaaacgggctcagcttctcaaaaaaaactatccgcatctgcggttgatttccccagaatcaatgagtgctacaccggaaagaaacagagatacgtatatggaacaattctggacagtatcgcaaaggttaccggaatcatcaagtttgatctgcatgcagaagctgagacagggaaaagaatgctggaagtaggaggtaatatcaaaggaatatatgacctgggagaaggcagatatggttcagaggctatctatgttccgcgtgagacagcagaagaagacgacggttacttgatattctttgttcatgatgaaaacacagggaaatcatgcgtgactgtgatagacgcaaaaacaatgtcggctgaaccggtggcagtggtggagctgccgcacagggtcccatatggcttccatgccttgtttgttacagaggaacaactccaggaacaaactcttatataagccaagctgtgtgcatatacacataatacttctgagtcagagatgtgaaactcggtgatactgaattactgatattaccattacacacatattatggcgttatgtattcataatactgcctggtttctctttacatataattacatttcatcctccaataaaaaaaaaaaaaaaaaactcgagnnnnnnnnnnnnnnnnnnnnnnnnnnnnnnnnnnnnnnnnnnnnnnnn

SEQ ID NO: 98062 - DNA, 456 bp, Arabidopsis thaliana columbia
caaagtcctttcgtacttatcaaagctttattagtctctttgttttcttgcttctacattacagaaattaaatggcttcttttgtgatgggatacttcttattgttcgctgttgctttcatgtgtttggatgcgagaacggacaaaacgcaagattatacgtcgtttcagtaccataaaggagctctcctcaccggagacgtttccatcaacctaatctggtacggtaagtttaaaccgtcgcagcgtgcaatcgtaaccgatttcgttgcttccctctcgtcttcccggagatcgaccatggctcaaaatccctcagtcgccacgtggtggaagacggtggagaagtattaccaattccgcaagatgaccacgacacgtggactcagtctctccctcggagaacagatcctcgaccaaggatactcaatgggaaaatctttaacagagaaaaacc

SEQ ID NO: 98063 - DNA, 596 bp, Arabidopsis thaliana columbia
cgcctgcaggtaccggtccggaattcccgggttgacccacgcgtccgtaccgctgcgagaagacgacagaagggggcttgttttgtgatgggatacttcttattgttcgctgttgctttcatgtgtttggatgcgagaacggacaaaacgcaagattatacgtcgtttcagtaccataaaggagctctcctcaccggagacgtttccatcaacctaatctggtacggtaagtttaaaccgtcgcagcgtgcaatcgtaaccgatttcgttgcttccctctcgtcttcccggagatcgaccatggctcaaaatccctcactcgccacgtggtggaagacggtggagaagtattaccaattccgcaagatgaccacgacacgtggactcagtctctccctcggagaacagatcctcgaccaaggatactcaatgggaaaatctttaacagagaaaaaacctcaaagacttggccgcaaagggtggccaaagctacgcggttaaggtcgtgttgacctcagctgacgtgacggtccaaggcttttgcatgaacagatgcgggtcacacgggactggttccgggtcaggcaagataggat

SEQ ID NO: 98064 - DNA, 815 bp, Arabidopsis thaliana columbia
  unsure (1)..(815): unsure at all n locations
cgcctgcaggtaccggtccggaattcccgggttgacccacgcgtccgcccacgcgtccgtacggctgcgagaagacgacagaaggggatgtgggagaggagtaatgataatgaaaaaaacaactcaagcgtatcttcttctaagtttagttcatatacttctatgtctatcctttcagattcgtgctatacgccctcttctagctgagccgccaagtcaaatcctaaatccaccaccaccctcgcccgtatggccctctccaccatgtggaactaatatcgggagtcaagttacggcagtaggagagaattcttgcagacaaattccgaggcctcctaaaaccaaaaagaagaaaattccaaagcctcttaaaaccaaaaagaagaaaatctcaaagcctcatgcagcagttccgtgatctccaaacaagagtgtgtgggaaaggctttcacagataaaactaccacttagaatccttttttggaatacacttatcctttgaaaactcatcaagtattttattggattgtacaataaatccctcggtcttcaataaatatggttatcccctttaggaatcaatttttgactggttgggttccaatgctccaaaacctggtggaaacttgggccatcttcatcttttgnccaattggtatctaattttgtccttccatttcaaaaaaaaaaaaaaaaagggggggccgcntttggggtccnaggtttcggccggggatttggccggaangncttcntttggggcccctaatnaattnnttngcggngtttaaangggggctgggaaccnggggtnc

SEQ ID NO: 98065 - DNA, 452 bp, Arabidopsis thaliana columbia
  unsure (1)..(452): unsure at all n locations
tacgaacgaagaatggagagcgactccgagatggtagcgttgcctctgttaccgactccgatagaatcgaactacagggcttgcaccattccttatcgattcccttctgataatcctagaaaggctactcccactgagatctcctggatcgatctcttctccaattccatcccttctttcaaggaacgtgcagagagcgatacaaccgttccagatgctcctgttcgagctgaaaagtttgccaaaaggtatgcggagattcttgaggacctgaagaaagatccggagagccatggtggtccaccggattgcattcttctctgcagaattcgtgagctgatactaagagaattgggatttanggacatatttaagaaagttaaggatgangagaatgcaaaggcaatatcactatttcctgaagttgtccgtttgagtgatgctattaacga

SEQ ID NO: 98066 - DNA, 667 bp, Arabidopsis thaliana columbia
taggtgcactatagaagagctatgacgtcgcatgcacgcgtacgtaagctcggaattcggctcgagttcttcccaacacacacaaaaaaaaaaaactgtaacgaccaaaaaaaaagaggacgcgttagaagaaaaaaaaagaacaatccgataaaaagatccggcgatgtcaaacccgacccgtaagaatatggagaggattaaaggtccatggagtccagaagaagatgatctgttgcagaggcttgttcagaaacatggtccgaggaactggtctttgattagcaaatcaatccctggacgttccggcaaatcttgtcgtctccggtggtgtaaccagctatctccggaggtagagcaccgtgctttttcgcaggaagaagacgagacgattattcgagctcacgctcggtttggtaacaagtgggctacgatctctcgtcttctcaatggacgaaccgataacgctatcaagaatcattggaactcgacgctgaagcgaaaatgcagcgtcgaagggcaaaggtgtgattttggtggtaatggagggtatgatggtaatttaggagaagagcaaccgttgaaacgtacggcgagtggtggtggtggtgtctcgactgggcttgatatgagtcccggaagttcattcggatctgacgttagcgag

SEQ ID NO: 98067 - DNA, 877 bp, Arabidopsis thaliana columbia
  unsure (1)..(877): unsure at all n locations
atactgactcacgttatgggaaagcatcggtacgcctgcaggtaccggtccggaattcccgggtcgacccacgcgtccgaacaagtgggctacgatctctcgtcttctcaatggacgaaccgataacgctatcaagaatcattggaactcgacgctgaagcgaaaatgcagcgtcgaagggctaaagttgtgatatttggtggtaattggagggtatcgatggtaattctatgagaagagcaaccgttgaaacgtacagcgagtggtggtggtggtgtctcgactggcttgtatatgagtcccggaagtccatcggtatctgacgtcagcgagcaatctagtggtggtgcacacgtgtttaaaccaacggttagatctgaggatacagcgtcatcgtctggtgaagatcctcaactatcttagttagtctcttacttggactgacgagacggatcgagtcaacgagacggatcaacttaaccagaatacggttatggacggtgttatactgtggtgctgtttccgttcgatggaagagcagtagatgtggatattacgacctacatggatatctggtgattcgtggtgagtcatgacggtggttcggagatgatanggacggaggtgacgagtacatggaggattacagtaggacactctgtggtcgtagtctgcgacgacgtggggttcatgatgcacacatgtaacagncgtcggtaaggttagacagttatagtgcacaattcgcattgggagagtgggacaggatagaccagtctcctctgatcttggaataaatttaagctttatgttaagacagaaagaacacttaggtgagcgaatttaagtggggctatcatatagactcttgggtgat

SEQ ID NO: 98068 - DNA, 490 bp, Arabidopsis thaliana columbia
  unsure (1)..(490): unsure at all n locations
cannnnnnnnnnnnnnnnnnnnnnnnnnnnnnnnnnnnnnnnnnnnnnnnnnnnnnnnnnnnnnnnnnnccacgcgtccgcgctcccacgctctctcctcttcctcggatcttccatcttctctctaacagcaaatgactcagtcgtaaccttctacactttctctctctccaatttttcacattttatttttggcttccgagctatgaccccagtgcgtctgcttcgtctcgaccgctgatcggaataaaaccaccgccgagtttcctaggtctatgtgtattgtaatatcctccggaaatggcagctttcctcgtcatgtttatcttcacgatcgctctgttcgtcgcactcctttgggttttcttcaagtctctcccttggattctccggcatagtgctggaataactctcagttttcagtttgatggaatggaactgcttgaaggatgttgcattgcaattcaagaggggtctattggatctatag

SEQ ID NO: 98069 - DNA, 1858 bp, Arabidopsis thaliana columbia
gaacaaagagggtttgattgattcacttgaaaaagagaaaacacagctttggaaaatggagtcacagttgacacgtccttatggtcatgagcaagcagaagaaccaatcagaattcaccatccagaagaagaagagcatcatgagaagggagcatccaaagtgttgaagaaagtaaaagaaaaggctaagaaaatcaagaacagtctcactaaacatggaaatggtcatgatcacgatgtggaagatgatgatgatgagtatgacgagcaagacccagaagttcacggcgcaccagtgtatgaatcctctgccgtgagaggtggtgtaacgggtaaacctaagtctcttagtcatgccggagaaactaatgttccggcatcggaggagattgttcctccagggacaaaagtttttcctgtcgtgtcttctgaccacaccaaacccattgagcctgtatcattacaagatacctcttacggacatgaggcactggctgatcctgtaagaacgacggaaacatcggactgggaagcgaaaagagaggcaccgactcattatcctctcggagtgtcagaattttcagacagaggagagagcagagaggctcatcaagagccattgaacactcctgtgtctctgctttcagcaacagaggacgtgactaggacgtttgctcctggtggtgaagatgactatctcggtggtcaacggaaagtcaacgtcgagacgccaaaacgtttggaggaagatccggctgctccaggaggaggatcggattatctcagtggtgtatctaattatcagtccaaagttactgatcccacgcataaagaagctggagtaccagagattgctgagtctcttggtagaatgaaagtgactgatgagtctcctgatcagaaatcaagacaaggacgcgaagaagactttccgacgagaagccatgagtttgatctgaagaaggaatctgatatcaacaagaattctccggcaagatttggaggggaatcaaaagctgggatggaggaagattttccgacaagaggtgatgtgaaagtagagagtggattgggaagagacttaccgacgggaactcatgatcagttctcaccagaactatctcgtcccaaagagagagatgattctgaggaaaccaaagatgagtcgacacatgagacaaaaccaagcacctacacagagcagttagcttcagctacatcagccataactaacaaagctatagccgcaaagaacgtcgttgcctcaaagctaggttacaccggagagaatggcggcgggcaaagcgagagccctgtaaaagatgaaactccgagatctgttactgcttacgggcagaaagtggcgggaactgttgctgagaagttgactccggtttacgaaaaagtcaaagaaacaggatcaacggtgatgacaaagctacctctctccggaggtggaagtggagtgaaggagacgcaacaaggggaagagaaaggtgtgacggctaaaaattatatatcagagaagctgaaacctggagaagaggacaaagctttatcggaaatgatagctgagaaacttcattttggaggaggaggagagaagaagacaacggctacaaaggaggtggaagtgacggttgagaagataccttccgaccagatagcggaggggaaaggacatggtgaggcggttgcagaggaaggaaaaggtggagaaggaatggtggggaaagttaaaggagcggtcacttcttggctcggtggtaaaccgaagtcgccacggtccgttgaagagtctccacaatcacttggcaccaccgttggtaaaactccctcgtccttgtgttacacgtaa

SEQ ID NO: 98070 - DNA, 1967 bp, Arabidopsis thaliana columbia
acacccacgcgtccgactggcgcctgatttacggttaaaacgcctcttccctctctccgacgcttctcgtcggaaatctgggtttaagtttcttctgcagatcggaagagattctattgaagcggcgttgacacgatttcatctataattgtacgataatgaagcagaagaaccagcataagaagaagaagaagcgatcctgcgccgcgaaaccttccggtgatggaacgacgtcggacgggaacaaaaaagatgtggaggaagagaggaaggacggtgaaggaaagagggagatagaaaacgttggaaaaaattttatcgaatcgttaatggaagccttttgctcggtttcaatggaggaagcgatggctgcttataaggaagcaggcggagatctgaacaaagccgctgagattttatcggatctggtggaaagcggtgatgatccgtcgacgagttcggtggcgagtggttcttcgggtcaggaaacagcgtctacctctgagtatggggcagggtcaagttctagctgtagcgaagatttgactagagatagatggtttaagggaagcaagcagagtagagttattgctgctacagggatggtttcttctgtgattgcgaaggattacttgaagccaaaccctgtgcgaaaagagtttcctatgatggaacggtctaaagagctctgtgggaacgggaaaaaagctgcggatagagagaaagctgaacagttcttaagttcaatgcttggagatgattgcgagcttagcatggctgttgttagagatgttttgtgtcaatgtggctatgatgtcgacatggctttgaatgtcttgcttgacatgtcttcttcatcaactgatgattcattgagtggtaaatgtttcggcataggagtcagcgatagtctggcagagtcatcttttgatactgatacttctgattgtgaacttttctggggtggagactatagtcaaagggactacgcaaaagctctcatgagttctcaagatccttttgcaactacccaaggaattgatgagcttggtcttccacaaaaagtgttggagtctctgttcaacattcgccagaatcctaaacatgaatcaaagacaacgagttggaggaatgtggcaaagaaaatgcagtcacttggcattgatgcttcttcatctagtggggaagagcctcaccctaatacgtttgtgaaggatgacagttatcatgaacttagaaaaggtgcaaatgaccagtggaatgttacgaagtcctactatcaaaaagctgccgaagcatattcgaaaggagggagggctcatgcggcttacctttctgacaagggaagagtggcatctaaacaagctcaacgggctgatgagagggcaagccaagatatattcgttgcaagaaacaaaggtatagagaatgtggtaaccattgatctgcatggtcagcatgttaaaccagcaatgaagctactgaagctacatctcttatttggatcatatgttccttccattcagactctacgagtgatcacaggatgtggagcttctgggtttgggaagtctaaggtgaaacaatcagtggtaaagctgctagaaagagaaggagttaggtattgtgaagagaacagagggacactgctgatcaagcttgacggaggtagtagagagttcagtttcttagacacagagagtgactctgatgaataagtgataactaaaactaaagtcaggttttagctttagatcttaaaatttatgtcgattttgtctatatctgatgctagctctctgttgttaagtaaatgttgggcaaaacttagcttccttctttttcctttccgtatttcacgttatttaagttctgaaaacactttgtctgacacagacagaatgtatatttttcgctaactcttctttaggagtttactgatatatatattatcgtgtaacttctat

SEQ ID NO: 98071 - DNA, 947 bp, Arabidopsis thaliana columbia
  unsure (1)..(947): unsure at all n locations
taatacgactcctatagggaaagctggtacgcctgcaggtaccggtccggaattcccgtgtcgacccacgcgtccgtacggctgcgagaagacgacagaagggggccggaaaaaagaagtagaagacgacgacgatggcgggatttgagagctatgtggttgttcacaacatagcaaagcgtcacaacgtcggaactttagctcgtagcgccactgcctttggtgtgacggagctaatcctcgtcggtcgccgtgatttcaacgccttcggtagtcatggttcagcttctcacatccgtttccgccattttcactctctcatcgaagctcgcaactatctcaaggaggagaaagattgcgatatatgcggcgttgagattgcagatggagcttctgcggttaatgaacatcctttcaaaagaaacactgcgtttcttctcggtaatgagggatcaggattatctgcgaaggaatacgaaatatgcgacttctttgtatatattcctcagtatggctgtggcgctgcctctttgaatgttactgtttgcagcttctattgttttgcatcactttggagtttgggctggattttctgaacgtgttcgggatggaagcaaatttatagtggctgatagacccgtaagacaaggaagacgaaatttctgcgccggcacagaagaatccgtcattgaagagcggaagttgaggaaagaaagtgcagaaaatgggtttttcgatgacaatggaaatgaaaatggaagttcatcatccgaccttttggacggtttgttccttaacgaataattatcttttataaaagaacaaagtcttgatttgggttccnnnnnnnnnnnnnnnnnnnnnnnnnnnnnnnnnnnnnnnnnnnnnnnnnnnnnnnnnnnnnnnnnnnnnnnnnnnnnnnnnnnnnnnnnnnnnnnnnnnnnnnn

SEQ ID NO: 98072 - DNA, 358 bp, Arabidopsis thaliana columbia
cccacgcgtccgcacaggcgtcagtacggctgcgagaggggagcagaagggggaaaactcatcaccatcgtcgcaataaatcatgtcccgatcaatccagttcaaacccatgtagtccccgagcatcgtttacggcatcacccagcaccaacacccatgactcacacattccatcagcacatttcatcaccgtcattgacatccagtctcagttcgatatctcacacctgagaatttcttgctttcgagtcatgaggcgaatgccacgcttaacgctactgagttcggtttgtccgtcgtcatcgaagcaggtgcagtttaccgggatatagttgagagtgcttactacgttgctcca

SEQ ID NO: 98073 - DNA, 240 bp, Arabidopsis thaliana columbia
ggaagcttagagaatcatttgttcagaagaggttcttattttcaacctttatcttggactctccggttgaaagttgctcttggtgcagcgaaaggtcttgcgtttcttcataacgccgagactagtgtcatataccgcgatttcaaaacgtcgaatatactgcttgattcggagtacaatgctaagctttctgatttcgggctagctaaagacggtccaacgggtgataaaagccatgtc

SEQ ID NO: 98074 - DNA, 726 bp, Arabidopsis thaliana columbia
cggacgcgtggggcaaaaaagtcttacgtcacactcccatgtagtagccgtcacttctcgtcttcctcctagagattacccaactctctcgcttcttctttttcctcttagggtttcttcatcctttagggtttccacaaaaattcaaaacctacttggaaatatttgggcttgaagaaggaagaattagatggaaggaagaaggattacggcaagccctagaccttgtagtggaagaagaattgtggctaagaaaaggtctcgacccgatggattcgtcaacagtgttaaaaagcttcaacgaagagaaatctcttctcgtaaagatcgagctttctctattagcaccgcccaagagagatttcgtaacatgcgtctcgtggagcaatatgatactcacgatcctaaagggcactgtttagttgcattaccgtttttgatgaagagaactaaagttattgagattgttgctgcaagggacattgtttttgcgcttgcacattctggtgtttgcgcagcttttagtagagagtcgaacaaaagaatatgctttttaaatgttagtccagatgaagtcatcaggagcttgttctacaacaagaacaatgattctctcatcacaagtttctgtttatgcttcagacaatttcagctctttgaaaggcagatccactagaattgagtatattctgaaaggtcaacccgatgcaggggttgctctttttg

SEQ ID NO: 98075 - DNA, 404 bp, Arabidopsis thaliana columbia
  unsure (1)..(404): unsure at all n locations
ggagttcaaaagaaagtaagttgaagtcaatgcaagaagctcttgaccaaagtagaaccgagatgaaggctaagttttctgctgcttccatgaagaggcaggattcgatatcaagtacccgccaacgtgcagagaagttcagatcttttaactctcggacaagttcgaaaaagtatcagcatcctataagctcattacagagtgaagaggaaaacgaaaaagataggctagtcagtggacaatccattggaaaaggtgcttctaagagctcccaagttagaaaggttccatccccaaacgggagctcacgagtctcataaccgtcaggtaaagtttcaaacacanacactaatacttctgggagaggacganaaacatcagagataaaactggttacacaatct

SEQ ID NO: 98076 - DNA, 811 bp, Arabidopsis thaliana columbia
  unsure (1)..(811): unsure at all n locations
nnnnnnnnnnnnnnnnnnnnnnnnnnnnnnnnnnnnnnnnnnnnnnnnnnnnnnnnnnnnnnnnnnnnnnnnnnnnnnnnnnnccacgcgtccgtacggctgcgagaagacgacagaaggggatcaaacaatcctggtggggaacaagcctctggattccataactggcttcagttttacttggaggaagccaaaggaactgtagattatcaaggctatatatttccccgacgtcgcggtgaaattcctgattcagagactcagctgctaacaatccaattcgagtggaacggtgttctaaaatcagtctcaagtactctagttggagtaagtccagagttcgagttggctctatacaccatgtgtttcttcatgggcacagaagataaccacattcagttgggtccatacaatgtcaatgtcaaatgttaccgacttggcaacaaccgtatcggctcagctttccccagtgcagaatcttgaaacctctcttgatggctctggtcacaaaatatctgccccttgcgcagtactgtattgaattattgtgattgtcagatctttctgtctacatgtgtagactagaaatatcttcatgtgatatttatgggaaaccatgtcttgtcctttctgaaaatgatacaacataagaagagatgtaagagaaaatatcttctaataatttttactttcaaaagaggtatttaatatgttttgggtaaaaaaaaaaaaaaaaaagcggccgctctagaggatccaagcttacgtacgcgtgcatgcgacgtcaagactcttctatagtgcgcctaaa

SEQ ID NO: 98077 - DNA, 765 bp, Arabidopsis thaliana columbia
  unsure (1)..(765): unsure at all n locations
ccaagcatctatacgactcactttagggaaagctggtacgcctgcaggtaccggtccggaattcccggttcgacccacgcgtccgcccacgcgtccgtacggcggcgagaagacgacagaagggtacggctgcgagaagacgacagaaggggtagccgagaaacaacggttggcgaagtcatctcttgctttcaattgtaaaagtgtaacattccggaaactatttcctgagtatgtcgagaagtacagccagcaacaagtagctgaagaagaagcagccactcaacagacaacaacatctgagaatcaggattttcctcagaaggacaatgcgaaagtcgaatcagagaaaagcgttggtcttaaaaaggaaagtattcaagaagtgggattgaaagagaggagaaggaacaagaaagaagcattaccgggttggatagtattgttgctagtatcgattgtcggtgttgtaatggcgttgcctttgcttcagctgtgatttagatgcaaatgcaacgcaacacaacatgactgcaaatcaatctggtaaaatctgtttatcattgcctctcagtctcagtactaagtagtgtcttttgttcttccccctctcttgaaaagaaaacagatacattgagtttggtatggcatttgaagttacgtatnnnnnnnnnnnnnnnnnnnnnnnnnnnnnnnnnnnnnnnnnnnnnnnnnnnnnnnnnnnnnnnnnnnnnnnnnnnnnnnnnnnnnnnnnnnnnnnnnnnn

SEQ ID NO: 98078 - DNA, 415 bp, Arabidopsis thaliana columbia
gataaccttcgtttttcaggagtttctttctatatttcttcatcgatttcgttcagtctttgagagaggttcgtcgacgtattatcgtcggaaataagctatgagaatctatttctcatagctccagtaatgtgaaatcgagacaacgcttgatcttcagaatctgctaatccatgggagattcaatcacattccggtagatttttttccagtttctggggaagtcaaaaatttccagggtttccgatttttgttttccttttccaaatgttctcgaatcagtttgttctcttcttctctcttctcctatgtctcccatttgttttcttctttgtagcgccacatgtgtttccttctcctcctggggaatctttaatcccaatctccgatgagattgatgaccggagtttattca

SEQ ID NO: 98079 - DNA, 410 bp, Arabidopsis thaliana columbia
gacttttcctttgcctctgcgtggcatccggatggagtcactttctctacaggaaaccaagataagacttgtcgtgtatgggacagtccgtaacctatctcagtctgttgctgtcttgaagggtaacctgggagcaatccggtcaatccgctacacatcagatggaaaatacatggccatggctgaaccggctgactttgtccatgtctatgatgtctcaaacgggtatgaaacagagcaggaaatcgacttctttggggaaatctctggaatatctttcagccctgacacagaggcgctatttattgggggatgggaccgcacttatggtagcctccttgaggttggtcggcgcaggaactaattcctaccttgactcgtatctttaagctagaagagaagtatacaca

SEQ ID NO: 98080 - DNA, 971 bp, Arabidopsis thaliana columbia
  unsure (1)..(971): unsure at all n locations
aatacgactcctttagggaaagccggtacgcctgcaggtaccggtccggaattcccgggtcgacccacgcgtccggaaatttggtatgggcaacttctaagcacgacgtgtatcttatgtcaaattttctggttacacattattcttctctaacgtctggaaagcatgaagttctcaatgtccgtggtcatgttgcgccatctgagaaacatcctggatgtttacttgaaggatttacgcagactcaagtaagtacacttgcagtaaaagatgactttctggttgctggcgggtttcaaggagaacttatttgcaagcatcttgatagaccgggtgtcagcttttgctctcgtatgacttatgatgataatgctataaccaatgctattgagatctacaacaaacccagtggtgcacttcattttactgcgtcaaataatgactgtggagttagagactttgacatggagagataccagcttgttaagcatttccgttttccttggccagtgaatcacgcatctttgagtcctgatggtaaattactggctattgttggagacaacccggagggccttattgtagaccccaacacaggaaagacgttggaaacactatcaggacacttggacctttcctttgcctctgcgtggcattcggatggagtcactttctctacaggaaaccaagataagacttgtcgtgtatgggacatccgtacctatctcagtctgttactgtcttgaagggtaacctgggagcaatccggtcaatccgtacacatcagaggaaaatacatggccatggctgaaccggtgactttgtccatggctattgatgtctcaaaacgggtattaaacagagcagggaatcgncttctttttgggggaaantnttggaataanctttanaggccttnacaaaaanaggnggtnntttttttgggggtattggggcccnnncntttttgg

SEQ ID NO: 98081 - DNA, 668 bp, Arabidopsis thaliana columbia
  unsure (1)..(668): unsure at all n locations
aatacgactcactttanggaaagctcgtacgcctgcaggtaccggtccggaattcccgggtcgacccacgcgtccgcttaggcatcccaatggaagagtattctccggtaatggactacggatgctgcattcaagcttggtgagcctggtacttgtctgttgtttccttaggcatcccaatggaagagtattctccggtaatggactacggaagacatcatcatcctcctgcaacatctgcagctctcatggagctaaccactcgtctggatttcttcaaggaacgacggtcacaacttatggaacagattcagattcttgacctcaactatggttcctcttcttcttctctgcaccgatcctcttctccaccatggaattaggctctttgagaagctcttgtccaaaaaaatagaaaaatgtaaagaaagtctcgtctgtgcagactcttcatgcttgtaaaaccggttcaaggttaaaccaactatatatttaccacgaaattgatgagaaattgtttgctcttgcttcgttgtcagtgtgatttatgtgagtgaggtttgtaaaagctgggggatttcctcggtttgtttctcattttaaagggtggccgactaaaattcagttattgaaataaaaacataaaaaaaaaaggggcggccgtttaa

SEQ ID NO: 98082 - DNA, 394 bp, Arabidopsis thaliana columbia
gttgagatcgttcattatgaccctaaagccattggggttgacgccaagaaggcttttctattcagaaacatgcatttctacgcagagccaagagccgctaaggacttattagggtgggagagtaaaacgaatctgcctgaagatctcaaggagagattcgaagagtatgtgaagattggcagagacaagaaagagattaagtttgagttagacgataagatactcgaagccctcaaaactccagtggccgcttgatcaaatacgccataaagtttgttcttcatttgtaacttcttatgctacactgtgctctttcatttcccacggctcatatgagatgaacatgatttcagctaaaagatcatttaaatattcataagcaacagcaggaaag

SEQ ID NO: 98083 - DNA, 1192 bp, Arabidopsis thaliana columbia
ccccatactcacactctgtgtaccatcataagcgcagactccaatttgtgagcatactttcttcggatcctcctgagctagaagagaattcaacatggtttttccgtattgatccaccacggccttgcattcacggcttacaattccttgtgctcctatcgcgtgattgatcatcgtgatgacagtcgatggaccggtgagcagagaagttccggaatcagcaatagcagaacaacctttagcacaatatccggttggtttgccagcaatttggagatcacccatgtcaaactgccagtaacctttatgtgtcacaggaacaaaagtatgctctcctttgaagtgcttcgggtcgactccaccgaaaacaatctcaccgccttctggatctttcgggttacggttaagccagaacgaaaaaatcggttccttaactaaacctttttctaccatgcttatacccaaaccggagttgagtttcctacagaaatctctttgaaacccaaaccgaggataccatcaaactttgctagcaagaatgttataccaggctcactagtagcctctatgaattcctgctctttcacaacaatatcaccaactttaacatcatcattgctaaagtaaccagaaatagcacccgtcccatagcggatagacgcgggttttccgttctttctatatgacgatgactggctagccttgtacttggagtggaaataacaagcaaccgataggtaacatttagtagatggtatccagagattggagctaccagtatcaaagatcacagtgaacttctgaggaggagtaccaatggtaatgtcaccatagtattgagcatccaaatagtttttcagcggaaccatatccgcattttcatcgttcaggcgaaaatagtgtttgggagaccaatgagaccctcggtttttcaaaaaaagctgagaagctagcctgttgctccggtctagtttcctcttcttcaatccaattctaatcgttccatcaccatttcgctcacacgaggcagttgatatgaggattaaacatgaaagcaagaacacgagcaagaatgattggaacctagttcccatttttacagagaaaatcgaacgcgtgggtcgacccggcaataccgtaccggtacctgcaggcgtgccagctttccatatagtgagtcgaattgacacct

SEQ ID NO: 98084 - DNA, 941 bp, Arabidopsis thaliana columbia
  unsure (1)..(941): unsure at all n locations
cccacgcgtccggagagagtatcgaagagaagaatccaaaaaaatgggatcttcaccaccgaagaagacgactctgcaacggtacttgtcacagcttcaacaacatcctttaagaacaaaggcaataactgctggagttttgtctggtgttagcgatgttgtatcacagaagctctctggcatacagaagattcagctgagaagggttcttctcaaagtgatatttgctggtgggtttcttggaccagcagggcatttctttcatacatatttagataagttttttaaagggaagaaggatacacagactgttgcaaagaaggtaattctggagcaattgacattgtcaccattgaaccatttgcttttcatgatctattatggagtagtcatagaaagaactccctggacccttgttagagaaaggatcaagaagacttatccaacggtccagcttactgcatggacgtttttcccggtggtgggatggattaactacaagtatgtgccactgcacttccgggtcatcttgcacagcctggtcgcattcttttggggaattttcctaaccctgcgagcgaggtcaatgacactagctttggcaaaggctaagtgattaggaaacacatggatcgtgacagagaactcaagccttgggactcattatgatcacttagtactctgtaagttaaagcaaatcaaacagctctgaaaccaaataaaaatctgtattaagatgataccattctaggatagcaatatgttttaagttattacaaacacattcacaaacatcatataaaaaacgagggtattaaagaagagatattgttttaaaaaaaaaaaaaaaaaaaaaaaaaaannnnnnnnnnnnnnnnnnnnnnnnnnnnnnnnnnnnnnnnnnnnnnnnnnnnnnnnnnnnnnnnnngtacctannnnnn

SEQ ID NO: 98085 - DNA, 893 bp, Arabidopsis thaliana columbia
attgagacgacaactatagaagatctatgacgtcacatgcacgcgtacgtaagcttggatcctctagagctgccgccctttttttttttttttttttttttaaaccaaataaaaatctgtattaagatgataccattctaggatagcaatatgttttaagttattacaaacacattcacaaacatcatataaaaaacgagggtattaaagaagagatattgtttaagcagctttggcgaatccaactcttcctttcccataatcgaacactgtgtggtatggtcccatgaagatatcacccaagatccagagaggtccacgaggcggagcaatatccattgccgtgaaaccgctggtgcactgagactcaactccttccccgatcttgaatatatagtcttgaggagttagatcaaagcttctgccaccaattgagaatgtgactataggcatcgacgaaaccctcccacagtccactgctgattgttggttttgggttggtatatggtcacatagctcagcagcataagcgagtatgcgttcttgtgtttgattctgagtcaattcgctctccatccacacggctgccatttcgcaagcactgcacatcgcttggtttaaaagacccgatgttccatcgtctacaactgactggatccccatactcacactctgtgtaccatcataagcgcagactccaatttgtgagcatactttcttcggatcctcctgagctagaagagaattcaacatggtttttccgtattgatccaccacggccttgcattcacggcttacaattccttgtgctcctatcgcggacgcgtgggtcgacccgggaattccggaccggtacctgcaggcgtacgagctttccctaaagtgagtcgtat

SEQ ID NO: 98086 - DNA, 991 bp, Arabidopsis thaliana columbia
  unsure (1)..(991): unsure at all n locations
atacgactcctttagggaaagccggtacgcctgcaggtaccggtccggaattcccgggtcgacccacgcgtccggcccagagttgacataattgcatccacataatatttttttctccgatcatcggaaaaagcagtaatcaagatgcagaagctcaacgacatcttctccggtggaggagacggcgacggaacaaccgatagtttccttgaagatggatcggagggtctctgtgctctctccaccacccagagaatgtacggattcgccgcgtctttagccactggtctgctacttatgttcctgtctatgattgtatttgggatccccatcaaatttgcactgctcttcacatttggaaatgttctagctattggaagcacagctttcctcatgggacctgagcaacagatgagtatgatgtttgaccctgttcgtttcttagctacatccatttatatcggatgtgtcgttgttgcactcatttgcgctctcctgatccatagcaaaatcttaacggtccttgcgatcttatgtgatatttgcgcactgatatggtacagcctcagttatattccattcgcacggagaatgggctctgaaatatgatccgtctttgtgacactgagctatagtcagtcatctggcagcagaacacacagcacataaattgttctatactggtctcgagaacttgtgatctgattattcttaaacgaatcttgcttgtttttgacctgatcgtgtgagtcagaagtaatgcagtgaggtttggttatttggggtcttgaagctctggtgtgtatttcggtgcttaagctcttctgttgcttcagtcttaaaacgttgtttggcattttgtgtgatcaaatacaaagatttctttttctttnnnnnnnnnnnnnnnnnnnnnnnnnnnnnnnnnnnnnnnnnnnnnnnnnnnnnnnnnnnnnnnnnnnnnnnnnnnnnnnnnnnnnnnnnnnnnnnnnnn

SEQ ID NO: 98087 - DNA, 404 bp, Arabidopsis thaliana columbia
gaagggcctcagaaggaacttgggcaacttggtgtttttgctgagctgcaagcgctcttccctggtctgcgcatttatgtagatttgattggacctgacgttccacaacatatggatggagaaatgatctccctttgcagatattccccttgcatgggaaaagaatgtgaatgtaaaaattcaagcaaaattctcaattccgggagcaaacctgctttggtttcggctgtgtcattacagctccgtagagggttttaccatgatcgttacaatgacataacaaaggattcatttcctccacacatagtgattgctccaaacgcaggcatcgctgcatatccaagctggttgccaactattgaactgataagggagatacaagtcccagcagtattctctgatta

SEQ ID NO: 98088 - DNA, 583 bp, Arabidopsis thaliana columbia
  unsure (1)..(583): unsure at all n locations
nnnnnnnnnnnnnnnnnnnnnnnnnnnnnnnnnnnnnnnnnnnnnnnnnnnnnnnnnnnnnnnnnnnnnnnccacgggtgcgcccacgcgtccggctttcactcgccattattggtccctcttcttcttcttcttattctctggatctctccttctccctctcttctttctacagttatttcgctttagcagattacttaaatccacggtttcttcttctccgggagcatttatggcgtcagcggtgacggcgtcaggcaaggtggagaaaggacatcagctatatagagacggcaagtataaggaggcgcttctcttctatacggaggctcttactgctgctaaagctaaaccacagaagatcgctcttcacagcaaccgcgccgcttgttacttgaaattgcacgatttcattaaggcagcagaagaatgcacttgtgttcttgagcttgatcagaaacatagcggagcgttgatgctgagggctcagactttagtcactcttaaagaataccaatctgctccttttgatgtcaccaggcttatggagttgaaccctgattctgaggtttatcagaacctc

SEQ ID NO: 98089 - DNA, 794 bp, Arabidopsis thaliana columbia
  unsure (1)..(794): unsure at all n locations
nnnnnnnnnnnnnnnnnnnnnnnnnnnnnnnnnnnnnnnnnnnnnnnnnnnnnnnnnnnnnnnnnnnnnnnnnnnnnnnnnnnccacgcgtccgtctgtggaactcagaatggtactctcttgttgtattcatggggatttttcaaggattgcagcgatcggtttgttgatctcgctccaaattccgttgatgctctactgaagctcgatgaggacagacttatcactggatgtgataatggaataattagccttgttggaatactgcccaacagaatcatacagccgattgggtcacacgactaccctatcgaagatctcgctctttcgcatgataagaaatttctcggtagcacagctcatgacagtatgctgaagttgtggaacctagaagagattctagaaggttctaatgtcaactctgggaatgcatctggagctgcagaagacagtgacagcgacaatgatgggatggaccttgacaatgatccttccaagtcttccaaaggcagcaagaggaaatcaaaaagtaaagcgaatacgctgaacgctacaaataatttctttgcagacttatagattttgtttcagattcagtctggatagtatatcagtttcatacctgaattgtctacttgattctgacagtttgttaaaaattttggtttttagtaagattgtgttttccnnnnnnnnnnnnnnnnnnnnnnnnnnnnnnnnnnnnnnnnnnnnnnnnnnnnnnnnnnnnnnnnnnnnnnnnnnnnnnnnnnnnnnnnnnnnnnnnnnnnnnnnnn

SEQ ID NO: 98090 - DNA, 561 bp, Arabidopsis thaliana columbia
atgatactccagctctctacgactcactattgggaaagctggtccgcctgcaggtaccggtccggaattcccgggtcgacccacgcgtgccctcatctgccaccaaaccaaagacataatttcttcggtgacttccatggctccgcctgtctctgatgattccctacagcctcgagatgtttgtgttgtgggagtggcgcgaacgcctataggggacttccttggctccctctcgtctttgactgctacaagacttgggtccatagccatccaagccgcacttaagagagcacatgttgatccggcccttgtggaagaggtcttctttggcaatgtcttaactgccaatcttgggcaagcaccagcaagacaggctgcacttggtgctgggattccctattctgtgatctgcaccactatcaacaaagtttgtgctgcaggaatgaaatctgtaatgctagcgtctcaaagtatccagctcggcttgaatgatattgttgttgctggtgggatggagagcatgtcaaacgtacctaagtacctcccggacgcaagaagggg

SEQ ID NO: 98091 - DNA, 728 bp, Arabidopsis thaliana columbia
  unsure (1)..(728): unsure at all n locations
atacgactcatatagggaaagctggtacgcctgcaggtaccggtccggaattcccgggtcgacccacgcgtccgaaaactaacaaaagatcaaaagcaagttcttcactgttgataatgtctaccaccggacagattattcgatgcaaagctgctgtggcatgggaagccggaaagccactggtgatcgaggaagtggaggttgctccaccgcagaaacacgaagttcgtatcaagattctcttcacttctctctgtcacaccgatgtttacttctgggaagctaagggacaaacaccgttgtttccacgtatcttcggccatgaagctggagggattgttgagagtgttggagaaggagtgactgatcttcagccaggagatcatgtgttgccgatctttaccggagaatgtggggagtgtcgtcattgccactcggaggaatcaaacatgtgtgatcttctcaggatcaacaccgagcgaggagggatgattcacgatggtgaatcaagattctccattaatggcaaaccaatttacccatttccttggggcttccccggtcagtgggtccacagtggtcacncttggcaaggttctnaagtcaatccggntcntcttttncaaggcttgnattttcaattnnggtttgcntctggggaagggnaccttttaattnggtancccngaaaggcaaagtttccattttggctttggcntntggtttgg

SEQ ID NO: 98092 - DNA, 1471 bp, Arabidopsis thaliana columbia
  unsure (1)..(1471): unsure at all n locations
ctactccctctcactatanntatagctcctgcacgtgccggtccggaattccagggtcgacccacgcgtccggtctaccaccggacagattattcgatgcaaagctgctgtggcatgggaagccggaaagccactggtgatcgaggaagtggaggttgctccaccgcagaaacacgaagttcgtatcaagattctcttcacttctctctgtcacaccgatgtttacttctgggaagctaagggacaaacaccgttgtttccacgtatcttcggccatgaagctggagggattgttgagagtgttggagaaggagtgactgatcttcagccaggagatcatgtgttgccgatctttaccggagaatgtggggagtgtcgtcattgccactcggaggaatcaaacatgtgtgatcttctcaggatcaacaccgagcgaggagggatgattcacgatggtgaatcaagattctccattaatggcaaaccaatttaccatttccttgggacttccacgttcagtgagtacacagtggttcactctggtcaggttgctaagatcaatccggatgctcctcttgacaaggtctgtattgtcagttgtggtttgtctactgggttaggagcaactttgaatgtggctaaacccaagaaaggtcaaagtgttgccattggtggtcttggtgctgttggtttaggcgctgcagaaggtgctagatcgctgtgcttctaggatctcggtgtgatttaactctaaaaattcgaccaagtaaggaattcggtgtgccgagtgtgtaacccgaaagcccatgacaagccaattcaacaggtgatcgcttagatgacggatggtggggtggacaggagtgtggaatgcaccggaagcgttcaggccatgattcaagcatttgaatgtgtccacgatggcttgggtgttgcagtgctggtgggtgtgccaagcaaagacgatgccttcaagactcatccgatgaatttcttgaatgagaggactcttaagggttcttttttcgggaacttccaacccaaaactgacatttccggggttgtggaaaagtacattaacaaggagctggagctttagaaattcatcactcacacagtgccattctcggaaatcaacaaggcctttgattacatgctgaagggagagagtattcgttgcatcatcaccatgggtgcttgaagccattctctcgcagatgatgttcactttgtgttttacttcctttatgcattcacagcaataaaagaaagaaatctccatcgcttttggttttcttctctgtcttaagttagtcgttttcgtgtctaatctattacttatcattgtaatagactcttcttctattgagatttgaatataaactaaaaaaaaaaaaaaagaaaaaaaaaaaaaaaaaaannnnnnnnnnnnnnnnnnnnnnnnnnnnnnnnnnnnnnnnnnnnnnncgcc

SEQ ID NO: 98093 - DNA, 1229 bp, Arabidopsis thaliana columbia
  unsure (1)..(1229): unsure at all n locations
gnnnnnnnnnnnnnnnnnnnnnnnnnnnnnnnnnnnnnnnnnnnnnnnnnnnnnnnnnnnnnnnnnnnnnnccacgcgtccgcccacgcgtccgcccacgcgtccgcccacgcgtccgcccacgcgtccgtacggctgcgagaagactacaaaagggtaaggctgcgagaagacgacagaagggtacggctgcgagaagacgacagaagggtacggctgcgagatgacgacagaagggtacggctgcgagaagacgacagaagggtacggctgcgagaagacgacagaaggggataaagaagaagaagctaacgaaaaataatggcggagagatcaaattcagaggaagtgaagcttttgggaatgtgggcgagtccttttagtcggaggattgagattgctcttacgcttaaaggtgtttcgtatgagttcctggagcaagatatcacaaacaagagctctttgttgcttcaattgaatccggttcataagatgattccggttcttgttcataatggtaaaccgatttctgaatcacttgtgattcttgagtatattgatgagacttggagagacaatccgattctccctcaagatccgtatgagagaactatggctcgattctggtctaaattcgtcgatgaacagatttatgtgacggcgatgaaagttgtggggaagaccggaaaagagagagatgctgtggttgaagcgacgagagatttgttgatgtttttggagaaagagcttgttgggaaagattttctcggtgggaaaagtttagggtttgtggatattgtggcgactttggtggcgttttggctgatgagaacggaggagatcgtcggggtaaaggtggttccggtggagaagttcccggagatacatagatgggttaagaatttgttgggtaatgatgttatcaagaaatgtattcctcctgaagatgagcatcttaagtacattagagctcgtatggagaaactcaatatcaaatctgcttgataaggttttataaaaattctaatgctcacagtatgtctcttttgttcttgtctcagttgctatgttctgtcacttaatgtttgctatattgaaacacgaaaatttgaactaaaaaaaaaaaaaaagnnnnnnnnnnnnnnnnnnnnnnnnnnnnnnnnnnnnnnnnnnnnnnnnnnnnnnnnnnnnnnnnnnnnnnnnnnncgaacctccatccggggcggggc

SEQ ID NO: 98094 - DNA, 555 bp, Arabidopsis thaliana columbia
  unsure (1)..(555): unsure at all n locations
ttccgactttgttgtctcttgaggatcctcaaggatgtagtcactttacactcacacgtgttaattggaccggtagtgttggtggtcatcctcacacgtacgatgcctctnagatctcgccgcagctgattcactctctgcggagatctaattcgagtttagactatttcttcgccagaaaattcacgccggagtcattgcaaccncttatggagattgcagatgctgtgatctttagggattgaattcggtgaaagtaaattaggtttcaaatatccatcataaggaaggtttagggaaggaagctttgtnttggcgctcggaaggaagagggggcttaaataaaaggatgaacctcctgctgtgtgttcgtgtgaaaatttctgtgtttttnaagcttttgtgtgtctctagggaaggtagagatatgggnaaatggatgtaaaaaaggatgtaaatagggggcccccaaaggcaaagtgnggnccatcatccattaaggtaaagnccaatcgggcttttcctttttgtaaatcagctcccttccncgggggg

SEQ ID NO: 98095 - DNA, 533 bp, Arabidopsis thaliana columbia
gcgggtccacacaagcctctatactgactcgaagaagacagacgggagggattgaattcggtgaaagtaaattaggtttcagatatcgtcataaggaaggtttagcgaagaagcttgtgttggcgctcgaagaagagtggctaaataaagatgaacttctgtgtgtgtgtgtgaaaattgctgtgttttttaagcctttgtgtgtctctagggaaggtagagatatgggaaaatggatgtaaaaaagaatgtaaatagagagcccccaaaggcaaagtgagagcatcatcattaacataaagccaaatcggcttttcttttgtaattcagctcctttccacgggagagagagggaatggcaaaagtgttgttccctctcttttgtttcgaaaaaagtgtgaagaacaagatctgtgttatctcaagtggttcttcctttgatgaatccaatcagaacccatagggcggccgctctagaggatcccagcttacgtacgcgtgcatgcgtcgtcatagcttttgtagtagtgtca

SEQ ID NO: 98096 - DNA, 604 bp, Arabidopsis thaliana columbia
  unsure (1)..(604): unsure at all n locations
cnnggggnccccccccagntttncacctnngcggnntnctaatcggggtttggccttttcntcccccggaattccccccccgggtcattgccaccccttttggagattgcagatgctgtgatctttagggattgaattccggtgaaagtaaattaggtttcagatatcatcataaggaaggtttaggaaaaagcttgtgttggcgctcgaagaagagtggctaaataaagatgaacttctgtgtgtgtgtgtgaaaattgctgtgttttttaagcttttgtgtgtctctagggaaggtagagatatgggaaaatggatgtaaaaaagaatgtaaatagagagcccccaaaggcaaagtgagagcatcatcattaagataaagccaaatcggcttttcttttgtaattcagctcctttccccgggagagagagggaatggcaaaagtgttgttccctctcttttgtttcgaaaaaagtgtgaatgaaaagatctttgtttcacaaaaaataaaaaaaaaagaccaaacccatagggcgaccgctctagaggatccaagcttacgtacgcgtgcgtgcgacgtcatagtcttctatagtgcaccta

SEQ ID NO: 98097 - DNA, 511 bp, Arabidopsis thaliana columbia
gccggcactaatacgactcatatagggaaagctggtacgcctgcaggtaccggtccggaattcccgtttcgacccacgcgtccgcccacgcgtccgcggctgcgagaagacgacagaagggggattcaggagaaaacaagataacaggattggcgtttggaggaaatagaatgtttgtgacccgaaaggatcagcagtctgttcaggtttggcaaagtcctagtcgtggaatatctatctaatgagcaagtattaagctttggttcgaggtgatcacgagttgcttaaagccgaatccaacaaaaactagttagcgacttacgttgtgttaaagaagaatgaatgatcttaatcccaatacttgatgaagctattccaaccatgaatttcttatctctgataatcttataaaaaggacttacatcgttcgtcagaccaggctgtgaaggatgtttgcattctaacgacatgaccctatacaagtactgcagagagaagcagatgacgatgc

SEQ ID NO: 98098 - DNA, 544 bp, Arabidopsis thaliana columbia
gggaaagctggtacgcctgcaggtaccggtccggaattcccgggtcgacccacgcgtccgaattcaccaattttagaattcccattctcattttctctctctttctatttctccaaatttgcctaaagattttacattttatcttcaatccttccttgatttacgtttgaaatatttcgacccaaaactatactgatggagagaacaaacagcattgagatggatcgagagagattaacggcggagatggcgtttcgagattcatcatcggccgttataagaattcgaagacgtttgccggatttattaacgtccgttaagctcaaatacgtgaagcttggacttcacaactcttgcaacgtgaccaccattctcttcttcttaattattcttcctttaaccggaaccgtgctggttcagctaaccggtctaacgttcgatacgttctctgagctttggtctaaccaggcggttcaactcgacacggggactggacttacctgcttggttttcctctccttcgttttgaccctttacttggcta

SEQ ID NO: 98099 - DNA, 618 bp, Arabidopsis thaliana columbia
  unsure (1)..(618): unsure at all n locations
atgattttcgccnnnnnnnnnnnnnnnnnnnnnnnnnnnnnnnnnnnnnnnnnnnnnnnnnnnnnnnnnnnnnnnnnnnnnnnccacgcgtccgtacggctgcgaagacgacagaagggtacggctgcgagaagacgacagaagggtacggctgcgagaagacgacagaaggggtctggattgttgagtatccctctggctgggggtgctaatgtgaagtctcgaactttgttggaatcggctaagtgataatttcgaagcttgatcggtaaatccaggagcttttggatcggaatctgttcgctgatgctttggtgaaaatgggtttcggtgcaattagatcgattttgcgtccattgtcgagaaccttagtttcgcgtgccgtcgttaactactcgtctgcgccgttcaacgcgacgattccggctgctaaacccgagttatgttccttcttcggtggatcgatgactcatttgaggttaccatggattccaatggctaaccattttcatagcttaagcttgacttgatactcggntcccgaagagacgncccatgacttatcccaagngggnaaagnttccaaatttnnaacctccaggggccttatgcataccg

SEQ ID NO: 98100 - DNA, 806 bp, Arabidopsis thaliana columbia
  unsure (1)..(806): unsure at all n locations
cnnnnnnnnnnnnnnnnnnnnnnnnnnnnnnnnnnnnnnnnnnnnnnnnnnnnnnnnnnnnnccgggtcgacccacgcgtccgaacagaaaaggcagatgtttacagcttcggtgtggtggcaatggagattgttagcggaaagagcaacgcgaaatacacgccagatgacgaatgttgtgttggccttctcgattggttttcaatttcaggcatttgtgttgcaaaagaaaggggatatcgcggaaattctggatccgaggctggaaggaatgttcgatgtgatggaggcagagagaatgataaaggtttcacttttatgcgccaacaagtcttcgacattacggccaaacatgtcgcaagttgtgaagatgcttgaaggggagactgagatagaacagatcatatcagaccctggagtgtatagtgataacttgcacttcaagccatcgtctttgtcgtctgattatatcttgtcgattccttcatcatctgaatctgcttatgatctgtaccccctcagccccgagtccattgtctttactatacagtagcctgaaccctctgattatctctacgctagggttgttgttgtaggctacttcgggctcgagaaaagattgtaattagggctaatatcgctagttgtacttggaaaagaatttattttgttttagaagaaaaaatcatccttnnnnnnnnnnnnnnnnnnnnnnnnnnnnnnnnnnnnnnnnnnnnnnnnnnnnnnnnnnnnnnnnnnnnnnnnnnnnnnnnnnnnnnnnnnnnnnnnnnnnnnnnnnnnnnnnn

SEQ ID NO: 98101 - DNA, 1001 bp, Arabidopsis thaliana columbia
  unsure (1)..(1001): unsure at all n locations
cnnnnnnnnnnnnnnnnnnnnnnnnnnnnnnnnnnnnnncccacgcgtccgcccacgcgtccgcccacgcgtccgcccgtgcccttctccttcttggcggctgcggccatttttttcttctttctctcttctattctatctcttaaaccctagatttgatctgggtttttcctgattccatttagggtttctctatcttcttttttttcttcttcttcttctttctctttggtcgcatccccttttatccgagaaggatctatccaaatctttgtttgtcgaatctcctctcatggctaccgttgctcctcctgctgatcaagctacagatctgttgcagaaactatccttggactcgccagcaaaagcttcagagatccctgagcctaacaagaagactgccgtctaccagtatggaggcgttgatgttcatggtcaagttccttcttatgatcgatctttgacaccaatgcttcccagtgatgctgctgacccttcagtttgctatgttcctaatccttacaatccctaccagtattacaatgtatatgggagtggtcaagagtggactgactacccagcttacacaaatcctgagggtgttgacatgaattctggaatttatggagagaatgggactgttgtgtatcctcagggttatgggtatgcagcgtatccttactcgccagcaactagccctgctccacagcttggcggggaagggcagttgtacggtgctcagcagtatcagtatcctaactattttccaaacagtggaccgtatgcttcatctgtggctacacctacccagccggatctctctgcaaacaaacctgctggtgtgaagacactacctgcggatagcaataatgttgcttctgctgctggtatcacanaaggaagtaatggatcagctccagtgaaaccaactaaccaggctacccttaacacctcaagtaatttgtatggtatgggtgctccaggaggaggtttggctgctg

SEQ ID NO: 98102 - DNA, 637 bp, Arabidopsis thaliana columbia
gggagagaagtctgtgtctttgcctcaagttttcattatgggcaagtatgttggtggtgctgatgtgatcaagagtttgtttgagattggtgagcttgctaagattcttaaagagtttccaatgagacaaccagggtttgtttgccattgctgtggggacattcgatttgttccgtgttccaattgtagtggcagcaagaaactgtttgatgaggatgaagatagggtcaagagatgtcctgaatgcaatgagaatggattgatacgttgtcctgattgctcttcttgagatatatcatcaatgaacctgaaaaaaccattaaaaaaaagaagaaaaaagaggtatttatttctcttttgatgtttccattgttgtgtagaacagtgaatgatgctgccacaagtatccgaaaatctcttttggatcagcagcatttcactttgggttttttaaggtttgcgatcaacggtaatgggaactgccggtgatcgtggatttagtttatgtatgtgtttgctactaagggctaaatgtaattgtgtaatcaaaatgtctgaaacgggtagtaagcattttgactcttgtgtgtcaatgttgtgaaagacaactgtgttcttatgctatatatttgattgt

SEQ ID NO: 98103 - DNA, 421 bp, Arabidopsis thaliana columbia
ctctaaagtccgtcgtattacgcagtccgcccacgcgtccggacgacagaaggggacttcatcgctcttttatcgttaataatcataaagaaaatcaaagactcgaaccgaaatcttcctccgagcccactgaagctaccggttatcggaaacctataccagcttcgaggattgtttcacaaatgtcttcacgatctctccaagaaacacggacccgtgttgcttctccgtctaggttttctcgatatgtttgtgatctcatcgaccgaagcagctgaagaagctcttaaagtacatgaccttgagtgttgtaccagacctataactaacgtcacatcagaactctggcgtgacggtcaagatatcggcgtagccccatatggtgagtccttgagagagtttgcgaagctttccttttctc

SEQ ID NO: 98104 - DNA, 683 bp, Arabidopsis thaliana columbia
  unsure (1)..(683): unsure at all n locations
tactccaactcctgatgctaagatggttaaagaagggcaagttgttattagagctcggaatcttaaagtcggtgctaattttatcccgccgaaatcattccgtgctcggagattctacttcagcaacgaggagaatggtttgctacatgttcccaagggagaagctcaaaatccacaagctgctatgttttctgatcctaacatggccatggatatgatgaagaaaaatctttctatgattattcctcagacactcacttttgcatgggtcaacttcttcttctctggatttgttgcagccaaaataccatttccactgactcagaggttcagatcaatgttacagaatggcattgacttgagcactgtcgatgttagctatgtgagtagtcggttcccgggtactttcttgaaccttgtttggattaagaggcttgttcaagcctcaattctcgggggatgcaaaatgccattggtggcacacaaccggatgatgcaaatggggggggtttgggttttatgcatcaaagggggcttgggtccagaggaaggattggttnggcataatccagaccggatnggactaccncggttttngcagcggnagnaatctgtttnagaaaccccgnaaggtnggggaacccggtagggttcagggnacctgggtnttnccgggttgaant

SEQ ID NO: 98105 - DNA, 655 bp, Arabidopsis thaliana columbia
  unsure (1)..(655): unsure at all n locations
cttcttctctggatttgttgcagccaaaataccatttccactgactcagaggttcagatcaatgttacagaatggcattgacttgagcactgtcgatgttagctatgtgagtagtcgttcctggtacttcttgaacttgtttggattaagaggcttgttcagtctcattctcggagatgaaaatgccattgatgacacacaacgtatgatgcaaatgggtgggtttggatttgatgcatcaaagagtctgggtgcagagaaggatggtttagacataatccagcacgaatgggcactacctcgatttgagcagcgcgcagaatctgtattaagaaaactcgtgaagtagagagaaacacgataaggttttcagtgaaatctggtttacttcactcgatgttgaaaacattcgaactttgtagaaacttttacttgaaactgagtcttaacagtgagttcttgtgtttcagctcgtagattccgctctggttttcttttcgtcatctgtcaattattgtgacactcactactctctcaaaaaaagaaaatgttctccgtaaaaaaaacaaaaaaagnnnnnnnnnnnnnnnnnnnnnnnnnnnnnnnnnnnnnnnnnnnnnnnnnnnnnnnnnnnnnnnnnnnnnnnnntgaatcg

SEQ ID NO: 98106 - DNA, 703 bp, Arabidopsis thaliana columbia
  unsure (1)..(703): unsure at all n locations
nnnnnnnnnnnnnnnnnnnnnncgactcactttagggaaagctgctacgcctgcaggtaccggtccggaattcccgggtcgacccacgcgtccgcggacgcgtgggtttgtttgcttcaccagagaagatcgaagacgaagaagacgagaaagagagataattagggtttagaatggcggaggatctagttctcgatacggcgatcagagattgggttctgattcctctctccgtagtgatggttctaatcggtattttgagatactttgtctctaagcttatgcgttctactccaactcctgatgctaagatggttaaagaagggcaagttgttattagagctcggaatcttaaagtcggtgctaattttatcccgccgaaatcattccgtgctcggagattctacttcagcaacgaggagaatggtttgctacatgttcccaagggagaagctcaaaatccacaagctgctatgttttctgatcctaacatggccatggatatgatgaagaaaaatctttctatgattattcctcagacactcacttttgcatgggtcaacttcttcttctctggatttgtgcgcaatcctttcctgctcaagtcaatatgtcaatgctgctgcctgcatgtgttgagtgctctgacttactgtgtaagtgctttgtatctaccctgcaggtgtacaacgcgaggtatcca

SEQ ID NO: 98107 - DNA, 563 bp, Arabidopsis thaliana columbia
  unsure (1)..(563): unsure at all n locations
aacttcgaaagatttagcgattttaacaaacgccgcgttacggtttatnacacaaacgcgaaaaaagcgtcaggaaagattggccccttgcgcactcttgcttttttntggaaacgtctctgaacgaccaactatagatcgtggaaaattcagattccattgcgacgaaaagaaggcggcggattcaaagaacacccaaatacaaatcgaagacggagccttttcagcaatttcgttttattcaacctctggaacaccaatcatctcaaactgattgaatgagaagccctcccccgtctctgctctccctcaccgtcaacgccgccgtcttaaacatctctcgcatcaacgatctctcccatcttcctgatcacatcgtccttgacctcttcgcgaggacattggaagctgggaaattgaatgagagagttctgagactctttatggcatctggaaacgaagaagttctttctgttatcgacgccctcaaaatcaaaatcaacgtttccccgatccttcctactcgatgtgatgagaagtttagattgcacgggactagacga

SEQ ID NO: 98108 - DNA, 435 bp, Arabidopsis thaliana columbia
  unsure (1)..(435): unsure at all n locations
gtcggcggccgccctttttttttttttttcccgaatattctacaacggcgggccaaccagaccacaaggatataaatttcttttaaaagccaggaaggttggaaactatttatttttttaaacaggtatcaaaagatttataatttttgtggcacccaaaagaatcaataaataaacgtttaatcccactcccccgtaaccctaagcaaaccagtggcaaacccgtacaccccacattaggcagtgaagttctacacacgatttcttatcagaagcagggtcctcttgggaatgttcaatcagagattttgtcccgtaaagaccaatcaaccttcacattcgagaaaggttgggcttttccacgaaggatttacttgaatgaacccacgctcgtaccgaattccgagcttacgtacgcgtgcagntgtcgtcaag

SEQ ID NO: 98109 - DNA, 549 bp, Arabidopsis thaliana columbia
  unsure (1)..(549): unsure at all n locations
gtatccttcnnnnnnnnnnnnnnnnnnnnnnnnnnnnnnnnnnnngcctgcaggtaccggtccggaattcccgggtctacccacgcgtccgcccacgcgtccggcacaaacaactgaacaaggtgattgttcaaagtacaaaggaaacataccacattgttgtaagaaggatccaacagttgtagacttgcttccagggactccttataatcagcagattgctaattgctgcaagggtggtgttatgaactcatgggttcaagaccctgccactgcggctagctccttccagattagtgttggtgctgctggaaccacaaacaaaaccgttagggtcccaagaaacttcactctcatgggacctggtccaggttacactttgtggtccagcaaagattgtcagaccaacaaaatttgtcacgactgacacacgcagaaccactcaagctatgatgacatggaacattacgtgcacatacttcgcggttccttgctcaaagacctccaacttgctgtgtttctttatcttctttctacaatgaaaccatt

SEQ ID NO: 98110 - DNA, 686 bp, Arabidopsis thaliana columbia
  unsure (1)..(686): unsure at all n locations
aaaaaccaaaaattggntaaaaaaaatnttnccctaccggggnnaacgaacncganttaggggnggaagtnnncaacggntctttcanaaagcaggccnctgggaatgtccaatccagagatttgtccgtaaaagnccaatcaaccttcacatcgagaaaggtgggcttttcccacgaagggttttcctttaatggagccaattggcgtcatccctcctccagactcttacccttttcttcccaacggtgggtcccggtcccaattctcattcgtcgcccccgggctcctccctcttcttgtctttttcttcttctccgcctaatctcggatttacggttttgccactggtttgcttagggttacgccggagtggtataaacgtttatttatgattcttttgtgtcccacaaaaattataatcttttgatactttttaaaaatataaatagttttccacttccatgtttttaaaagaaatttaaatccctgtgttctgttggtccgtcgttgtagaatatcgggaaaaaaaaaaaaaagatgttagatactgtaaactttgttttccgaacgttatatactttactttttctgttaaaaaaaaaaaaaaaaaaacccaaagggcgaccgctctagaggatccaagcttacgtacgcgtgcgtgcgacgtcatagctcttctatagt

SEQ ID NO: 98111 - DNA, 917 bp, Arabidopsis thaliana columbia
tgatctgccaagctactatacgactcacattagggaaagctacgtacgcctgcaggtaccggtccggaattcccgggtcgacccacgcgtccgcggacgcgtgggatccggtgcctgcctcgacccggacacaccacacttagcctcggttgtgtcaccaccaaccaaaagaaaaggaacgggtttttaccaccattagtgcaatgcacgagacacatgtgcccgatcagagtgcattggcatgtaaagcagaactacaaagagtattggcgtgtgaagatcacaatcacaaacttcaactatcgcttgaactacacacaatggaaccttgttgctcaacatccaaatctcgacaacatcactcaaatcttcagcttcaactacaaatctcttactccttacgctggactaaacgatacggcgatgttatggggagtgaagttctacaacgatttcttatcagaagcaggtcctcttgggaatgttcaatcagagattttgttccgtaaagaccaatcagccttcacattcgagaaaggttgggcttttccacgaaggatttactttaatggagacaattgcgtcatgcctcctccagactcttacccttttcttcccaacggtggttcccggtcacaattctcattcgtcgccgccgtgctcctccctcttcttgtctttttcttcttctctgcctaatctcggatttacggttttgccactggtttgcttagggttacggtggagtggtataaacgtttatttatgattcttttgtgtcccacaaaaattataatcttttgatactttttaaaaatataaatagttttcaaaaaaaaaaaaaaaaaagggcggccgctctagaggatccaagcttacgtacgcgtgcatgcgacgtacatagctgttgtatagtg

SEQ ID NO: 98112 - DNA, 1427 bp, Arabidopsis thaliana columbia
  unsure (1)..(1427): unsure at all n locations
gacacattcaatctccaggatggacattaggttggaaatgggcaaagaaggaagttatatggagtatggttggagcacaaacaactgaacaaggtgattgttcaaagtacaaaggaaacataccacattgttgtaagaaggatccaacagttgtagacttgcttccagggactccttataatcagcagattgctaattgctgcaagggtggtgttatgaactcatgggttcaagaccctgccactgcggctagctccttccagattagtgttggtgctgctggaaccacaaacaaaaccgttagggtcccaagaaacttcactctcatgggacctggtccaggttacacttgtggtccagcaaagattgtcagaccaacaaaatttgtcacgactgacacacgcagaaccactcaagctatgatgacatggaacattacgtgcacatactcgcagttccttgctcaaagaactccaacttgctgtgtttctttatcttctttctacaatgaaaccattgttggatgtccaacttgtgcttgcggatgtcaaaacaacagaacagaatccggtgcctgcctcgacccggacacaccacacttagcctcggttgtgtcaccaccaacaaagaaaggaacggttttaccaccattagtgcaatgcacgagacacatgtgcccgatcagagtgcattggcatgtaaagcagaactacaaagagtattggcgtgtgaagatcacaatcacaaacttcaactatcgcttgaactacacacaatggaaccttgttgctcaacatccaaatctcgacaacatcactcaaatcttcagcttcaactacaaatctcttactccttacgctggactaaacgatacggcgatgttatggggagtgaagttctacaacgatttcttatcagaagcaggtcctcttgggaatgttcaatcagagattttgttccgtaaagaccaatcaaccttcacattcgagaaaggttgggcttttccacgaaggatttactttaatggagacaattgcgtcatgcctcctccagactcttacccttttcttcccaacggtggttcccggtcacaattctcattcgtcgccgccgtgctcctccctcttcttgtctttttcttcttctctgcctaatctcggatttacggttttgccactggtttgcttagggttacggcggagtggtataaacgtttatttatgattcttttgtgtcccacaaaaattataatcttttgatactttttaaaaatataaatagttttcaacttccctgttttcaaaagacatttatatcgttcagttgtttgtgccgnacgcgtggcgnnacgcataggtnnnnnnnnnnnnnnnnnnnnnnnnnnnnnnnnnnnnnnnnnnnnnnnnnnnnnnnnnnnnnnnnnnnnn

SEQ ID NO: 98113 - DNA, 823 bp, Arabidopsis thaliana columbia
  unsure (1)..(823): unsure at all n locations
nnnnnnnnnnnnnnnnnnnnnnnnnnnnnnnnnnnnnnnnnnnnnnnnnnnnnnnnnnnnnnnnnnnnnnnccacgcgtccgagaaggatacctcaatttcatgggaaacgaatttggacacccagaatggatcgacttcccaaggaccgaccagcaccttcctgatggcagagtcatcgctgggaataatggtagttatgataaatgccgacgtaggtttgatctgggagatgcagaatatcttagataccatggactacaagagtttgatcgagcaatgcaaaatctagaggagacgtatggtttcatgacttcagagcaccagtacatatcccgcaaggatgaaggagacagagtcattgtattcgagagaggtaacttgctcttcgtcttcaacttccactggaccaacagttactctgactaccgtatcggttgctctgttcccggaaagtacaaaatcgttttggactctgataactctttatttggaggcttcaaccggctagatgactccgcggagtttttcacctctgatggaaggcacgacgataggccttgctccttcatggtgtatgcaccgtgcagaaccgctgtagtttacgctgcagtagatgatgatgatgatgatgaacgttcttctcttgtcccataggcctgttacccgaagatgtttaggagcaaagacagttgtccgagtttacctactgtaagcttctttgtactacaaaaaattactcgttgatcttcttctcctttagttttcgcttgcagcatcattataacttaaaaatgaaataaaaaggtcgtgccctaanaaaa

SEQ ID NO: 98114 - DNA, 564 bp, Arabidopsis thaliana columbia
  unsure (1)..(564): unsure at all n locations
nnnnnnnnnnnnnnnnnnnnnnnnnnnnnnnnnnnnnnnnnnnnnnnnnnnnnnnnnnnnnnnnnnnnnnnnnnnnnnnnnnnccacgcgtccggaaaaaggttggagctttatcatcatcagcttcgaaaccaccacctgcgccggttagaggagcaagtggaggagagacttcgaaacaagtaaagttgaagcctttacattgggataaagtaaaccctgattccgatcattcaatggtttgggacaaaatcgatcgtggatcattcagtttcgatggcgatttaatggaagctctgtttggatacgttgccgtggggaagaaatcaccagaacaaggcgatgagaaaaaccctaaatcaacgcaaatattcatacttgatccgagaaagtctcaaaacacagcgattgtgctcaaatcattaggtatgacacgtgaagagcttgttgaatcactcatagaaggaaacgatttcgtgccagacactcttgagaggttagctagaatagctccaacgaaagaagaacaatcagccattcttgaattcgacggtgacacggcaa

SEQ ID NO: 98115 - DNA, 1040 bp, Arabidopsis thaliana columbia
  unsure (1)..(1040): unsure at all n locations
atacgactcacttagggaaagccggtacgcctgcaggtaccggtccggaattcccgggtcgacccacgcgtccgcccacgcgttcggattcttcttctctaccatattcgttgaaaccagagaagatggtgggtgtgtcgccgaagatcgctccgtcgatgttgtcatcggactttgcaaatcttgccgcggaggctaagcggatgatcgatttgggcgccaattggcttcacatggacattatggacgggcattttgtttctaacctaacgattggtgctcctgtcatcgagagtttgaggaagcacacaaatgcatatcttgattgccacttaatggtgacgaaccccatggattatgtggatcagatggctaaagctggggcgtctggtttcacattccacgttgaggtggcccaagagaattggcaagaacttgtgaagaagattaaggctgctgggatgaggccaggtgtggctctaaagcctggaacacctgttgaacaagtctatcctctggtcgaaggtacaaatccggtcgaaatggttcttgtgatgactgtggagcctggatttggaggccagaagttcatgcccagcatgatggacaaggtcagggcattgaggaccaagtacccaacacttgatattgaggtggacggcggcttaggcccttccacaatcgatgcagcagctgcagctggagccaactgtatcgtcgcaggaagttcagtgtttggagctccgaagcctggggacgtcatatcccttttgcgggctagtgttgagaaagcacaaccctccacttaaggaagttggtgccctaactctatgagccaaggtcttaagctaatacttttttatttctttgaaatggaataaaccttagatcttagttacttgttatacaattaaaatgtgtctgagagcttttgccctagcgatgaaattccacaagaaaaaaaaaaaaaaagnnnnnnnnnnnnnnnnnnnnnnnnnnnnnnnnnnnnnnnnnnnnnnnnnnnnnnnnnnnnnnnnnnc

SEQ ID NO: 98116 - DNA, 690 bp, Arabidopsis thaliana columbia
  unsure (1)..(690): unsure at all n locations
ccagctctactctactcacatctagggaaagctggcacgcctgcaggtgccgggccgcaatacacgggtcgacccacgcgtgcggcttcatcatcttctttctagtctctctctctctcttcaccgcgtacacagtaacacagaccctttttccctcttactcaaggttcttctttgtcatcttgttgccgaatccacaaagaggagaataaagattcgacctttattagatattaacgactctggatttttgggtttttggagttggatccacatgggttcttatccggatggattccctggatccatggacgagttggatttcaataaggactttgatttgcctccctcctcaaaccaaaccttaggtttagctaatgggttctatttagatgacttagatttctcatccttggatcctccagaggcatatccctcccagaacaacaacaacaacaacatcaacaacaaagctgttgcaggagatctgttatcatcttcatctgatgacgctgatttctctggattctggttttgaagtatataagccaagttcttatgggaggagggtatgggagagaagccctggtaggttccaggaggctttgggcctcaagctggctgggaacnncctcagtgggccttgggggaaaacccnttgggnttgggctttgggnaacccggnnnggc

SEQ ID NO: 98117 - DNA, 538 bp, Arabidopsis thaliana columbia
  unsure (1)..(538): unsure at all n locations
aagaaatggcgaattacatgtcggaagcagcacagctcagaagaggtctaaagcctaaagggaagacttatgggttgaccaatcagaagagacgagagatcagagagatctttgatcttttcgacatagacggttcaggtagcatcgatgctagcgagctcaacgttgctatgaggtctcttggatttgagatgaataatcagcaaataaacgaattgatggcagaagtagataaaaaccaaagtggagccatagatttcgacgaatttgtgcatatgatgacaacccaaattcggagaccgagactccatagacggattgtctaaagggcgctttaagacccattggccccggccattacttggggggggttttcccccccgggggtattaaggttggtttcctaaagaattggggggaaatttcccccggtttggtgttgttggggggcccgaaaaccacccggngcaaagtggggantttccttggggggtcccnaanntgttgaagncccctttnggnaagnnaaccccttgaa

SEQ ID NO: 98118 - DNA, 683 bp, Arabidopsis thaliana columbia
cggccggaattcccgggtcgacccacgcgtccggacagatcatcggcaactaatctcgtcatcgcatgcgtcataaaccaaattaactaagtcatccatttaatccatttgtgcttatcagatcatccttttccttcctacacaagaaatggcgaattacatgtcggaagcagcacagctcagaagaggtctaaagcctaaagggaagacttatgggttgaccaatcagaagagacgagagatcagagagatctttgatcttttcgacatagacggttcaggtagcatcgatgctagcgagctcaacgttgctatgaggtctcttggatttgagatgaataatcagcaaataaacgaattgatggcagaagtagataaaaaccaaagtggagccatagatttcgacgaatttgtgcatatgatgacaaccaaattcggggaacgagactccatagacgaattgtctaaggcgtttaagatcattgaccacgacaataatgggaagatttcacctcgtgatataaagatgattgctaaagaattgggagaaaatttcacagataatgatatagaagaaatgatcgaagaagcagaccgtgacaaagatgggagaagttaacttggaggagttcatgaagatgatgaagagaacctcttacggctaagtataaatcaattagtaa

SEQ ID NO: 98119 - DNA, 576 bp, Arabidopsis thaliana columbia
  unsure (1)..(576): unsure at all n locations
ctcgcgggtcgacgcaagcctctatactgatgcgaaataacgacagaaggggaatgttaaagcccatttccgaagaggacccgcacagagaaatgttaggcgattgcaagggagccatagaagattccagatacgccccttgggcgggaaccaaacaacaaacgagcgtctctctcagcagagagactgagaaaattccagtgagcttcttttgtccgtaccccaccgatcattgagaaaacgtttgttccttaaaatttgtccaagagtataggccaattttgtcaacccctgtcttttgcgtttgatatttaggcattttatctaaagaaaccttttgcaagtcccccgagaatggaaaattataatatccgatgtttattttaaacgttctctaaaattggatatcaaaaagtaatgttaatcttaaacaccggaaaccggcattcccggttgaaaaaaaaaaaaaaaaaaaaaaaaaaaaaaaaaaaacaaaacccanagggcggccgctctagaggatccaagcttacgtacgcgtgcaggcgacgtcataatcttctatagtgctcctaa

SEQ ID NO: 98120 - DNA, 519 bp, Arabidopsis thaliana columbia
  unsure (1)..(519): unsure at all n locations
gtaaagttctgattctctcctttaggtttatctctcgttaacgtcgctcttggtcacgaggcgactctcactgtggagttcgatattcaggcaatctcaaaagcttccacgacaaaggtgtcaaatttggtcatcatgacggagtataagcaggagcaggaaatggagattgaagctcttgaagctatacttatggatgagtttaaagaaattcattctagtgaaagtgggcttaatacttcgaatcgatgctttcagattacagtgactcctcaggatgatgaactggaggaattagcaatcccaccagttcaactggctttggttttctcgcacacagaaaattacccggacgaggctccgcttttggatgttaaaagtattcgaggaatccatgttagtgacctaccatcttgaagggaagcttnnncaanggnatttgaaaanttnggntggccatgcctttnaatnggnntattagnaangcctgttttttancctttgggaanttttccctta

SEQ ID NO: 98121 - DNA, 760 bp, Arabidopsis thaliana columbia
  unsure (1)..(760): unsure at all n locations
atgatatgccnnnnnnntnnnnnnnnnnnnnnnnnnnnnnnnnnnnnnnnnnnnnnnnnnnnnnnnnnnnnnnnnnnnnnnnccacgcgtccgcggacgcgtgggcggacgcgtgggcttggtcacgaggcgactctcactgtggagttcgatattcaggcaatctcaaaagcttccacgacaaaggtgtcaaatttggtcatcatgacggagtataagcaggagcaggaaatggagattgaagctcttgaagctatacttatggatgagtttaaagaaattcattctagtgaaagtgggcttaatacttcgaatcgatgctttcagattacagtgactcctcaggatgatgaactggaggaattagcaatcccaccagttcagctggctttggttttctcgcacacagaaaattacccggacgaggctccgcttttggatgttaaaagtattcgaggaatccatgttagtgacctcaccatcttgaaagagaagcttgaacaagaggcatctgaaaatctaggtatggccatgatctatacactggtctcatcagcaaaggactggttgtctgaacactatgggcaagatgatgcagctgaatttgccgaagtagaagctgccaaagaggatgaggtaattgtccctcatggagaacctgttacgctagagacattcttggcgtggagagagagatatgaggcagagcttgcacttgagcgagccaagttgatgccggagtctgctcttacagcaccta

SEQ ID NO: 98122 - DNA, 447 bp, Arabidopsis thaliana columbia
ctctctttctctctacaaacaaaataacgagaacttcaaaaatcaaatgggtctttgtgtatctgttaatcgaaacgagtacgtttcttcgtcgacgacggctaaaatcgtaacaattaacggcgatctccgtgaatacgatgtaccggtgttagcatctcaggttctggaatctgaatcgacgtcttcttcttcatcatcatcatcttcttcttatttttctatgtaattccgattctctctactacgacgattttatcccagcgattgaatctgatgagattcttcaagcgaatcagatctatttcgtccttcccatctctaaacgacaataccgtctctctgcctcggatatggcggctctccctgtaaaagccagcgtcgcgattgagaagcagcggggaagaaaatcgccgtcgtagaagcggaagaatctctccggttgtg

SEQ ID NO: 98123 - DNA, 811 bp, Arabidopsis thaliana columbia
  unsure (1)..(811): unsure at all n locations
gagtatcgattagagggcaaattcgctatcgataatctctctaaaaccgctaagaacgaatgtgttattagtcgtgtttttcatacacggactgatggtacgaaggagcatatgtccgttggtttacctccgctgatggattcttctccatatctaaagagtaggggacaagactctttagccgggaccacccttggtgggttgttgtctcacgttacctacttctccgaccaaacaaccgatgacaagagtcttgtggccgattttaaaactaccatgtttggttccggatcgactaactttttaccaaacataggttctctactagacttcgatcctctgtttctacaaaacaattcttcagtactgaagatgttgcttgacaatgaagaaacccaatttaagaagaatcttcacaattcaggttcatcagagagtgaactaacagcgagttcttggcaaggtcacaattcttatggttccactggtccagtgaatcttgattgcgtttggaaattctgaatttggaaaatcgaaaatttggatgttaactagggggtatatagggtttttaaaaacagtgtatatatgcgttatgtgttagctttagattctaggatatacaaagatgacactaatagattcttataacattttgtaaaaaaaaaatcattgtagtgaatactctcttgccatttgaaatccattgtgtttgcattaaaaaaaaaaaaaaaaaaaaaaaaagggcggccgctctagaggatccaagcttacgtacgcgtgcatgcgaataaagnnnnnnnnnnnnnnn

SEQ ID NO: 98124 - DNA, 843 bp, Arabidopsis thaliana columbia
  unsure (1)..(843): unsure at all n locations
caaaaaacctgaggaaactccacagagaagcggttcaaaacacgactaactccataacggtagtggcggttntttttgcttccatagcgttcttggccatattcaacttgccgggtcagtatttcacggaggggtcgcatgtgggacaagccaatattgcagggagaaccggattccgcgtgttctgtcttttaaacgcgacatctctgtttatatcgttagcggttgtggtagttcaaataactttggtggcgtgggacacacgggcgcagaagaaagttgtgtctgtagtgaataagctaatgtgggcagcttgtgcttgcacattcggagcatttttggcgattgcatttgcggttgttggaaaggggaactcgtggatggcgattaccataacgttgcttggagccccgatcttggtagggacattggcaagtatgtgttatttcgtgtttcggcagcggtttaggagcggcaacgattcccagagaaggattaggagagggagtagtaagtcgttttcatggtcttactctcatcatgtatccgattttgaagatgaatcagatttcgagaaaattattgctctttgaattaagtttcttaagcgtctttgtatagatcgtctcttctctttgcctttcttccaacgcaagtctgtgttgtattcttagaataaatcttgttggggcacattagtttcatatatagcaataaagtggcccccggccatatctgtnnnnnnnnnnnnnnnnnnnnnnnnnnnnnnnnnnnnnnnnnnnnnnnnnnnnnnnnnnnnnnnnnnnnnnnnnnnnnnnnnnnnnnnnnnnnnnnnnnnnnnnn

SEQ ID NO: 98125 - DNA, 1167 bp, Arabidopsis thaliana columbia
  unsure (1)..(1167): unsure at all n locations
nnnnnnnnnnnnnnnnnnnnnnnnnnnnnnnnnnnnnnnnnnnnnnnnnnnnnnnnnnnnnnnnnnnnnnnnnnnnnnnnnnnccacgcgtccgtgaaattcaacttctagtcttctcctccaactactggcaaattagggtttctgagttcgagaaaattcgtagcagagtgtgaaaatggaaggaagcaaaagcgaggcagtgttcgattccatgaatctaaatcctcagattttcatcaacgaagcaatcaactccgtcgaagattatgtcgaccaagcttttgacttctatgcccgtgatgcatccaaatctctcaaaatcaaaggatctgataaacaaaagtcacaagctttatcaaatggtattgctcgtgttcgtggtttgctactatctgtaatcgacaatcgtttgaaattgtgggaaagctattctcttcgattctgtttcgcagttcctgatggatttgtgttaccaaagagtgaggagtcttcgtctgtgcatcaggatgggttatatgatctagaattagatgcagaattggattctttaagggataagcttaatgtggtgggaaagaggtctgttgagcttgactctgagctccaggctttagaaagaagctcggtttcgagggaacggtctttgagactcgttaatgaagctttggagctttatgatgagtcttctatggatgaaatattcaaagagatgacgaaaatggcatcggaacttcgtgcaagcgtggagaggctgaaaacaagaagaatgaaagcaagtgaaagcgctaaagtaaagaggctaaagaaccatggcaaagagttttcagcaatgacttttgatggaaagcttgaagacctcgaaaagtttcaagccgagttaaggaagatgtgaaaatttgttaacctttgcagcaaaagaattgtggtttgtcaaagataatgctctaaactgacttttttttgtaaatgactaacttgacttcttctctttatagactacgtcgtttctggcttaccaaacggtcactttcagattaggattcacaaatgattaaattatgaaattataaactgaaaaaaaaaaaaaaaaaaaaagnnnnnnnnnnnnnnnnnnnnnnnnnnnnnnnnnnnnnnnnnnnnnnnnnnnnnnnnnnnnnnnnnnnn

SEQ ID NO: 98126 - DNA, 554 bp, Arabidopsis thaliana columbia
ccagctctctacgactcactatatggaaagctggcacgcctgcaggtaccggtccggaattcccgggtcgacccacgcgtccgatcagcggcgagggcggctctagggtttctattccggctgatctgcttcaaaccattcaaaacatcgagagacgtcaccaggtaaacaacattccgacgaggatatcttctctgtctttaaggagtgtttcagtgatccacatgagaccactcataagctactgtatttagatacatttcatgaggtgagaagcatacagtagagaaagaaagacaatttagtgccagatacacaaggaaggagccggactgcacggaataactttgctgcatgttacacagatgccactaatggaagaagtgcagctattaaaaagcacagtggagctaatcacataataggaggttctggaactgcttcctctgctcctaacaatgcaagacacgacacataagcttcttccataatggccccgaaccctataagtcttccaagaggaatcagtaaccacaaaattcaagatgctatct

SEQ ID NO: 98127 - DNA, 855 bp, Arabidopsis thaliana columbia
  unsure (1)..(855): unsure at all n locations
nnnnnnnnnnnnnnnnnnnnnnnnnnnnnnnnnnnnnnnnnnnnnnnnnnnnnnnnnnnnnnnnnnnnnnnnnnnnnnnnnncccacgcgtccgttcctctctcctcctccctccgcttctctttctctctgtaaccaacatgagcaggatcagcggcgatggcggctctagggtttctattccggctgatctgcttcaaaccattcaaaacatcagagaggttaccggtaaacaacattccgacgaggatatcttctctgtctttaaggagtgtttcagtgatccacatgagaccactcagaagcttctctatttagatacatttcatgaggtgagaagcaaacgggagagaaagaaagagaatttagtgccaaatacacaaggaaggggccggactggacggaagaactttgcttcaagttacacagatgccagtaatggaagaagtgcagcttttaaaaagcagagtggagctaatcacataataggaggttctggaactgcttcgtctgctcctaacaatgcaagaaacgacacaaaaccttcttccataatggccccgaaccctataagtcttccaagtggaatcagtaaccagaaaattcaagatgctatcatatcccctgtggacaaggtggacacagaggaacagcctctctccaaggctacttcttcttctaagggatgttgtgagccggataagtctaaagaaagtagtgtatcagtggctggatcagattctgttgtagaaacgatactcaatatgctgtagttgaaacttttcagatcccacaacagtccgagcgagtattaagagtgagggtgcagcagtaatgcagaatgagtccttctca

SEQ ID NO: 98128 - DNA, 455 bp, Arabidopsis thaliana columbia
  unsure (1)..(455): unsure at all n locations
ctcgtgggtcgacgcaagcctctatactgattcgaaataacgacagaaggggggagaaagtggttgatctcttcggagtcggagaagctaattcccagaagctactcgaaggaggcaaagatctcagcgagatccaacagggattgttcataggatcagtagctgaagcgaataacaaggattttctcaaaagctctaatatcacccatgtcttaaccgttgctgtggccttggctcctccttatcctgatgattttgtctacaaagtcattgaagtggttgatagatccgagaccgatttgacagtatatttcgatgagtgttatagcttcatcgaccaagctattcaatctggtggtggtgttttggttcattgcttcatgggaatgtctangaggttttgattcttttgcccttaaatctcatacattcagttattagatttagtgtttaag

SEQ ID NO: 98129 - DNA, 399 bp, Arabidopsis thaliana columbia
gggcgtgaacttggattgatagatgatagacgatggaagttataccaagagaagcaagcaaggatttcagaagagaagaagagactgaaaactgtcaaggtttcagttgcagtaggtgatttggctgccgaagtttctagtgtgtcttctcagccagtcaaagaatcagcgacactagagagtctcctaaagaaaccacatatccactacaagcttcttgagaagcatggctttggaaatgaagcattatctagaatggagaaagactgtgtagagatcgatataaaatatgaaggtttcattgttcgccagcaaaaccaactgcagcagatggtccaccaacaacatagacgacttccagacgatttggattactattcgatgacaactctatcccat

SEQ ID NO: 98130 - DNA, 1145 bp, Arabidopsis thaliana columbia
  unsure (1)..(1145): unsure at all n locations
aatacgactcctttagggaaagccggtacgcctgcaggtaccggtccggaattcccgggtcgacccacgcgtccggtgggcgtaggtattgccatgggcttttggcgactttggagcttaagagtagacacgatctgatctcaaggctattcaactctgtcgtgccttgtaaagatgagattagttttgaggtgtatatgaatgatgaagccatggatcacattgtgtttgctatggcgaggaagaaggcggctaaaacgatgcacaacgagctgagggatctgcagagatttggaaggatggtcccagtccggcgggagaagtgggtacggaggagtagctgtgtctctgagtctaaggaggagctggagatatttcaccgatgtgtactgatcaggttttggtgacaagtcttttaaaagtttgggaagtatttcatctcaatgcatttctcggatcaacatcctggcaaacacaggaagatgctgcttttcaagtttgccttacctgatattaaacacatggatgatatggttcggttgatagcgctaattccgtattacattgacttaattgggcgctacaagctcagctctcaggcaaggaacaaaactgacggtgctaggcaaaaggcggctcaggaagcgtacaaggaacttgagaatgtgagacaagaggcattgcagagaaagaaagccgaaaagaagaaaatattggaggaggcacaggcaaagcttagctccgaggctctaaggaagaaagaagcaaaagaacgtgcacgccagatgaaaaagtcaatgccgaaagttaagatgagtcgtggtcactagaatcaagcataagggacacactgtcatgtcgtccattggaatagctactccctttttagtcctttcgattagatattttgaactttcatgaatctctctacttgcagttgatttttacttcattacgatttcccctatagtggcaccgaggccttacttccgataatcctccgggacctctttgaatcataagatgagttttgaagttataggcataaaaacaaagggcaaccgctctagaggatccaagcttacgtacgcgnnnnnnnnnnnnnnnnnnnnnnnnnnnnnnnnnnnnnnnnnnnnnnnnnnnnn

SEQ ID NO: 98131 - DNA, 535 bp, Arabidopsis thaliana columbia
gttgatcgtcacgaacccaactgtcataatcttcgtcgatttgatcgattcttcttcgtctctctccgagtgaaatagacccttgatttcactacagaaagttttttttttgtgatcgggaattgaatcttcttatcatgaattatcttcttggagctttcaagccagcatgtaatatttcaatcacatttactgatgggaaaaaccgtaaacaggtacccactaagaaagataatggacaaatagttatgattccacttttccagagtcaagaaactattgccgggaagattagcattgaaccatatcaagggaaaaaggtggagcataatggtgtaaaagttgagcttcttggtcacatagaaatgtactttgacagaggaaacttctatgatttcacttccttggttcgtgaactggatgtacctggagaaatatacgaaaggaagacatacccttttgaatttcctactgtgggagatgccatacgagacatacaatggtgtgaatgtgcggctaagatatgtcctcaaag

SEQ ID NO: 98132 - DNA, 571 bp, Arabidopsis thaliana columbia
  unsure (1)..(571): unsure at all n locations
nnnnnnnnnnnnnnnnnnnnnnnnnnnnnnnnnnnnnnnnnnnnnnnnnnnnnnnnnnnnnnnnnnnnnnnnnnnnccacgcgtccgcccacgcgtccgtacggctgcgagaagacgacagaaggggtaaacaggttcccatgaagaaagaaaatggtcagacggctctggtgcctctgttccatagtcaagacactatttccgggaaggtttgcattgaaccatatcaagggaaaaaggtggagcataatggtgtaaaagttgagcttcttggtcaaatagaaatgtactttgacagaggaaacttctatgatttcacttccttggttcgtgaactggatgtacctggagaaatatacgaaaggaagacatacccttttgaatttcctactgtggagatgccatacgagacatacaatggtgtgaatgtgcggctaagatatgtcctcaaagtaaccgtcactcgtggctacgctggaagcatcttggaataccaggagcttgtggtacggaactacgctccacttcctgatattaataacagcatcaaggtggaagttggaattgagga

SEQ ID NO: 98133 - DNA, 973 bp, Arabidopsis thaliana columbia
ctcgtgggacgacgcaagcctctatactgacgtcgtgactagaagacgacagaagggggaagtgacacagcgaagttcgagtatgagccgcaagagagataaaccctacacaaaccgtcacacgccggcgcgaatttcgaaacgccggcgaccatgggcgccttcgtcatcggagcacgatgagattatcgacaaaccgatcaccaaacctccgccgccaccggcgttggtagttatgggacttcccgccaactgttcagttctggagctaaagtctcgattcgagatctacggttcaatctcccgaatccgaatccataaggacggaattggctccgtttcgtatcgaaccgccgagtcagcagaagccgccattgctggtagtcacgagccttctttcggtatctccatcgattccaaaaagttggaggtggtttgggcgacggatccattggtgaagtggaaggaaggtgtgacggcgggagaaggaaaggagagaacgtcgtcgttttcgtcgaagcttttacgacctgtgatgcctttgagaaaacatgggagaagcagtaggttagcgtcagctattgttaatccgagaagtgataatactaaaggaattagtgcagatggagggatatcatctccggcgacgacaagtgaagttaaacagagaaatatagtaacctacgacgatatcgtttaacaccattctactacaattatagtaactttgattcttttacatattttggcaattttatgagtttagctaatcctgttggtaatctcagttgtcgaatgttgtgaaatgagttgagttttgtttatttgccccattgtaacttataagaaagagaaggattccaaaatgggtaaaaaaagaaaaggtgaacgaacccatagagcggccgctctagaggatccaagcttacgtacgcgtgcgtgcgacgtcataactcttctatagttgtaccta

SEQ ID NO: 98134 - DNA, 646 bp, Arabidopsis thaliana columbia
  unsure (1)..(646): unsure at all n locations
cccacgcgtcagaaaaaaaaaactcggaatctgaatccgatcaaatctgaacaacaccggcgacgaatctctgcggcgtagatttagatttcatcccggggagacttaaattgatgcagtagtgaaatatcacggcgaagggatggtttgttggtaaaagagccaattgaaatcagttatgtcatcgggaggagccggagagtataacgaagacagacatctgttacgatccaccgacggagatgaagtcggcattggcggaggagagggtgatctagatgttgaatctcagtctccggctatcagaagtggagctggaggagttagggatctgttcaagcatatagatcggagattttctctttccggtcgtcgtttaagttttaaacggatggagaatatcagagtcgatagagagcgccataaatccttcttccttcttcagcgttttcggcttcttggagaagaagattggtnggtggtatcagtaatttccatagcgttgatgancgaaatacgggtncgggtttatgaggagtctncgngntaagtcncnccctaagngggnnctcttcnaattgctncctattgggttcccctgaatttttcnccgttaaaaaagggnnatgcnatcnanggggggggc

SEQ ID NO: 98135 - DNA, 573 bp, Arabidopsis thaliana columbia
gttggacgtcgcaacaccctatagtgagtcgtattaaccacagaagggggctttacgaaagcttttgtgggaacaacagctacgcgttttgccgtcctgcctgtggagtgatccctgaacagcggcacatggcagttcctgtgccccttgttggagcagcgcttggtgttggcgtgcaggtgtatgccaatgccgtgcgcaagctgccgctgatgcggaagccctggctacatgttctgtgcggcagcgcaggctacggcttcggctcgtggctcgtggaatttgaagcaaagacgcgcaaggacctgactgaaatgttgaagaatcgcgagaatgcgaacaagcacctgcagccgtggcaacatccttgcgcagcgaacatgcatgctgagaggggccagcccagcagcagccaagcctcacacagccaccgccacacatcacgtgcccctcgcaaatggtttaaatgtcccagtattgggagaaaaaaaaaaaaaagaaaaacccataacggccgctctagaggatccaagcttacgtacgcgtgcaggcgacgtcataactcttctatag

SEQ ID NO: 98136 - DNA, 663 bp, Arabidopsis thaliana columbia
  unsure (1)..(663): unsure at all n locations
ttaggtgccactatagaagagctatgacgtcgcatgcacgcgtacgtaagctcggaattcggctcgtgggggacacgaaggtagagacaatctcgaggttagctcaatggagaattgaaaattttggtccttgttctttcaaaaagtccgatcctttcaaagtcggaatttggaattggcatctgtctatagagaggaatcgctatctatcagtgaggctattcccagaactttctcgagtatctaaagagcaacctcctgttgccaaatttgttcttcgtgtctccaacgttggccccaatcgtagattctacatctctcctgtttatgagaagctgctgcgtacaactgatgattgtgtgtggcatgttgactccagtttccacggtcggattcaccattgatgggtgaggttcttggatctcaaaatctgcccctgtgaatggtgggtgaagcttctccctgtttggccacccgttgaaacaatgcaatcaatctctacttaaaaccactttcaaatggttatccccggttcttgggggagggattctaacccgtgaaattctccacaaagccggtggggcaatttttggtaaaagggtccccccttaggtgggccaactttttaaaaatttccccgcccttggaagggnttcccatttc

SEQ ID NO: 98137 - DNA, 1296 bp, Arabidopsis thaliana columbia
atacgactcccttagggaaagctcgtacgcctgcaggtaccggtccggaattcccgggtcgacccacgcgtccgcccacgcgtccgaaaacttcagagagaaagtggatgggggacacgaaggtagagacaatctcgaggttagctcaatggagaattgaaaattttggtccttgttctttcaaaaagtccgatcctttcaaagtcggaatttggaattggcatctgtctatagagaggaatcgctatctatcagtgaggctattcccagaactttctcgagtatctaaagagcaacctcctgttgccaaatttgttcttcgtgtctccaacgttggccccaatcgtagattctacatctctcctgtttatgagaagctgctgcgtacaactgatgattgtgtgtggcatgttgactccagtttccacggtcgattcaccattgatgttgagtttcttgatctcaaaatctgccctgtgaatggtggtgaagcttctcctgtttggccaaccgatgcaacaatgcaatcaatctctactcaaaccactctcaaatgcttatcccggatgctagaggaaagcatactaaccgatgtaatcatccacacagccgatggaacactctctgctcacaaagctatcctctcagctagctcaactgttttcaaaagcatgttccaccacgacctcatggaaaagggatcatccacaatccacatagacgacatgtcgagagaatcttgcatggctctactaagttacctctacggaaaccatacccaagaagagttctggaaacacaaggctcgccctcctcggcgctgcaaacaagtacgacataacggatttgaaagcagcctgcgaggagagcctaatggaagatataaactcgagtaatgtgctcgagaggctacaagaagcttggctttatcagctggagaaactgaagaaagggtgtttcatgcatttgtttgatttcggaaagatttatgatgtcagagaagaaatcagcagtttcttcaggcaagctgatcgagaactgatgctggagatgtttcaagaggttttgtctgtgtggaaaccggtctaatatacacttacacacatactttgaacatttcagcttgatggtgttttgtttatagtcttcttgttctcttctgtgtgtgtaactaacaacaactctggattttgttgtatcactctgtctaatgtatagtagccgcaaattcaaacagcccgggggatccactagttctagagcggccgccaccacggtggagctccagcaaatgtt

SEQ ID NO: 98138 - DNA, 464 bp, Arabidopsis thaliana columbia
  unsure (1)..(464): unsure at all n locations
cgtgggtcgacgcaagactctatactgagtcgtaataacgacagaaggggacataagagggaaaaggaaaatgacttatggggaggaggagccggttagcccgatggcgcgtgtattccaatcgccgggcatagacttatgtgccgtgaccatcatgggtttcaaaacaaagattaatcccgacgttgttcttgatgccttgaagcaaaatgtctccaagcatcctcgtttctccagcatactgtccgataatggtgcaaaatggatcgagaccgaagttagtgtagaagatcatgtaattgtaccatacatagacgcggaagagataggtgaaggtggacaaagcttcatcgatgattatatgtcacgtctcacgatgattcctctcgatagatcaagaccctttgtggggcatttcacatcccttaacgtcaaaaactccagaggnctttaaggcagtcggt

SEQ ID NO: 98139 - DNA, 605 bp, Arabidopsis thaliana columbia
cctatagtgagtcgtattaaacaatagggaacactacgccggagaccaataaccagactttcatcaaccagcatggtctgatacagtttgatccaatcgataacatcaacctcaggagtaccggcaccaacaacagcttcttcaccctcggattctttcacgaaaacacgacgaactcagagacgactcctccctctctatatagcaccgacgttcttgttcatcaccgtgacagaaaacttcaacgcgggttctaacgtgtcagccacggcactacttcagaaagctacacaaatgggtccagtcacaagcaacgacccatctgctttgttcagaggcttagcttcttcgtctaactcatcaagtgttatcgctaatcactttggtggaggacgaattatggagaatgataataatggaaaccttcaaggtctaatgaactcattagccgccgttaatggaggtggcggatccggtggcagtatcttcgacgttcaatttggagacaatggaaatatgagcggctcggacaagttaacgttagattttcttggagttggaggaatggtgagaaatgtaaatcgcggtggtggtggtggtggtcg

SEQ ID NO: 98140 - DNA, 544 bp, Arabidopsis thaliana columbia
  unsure (1)..(544): unsure at all n locations
nnnnnnnnnnnnnnnnnnnnnnnnnnnnnnnnnnnnnnnnnnnnnnnnnnnnnnnnnnnnnnnnnnnnctcgtgggtcgacccacgcgtccgtacggctgcgagatgacgacagaagggacaaggttgttgaagtgaatcctatcagtaagaaagaaatcaaatggtctgattataagaaggtgcctattcttactgtagatggtgaacaaatggttgattcttcagtgataatcgatagcttattccaaaagatgcaccctgaaatttccaagtccgaagatgatgaagagactaaatggcgcaagtgggtggacaaccaccttgtgcatcttttgtcaccaaacatatacaggaatacttcagaggctcttgagtcctttgaatatatcaccacacatgggaatttcagtttcactgaaagattagtggcaaagtatgcaggagcaacggcaatgtactttgtatcaaagaaattgaagaagaaatataacattacagatgaacgtgcggctctttacgatgctgcagagacatgggtcgat

SEQ ID NO: 98141 - DNA, 881 bp, Arabidopsis thaliana columbia
  unsure (1)..(881): unsure at all n locations
gatactccnnnnnnnnnnnnnnnnnnnnnnnnnnnnnnnnnnnnnnnnnnnnnnnnnnnnnnnnnnnnnnnnnnnnnccacgggtccgtgcggctgcgcgaagaccacagaaggggacaaccgaccgagtcggagatcgaagttttgaacctaagaatctcgttgtcttcttcttctgcagagcctccaaagtctaaatcttttggttacgtctctcaaaccccaacctttatactcactctctttctttttctctcttacctccattggcttcttcttgagatctcgtcaggctctgatcccaatctatgttcgatctcactctcaccgagatctcatcttcctccattttttcaaagatccatatatgagctctaaaaccacagatttcaatctgtgaatccgtatatatgctcaatcggagccagattctaacaaatcaaagaaaggaagaagaagtgaagaacaatgggagctgaaaagaaatggcttttcacactcttctctgtagtatgcctctcagtgttccttctcttactttattctatctctgctttcaccgctaaaccattcccttcttcaattcggcacggggctcatgaacccacctgcttttgcttataacataaccggtggtcgtggagataatgaccggatctctcggttattgcttgcggtttatcatcctaggaatcggtatcttatccatctggggtgctgagctacctnatgcagagaggctagctccttctctctgatttgaaacntgtccnggctgtgaatgctttttgggnattgttgatntttaggggnaagtttaancggttntnctnngnatngggcctcnaaggattgcttctactnttnacggttgtttcaat

SEQ ID NO: 98142 - DNA, 1311 bp, Arabidopsis thaliana columbia
attagatccatttcagagctaagcgtactaattagtgtactaagggtagtgtgactcattaccacctaaagtagtttcaattttctcctgtcgtcctcggcaaagagttatagtgggaaacaaagggagtggttaataaagaattaattagttaattaagggagttcaagatcataatggtgaggcctccttgttgtgacaaaggaggagtgaagaaagggccatggactcctgaagaagatatcattttagtcacttacatccaagaacatggtcctggtaattggagagctgttcctaccaatactgggctgcttagatgcagcaagagttgtagacttagatggacaaactatttaaggccaggaatcaaaagaggcaatttcacagaacatgaagaaaagatgattgttcatctccaagccctcttaggaaatagatgggctgcaattgcgtcatatcttccacaaaggacagacaatgacattaagaactattggaacactcatttgaagaagaaactcaacaaagtcaatcaagattctcatcaagaacttgaccgttcctcgctctcatcttcaccatcgtcttcttctgctaattccaactcaaacatctcaagaggccaatgggaaaggcgacttcaaaccgatatccacttggcgaaaaaggctctctctgaggctttatctcctgccgttgcaccaatcattacatctacagtgacaacaacgtcttcctctgctgaatcaagacgctctactgcctcagctagcgggtttcttaggacgcaagaaacatctacaacttatgcctcaagcaccgaaaatatcgcgaaattgctcaaagggtgggtgaaaaactcgccgaagactcaaaactccgcggatcaaatcgcttctacagaggtaaaagaagtgatcaagagtgatgatgggaaggagtgtgcaggggcatttcagtcattttctgagtttgatcactcatatcaacaggctggtgtttcacctgatcatgagaccaaaccagacataactggatgctgcagtaaccaaagtcaatggtctttgtttgagaagtggttgtttgaggattctggtggacagattggtgatattctattggatgaaaacactaatttcttctgaagagtttgctttaatcacatggttctaattttaggatcctcatctctattttttttttggggttttccaaattaactcgcttagattatcgtgagataaatcagtaataattttatttattttccctctttaatttacaattaatgatggggttgcttttaaa

SEQ ID NO: 98143 - DNA, 447 bp, Arabidopsis thaliana columbia
gagccctgtcaatggctcgcttcgtcagatgtctgagaagaacactcttttctaattcgtctccttctattgctcaccggagccctaggattggtttgcccacgaatctaaatcctaaaattttaatcagccgcagatgtctgagctccgggagttacgtctcagaaatgcagaaatcagctttccagggcaacattttgcgactgatccgtaatgagattgagtacgaactcgatcactcgcctcctcttcagcctcctaacagttttggtccattcactgtggatgaacggcctggagagcagtggattagcttgaaaaggaattttggggataaagaagacatcaaaattgaagcaactatgtttgatagatcagttcccacgtcaaaatctaccaaaactgaacctgaatatattcttcacatcactttcattgtcaacatct

SEQ ID NO: 98144 - DNA, 507 bp, Arabidopsis thaliana columbia
  unsure (1)..(507): unsure at all n locations
nnnnnnnnnnnnnnnnnnnnnnnnnnnnnnnnnnnnnnnnnnnnnnnnnnnnnnnnnnnnnnnnnnnccacgcgtccggacgacagaagggggctcacaaaaaaaagaaagaaagccagagtaagaaaccatggaagacgccatatatgttgcagtgaatcaagatgttcgagaaagtaaaaaaactttgttatgggctttgaaaaatcttcaagtcaagaagattttccttcttcatgttcatcttccattttcgttgaccacttcttcaagtaggcttgaacaaagtgagatcgatgcaatccaagattcagaactgaatacttcagtaaatagcctctacaagtaccgtgatatctgcataaacaaaggggttaatgaaaaagatgtggatacatcaatgatctcaggacatgatgtgggggaagggattgtggaactcatctatcaagacattatcacgaacctcgttatgggagcagcagctgatcctcactattccagggg

SEQ ID NO: 98145 - DNA, 512 bp, Arabidopsis thaliana columbia
  unsure (1)..(512): unsure at all n locations
cannnnnnnnnnnnnnnnnnnnnnnnnnnnnnnnnnnnnnnnnnnnnnnnnnnnnnnnnnnnnnnnnnnccacgcgtccggtttcctcatcttcaaaacattgtactagtctcaatctccaactgttttaaatgggaatttcgaaaaaatctcaagttagcagagaattagacaccgatggaaaaaagtttatcttcgccaaaacatcgattcgggcttcactaaagccggtgaagacgaaactcattaagcctgagagagaatcagaagatggaatttgtatcactcccacggcgagaggagcaaagactccggagtgtccggcggctccaaggaaacgcccaccggtgttgaaatgtcagaacaatattcgtatagagtactttgtgcctccttcagatttcgagttggtgtttatacaacgccgttaatgtaaaaagatataaaaagagtttctgagtttggtttttacaaaaaaaaaaaaaagggcggccgctctagaggatccaagc

SEQ ID NO: 98146 - DNA, 535 bp, Arabidopsis thaliana columbia
atgattcgccggcactaatacgactcatatagggaaagctggtacgcctgcaggtaccggtccggaattcccttgtcgacccacgcgtccgtacggctgcgagaaacgacagaaggggagagccaaacataaaaaaaaatcaatacatatgcaaatatatagcaacaaccgaacgatgaggaccaaattttcacttaatctgatttctccggcgaagaacatggtgaagattcatcctgacaaggcgtttcctgcggattttagcgtgggagaaggcaagacttcgccgtacttaacgacggagaaagagagtttcacgatttggatgagatctcttgtgttccatagtaaaggctgcacagtttttgattccaaaggaaacttagtctatcgagtggataattataactccaagagttgtagtgaagtttaccttatggacttatacggcaaaatcttgtttacattacgtcaaaggaaattgggattatgcagatcttggaaaggatataaccaaccgggacaagattcaact

SEQ ID NO: 98147 - DNA, 936 bp, Arabidopsis thaliana columbia
aaagaaattggctgcaaagggtaggaagatggtgaccattgtggatcctcatatcaagagggatgactcatacttcttacacaaagaggctactcagatgggatactatgttaaggattcatctggaaaagactttgatggttggtgctggcctggttcatcatcttacattgatatgttgagcccagagattagaaaatggtggggtgggaggttctcgtataagaactatgttggttcaactccatcattgtacacctggaatgacatgaatgagccttctgtattcaatggtcccgaggttactatgccaagagatgcattacatgttgggggtgttgaacacagagaagttcataacgcatatggatattacttccacatggcgacttccgatggacttgttatgcgtgaagaaggaaaggataggccttttgtattgtcaagagcaatctttcccggcactcaaagatacggagcaatttggactggagataacacagccgaatgggaacaccttagagtctccattccaatgatattgacacttggtcttactggaattacattctctggagctgatattggtgggttttttggaaatcctgaaccagaacttctagttaggtggtaccaagtgggtgcttactatccatttttcaggggtcatgctcatcacgaataccaaaagacgagagccttggttgtttggtgaacgggacacagaactcatgagagatgccatacacactcgttacacactgctcccatacttctacacgttgttcagagaagcaaacgttacgggtgttcctgttgtacgcccattatggatggaattcccgcaagatgaagctacttttagcaacgatgaagccttcatggtcggtagtggtctactggttcaaggagtttacaccaagggaacaacgcaag

SEQ ID NO: 98148 - DNA, 1372 bp, Arabidopsis thaliana columbia
  unsure (1)..(1372): unsure at all n locations
aaccttgctacgagcgtttccagatttctcccaaaacggaactgctgnttccttgaataaaattccctaatcggagtctgtgaagcaaatgggagcatcagattcaactctgctaggctctcaggaaaatcgaggtgatgtgattacgactatatctcatcgatcagaaatagtcgatcccattctcgagaatcttaaagctctcacagtaagtaggccaatattgaagtctcctcccacggaaagtagcttaacagatatcttagtgagaaaagctctatccagttcctcttccaatacggttgatcctcaaaatactttgtaggggcccttcccccctttaccggggatggccaaggcggcccaagctccaaggaaatttcccnagggggcccgggaggtttttggaaacccaggttggaagtcccanttnctttttggcggcctaaactttttcagggggttaacccccctctgtttctccaatgggggcaactgccccccatttacctcaagttcatggtttccaggtggagctcggggagcttaaaggaagattgacagaggtgatcagcaactgcgatacattatgtaagagaattaattctgagggacctgaatctctgaggtccacagtggcgcctttttctcttgcatctcccgattcggtcagtataaatactactacaactctgtcttctaaacccgaggcataagagtaaatactcttaatggtagttagattggtgaatcgaatacgtgtagttctacagcatactttctgatctcctctgattttgcatagatgcatgatgatgctattgattgatctttttgttacaaatcattgttttcttttgtcatttcatctttaggcttttcgatttgtacaatcgcttgtgaccagtaagaaaccattgttctgataaggggaaaattcatatgtaataaatatgctttgtttgccttttgatacaaaatccacaatggacgattggcagtgtatggagttgaacaacttgaaacaacgaaagagaacaacaacaaatgaaacaaaattacatttcaatgaaaaagcagataatgattactcttctttgccacctccccatatcaaggttgctgctgagcgtccatggtaaccagcgtcggcgagcactttctccctcttggccagctcanggtcttcggccaccatcatcttcaccagcttctcgnaccctactttngggcttccacccaacattcccttgcctggctgnggctccttcagatgtcgacncggggggcgggaanacctttggccganccgaatggggcttncagtgngccnnggaccgaagaacgccagaaacctgngggggggntccca

SEQ ID NO: 98149 - DNA, 688 bp, Arabidopsis thaliana columbia
  unsure (1)..(688): unsure at all n locations
cnnnngggagttgagaaaaccttgctacgagcgtttccagatttctcccaaaacggaactgctgattccttgaataaaattccctaatcggagtctgtgaagcaaatgggagcatcagattcaactctgctaggctctcaggaaaatcgaggtgatgtgattacgactatatctcatcgatcagaaatagtcgatcccattctcgagaatcttaaagctctcacagtaagtaggccaatattgaagtctcctcccacggaaagtagcttaacagatatcttagtgagaaaagctctatccagttcctcttccaatacggttgatcctcaaatacttgtagagctcttctccatttaccgagaatggcaagagaacaaagctcaagaaattaccaagagacaggaagatatagaaaacaagatagaagtcgcagatgctttggcgactaaacttttacagaggtttaaccactctgtttctgcaatgaggacaactgcccagcatttaatctcaagttcatggtttgcagggggagctccgggaagcttaaaggaagattgacagaggtggtccagcaactggcgatacaattatgtaagaagaattaaattctggagggaaccccggaatcttttgggagggcccacacatgggcggccctctttttctttttttggcaatcctcccc

SEQ ID NO: 98150 - DNA, 862 bp, Arabidopsis thaliana columbia
  unsure (1)..(862): unsure at all n locations
ctatgacgtcgcatgcacgcgtacgtaagcttggatcctttaaagcggccgcccttttttttttttttttacaaatcattgttttctttggccatttcatctttaggcttttcgatttgtacaatcgcttgtgaccagtaagaaaccattgttctgataaggggaaaattcatatgtaataaatatgctttgtttgccttttgatacaaaatccacaatggacgattggcagtgtatggagttgaacaacttgaaacaacgaaagagaacaacaacaaatgaaacaaaattacatttcaatgaaaaagcagataatgattactcttctttgccacctccccatatcaaggttgctgctgagcgtccatgtaaccagcgtcggcgagcactttctccctcttggccagctcaaggtcttcgtccaccatcatcttcaccagcttctcgaaccctacttttggcttccaccccaacatttcctttgccttgcttgcgtctcctttcagattgtcgacctccgtgggccggaagtaccttttgtcgatctcgacatggtctttccagttgagccccacgtacccgaaagacacgtccagaaacttccttgacggtgtgtgattcctcagttgcaaccacatagtcatctggtttctcctgctgcagcatcagccacattgcttccacgtagtctcctgcgaaaccccagtctcttgaagcctgtatatttccccggaagagcttggtctgcaatccgaccttgatccttcccaaggcccgagtgattttccgagtcacgaagntctctgctctgcgaggtgactcgtggttgaagaggattccgttgcaggcgtacagaccgtag

SEQ ID NO: 98151 - DNA, 1696 bp, Arabidopsis thaliana columbia
  unsure (1)..(1696): unsure at all n locations
cgatattagcagcacatgttgattgccataagccaaagccaatcctctccacgcgtccgtctggatgtccaccaatcatcttcgcacttctttcgtccagtcgatgataataacggtggagaacgacggaggcgggcgacgttagggtttctaatcatttctctctcttagacgcttatggcagtgaagaaagcctgcgaaatgttcccgaagagtttgatcgaagatgttcacaaatggggttgcatgaagcaaaccggtgttagccttagatacatgatggagtttggttccaaacctactgagaggaatcttttgatttctgctcagtttttgcataaggagcttccgattcgcgtcgccaggagagcgatcgaactccagacgcttccttatggtctctctgataaacctgccgttttgaaggtgcgggattggtatttggaatctttcagggacatgagagcatttcctgagattaaggattcgggtgacgagaaagatttcactcagatgattaaggctgtcaaagtaaggcataacaatgtggttcccatgatggctttgggtgttaatcagctcaagaaaggaatgaattctggaaatcttgatgagattcatcagtttcttgatcgtttctacttgtcgcgaatcgggatccggatgcttattgggcagcacgttgagttgcataatccaaatccaccgcttcatacagtgggttatatacacacaaagatgtctcctatggaggtagcaaggaatgcaagtgaagatgctcggtcaatttgtttccgagagtacggttctgcaccggaaataaacatatatggcgatcccagtttcacctttccgtatgttccaacgcatttgcatcttatgatgtatgagctagtcaagaactctctacgtgctgtccaagagcgatttgttgactctgatagagttgcaccaccaatccgcattatagttgctgatggaatcgaagatgttactataaaggtctcagatgaaggtggaggtatagcaagaagcggtcttcccagaatattcacctatctttacagcactgcaagaaacccgcttgaggaggatgtcgatttaggaatagctgatgttcccgtgactatggctggatatggttatggtcttccaattagtcgcttgtatgctcgatatttcggtggagatttgcagatcatatccatggaaggatatgggactgatgcatacttgcacttgtctcgccttggagattcgcaagagcctttaccctgagaacatctctatgtcaggcaaagtaaagaaagctttgacatgtatttatggtagatgagggatatctacaatactcaattatttatgcttttccagtttcttctaatgtacagactacagacattattttctcgtattacgctttcttgattttagactcagatatggagctttttccaagtgagttaatctcctatgatttgttttgattcgatccaaaaccaccttgtatccgaaaaaaaaaaaaaaaaaattggtttatattcgataaaacagctacaacaagctcctgcatttggatcggttactttaaaaaaaaaaacgtaatcacaaaaaaaaaaaaaaagnnnnnnnnnnnnnnnnnnnnnnnnnnnnnnnnnnnnnnnnnnnnnnnnnnnnnnnnnnnnnnnnnnnngcc

SEQ ID NO: 98152 - DNA, 906 bp, Arabidopsis thaliana columbia
  unsure (1)..(906): unsure at all n locations
nnnnnnnnnnnnnnnnnnnnnnnnnnnnnnnnnnnnnnnnnnnnnnnnnnnnnnnnnnnnnnnnnnnnnnnnnnnnnnnnnnnccacgcgtccgatttccctctcttatcctcaatgaaaaaaataatctgagaaaacgcaaaagaagaacggagcaaaatcctcagaatcgtcgccggagaatctttacgtttcgacataatcggaattttggaattgataattccgatggaaggggttatcacatgtttccatacgaaatgcgtctctcttccaattcgttctttcccactttctagggtttcttcacttcctcggtggaggaacaataaattgatctcttcatcgcgatcggttcatctaagaagcttgtgcgtttcgagctcagatactttagtcgcgagcggttcaccaaaggaagacgagaggcagagcaaagtatcgagcaagaaggaaggagatgactccgaggatttgaagttttggatggataagaatgggttgccaccttgcaaggttattctcaaggagagaccagctcatgatcagaagcataaacctatacattatgttgctgctagtgaggatcttcagaagggtgatgtggcgttttcagttcctgattctctggtggtcactctggaaagagttttgggaaacgagactattgctgaactgttgacgacgaacaaattatccgaactggctttgtctagctttgtaatttgatgtattgagaagaaacaacgggaagaaatcccgttgggggccccccataagagaacttgatcgtcaaagaggaagaggtcagttagatgcggaatcccctttgctgtggtcagaggctgagttagattacctaactggtagtcctaccaaggccgaagttcttgagagggctgaagg

SEQ ID NO: 98153 - DNA, 609 bp, Arabidopsis thaliana columbia
  unsure (1)..(609): unsure at all n locations
cccacgcgtccgaccacgcgtcagcccacgcgtccgctctctcgcatctccaaatcgaaatcgctctctgcctctcttcgtctccgtctccgtctccgtctccatctctgtctccggtaagtcactgaaagatggggcgtgttagaaccaagacggtgaagaaatcttcacgtcaagtcattgagaagtactactctcgcatgactcttgactttcacactaacaagaagatccttgaagaggttgccatcatcccatcaaagagactccgcaacaagattgctggattctccacccacttgatgaaacgtatccagaagggaccagtccgtggaatctcactcaagcttcaagaagaagagcgtgaacgccgtatggactttgttcccgatgagtctgctatcaagactgatgagatcaaggtcgacaaagagactcttgagatgcttgcttctctaggaatgtttgacacatccggcatctttgcagtcgagcacaacaagctttcggaccaatccctgctttcggggggggagggaccagaagtacaagatggctcagtaananagcacgttgggcccttttccagtagggnaaaanattggggnt

SEQ ID NO: 98154 - DNA, 759 bp, Arabidopsis thaliana columbia
  unsure (1)..(759): unsure at all n locations
cagatccacaaaaagggggatcagttccgtcgccgcttcttcgatttttgacgccgccgcttcttcttcttcctcgcagcaggtaagtcacacaggtaactgaaagatggggcgtgttagaaccaagactgtgaagaaatcttctcgtcaagtcatcgagaagtactactctcgcatgactcttgacttccacactaacaagaaaatccttgaagaggttgccatcatcccttcaaagagactccgcaacaagattgctggattctccacccacttgatgaaacgtatccagaagggaccagtccgtggaatctcactcaagcttcaggaagaggagcgtgaacgccgcatggactttgttcccgatgagtctgccatcaagactgatgagatcaaggtggacaaagagactcttgagatgcttgcttctctaggaatgtctgacacttccggcatctctgcagtcgagccacaacaagctatgggaccaatcgctgctttcgggtggtggcaggggacccagaagatacctgggatggctttgttatcatcagccaatcaaggcaaacggctggctctcttttttcacagttagggataggaaagacgtgtgtgttcttggaaagtttattgtttcttttgattcaagttnttatgtcttaaactcagagtgagactctttcgtattaatgggttttgagttatgtggaaccaaaattggagttaaaagtttcgatagtaaaaaaaaaaaaaaaaaac

SEQ ID NO: 98155 - DNA, 959 bp, Arabidopsis thaliana columbia
gctattttgggggttcccgggcgccccccccctcctagggtgtgtgcggtttttcgtttcaggctttcttctccattttccccgtcccgcggccttttttttgttttccgtttcccgtctcccttttccttttctttttccggttaggtccttaacatatggggcgtgttgggtccccgccgtgtgaagttttttttcccgtcatgtcattgagcagttctcctctcgcttggctcttgtctttcgcgctgccttgagtttccttgatgtggttgccatcctcccatcaaagagtctccgctgcatgatttctggtttctccccccacttgatgtttcgtatccagaagggtccagtccgtgggttctcactctagcttcatgaagtagagcgtgtgcgccgtatggtctttgttcccgatgagtctgctatcaagactgatgagatcaaggtcgccatagagtctcttgagctgcttgcttctctaggaatgtctgacacatccggcgtctctgcagtcgatcctcatcaagctatggcgcctttcgctgctttcggcggcagggctcccagtagatgctaagatggcctcagctaatcatcagcttcgattggctctcttttttctcagttaggggcaagaaagacttgtgtggttgtttattgtttcttctgattatgtcttaatctcaatgtgaggctctttcgtatttttggtttttgcgcgtccgcgtattcctgcagcccggggggtcccctgttcttgagcgtccgcccccgcggtggagctccagcttttgtttcggtttgtttgcatcgttctacgtgttccaatttgtttctcttccctgttttggtttttgcgcgtcgttctttggttgttccgcgctgctgcttttcgttcgcttttgtcttgttccctgttttgtgcgcgtttcttttctctttgtgttgttttt

SEQ ID NO: 98156 - DNA, 872 bp, Arabidopsis thaliana columbia
  unsure (1)..(872): unsure at all n locations
ttttattccaattacttttagggaaggttgttccccttgcaggtaccggtccggatttccgggttcgacccacgcggcttctctgctctccagctccggtcaatccgtacaggtaagtcaaaaagttgtgaaagatgggtcgtgttcgtaccaaaacggttaagaagtcttcacgtcaggtgattgagaagtactactcacggatgacactagacttccacaccaacaagaagatcttggaagaagttgcaatcatcccatcgaaaaggctacgcaacaagattgctggattctccactcacttgatgaaacgtatccaaaagggtccagtccgtggaatctccctcaagctacaagaggaagagcgtgaaaggcgaatggactttgttcccgatgagtcagccattaaaatcgatgatgttaaggtggacaaagagacactagagatgcttgcttctttgggaatgtctgatattgctgggatttctcaagtggagacacaacaagctatggcacctgctgtgtttggacgtcccgcaggaagataccaacgctaagtttattgggtttcaatcaaagatttcggagacgagagtttggtttattggtctagtatggattcaacatcgtttcctttgatttaagattaatgtcgtttcctttgatttaagaattaatgtctggaatttatagcttttgctttgttttaacctttttttttggtccattttgaactatgatttggagttgcaatcaattgaaaacagcatgtaattcatctcttcaaaaaaaaaacaaaaagnnnnnnnnnnnnnnnnnnnnnnnnnnnnnnnnnnnnnnnnnnnnnnnnnnnnnnnnnnnnnnnnnnnacc

SEQ ID NO: 98157 - DNA, 605 bp, Arabidopsis thaliana columbia
  unsure (1)..(605): unsure at all n locations
cgttcctntttcnccggtagtacgaagtggncgntagaccnagcccggagaatcttctcgtaagtcatgggaagtactatccgctgactctgacttcacctacagaagatccttgaagagttgccatcatcccacaagagactccgcaacaagattgctggaattctccacccacttgatgaaacgtatccagaagggaccagtccgtggaatctcactcaagcttcaagaagaagagcgtgaacgccgtatggactttgttcccgatgagtctgctatcaagactgatgagatcaaggtcgacaaagagactcttgagatgcttgcttctctaggaatgtctgacactctcggcatctctgcagtcgacccacaacaagcgctatatggcaccaatccctgctttcgggcggcggcagggcacccaggagatacctaagatgggacgattggctctcttttttcacagttagggacaagaaagacttgtgtggttgtttattgtttcttttgattatgtcttaaactcaatgtgagactctttcgtattaatggtttttgagttatgtgaaaaaaaaaaaaaaaaaaaaaaaagggcggccgct

SEQ ID NO: 98158 - DNA, 396 bp, Arabidopsis thaliana columbia
gaatgttgatgattctgcttttagtgagattagcattgatgaattgagggcttatgctcgtgatattatggagaaagagattgaaaagcatgctgctgatggccttggccgagttgattatgcattggcttctggtggtgcttttgtgatggagcattcagatccttatcttgttggtaaagggagtagctggtttgcgactaccatgcggcgcgctcatacgaatgcggttaagatgttatctccgagcttcggtgagcctggacaatgttttcctctgaaaggtagcgagggctatgtgcaaatcaggctgagaggaccaatcataccagaggctttcacattggagcatgtagctaagagtgtaacctaccacagatcgagtgctccagaaga

SEQ ID NO: 98159 - DNA, 538 bp, Arabidopsis thaliana columbia
  unsure (1)..(538): unsure at all n locations
aagattttcgggcactaaccgcactcatttagggaaagaacgtacgcctgcaggtaccggtccggaattcccgggtcgacccacgggtccgtgcgggtgcgagaagacnacagaaggggtaatgccagaggggatatctccgagtctggcgttcatagtgcagtcttgttgggtggaggacccaaacatgaggccaagcttcagtcaaattatcagactgctcaatgagttcctccttacccggactcctccgcctcctcagcctctgcctgagactgccaccaacaggaccaatggccgagccatcactgagttctccatccgtccaaaagggaaatttgccttcattcgccagcttttcgctgccaagaggaacataaactcttaggtacaagaaggggtcttctttgtctttgccactgccactgctttggtggataaatgacattagcagagagagagaagtagaaaggtagacttacttaaagtctatagcggagttaagtactcaatcttctttttggcaaggggataactg

SEQ ID NO: 98160 - DNA, 541 bp, Arabidopsis thaliana columbia
  unsure (1)..(541): unsure at all n locations
gactacacgcagagctagacacacacttatatcaactgatcttctcccaaagcctgagaataaagaaaaacctccatctttttacatatatagataatcatcaaagaagatgaagatgatgaaggtgatgatgttgatcgtgatgatgatgatggtgatggtgatggtgagtgaaggaagtataatagagccaacatgtaaagagacaccagacttcaatctttgtgtgtctctccttaactccgatccacgtggttcctctgccgacacttctggcctcgctctcatcctcattgataaaatcaagggcctggcaacaaaaactttgaacgagatcaacggtctatataagaagagaccagaactaaaacgggctttggatgaatgtagtcgaagatacaaaaacgatcttaaacggtgatgttncccaagcccattagaaggcttatctctaaaagggggtncccgaaaattncggaggaagangggttntnatccgnggccggttttgnaagnnttttnttttntcaaggaggggttt

SEQ ID NO: 98161 - DNA, 426 bp, Arabidopsis thaliana columbia
ggtatgagcgctcttcactcttagcaaccacgagcacaggaaaatatgagcgaccctagcggccaatcttcaacaacgactgtcggtggaattgccggcggtagcggttgtaacggaggaggtggtggaagtggcagtggaagcggcggctcctttgggaatcagccgaggagatcaaaggtgaggaagcaagtgtgggctggagtactcggcatctcatccgactccaccaacaattaatagtttcttctttctttctcttttcacctaagaaatcatgtgtagtgaaaaatggtggtggtaattactatgcttgatcatcgtttcatgttaactgtgtctaaataacaagcaagaaatatattagaccaccaccatcgtcattgttatgagattatatgaagtatatatatttttaccttctgc

SEQ ID NO: 98162 - DNA, 511 bp, Arabidopsis thaliana columbia
acgactcactatagggaaagctggcacgcctgcaggtaccggtccggaattcccgggtcgacccacgcgtgcgcccacgcgtccgtacggctgcgagaagacgacagaagggggtatgagcgctcttcactcttagcaaccacgagcacaagaaaatatgagcgaccctagcggccaatcttcaacaacgactgtcggtggaattgccggcggtagcggttgtaacggaggaggtggtggaagtggcagtggaagcggcggctcctttgggaatcagccgaggagatcaaaggtgaggaagcaagtgtgggctggagtactcggcatctcatccgactccaccaacaattaataggttcttctttctttctcttttcacctaagaaatcatgtgtagtgaaaaatggtgggggaaattactatgcttgatccttggggtatgttaattgtgtctataaacaagcgagagaattgttggatctcccccttcggcgtgtgagtgagattatgg

SEQ ID NO: 98163 - DNA, 876 bp, Arabidopsis thaliana columbia
  unsure (1)..(876): unsure at all n locations
atgatatgccggcatactatcgactcactttagggaaagctcgtacgcctgcaggtaccggtccggaattcccgggtcgacccacgcgtccgtacggctgcaagtaaaaacatcaccatgaccaccgattcttgcgtcagcctcgtaggtgaacgaaatggagtgcctatcggtccagcggctggatcggattggcttttgatatatcccaagggtattcgtgatctcctactacatgcaaaattcagatacaatgatcccgtcttgtacattacagagaatggagtggatgaagcaaatattggcaaaatatttcttaacgacgatttgagaattgattactatgctcatcacctcaagatggttagcgatgctatctcgatcggggtgaatgtgaagggatatttcgcgtggtcattgatggataatttcgagtggtcggaaggatacacggtccggttcgggctagtgtttgtggactttgaagatggacgtaagaggtatctgaagaaatcagctaagtggtttaggagattgttgaagggaccgcatggtgggccgaatgagcaggtggctgttatttaataaaccacgggcctttggtcaatttagtctactgtttcttttgctctatgtacagaaagaaaataaactttccaaaataagaggtggctttgtttggactttggatgttactatatatattggtaattcttggcgtttgttagtttccaaaccaaacattaataaataaataaataaaagagtttgaggttnnnnnnnnnnnnnnnnnnnnnnnnnnnnnnnnnnnnnnnnnnnnnnnnnnnnnnnnnnnnnnnnnnnnnnnnnnnnnnnnnnnnnnnnnnnnnnnnnnnn

SEQ ID NO: 98164 - DNA, 711 bp, Arabidopsis thaliana columbia
  unsure (1)..(711): unsure at all n locations
acaaaacaaacgaagaagacgaatctctcagtttcgtcgttcgtttcgaagttgtgcgttggtgaaatttgaaatctgaatacactcattgcaaaccttagaagaagaagaagaagaagaagaagaagcttccatagattccgttgggcttttactgtgtttgattgatcggatcgattgcgattacggagaagatatggctcaggctgtagaagaatggtataaacagatgccgattatcactcgctcttatctcacggcggctgttatcaccaccgtcggatgttccctcgatatcatatctccatataacctttatttgaatccgacacttgtggtgaagcaataccaatattggcgtctcgttactaatttcttgtatttccggaagatggatttggacttcatgttccatatgttctttctcgcacgatactgcaaactccttgaagaaaactcattcaggggaaagactgctgatttcctatacatgctcctatttggagcatctgtttaacccggttttgtacttatcggtggaatgataccatacttgtcagcatcatttgctaaaatcatcttcctcagcaactcattaactntcatgatggtctatgtatggagcaaacaaaatccttatattcacatgagtttccttggtctgttcaccttcacagcagcttacctaccatgggtgcttcttggcttctc

SEQ ID NO: 98165 - DNA, 522 bp, Arabidopsis thaliana columbia
aatacgactcactttagggaaagctcgtacgcctgcaggtaccggtccggaattcccgggtcgacccacgcgtccggaagacgacagaagggtccagaataagtacagaaattgtaatctttgtcaaattttgtttattttgagtttcttagtgaactcagttggataacagtgacacatatgagatttgagatgaatttattttctggtaaatgcatagagattattaatggttcttactgatttgagaattgcaaggcattgtcctttgagtttggtgttaaagttagcaaattggtgactatctctattgagtttacatgttttcttggttgttattgtgaggatttaagatttgcctgcttttgtatttctctttggtcttgtaatgtcagaattgtttctttcttaaagttgatttctttgtcaatctttaaacagagatcgaggtgtttttgacgcaatagaagatcgttctgcgtgttattatccaagaactgctttagtgttataaacatttga

SEQ ID NO: 98166 - DNA, 552 bp, Arabidopsis thaliana columbia
attcgttccttgccatcactggtggcgctggaatctttgaaggtgcctacggactggttaagcttcaacagcttgtgtatccgacaaaactgttctacactttttatcttaaaggattggctaatgatttgccactggagctcataggaactccggtaccaccgtctaaggacgtggagccagcaccggaagctaaggcgcttaagcccagtggagttgtaagcaactttacaaattagtgaataaaattagtcttatctttctcgtgtcctgtatatataataatctttttcataaagaattttatattcttagacttgtaatcaaataatttgtatggatcttagtatccttgtgaatgcagtatgtttgagttgaaaaatacttgtaatcgaatctttagttttgagttgtccccttttggggagtaaaatatcttcttctttttagaaaaaaaaaaaaaaaaaaaaaccacaaaaagcggccgctctagaggatccaagcttacgtacgcgtgcatgcgacgtcatagatcttctaagttgcacctaa

SEQ ID NO: 98167 - DNA, 1649 bp, Arabidopsis thaliana columbia
  unsure (1)..(1649): unsure at all n locations
ccaacgcgtccgcaaagtggttggagtgttgtagaggatgacgacagaatcactgcatgatggaggggcaagtcaggcagaaagtaagcatgacgaattggaggaaaccaaagaagaaagtgatgaaatgaaaacaagtcttggtgtagagagaaatggagataagaaagaactagagcaccagtttgagtgtcaagagaatgaaacatatagaagcaatgtggaggcagctgagtcttcctgtcgttttccaaacggagaagaaattattggcgcagcaacaaatggaaacatgaaagaaaatgagggagaggagggagaggagagttgtcgatcatctatggaagaagagggagatgctacttctgatattggcgcagcaacagatggaaacatgaaagaaaatgagggagaggagagttgtcgatcatctatggaagaagagggagatgctacttctgatatttcacaaaacaaagcagagacagttgaggaacatctgaaaaagatagatgaaacaagagagaaagagagagaaagaaagcaagagagagttatggtagaaagagctattcgtgaagcccgcgaaagggcatttgctgatgctatggaaagagcaggaaaaactgcaatggagaaggcaaaggcagtagcccaccgtagagaggttccaaggaaatcagaaaagggatctgttgaggtaaacgataagttatcatcagctgagaaggcttcaatgcaagccaaactcagagctgagcgtgctgctgtagaacgagcaatcactgaggtcagagaacgtgccatggaaaaagcattgtctggtaagtctgctgcttctcaagcaaaaagttatggcggcagcaagtcatttagctcttctggtgaaagacgaggctcctcatcttctggtacggagaacaaaagttcaggtccttccaattcttcaaaccagactgccaaaggtgaaccaatccagagatgtaaagctagatctgagagacaccagagaacatctgaccgcgcagcagaggctcttgcagagaagaaacttcgtgatcttaaaacccagaaagagcagacagagagaaatagactcgcggaagctcttgatgctgatgtcaaacggtggtcgagtggaaaggaaaacaacttacgggcgttgatctcaacactccaatatatacttggagcagagagtggatggaaaccgattcctctcactgatcttgtctcaagcgcttctgtgagaaaagcctaccgcaaggcaactctttatgttcatcccgacaagcttcaacaacgtggcgcatccacacagcagaagtacatttgtgagaaagtttttgaccttctcaaggaagcatggaacaaatttggtgtcgacgaacgataagtcagatggtgtaaaactttggatttttctttaccctattatcagaagtcaccctgcaaatcagaacctagcagcctaagcacctaagttaacaagtacaggatcaagctatggtatgggatgaagacagatctagagatgtaataactagttataaatatttataactatgtgtcatatatagaaaagtagctcattcatattcccagctgnnnnnnnnnnnnnnnnnnnnnnnnnnnnnnnnnnnnnnnnn

SEQ ID NO: 98168 - DNA, 996 bp, Arabidopsis thaliana columbia
  unsure (1)..(996): unsure at all n locations
aatactgactcactttagggaaagcacggacgcctgcaggtaccggtccggaattccggttcgcccacgcgtccgcttctctctctctctctaccacaaagcttgcatggcgtcagatcagagcacgaatccaccgatcatggaggcaaagacaagacatcctcttcaccagatcgcagatacaccaacacacaagcttctcctgaaacaatggttattataagaagagctaattctaagccgtgtctctcacaaagaatctcagatcgattctgttcgaagagaaatcactcagctctacatcttcttctttctcttgcactccatttctctgctacttctcttccacgcttcttcatactcatcttcctctgcttcttccagtgcttgtaaagatcatggatcccttcactctgcgctctgctatcttccttggggatcatttgggcgggtacggacatatctgaagtggaatcgcatcttgagatgttgttggagagggagaaagatgatgcgaagctgttgcgtaaatgtgttgaagagttgaagatgaaaggtatcgaattctgatttgcttagggaagtggatgcgcttcgtagagccaagagtttaagaagtgagtcgaagcctggtgagaaatggtctgctagggattttgtgacgctcttcttcttctctgtttcgtgtttggttcttgccatgattagactcattctctgcgattgattctttggctcttttgttgcatgcttagcagaattctctggtttctgcactttagtgtaataaagaaaacacatgttggatcatcctccttcaatccttttttgtaatgttaatttgttttgtcgacattttcaaagaattgagcaaaaacatatccattcnnnnnnnnnnnnnnnnnnnnnnnnnnnnnnnnnnnnnnnnnnnnnnnnnnnnnnnnnnnnnnnnnnnnnnnnnnnnnnnnnnnnnnnnnnnnnnnnnnnnnnnnnnnn

SEQ ID NO: 98169 - DNA, 721 bp, Arabidopsis thaliana columbia
  unsure (1)..(721): unsure at all n locations
accagaaaaccagcaaatggaagagaagaggctctaaaccatgtggaagcggaacggcagaggagggagaagctgaaccagagattctacgctttgagagcggtggtgcctaacatctccaagatggacaaggcttcgctccttgcagacgcaatcacttacatcacggatatgcagaagaaaatcagggtgtatgaaacagagaagcagataatgaagaggagggagagtaatcagataactccagcagaggttgattatcaacagaggcatgatgatgcagttgtaaggctaagctgtccgttggaaactcatccagtttcaaaggtgatacaaacgttgagggagaatgaagttatgcctcatgattccaacgtggccatcacagaggagggtgtggttcacacattcactctccggcctcagggtggctgcaccgctgagcagttgaaggacaagctccttgcctctctatcacagtaactatcccaccagtaactgctatgtaataagtgtacccgtgttggaggttgtatcaatgtactattgcaagccacccaaaaaaaactccagcttagtaggatcgtgtaattttccttatatgtaatgttgagatttgtcttttacatataaagatttgagcaaaaannnanccngcccanacccccnnnaaagcagccgctctagaggatccaagcttacgtacgcgtgcatgngacgt

SEQ ID NO: 98170 - DNA, 913 bp, Arabidopsis thaliana columbia
  unsure (1)..(913): unsure at all n locations
acgacttactatagggaacgctggtacgcctgcaggtaccggtccggaattcccgggtcgaccccgcggtcgcgctctctcgaagttccgtgcgactctctgctcgagcaagatctcctaccgatacaatgattatctcagaggctaaccgcaaagaaatctgcaagtacctcttcaaagaaggagtttgctttgcgaagaaggatttcaatcttgctaagcatccgttgatcgatgtccccaacctacaagtgattaagcttatgcagagtttcaaatccaaggagtatgttagggagacatttgcctggatgcattactattggtttttgaccaatgaagggatcgagttcttgagaacttatcttaatcttccatctgatgttgttcctgctactttgaagaagtcagctaagcctggtggtcgtccatttggtggcccacctggtgatcgctcaagaggacctcgccatgaaggaggagaccgtcccaggtttggtgaccgtgatgggtaccgtgcaggtcctcgagctggtggtgagtttggaggtgaaaagggtggagctcccgcagattaccagccatctttccaaggaagtggccgtggttttggccgtggtgctggtggctacagcgcagctgcaccatctggttcaggtttgccttgaaaaagaaatgtctttaggtgacagtaagaccatggaggagttttcagctttaaattttgcttttgtaattcagattccggaatccttcataatctctatctgagtttagttttgttgttgaatcaaacatccgatttaaagttnnnnnnnnnnnnnnnnnnnnnnnnnnnnnnnnnnnnnnnnnnnnnnnnnnnnnnnnnnnnnnnnnnnnnnnnnnnnnnnnnnnnnnnnnnnnnnnnnnnnnn

SEQ ID NO: 98171 - DNA, 677 bp, Arabidopsis thaliana columbia
gtacggacgaggagaggaagatgaatcttgagagagacacgtgtcctggttttatatcggacggtttagggagagtcatttggacgaacggttcttacagagagttggtggttgggaaagatcatgagcagtgtggtaagatgagtgtgtggcttgtgatgaaggagaagcctttggtaacgtaccggacttttacgtgtacaatgagattgcagtacacgtgtcgtgataaggaggtgagttcgattacttcgttctgtgatgtttggaggatgagtgacggtggctttgcgtggcggcttgatgttgatgctgcactttgccttggacggtgaggattgggccgttggattagagatgatgttagattgatgagatgaggatatttaataacggcatgcaagttagatagatatttggacttccaactttatgagtgtacatacatatttcgcaattttgtagcttttaagttttaacattttgatttcaatgttctgttttaatttgtagtgtttggtgttttattcttcttcttttttggggtttgtataaaaactcttggttagtcggtatctttcttttttctagtattgtgctttgtaggattatggaattagtacttaggtgaggatcttatgtttaatcacacaatggaatgcattaaattttttgct

SEQ ID NO: 98172 - DNA, 637 bp, Arabidopsis thaliana columbia
  unsure (1)..(637): unsure at all n locations
tnnnnnnnnnnnnnnnnnnnnnnnnnnnnnnnnnnnnnnnnnnnnnnnnnnnnnnnnnnnnnctaccacgcgtccgcgatcttgtgctgaagatatcgaaaagatgtcatctttgggtaggattttgtctgtttcctacccaccggatccgtacacttggcggttttcacagtataagctgtcttcttcactagggcgaaatcggagactcagatggcgattcacggcgttggatcctgaatcttcctcactcgactctgaatcctccgccgataaattcgcttccgggttttgtataatagaagggcctgaaacagtacaggactttgccaaaatgcaattacaagagattcaagataacattcgaagccgacgaaacaagatcttcttgcacatggaagaggtgcggaggctaagaatacaacaacggattaaaaacacagaacttggtatcattaacggagaacaagaacatgaattacctaatttcccatcttttatcccattcttacctccattgacttctgccaattttgaaaggcttttccggaacttggttctactcatcgcgggggtttcccattcggggggctctagtcctactttgggctaagttagggttggggncaacgattga

SEQ ID NO: 98173 - DNA, 565 bp, Arabidopsis thaliana columbia
  unsure (1)..(565): unsure at all n locations
cnnnnnnnnnnnnnnnnnnnnnnnnnnnnnnnnnnnnnnnnnnnnnnnnnnnnnnnnnnnnnnnnnnnnnccacgcgtccgcggacgcgtgggcggacgcgtgggcggacgcgtgggcggctgcaagaagacgacagaagggggacacaaatggcagcagcgatatcagcgactttggtattcgctgcaagacgacgtccattgttctatagcttatcatcatcgtcttcttcgaaaccaaacacgagaaagcttgttctatactccaaacctggttgttgcctctgcgatggtcttaaagagaagcttcacgctgccttcactctctccaccggtcctgattcactcaacgacgttactcttcaggtaagagatataactacgaatcccgagtgggaacgagcgtatcagtatgagataccagtgttggctaaagagaattctgatgggaaagaggaagttttaccgaggttatctccacgtttaagtgcagaactcattcagaaggaagctacttgctgcctttagttgatcaattacgtgcacgacaacganaaaaagagac

SEQ ID NO: 98174 - DNA, 711 bp, Arabidopsis thaliana columbia
  unsure (1)..(711): unsure at all n locations
tacnnnnnnnnnnnnnnnnnnnnnnnnnnnnnnnnnnnnnnnnnnnnnnnnnnnnnnnnnnnnnnccacgcgtccggtccctcaatttctcaaaaccccaaacaagtgttcttttcttatagagagtagtctcccaagaagctgcagagacttgcaaaaatctcagattcaaacaatggcagaagaagctaaagctaaaggaaacgctgctttctcttccggtgacttcaccacggctataaaccacttcaccgaagccatagctcttgctccaaccaatcacgtcctcttctcaaaccgttccgctgctcacgcgtcgcttcatcaatacgccgaagctctctccgatgcgaaagagacgattaaactcaaaccgtattggcctaaaggttatagccgtctcggtgctgctcatttagggttaaaccagtttgagttagccgtcactgcttataagaaaggtttagatgtcgatccgactaacgaggcgttgaaatctggattggctgatgcggaggcgtctgttgctaggtcacgagctgcaccgaatccgtttggtgatgcttttcaaggaccgnagatgtggacgaagcttacgtctgatccttcgactagaggctttttncagnagccggntttttnttaacatnatgcaggngatttcagaagaatcctngcagtcttaattttgtaatttgaaggatcagagag

SEQ ID NO: 98175 - DNA, 545 bp, Arabidopsis thaliana columbia
  unsure (1)..(545): unsure at all n locations
tggaaagagtattgctctggcgatgcttgtncactgggcacgtaacgaaggctggttagtttnatatgcaccaaaaggacgtgactggactcacggtggctacttctataagaatccacatacagggttttgggacactcctctacaagctgagaatattctcaaggattttgtcaagttcaatgaatcccgcttaagagagttacggtgcaaagtccatgatcctatcgtgcttggagagggtgcgggtgttggatacttgaaaggagcagatgctatgcctattcccgaggattcaactctgtatgaccttgtgcaaatgggaattaagagcactcatgcagctgttaatgtcgttgtgcgacttagaaaagaactctcagttgttaaagatgtaccagtgttgattgtaatccatcaatataacagttggtttacattcagcgagtttgaagagcccgtaacaccgcgttcttgccgacctatacatgccagagaacttacaacggtgaatgctttcagaagcatgatgcatgaagatatga

SEQ ID NO: 98176 - DNA, 667 bp, Arabidopsis thaliana columbia
  unsure (1)..(667): unsure at all n locations
nnnnnnnnnnnnnnnnnnnnnnnnnnnnnnnnnnnnnnnnnnnnnnnnnnnnnnnnnnnnnnnnnnnnnnnnnnnnnnnnnnnccacgcgtccgtacggctgcgagaagacgacagaattagagagaaaagatagagagatgtcaggttctgtcttcgttcccggtatggcgattggagttcccacgctttctcgttcgagctctgttcaccggagcttagaaccgacgaagaagatgactatgagtagtgtcaaattcgtgaccagttttcgaaacccgtcaaactgttcagggacaaaacggtcatttcgcgttatggcttccgatgaccggtcggaacaagcagatagcggtcaaggaattcaggaggacttaaactacttgttgaagatcggagttggttcagtggcaggtgcagctataatcaaatacggaagtgtcttgttcccgcagatcacaagacctaatctcactctagccctcttcattatcatagctcctgttgtaatctccgttatccttttgtccctatcatcatcatcttcctccaagaaacagaactgattggttaaaaaaatgtgtaaatgtatttcacctcattgtgaaaaagatcgtgttaaaggatgagaaagtttcagtataatccagaataaaagtttcaatctt

SEQ ID NO: 98177 - DNA, 547 bp, Arabidopsis thaliana columbia
  unsure (1)..(547): unsure at all n locations
atgatcctgccggctannnnnnnnnnnnnnnnnnnnnnnnnnnnnnnnnnnnnnnnnnnnnnnnnnnnnnnnnnnnnnnnnnnnccacgcgtccgtctgcgagaagacgaccgaaggggggcggcaatggacaaagtcgtggaggtttatgaaagagcagtgctgggagtgacatgttcggtggatatctggttgcattattgcacttttgccatcaatacatatggagatccagaaacgatcagaaggctgtgtgaacgagctttggtttacgttggaactgattttctttcctctccgttgtgggacaaatacattgagctaaaaatcgtcgtcggtggacgcaacagagagaaaggtgaagcaatggtggctaagctgggagagaattctgaattttctcaagtagatatcaatgatgctaagatgcttgagacaagtttaagagacgttgatcttgtagtccatgccgctggaccattccaacaagcacctcgatgcactgttcttgaagctgccataaataccaagactgcatatctcgatg

SEQ ID NO: 98178 - DNA, 456 bp, Arabidopsis thaliana columbia
cccacgcgtccgcggacgcgtgggcggacgcgtgggaggacgacagaagggggaagaagcagagattcaaacattcctctgcagattagtgaaagcaaatcggaagaagcagcgaatcagcttcagatgggagattcaacatttctcgatagaatgcttctccagcttcgctccacttgcaagtattacagcggttaccctaaggatctcgggccatcgcgggttctccattttacatcagaaagagagtttgtccaactccttcaccagggctatcctgtggttgtcgcattcaccataaggagtaactacacacaacatcttgaccggatgcttgaggaagctgctgctgagttctatcccaacataaaatttatgcgtgttgagtgttccaagttatcccggattctgcataactcgccagaaaaatgaatatcctttcattgaaatattcca

SEQ ID NO: 98179 - DNA, 946 bp, Arabidopsis thaliana columbia
  unsure (1)..(946): unsure at all n locations
cannnnnnnnnnnnnnnnnnnnnnnnnnnnnnnnnnnnnnnnnnnnnnnnnggagaagaagaatttgtattctcaagttgtcgatatgagagagatgaagtcagaaacacgtttgtgagagaacagcttttagatgtgattgtggatcagattctcaaagacttttcgcgaagagtctctgatccttaaatcgcttctctctcgcttgacctcatttcgtcgtcgaaatcagatccttgtgaaaatgccgaaacaggatatggagaagatggagcttcgtaagaacttccgtaatgtttggcataccgatcttacccacagtatccagaacgatactccttattgttgcttcgcgttgtggtgtgccccttgtgcatcatacttgcttcgcaagcgtgcgctttacgatgatatgtcaaggtacgtctgctgtgccggttacatgccttgtagtggtaggtgtggagaagccaaatgtcctcaactttgtcttgccactgaggtcttctgctgctttgcaaactctgtggcctcaactcgctttcttctgcaagatgagttccaaattcaaacggcaaaatgtggcaactgcatcattgggttcatgggtttgcctcaagccaagtggcttgcatattccccataggttgccatgtattgtcgggaaatggatgagctttcagaagcttctcagatactcacatgttgctctgacatggtgtactgcacgggtttcgcatgtatgcaggcacaacacaaggttggaaatggccaagagggccggtaagntcgggcccaaccattggaggnccncgggttaaaaaatttacnggtttttaaaggccccccccccaggngggtttnccccaaaaaaggttnccccttgggttcnaaaaccccaaagggttccccttggntncnaaaccccccnggtttttaanccttc

SEQ ID NO: 98180 - DNA, 417 bp, Arabidopsis thaliana columbia
  unsure (1)..(417): unsure at all n locations
acgcgtccgcatgtgtgagaccgagagaaatagatgactaagaacagtaaccacgacgagaatgagttcatcagctttgaaccaaatcagaacacgaagatacgctttgaagatgctgatgaagacgaagttgctgaagggtctggtgttgccggcgaggaaactccccaagatgagtccatgttcgacgccggagagagcgccgacaccgctgaagtaactgatgataccaccagtgccgattacgacttcgactcttactctcactttggtaaatgcccttttttcaagttctacttttttccttgtgctctttggttatgaattcttactaagagttgaatttggttccacttttttttgcaggaatccatgaagagatgttgaaggatgttgtgagaacanagacttatcaga

SEQ ID NO: 98181 - DNA, 1393 bp, Arabidopsis thaliana columbia
  unsure (1)..(1393): unsure at all n locations
aaaaccctttcctctcttccttcttgtgtgagaccgagaaaaaaagatgactaagaacagtaaccacgacgagaatgagttcatcagctttgaaccaaatcagaacacgaagatacgctttgaagatgctgatgaagacgaagttgctgaagggtctggtgttgccggcgaggaaactccccaagatgagtccatgttcgacgccggagagagcgccgacaccgctgaagtaactgatgataccaccagtgccgattactacttcgattcttactctcactttggaatccatgaagagatgttgaaggatgttgtgagaacaaagacttatcagaatgttatttatcagaacaagtttcttatcaaggacaaaattgttcttgatgttggagctggaaccggaattttgtctctgttctgtgccaaggcaggagctgctcatgtctacgctgttgagtgttctcaaatggctgacatggcaaaggagattgttaaagctaatggattttctgatgttattacggtattgaaagggaagattgaggagatagagcttcccactcctaaagtggatgtgattatatcggaatggatgggttactttttgttgtttgaaaatatgttggacagtgtcttgtatgctcgtgataaatggcttgttgaaggtggagttgtgctaccagacaaagcctctctgcatcttacagccatagaggattcagagtacaaagaagacaaaatcgaattttggaacagtgtgtatggtttngacatgtcatgtattaagaaaaaagctatgatggaaccacttgttgacacagtcgaccaaaaccaaatcgtcaccgatagtaggcttctaaagacgatggatatctcaaagatgtcctctggtgatgcttccttcacagctccctttaagcttgttgcacaacgcaatgactacatccacgcccttgtagcctactttgatgtatcgtttaccatgtgccacaagctgctgggcttctcaacaggaccgaaatcccgagctacacactggaaacaaacagttctgtatctagaagatgtgttaaccatatgtgagggtgagacaatcactggaactatgtccgtttctcctaacaagaagaatcctcgagacattgacataaagctaagctattctttgaatggccagcattgcaagatctcaaggacccaacactacaaaatgcgttaaagttctctcataagaagcagaacttcagaagatacaattctcatattgtgatttagtttttatatttctttttctccagattacaactttccatttgcttcacattgcaacatttgcttcatctcaagttaaattaatgattttgctctnnnnnnnnnnnnnnnnnnnnnnnnn

SEQ ID NO: 98182 - DNA, 809 bp, Arabidopsis thaliana columbia
ttttcgaggtaacgaaaggattaatcagaaacttggccttgttccaagttcgtcttcctcctctcgtagcagcagtaatggctccttcaagcgtcgttagggtttactctaccgctacctctccttctccttctgaaatttccgtcaagaaagttggtactcataatggaagctttcactgcgacgaagctctcggctgtttcatgattcgcctcgtcgataaattctccggcgctgatatcgtccgttctcgtgaccctaagatattggcagaacttgatgcagtgcttgatgttggaggtgtttatgatccggagcatgaccgttatgatcatcaccagacaggttttgaagaggtttttggacatggcttcaacactaagctcagtagtgctggtcttgtttacaagcattttggaaaggagatcatagctaaggaacttaatgtcgaacaagatcaccctgatgttcttcggttgtttttagctgtctacaagagcttcatggaggcaattgatgctgtggacaatggaataaaccggtatgatactgatcagcctccacgatatgtgaacaacacacatctgtctccaagggttggaagattaaatctggattggattgaccctgaccagtcacaagaaaaggagaatgaagctttccaacgtgcaatggctctagctggaaaagagttcctcgaaagtgttcagttccatgcaagatcgtggttaccggctcgatcaattgtgatgcagtgtcttgaagaaagattcaagacagaccccagcggtgagatcatgatattggat

SEQ ID NO: 98183 - DNA, 514 bp, Arabidopsis thaliana columbia
  unsure (1)..(514): unsure at all n locations
cnnnnnnnnnnnnnnnnnnnnnnnnnnnnnnnnnnnnnnnnnnnnnnnnnnnnnnnnnnnnnnnnnnnnnnnnccacgcgtccgcccacgcgtccgtacggctgcgagaagacgacagaagggggcaacaacaacaaaaaaaaacagaacagtatccagactacgaacacagcacacgcagagcacgaagaacaattcagtgaatgggtacttgttacacacacctcacccaaatccccgcgtactgacgcatctacccctccaaactcaccgatattacatccaagccaccgccgtgaaaatccaacgatcaacgacgatgatgaagattctgttgtcccctccaccgtgaatctttggcttccgtggcgagtgattgagactaccaagaagcgattaatcaagaactcagtgtgcatctttcaggccgtccaaagggtgcgttgtaattacctaactcgtaaaagggtattttggtcattaacaatcattggaggcttctcgttggtcttga

SEQ ID NO: 98184 - DNA, 534 bp, Arabidopsis thaliana columbia
  unsure (1)..(534): unsure at all n locations
nnnnnnnnnnnnnnnnnnnnnnnnnnnnnnnnnnnnnnnnnnnnnnnnnnnnnnnnnnnnnnnnnnnnnnnnnccacgcgtccgtacggctgcgagaagacgacagaagggtacggctgcgagaagacgacagaagggtacggctgcgagaagacgacagaagggtacggctgcgagaagacgacagaagggtacggctgcaagaagacgacagaagggtacggctgcgagaagacggcggaaggggaggaagaaaatggatgaggagccatccaaggagactagaaatgatagtgccggagaagaggttttgaagaactgtcatgttgaagaagataaggaaaaagaagctcaagaaggttgcagtgaaagaagtgataaagaatatgagagggttggtggtggggctaagagggtagagcaggtggagattgagttaaggaagaaaagcgccgtaggagaagatgacctgaactgtactgttagagaagatggagagacagaaaacttacaagaaattgaagaagagtgtca

SEQ ID NO: 98185 - DNA, 529 bp, Arabidopsis thaliana columbia
  unsure (1)..(529): unsure at all n locations
nnnnnnnnnnncattgagtctgtgaagaagtggaggaaacagaggcagcagagtgggtttagtgatccacccggccggcctgaacttgatttcgaaagtggaaagagtttccagagaggaggaggtaagaaaagaccaggtgtgtctcccggagatcgatcaggaggtaaaggaaggcctacttcgaggatgggcaacaagaagagggagtttcgggattccaagtttggtcatggtggtaggaagggtttgagcaagcagaacacagcagagacgacaaacgatttcaaaggcggtttccgtggtggaaaagctagcggaaacaagaggcagaagaggtaaaaggtttgattatctaaacccacttcaaaactactataaactatttgtcttctttgttttttttaagaacatgtattttgttttggaaaccctgtggtaagggtcttagaaccaatacaattttgtactagtgattacttgaattaacaaagtcccttgtttgatgtctcatagttaacacttgaac

SEQ ID NO: 98186 - DNA, 609 bp, Arabidopsis thaliana columbia
ctccgctctaatccgcactcatttagggaaagatcgtacgcctgcaggtaccggtccggaattcccgggtcgacccacgcgtccgcgagaagacgacagaaggggcagagattgagaagcatgaccgtagggaagttcgtcaccctcatttgtctgagagagactaccagacgtatgatcatcttacttctagacgggaaatcttggttcgaaactcgcctgacccaccagattcagcggttactctggattcctacaggagagatccgtattacatttgtgagcgccatgctcttgaaagaccaccaaggacatacatggtttctccaggtagacaagatgatgacctgtattcccggtatgtaacaccggattcattggctgagtactaccgatcatcacaaagatacccaagcgtaactgaacctgagcttccgccttcgttagtaacatcccggtatgcttattctcggtctttgccttattctccccgctgaaatcagaatgtgtaattctcctattcctttgaatttatctgatgtttaatgtatcttggatatggatactaaagagttgctgccaaagggttccccttaaatttggtcggcc

SEQ ID NO: 98187 - DNA, 520 bp, Arabidopsis thaliana columbia
acgactcactatagggaaagctggcacgcctgcaggtaccggtccggaattcccgggtcgacccacgcgtgcgtacggctgcgagaagacgacagaagggcaacgcattgctcagtacagagctggaatcgtccctgtttcctacagaagggttccttgcaggagaagaggaggaataagattcgcgataaacggccactcatacttcaaccttgtgctgatcacaaacgtcggtggtgccggagacgttcactcggcggcgatcaagggttcaagaacagtgtggcaagctatgtcaaggaactgggggcaaaattggcaaagcaactcttacctcaacggtcaagcactttcctttaaggtcaccaccagcgacggccgcacagttgtctccttcaacgccgctcctgccggctggtcttatggccagacttttgccggtgggcagttccgttaaaaagggcaagttggttaatctctcttccatttatctaaagtaaactcatttgtgtggttatat

SEQ ID NO: 98188 - DNA, 413 bp, Arabidopsis thaliana columbia
cccacgcgtccgcccacgcgtccgcccacgcgtccgtcaaaacccatatctctctgtcttgatctctctctcactttctaataagatcaaagaagatgtcgaaagctaccatagaactcgatttcctcggacttgagaagaaacaaaccaacaacgctcctaagcctaagttccagaaatttctcgatcgccgtcgtagtttccgagatattcaaggtgcgatttcgaaaatcgatccggagattatcaaatcgctgttagcttccactggaaacaattccgattcatcggctaaatctcgttcggttccgtctactccgagggaagatcagcctcagatcccgatttctccggtccacgcgtctctcgccaggtctagtaccgaactcgtttcgggaactgttcctatgacg

SEQ ID NO: 98189 - DNA, 796 bp, Arabidopsis thaliana columbia
agctctaatacgactcactataggaaagctggtacgccttgcggtaccggtccggaatttccgggtcgaaccaagcgttcggccacgcgttcggccaagcgttcggccaagcgttccggaaaacccatatttttttggcttgagcttttttttaatttcttattagaaccaagaagaaggtgaaaggttcccttaaacttgattttcttggacttggaaagaaaccaacccaccacggttcttaagcttaggttccaaaattttttggatcgccgccgaagtttccgagatattcaaggggcgattccgaaaatcgatccggagattatcaaatcgttgttagcttccattggaaacatttccgattcatcggttaaatctcgttcggttccgtctactccgagggaagatcagcctcagatcccgatttctccggtccacgcgtctctcgccaggtctagtaccgaactcgtttcgggaactgttcctatgacgattttctacaatggaagtgtttcagttttccaagtgtctcgtaacaaagctggtgaaattatgaaggtcgctaatgaagcagcatctaagaaagacgagtcgtcgatggagacagatctttcggtaattcttccgaccactctaagaccaaagctctttggccagaatctagaaggagatcttcccatcgcaaggagaaagtcactgcaacgttttctcgagaagcgcaaggagagattagtatcaacatctccttactatccgacatcggcctaaacgatctctttttagattgggacat

SEQ ID NO: 98190 - DNA, 553 bp, Arabidopsis thaliana columbia
  unsure (1)..(553): unsure at all n locations
atgatacttccnnnnnnnnnnnnnnnnnnnnnnnnnnnnnnnnnnnnnnnnnnnnnnnnnnnnnnnnnnnnnnnnnnnnnnnccacgcgtccgaacaggaccaaagatcctattgaactagcaaaatatgatgtggttatgacaacttacgccattgtttcaaatgaagttccaaagcaacccctggttgatgacgatgagaatgatgaaaaaaattctgaaaaatatggtctcgcttctggcttctccatcaataagaaacggaaaaatgtagtgggtactactaagaagagtaagaagaaaaaaggtaacaataatgctggcgattcatctgaccctgactctggtactctagcaaaagttgggtggttcagagttgtactagatgaagctcaaacaattaagaatcatagaacccaggtggcaagagcatgttgcggtcttcgagccaaaaggaggtggtgtttgtctggaacaccaatacaaaatacaatagatgatttatacagctatttcaggtttctaaaatatgatccatatgctgtgtacaagt

SEQ ID NO: 98191 - DNA, 673 bp, Arabidopsis thaliana columbia
  unsure (1)..(673): unsure at all n locations
gatctagatttgtcaggtctcttcgaagaaaatgatgataagagatataaaacaagaattgggtccaagaacacagcgcaagaaacaatcaagaagattgaagctgcagcaacttgtgttagtttatcagttgagagaataaagcacttcaaggttaagattcagccaaaggagataagatcaagatcttcttatgacttattatcagcagaggtgatagaggtgactccaacaaattgtgttatagaaatatcgaaatccgcaggcgagttaagactatacatggagttttgccagagcttatcaagcttacttaccgcggaagtaagctaagatagagagccatagattctcaagtaaaaatgttaaaacagaggaagcaaatgaagcatatttttgcagattgaagttgaagtgtaaagaagacaatgaagagaagaaatccaaagaatttagttatgtcttggatcttggtgatcccaaagggttcttattcaggatgtaaaatgatagattggtttctaatcaaactcgtttataaaatagatatataaaaagctgaacaagttctatttcgccgaaaaaaaaaaaaaaaaaaaacaaaaagagcggccgctctagaggatccaagcttacgtacgcgtgcatgcgacgtcataactcttnctatagt

SEQ ID NO: 98192 - DNA, 534 bp, Arabidopsis thaliana columbia
  unsure (1)..(534): unsure at all n locations
atgatactgccnnnnnnnnnnnnnnnnnnnnnnnnnnnnnnnnnnnnnnnnnnnnnnnnnnnnnnnnnnnnnnnnnnnnnnnccacgcgtccgcccacgcgtccgtacggctgcgagaagacgacagaaggggactggttggaggttttgggctgtggggtgaccgagcaagtaattctgaaacaaagtggattagaaaataatgttgcttgggccttcggacttggacttgagagacttgctatggttttgtttgacatacctgatatacgatttttctggtcatccgatgaacgattcacgtcccagtttggaaaaggagaacttggagtgaaattcaagccatattcaaagtatcctccttgttacaaggacatcagtttctggataagtgatttgttcacagagaataatttttgtgaaggtgttagaggaattgctggggatcttgttgaagaggtgaagttaattgagcaattcaacaataagaagaaatggctgacgagtcattgttacagaatcgtgttccgttcc

SEQ ID NO: 98193 - DNA, 655 bp, Arabidopsis thaliana columbia
atcaaacgcaaaaacctattatcaaaagaactagggagaaatgactaatcccatgatcatggttatgctgttgttgtttcttgtgatgtcgactagagcagacgaagagctgattaagacagagtgtaatcacacagaataccaaaacgtatgcctcttctgtcttgaagccgatccaatctccttcaatatcgaccgtgctggacttgtcaacatcattatacactgtctcggatctcaacttgatgttcttatcaacaccgtcacgagtctaaagttgatgaaaggagagggtgaagcaaatgagaatgttctgaaagattgcgtcacaggctttgcgattgcacaattacgacttcaaggagccaacatcgatttgataacccttaattacgataaagcgtacgaattggtgaaaactgcgttaaactatcctcggacttgcgaagaaaatctccaaaaactcaagttcaaagattcatctgatgtttatgacgatatcttggcatatagccaactcacctctgttgctaagacgttgatccaccgtctctagatcaatatatatgtcgatctggttatcaaaaatatatttatgtcgatcgtttgctaccactaataaaataaaactccattatgtaaaaaaaaaaaaaaa

SEQ ID NO: 98194 - DNA, 361 bp, Arabidopsis thaliana columbia
gtcggttcttccgtaacgcagagctagagaaaacattggatcaagacttgtctaggttatatccagagcattggagttactttcaagctcctggatgtcaaggcatgttaaggcgtattctactcttgtggtgccttaaacatcccgagtacggttatcgacaagggatgcatgagcttttggcgccactgctttatgtacttcatgttgatgttgatcgtctctctgaagtgcgtaaaagttatgaagatcatttcatagacagattcgatggtttatcttttgaagaaagagatattacttacaactttgaattcaaaaagtttctggaggatttcacggatgatgagattggtggtat

SEQ ID NO: 98195 - DNA, 803 bp, Arabidopsis thaliana columbia
gcaatcgggagattcacagtacattaaatataagtcatcccagcaatcttctgccttcaattctggtgctaaagagaggatcattaggatggtggagatgcctgtagatccacttgatccaccaaagttcaagcacaagagagtcccaagggcttctggttctccgcctgttccggtcatgcattcaccgcccaggcctgttaccgtcaaggaccagcaagactggtaaatccctccttgtatctccaattggaagaatccgaaaggttacacaatccctcttgacaaacgtctagctgctgatggaaggggcctacaagacgttcagatcaatgataactttgccaagttatcagaggccctctatgtagctgagcagaaagctagagaggctgtttcaatgcgttccaaggtgcaaaaagagatggtgatgaaggacaaggaaaggaaagagcaggaattgagggctcttgcccaaaaagctcgctccgaaagaaccggtgctgctatgagtatgcctgtctcatctgacaggggtaggagtgaaagtgttgacccaagaggtgattatgacaactatgaccaggatagaggaagggaaagagaaagggaagagcctcaagagacgagggaggagagggaaaaaaggattcagagagaaaagatacgagaagagcgtcgcagggaaagagagagggagagaaggttggatgccaaagatgctgccatggggaagaagagcatatcaccagagacagagaccgtgacatcagtgagaaagttgctcttggaatggcatctac

SEQ ID NO: 98196 - DNA, 465 bp, Arabidopsis thaliana columbia
  unsure (1)..(465): unsure at all n locations
atccgactcactttagggaaagcacgtacgcctgcaggtaccggtccggaattcccgggtcgacccacgcgtgcgcccacgcgtnncgccacgcgtncgtacggntgcgagaagacgacacaaggggaagacaaatccaatcagaggtcagcaacaactgaaacttcgattggagatagcattctattgatcgtagctctctgttttcactctgtcttctaaggcatagctattggtatttcagagactaaatcagatgcttggagagctctctggacaataacactccataagatatttgcagcgattgcaatggggatagctcttctccgtatgatccctgaccgtcctttattctcctcaatcacttattctttcgcattcgccatctcgagcccaattggtggtgccatcgggatagccatcgatgcaacgactcaaggggccatcggcggattggatatt

SEQ ID NO: 98197 - DNA, 488 bp, Arabidopsis thaliana columbia
cagctctctacgactcactatagggaaagctggcacgcctgcaggtaccggtccggaattcccgggtcgacccacgcgtccgtacggctgcgagaagacgacagaagggggcatttctctctgcctctctttctctcttcatatttcccggtgcttcgtcgacgttaggggtcttttccgttgaccggagccgcagatttcttcgattctctttaaaccggcggtccatgtggtcttaccgacgagaaggccctaatttcagggattagatagctttttgaaacaaattagagcaatgaacacagagagagctcaagaaggtgataggaacgatgccgcatcttcctctggctgctccgagtcctacgagtttagccacgcagccgctaaagctgcagtagctcaagtctgcgagagcgttgggtacgagaatttcaaggattcagctctcgaatctctatctggattcgcactccagtacattcttc

SEQ ID NO: 98198 - DNA, 561 bp, Arabidopsis thaliana columbia
tacaaatattaaaataaaaagtgtcggtgaattctcaatctttgtcttctgtcggcggctctttaaaactctctccggccctccttattatgtaaccgtctcgccctcgcgtccgcaaaatctctccctccgttcataaacccagatcgaaatttatggttttgtaatttttttaccggcggttatggagacggaagcggcggtgacagcgacggttacggcggcgacgatggggattgggacgaggaagagagatctgaaaccgtataaaggaatacgaatgaggaaatgggggaaatgggtggcggagatacgggaaccgaataagagatcaaggatctggttaggttcttatgcgacgcctgaagcggcggcgagagcttacgacactgctgttttttacctccgtggtccttcagcgaggcttaattttccggagcttttggctggacttactgtttctaacggcggaggaagaggtggtgatttatcggcggcgtatattaggagaaaagcggcggaggttggtgctcaggttgatgcgcttggagcgacggtggt

SEQ ID NO: 98199 - DNA, 779 bp, Arabidopsis thaliana columbia
  unsure (1)..(779): unsure at all n locations
atgatactgnnnnnnnnnnnnnnnnnnnnnnnnnnnnnnnnnnnnnnnnnnnnnnnnnnnnnnnnnnnnnnnnnnnnnnnnnnccacgcgtccgacggctgcgagaagacgacagaagggtacggctgcgagaagacgacagaagggtacggctgcgagaagacgacagaagggtacggctgcgagaagacgacagaagggtacggctgcgagaagacgacagaagggtacggctgcgagaagacgacagaagggtacggctgcgagaagacgacagaagggggagacctgaaatctctaaggaagaagaaagaatgaacgtagacgaagagattcagaaactggaagaagagatccatcgtcttggttctcgtcagaccgatggctcttacaaggtgacgtttggagtgttgttcaatgacgatcgatgtgccaacatctttgaagcattggttgggactctgagagctgccaagaagcgcaaaatagtcgcatttgaaggtgaacttttgcttcaaggcgttcacgataaggttgagatcactctccgaccaacaccaccgncaccgcaagctgctgcttgctacttcagcctccntcctaaagttcccatttcctgcttttaaatcttttatactattgaggtgtaaatgaaaatggtaaactttgaaggntcaaatgatttccttttgntttccnnnaattggccatgggccanaattgcttgngnctatanttttaaaggttgttccaatgntggtacaaaggnaccttttttc

SEQ ID NO: 98200 - DNA, 555 bp, Arabidopsis thaliana columbia
  unsure (1)..(555): unsure at all n locations
tcccttttccccnanctnatcggccccctngggnaanttgtcccccnncgggtcccgncccggaatcccgggnngccccccgggcccgggaatctctaaggaagaagaaagaatgaacgtagacgaagagattcagaaactggaagaagagatccatcgtcttggttctcgtcagaccgatggctcttacaaggtgacgtttggagtgttgttcaatgacgatcgatgtgccaacatctttgaagcattggttgggactctaagagctgccaagaaacgcaaaatagtcgcatttcaaggtgaacttttgcttcaaggcgttcacgataaggttgagatcactctccgaccaacaccaccgccaccgcaagctgctgctgctactgcagcctcctcctaagttcccatttctgcttttaatctttatactattgagtgtaatgaaatgataaacttgaagatcaatcattcctttgcttctctattgtcatgatcacattgcttgagctatatttttaagttgttgcatgtagtaacaaagtcactattaacaag

SEQ ID NO: 98201 - DNA, 688 bp, Arabidopsis thaliana columbia
  unsure (1)..(688): unsure at all n locations
tgattctgnnnnnnnnnnnnnnnnnnnnnnnnnnnnnnnnnnnnnnnnnnnnnnnnnnnnnnnnnnnnnnnnnnnnnnnnnnccacgccgtccgctttcctacgaaaactcaaagaaacaatggccatcaaatccatatttatcatcatcatcatcagcatcatcacatcaatatctgaactttatgctttggatccttcgtttcttcgtctttcgacctctctccaaagaagtagctttcctcaagattttcggtttggtgcagcttcgagtgcttatcagagtgaaggagcagccaacgttgatggaagagaaccaagcatatgggatacgtttactaaacaatatccagaaaagatttcagatggtagcaatggcgacgttgcagacgaattttattaccgtttcaaggaggacgtggcacatatgaaagaaatagggctggactcatttaggttttcgatttcttggtccagaatactacctcgaggtacggttgctggaggagtaaatcaggcaggaattaacttctacaatcatctcatcaatgaactcatttcanatggtataaggcctctggttactctgtttcactgggatacacctcanngcacttgaagatgaatatggcgggttcttaaacccacaaatcgtgaaagatttcgtagaatatgtggatatatgtttc

SEQ ID NO: 98202 - DNA, 515 bp, Arabidopsis thaliana columbia
  unsure (1)..(515): unsure at all n locations
cannnnnnnnnnnnnnnnnnnnnnnnnnnnnnnnnnnnnnnnnnnnnnnnnnnnnnnnnnnnnnnnnnnccacgcgtccgcccacgcgtccgtacggctgcgagaagacgacagaagggaaacaccgttcccatctcttcgtcttctcccgtttccatctccttctgctgctctcgggatccttctggatgattcaacagtgccaggcatttggtttcatggttatatctttctctcaatctaacatagctgttgcattgataacagagttctgtcctgttgccacatacttcctgatgctcggcaagatcaaccgcaggcaatggaaactcacagaactcgcatgttacaatcctcttggggcaaatttctcctttatgactatcgaaaatctcacgttctatggtctctttgcacatcgagcatgctatcggagcatgtgtgttcaagtagggttcctcagcatgctttttgggtaccataccacccacaaatctctaaattcaaaaccttga

SEQ ID NO: 98203 - DNA, 810 bp, Arabidopsis thaliana columbia
  unsure (1)..(810): unsure at all n locations
nnnnnnnnnnnnnnnnnnnnnnnnnnnnnnnnnnnnnnnnnnnnnnnnnnnnnnnnnnnnnnnnnnnnnnnnnnnnnntttcgccacgcgtccggaagaaaccgtgatttgctcaaatcaccaaaataatactctcttcaatctccatcttcccgttatctccgccacgtgtttctctctttttgtctcctttcttcttctccctaatcttaatctcagaaaccaacaacatcagtagtcagtacccccacacacacagagagaccctttttcgattctccacttttctcataaaggaacgatttttcgagatgtgggtcagtgttgatttctctcctcttggcttatgagtttcgaattcgaatctcaaactaaaaagctttttgaaacaagcaacaaatgttactgacacctaagatgtttagttcttggcttcgacaagatgtgaagaagatcctcaaacgcaaagacagtgatgctggtgaacgaggaaagcattggaggacttgagagcatcgttattcaacagattccgttcaccggaaactccaaagagacagcaccaacaacaacatcgtatctgtggcccaactgttgctcttactttcaatttcgttgttgctattagcattatcttcatgaacaaatgggttcttaaaatataggctttgagttccagtgtcctcaattattcctacattgagctatctacatggctctctcaacctttcgtccttctgctcaccgcttcacgnatcatcgtgcttcgtctatactcttggattgaatgcactcttacangacagctat

SEQ ID NO: 98204 - DNA, 625 bp, Arabidopsis thaliana columbia
  unsure (1)..(625): unsure at all n locations
ctcattattnnccnccaggaaataaatttcccntnaaattnttcccnaaacctncaccttaananaacccaaccctttcctatatgttcccnaaaccttcantttgaggagaagaagagaagaaggaaccgccgccaaaggaagtggagaagatctctccccagaagccaccatcggaggagggtgagccggtggaacaggaagtgaaaggaggaggaggaatggtcgggaggattaaaggatggttcggtggtggtgcgactgatgaggtgaggccagaatcgccacattctgttgaagaggctccaaaatcatctggctggtttggtggtggtccgacgcaccaggtgaagccaaaatcgcctcattccgttgaagagtctccacaatcacttggctccactgttgttccggtgcagaaggagctttaagaatatgagaactgagattttcaagtttccctttggatgtttatgtgtgttttgtttgacgtctttgatgtatcatggtataactccttgtttgtgtgggaagaaatataaaaaaagaacgaacccatagagcggccgctctagaggatccaagcttacgtacgcggcgatgcgacgtcatagtcttctatagt

SEQ ID NO: 98205 - DNA, 2452 bp, Arabidopsis thaliana columbia
  unsure (1)..(2452): unsure at all n locations
ctctgttttactcaagatcaaacgtataaacaaacaatcatcaggaataaagggtttgattacttctattggaaagaaaaaaatctttggaaaatggatcaaacagaggaaccaccactcaacacacaccagcagcacccagaagaagttgaacatcatgagaatggtgcgactaagatgtttaggaaagtaaaggctagagctaagaagttcaagaacagtctcactaaacatggacaaagcaatgagcatgagcaagatcatgatttggttgaagaagatgatgatgatgacgagctagaacctgaagtgatcgatgcaccaggcgtaacaggtaaacctagagaaactaatgttccagcatcggaggaaattattccaccagggacaaaggtgtttcctgtcgtgtcttccgattacaccaaacccactgaatctgtaccagtacaagaggcctcttacggacacgatgcaccggctcattctgtaaggacgacgtttacatcggacaaggaagagaaaagagatgtaccgattcatcatcctctgtccgaattgtcagacagagaagagagtagagagactcatcatgagtcattgaacactccggtctctctgctttctggaacagaggatgtaacgagtacgtttgctccaagtggtgatgatgaatatcttgatggtcaacggaaggtcaacgtcgagaccccgataacgttggaggaagagtcggctgtttcagactatcttagtggtgtatctaattatcagtccaaagttactgatcccaccaaagaagaaactggaggagtaccggagattgctgagtcttttggtaatatggaagtgactgatgagtctcctgatcagaagccaggacaatttgaaagagacttgtcgacgagaagcaaagaattcaaagagtttgatcaggactttgactctgttctcggtaaggattcgccggcgaaatttccaggtgaatcaggagttgttttcccggtgggctttggtgacgagtcaggagctgagctggaaaaagattttccgacgagaagtcatgattttgatatgaagactgaaactggaatggacacgaattctccatcaagaagccatgaatttgatctgaagactgaatctggaaacgacaagaattctccgatgggctttggtagtgaatcaggagctgagctggaaaaagaatttgatcagaagaacgattctggaagaaacgagtattcgccggaatctgacggcggtttaggagctccgttgggaggaaattttccggtgagaagtcatgagttggatctgaagaacgaatctgatatcgacaaggatgtgccgacgggatttgacggagaaccagattttctggcgaagggaagacctggatacggtgaggcatcagaagaggataaatttccggcgagaagtgatgatgtggaagtagagactgagctgggaagagacccaaagacggagactcttgatcaattctcaccggaactttctcatcctaaagaaagagatgagtttaaggagtccagagatgattttgaggagacgagagatgagaaaacagaggagccaaaacagagcacttacacagagaagtttgcttcaatgctaggttactccggagaaattccggtgggagatcaaactcaagtggcgggaactgttgatgagaagttgactccggtcaatgagaaggatcaagaaacagagtctgccgtgacgacgaagttacctatctccggaggtggaagtggagtagaggagcaacgaggggaagataaaagtgtgtcgggtagagattatgtggcggagaaactgacaactgaagaagaagacaaagccttttctgatatggttgccgagaaacttcagattggaggagaagaagagaagaaggaaacgacgacaaaggaagtggagaagatctctaccgagaaggcagcatcggaggagggtgaggcggtggaagaggaagtgaaaggaggaggaggaatggttgggaggattaaaggatggttcggtggtggtgcgactgatgaggtgaagccagaatcgccacattctgttgaagaggctccaaaatcatctggctggtttggtggtggtgcgacggaggaggtgaagccaaaatcgcctcattccgttgaagagtctccacaatcacttggctccactgttgttccggtgcagaaggagctttaagaatatgagaactgagattttcaagtttcactttggatgtttatgtgtgttttgtttgacgtctttgatgtattatggtataattccttgtttgtgtgaaaaaaggacatttggttaataaattgttcggctttggattaaaaaaaaaaaaaaagnnnnnnnnnnnnnnnnnnnnnnnnnnnnnnnnnnnnnnnnnnnnnnnnnnnnnnnnnnnnnnnnnnnngcc

SEQ ID NO: 98206 - DNA, 1409 bp, Arabidopsis thaliana columbia
  unsure (1)..(1409): unsure at all n locations
tatacgactcacttagggaaagctggtacgcctgcaggtaccggtccggaattcccgggtcgacccacgcgtccgcggacgcgtgcgcgcacattctcagagcaaatttcaagtttatttcattcaatttcgatccgagtaaccatggagtgtagatcattggatctgacgattatatctgcggaggatctcaaagacgttcaattgatcggtaaacaagacttgtacgccgtcgtttccatcaacggcgacgctaggacgaagcagaagacaaaggttgataaagattgcggcaccaaacctaaatggaagcatcaaatgaagctcaccgtcgatgacgcagcggcgcgtgacaatcgtcttactcttgttttcgagatcgtggcggatcgtcccatcgctggtgataaacctgtcggtgaggttagcgttccggtgaaggagcttttggatcagaataaaggtgacgaggagaaaacggttacttacgccgtgaggttgcctaacgggaaggcgaaaggatctctcaaattctcgttcaaatttggggaaaagtatacttatggatcttcgagtggtcctcacgcgccggtcccttcggctatggatcataagactatggatcagcccgtcaccgcttacccgcccggacacggtgcaccgtctgcataccctgctcctcccgcgggtccttcttccggatatccaccacaaggacatgacgataagcacggtggtgtttatggatacccgcagcaggctggatatccagctggaaccggtggttatccgccacctggtgcatacccacaacagggaggttaccctggatatccgcctcagcaacagggtggatacccgggttatccgccacagggtccatatggttacccgcaacaaggttatccaccacagggtccatacggttacccgcaacagcaagctcatggtaaaccgcagaaaccgaagaagcatggtaaggctggagctggaatgggactaggacttgggcttggagctggtttattgggtgggttgttggttggtgaagcggtttctgacatcgctgatatgggtgacatgggtgacatgggtgacatgggtggtttcgatttctgattgctgtgttatcaagttttaatttcttaggataattgctctaatgtttttcgtttgatgaatcatgtgaagaacgtgagagatcaagttttatcttgtgtttatgtctccggttacttattttcttctaatgaatgtaacattatgatatttccaatctctggctgttgaatagaatgcaatgaaacattggaaatatagtgttgactttgtcacctttattaagcaaaaaaannnnnnnnnnnnnnnnnnnnnnnnnnnnnnnnnnnnnnnnnnnnnnnnnnnnnnnn

SEQ ID NO: 98207 - DNA, 787 bp, Arabidopsis thaliana columbia
  unsure (1)..(787): unsure at all n locations
nnnnnnnnnnnnnnnnnnnnnnnnnnnnnnnnnnnnnnnnnnnnnnnnnnnnnnnnnngaagagtctacgatccacgcgtccgggcagccacctcaagaagaagtgcctaaccacgtggctacaaggaagccgtacagagggatacggaggaggaagtggggcaagtgggtggctgagattcgtgagcctaacaaacgctcacggctttggcttggctcttacacaaccgatatcgccgccgctagagcctacgacgtggccgtcttctacctccgtggcccctccgcacgtctcaacttccctgatcttctcttgcaagaagaggaccatctctcagccgccaccaccgctgacatgcccgcagctcttataagggaaaaagcggcggaggtcggcgccagagtcgacgctcttctagcttctgccgctccttcgatggctcactccactccgccggtaataaaacccgacttgaatcaaatacccgaatccggagatatatagtcaatttatatacatgtagtttgttttgtttgattagaagattacatttacatacaagatacacatagatactggaaaatataggtatgtatacattcataaattatcttatgtatcaaagaattttatagattctgattagctttttgtttttgtttttgataagaactctgattagttgtccggagacaaaaccggctaagagcaatccatgagaagctagcgagtgttttttagttcaagttgtaatataaatgcatattaattctttagtaattttgt

SEQ ID NO: 98208 - DNA, 531 bp, Arabidopsis thaliana columbia
  unsure (1)..(531): unsure at all n locations
ccggcaannnnnnnnnnnnnnnnnnnnnnnnnnnnnnnnnnnnnnnnnnnnnnnnnnnnnnnnnnnnnnnnnnnccacgcgtccgtacggctgcgagaagacgacagaaggggatctccattactcgactctcctcacctaaagattcaaccttttctctgtttcccaattcagagatgaagcttgtggagaagacgactactacagagcaggacaatggagaagatttctgccgcaccatcatcgaggtttccgaggttaacagaaacgtgtttcaggctccgggcggtgaagctgatccctttcgagttgtctccggcgaagaacttcacctaattccgccgctcaacttctccatggtcgataacggtatattccggtctggattccctgattcagctaacttctcctttctccagactctcggtctccgctcaatcatatacttgtgcccggagccctacccagagagcaatctccagttccttaaatccaatggaatcaggcttttccagtttggtattgaaggca

SEQ ID NO: 98209 - DNA, 550 bp, Arabidopsis thaliana columbia
  unsure (1)..(550): unsure at all n locations
gggtcgacggaatagtcagggcgcccccggctagtatcgccgnnnnnnnnnnnnnnnnnnnnnnnnnnnnnnnnnnnnnnnnnnnnnnnnnnnnnnnnnnnnnnnnnnnnccacgcgtccgtacggctgcgagaagacgacagaaggggatagaaaattaaaagataacaaacattttaacaaacccaaacccaaaaattctcaaggaggccgaagaagaagaagaagaaatgagcgttaatggtgagaacaaggtctcaggaggagatagttcatcttcagatcgacctgttagagtctacgccgatgggatcttcgatttgttccatttcggccacgctcgtgccatcgaacaagccaaaaaatcgtttccgaatacgtatctgcttgttggatgttgcaatgacgaaattacgaacaaattcaaggggaaaactgtgatgactgaatctgagcgatacgaatctcttcgacaattgcaagcgggcttgatgaagtgattccagatgcaccatgggttcttacaaccagagtttcttgataagcataa

SEQ ID NO: 98210 - DNA, 707 bp, Arabidopsis thaliana columbia
  unsure (1)..(707): unsure at all n locations
atgatctgccggctactatacgactcactttagggaaagctcgtacgcctgcaggtaccggtccggaattcccgggtcgacccacgcgtccgtacggctgcgagaagacgacagaagggggatggaagcagaagtagaagaggaagaagaagacatgttcgaagacgccgtgtgtaccacgcaagcaagagtcaacacgccattgtccgtaatcacagaggccttcgaagatctcgcggatctggtgaaaccgcaacgatctgatgagatcgatgaagacgaattaaggcttgatgatttctgcagtgcgtgtactcacgtctctgttctcttcaattgtcttggattcgctttcaaatttgcggaaatggagtacatcgccaaggttaaggatttggtggaagcgtcgaaaacgttcgaaacgttacacaacattcttgacctagacgtggagaaagaaacggttaaaacaccggggagccattcgcgtaacctaagacgtgtgagacaagggtttaagatctgatcccgacgccatcttttgaacaattttttgatccgcagatgacttattccgttgaaagaccgctgctgacaacgggctttcacggganngttgttcaccgttcccaacggtgggccnttaganccccgggttttcgccggattttttnacttcccgcggggggtncaacttttnttacggg

SEQ ID NO: 98211 - DNA, 1207 bp, Arabidopsis thaliana columbia
  unsure (1)..(1207): unsure at all n locations
ccnnnnnnnnnnnnnnnnnnnnnnnnnnnnnnnnnnnnnnnnnnnnnnnnnnnnnnnnnnnnnnnnnnnnnnnccacgcgtccgtcgagatcttggcttaaatccaagaaagactcaaaggtccatattttcttggctggtgatagctctggaggtaacatcgcgcataatgtggctttaagagcgggtgaatcgggaatcgatgttttggggaacattctgctgaatcctatgtttggtgggaatgagagaacggagtctgagaaaagtttggatgggaaatactttgtgacggttagagaccgcgattggtactggaaagcgtttttacccgagggagaagatagagagcatccagcgtgtaatccgtttagcccgagagggaaaagcttagaaggagtgagtttccccaagagtcttgtggttgtcgcgggtttggatttgattagagattggcagttggcatacgcggaagggctcaagaaagcgggtcaagaggttaagcttatgcatttagagaaagcaactgttgggttttacctcttgcctaataacaatcatttccataatgttatggatgagatttcggcgtttgtaaacgcggaatgttaacactgggttagagaaagaaggttgttttaacaaagccaagacatctttcaaactaacacacaggtgaatgtattgcctgtggattctctcgtttagttttgtttttgtgtttagtatctaagtgtgtggcggtctgcggcagcctttgtgatgactgtttaaacgctggattctgaaacgctaaagcttgtggaagaacagtgaggcgtttagagacttggaaaggaaccaagccctagtaaaaatttctcctttttttgtctgtaatatttggcatttagcttttacccttgagcctttttactaactaaaagctgattttttcagcatgagagtggtaattagatatctataaatatatatatttcaagaatgtaatgtttatacccaaattttagtgattttggtaaatgtatgtagggtctgcactctgcagttgtattgttgctcctctttttcattgtactctaatggattttccaaaatagcaaaaaaaaaaaaaaaaaaaaaaaaaaaaaaagaaaaaaaaaagggcgaacgctctagaggatccaagcttacgtacgcgtgcatgcgacgtcataatctctatagt

SEQ ID NO: 98212 - DNA, 746 bp, Arabidopsis thaliana columbia
tgatactccagctctctacgactcactattgggaaagctggcacgcctgcaggtaccggtccggaattcccgggtcgacccacgcgtccgtggctgcgagaagacgacagaagggggtcgtcgtcgattcaaaatccgtcgcttcgcttccaacgttcgccggcaatctaaacattttccgggatggaggaagagatgtcgaaccgtcgagtatcaaatcggactcgtaaggtcgctacgaagatggcggcggctcttacaagcaacgacaatcgaactcaggctgctatagctaggctagaggctttagagaacgataatggtgctattgaagtgatagatttgaacgatgatgaagaagcttctcttgatgaagatgatgatctcggttacttacagaagaagcaacacaaaggatcaaagcgtaaaactcgacaagcgaaagctttagaagctcgtaaagctcctaaatccttccttgagctattgcaagaggcaaatttggagtctttaccgtcgcatgtaccgacttacttgaaagcagcagttggacctccgagttcgtcttctcgtcgctatttttgctcggtttgtggttacattgcaggttacaattgttgtttatgtgggatgaggttttgttctattcgttgtcaaaatattcacaaggatactcgttgtcagaaatttgttgcataggaaaggagtgtgaaaacaaatgtaacatatttttcaaaatgtatttg

SEQ ID NO: 98213 - DNA, 707 bp, Arabidopsis thaliana columbia
  unsure (1)..(707): unsure at all n locations
cnnnnnnnnnnnnnctcactttagggaaagctcgtacgcctgcaggtaccggtccggaattcccgggtcgacccacgcggtccgcccacgcgtacgaccacgcgtgcgtacggttgcgagaagaccacagaaggggaccatcgtcgtcaatggaaacgagaatcctttgacctctcctctcagtcgtctctctctctcgccatctccgccgtcggtctgaggcatcatcttggtcgaagaagaatcagcatcaacttccatcacgctcacgaaattggtcgaagaagaagaatcagcccttcttttggttggtgaagatttggcgaagagcaacggcaagccaaagatgaaaaactcatgaaattcgatgaaatcgaagagaatagaggcaatcttggttcgtgaagcagaagcaagattctactgcacacgttgatatcacaggctatcaatgctggtctctgtgtcagagagagaagtggcctgatgcccacaacaagaaagcaggagcacatagtttcgaagcaagcaatgaaacaccaatcttctacctcatttttggaagacagcatatgttgagagattgtcagacatttcatcctttctttctcttgtcttctctccgtgcaaactcattagttcgttttggtcccttggtagttttaatgttattgactaaatcagttttacatgattctgtttccctt

SEQ ID NO: 98214 - DNA, 440 bp, Arabidopsis thaliana columbia
agaagggggattggcagagatttcatcagtttgctttttggctttttacgtgtcttcatagcttattggaatttaaaagattaaaaggaaagaaaaaattctgagagagagatgggaatgagtggttcttcaggtttagttcatgtgctcatgcttcttcttcttctcagcatcctctttcaccataccgaatctactttgccctctgatagtgaacaactctcaataactgggagcagattgatgagtataatatataagccaaacggagacatatataatatcggaagcagagtatatatatcaccttgaagcagtggacatggtggtggtcacattcatcaacattaccttccttaggttttggccagtatacaaagttgtgtaataattcaccaagcataatttaaatgtgaatgtataatttgcaatttatgtga

SEQ ID NO: 98215 - DNA, 663 bp, Arabidopsis thaliana columbia
gggaaagcacgtacgcctgcaggtaccggtccggaattcccgggtcgacccacgcgtccgtgcggctgcgagaagacaacagagggattgccagagaattcatcaggttgctttttggctgtttacgtgtcttcatagcttattggaatttaaaagattaaaaggaaagaacactttctgacagagagacgggaaggagcggctctttatgggggggtatgtgctcatgcttcttcttcttctcagaatactctatcaccataccgaaactactttgccctctgatagtgaacaactctcaataactgggagcagattgatgagtataatatataagccactcggctacctatataatatcgttagcagagtatatatataaccttaaagcactggacatggttggtggtcacattcatcaacattaccttccttaggtttcggccaggtttcaaagttgtgtaataattcaccaagcataatttaaatgtgaatgtataatttgcaatttatgtgattccatgtaaggattttaaaattttcaaaatttgttagcaaatgtttgtgcaatatagtgtttttctttccttacaaaagatattttaataaatttgttaacaaatgtttgtgcaatatagtcacgagaaaagtcatgttttgcat

SEQ ID NO: 98216 - DNA, 525 bp, Arabidopsis thaliana columbia
caatattgtagaaaactgcgaaagcgtgcagataagagagatctctctgaacagatattatagttgatagtttgcgtactaggagtctgtgaaagcttgcacaggaagaaagcaaatcgggaaagaaaggaatctgaatcggagaagcaatcgaggtttacgattaccaaattctgatctaatctgattaattgtggtgatttccgatggaagaagacggtggtggcggcggtgcgaaagttggaatgctggagaatttcatgaagacgcatcagagttctttgaaatcgttattccagagaaagaaatcatcctctggtcgtgatggagatgcttctccgtcgcctatcgcttccccgaaacctattccgcagctctctcttctcgccaattccgtcgtctcccgctgttcaaagatcctgaacattcaaacagaagatctgcagcatcattttgatgtagagttgcctgagagtggttagcatctattgacatatgcatagaactttttagagttctgctctt

SEQ ID NO: 98217 - DNA, 520 bp, Arabidopsis thaliana columbia
  unsure (1)..(520): unsure at all n locations
tnggaggtgcctcncattncacagccgggtttcgggccggtcaacccatacggaattccaggatcttgatgaggtgattgcaagggccaacaactcaaggtacggtttagctgctggagtgttcacacagaatcttgacacagcacaccggctgatgcgagcactcagagttgggactgtttggatcaactgttttgatgtacttgatgcatcaattccatttggagggtataagatgagtggcattggtagagagaaaggtatctacagtctcaacaattacttgcaagtcaaggctgttgttacttccctcaagaaccctgcctggctctaaaccataccaggtggttacacttatttctcgagtttggtttatgatttgcacttttgctttgaaaacctggagttgtactgtgtctctaggatttctagattttgagagtaatttatcttcaatacattttgcaaataaagctacatgacaatgtgtgattaataaacacaaactcttattagtttc

SEQ ID NO: 98218 - DNA, 539 bp, Arabidopsis thaliana columbia
gactcacttagggaaagctcgtacgcctgcaggtaccggtccggaattcccgggtcgacccacgcgtccgtacggtgcgagaagacaacagaagggggagtccgagagaggagaacaatggaagagaagaagaagacgatggagatggaagcaacaacaatgaaaggcacggcggcggaaggtataacggagagactctcttctctcgacaatctctattttccacgcgccgtccaattaaccgctgcatcttccgaccaacgcaaatccatcctcctcgacctcctccgtcgtgatcccgccgtttttctagagagatatggatcggagctactagtagatgaattgcttgagtttgatgctatgaaacatgactacgaggttgattggcatttgaaaaacctgcggaagaagataagtccgacttcagaagagattaaatcgaggtctgtagctgtgaggaataggagattggcttatttgaataagcttgtatccgagggacagtatttctcagaggatgctatgagagatagaga

SEQ ID NO: 98219 - DNA, 352 bp, Arabidopsis thaliana columbia
ggaagagggatgcgatcctctcgtcatcgctggttccatcagtttcagtgagaatcagatcgtcgttgtactgagagctccggcattggttcacggcggagctggagagttatctaagaacggagaggttactgatctgaattgttgaagatcggaaaatgacagaatcgagtctggatctgcaggaatctggttgggaagaacttaggcgggaagctcgtaaaattgaaggagatctagacgttaagctctcttcttacgctaagctaggcgccaggtttactcaaggcgggtatgttgacactgggtctccaaccgttggatcggggagatcatggaagtctatggagat

SEQ ID NO: 98220 - DNA, 774 bp, Arabidopsis thaliana columbia
tggaaattcaatcgttgcttgagaagttgttggatattaatgattccatgagtagatgtgctgcatctgctgcacccacaacatcggttactcaaaaactagcaaggcacagggatatacttcatgaatatacccagaagtttcgaagaataaaaggaaatataaactcgttgagagaacacgctgagcttctgagttctgtcagggatgacataagtgaatataaggcttctggtagtatgtcaccaggtgtgcaagtgttaagggagagagcttcaatccatggaagtatatcccatattgatgatgtgattggtcaagctcaagcgacaagagcagttcttggctctcaacgatctctgttttcagatgttcaagggaaagtaaaaaatctcggagacaaattcccagtgattcgtggcttacttggctcaattaaaaggaaacgttctcgggacacacttatcctctccgctgtcatcgctgcttgtacgttgtttctaatcatctactggctctcaaaataaacagaatgttcatacacctaagctataaaacgagtttgccttgacatccctagatcgatttttttacaagttttttcttgcttttgtgtttttgccattatgttgggttatatgtttgtaggacaatattacaccctgaatcatatcgtaaaagtaaaattcgaaacatatatttcacaaaaaaaaaaaaaaagggcggccgctctagaggatccaagcttacgtacgcgtgcatgcgacgtgatag

SEQ ID NO: 98221 - DNA, 924 bp, Arabidopsis thaliana columbia
gatgcgatcctctcgtcatcgctggttccatcagtttcagtgagaatcagatcgtcgcggtaccggaccggaattcccgggtcgacccacgcgtccgggagagttatctaagaacggagaggttactgatctgaattgttgaagatcggaaaatgacagaatcgagtctggatctgcaggaatctggttgggaagaacttaggcgggaagctcgtaaaattgaaggagatctagacgttaagctctcttcttacgctaagctaggcgccaggtttactcaaggcgggtatgttgacactgggtctccaaccgttggatcggggagatcatggaagtctatggagatggaaattcaatcgttgcttgagaagttgttggatattaatgattccatgagtagatgtgctgcatctgctgcacccacaacatcgggtactcaaaaactagcaaggcacagggatatacttcatgaatatacccaggagtttcgaagaataaaaggaaatataaactcgttgagagaacacgctgagcttttgagttctgtcagggatgacataagtgaatataaggcttctggtagtatgtcaccaggtgtgcaagtgttaagggagagagctttaatccatggaagtatatcccatattgatgatgtgattggtcaagcttcaacgacaagagcggttcttggctctcaacgatctctgttttcagatgttcaaggggaaagtaaaaaattttgggagacaaaatccccagcggattcgtgggtttaccttggctccaattaaaaaggaaacccgtctttggggaaccacactttatttcctctcccgttgtacatcccttggcttggaaccgttgctttcataatcaagctcgcggggctttccaaaaaaaaaaccaggagtgtttccctccccc

SEQ ID NO: 98222 - DNA, 1515 bp, Arabidopsis thaliana columbia
  unsure (1)..(1515): unsure at all n locations
cgcctgcaggtaccggtccggaattcccgggtcgaccacagatattaaaacaactacccaaacaaaactttagatctgaaaatctcagctttgaaatggaggaaatcggaatagttatcgtcggcggcggaatcgctggtctcgccacttccattgctcttcataggaaaggaataaagagtgtggtgttggagagagcagagaaagtgagatcggaaggagctggaatcggaactctctccaatggttggagagcccttgatcagcttggcgttggtgatcgccttcgtctcaattcttctcttattcacaaggcacggaccatgttgattgagaatggaaaaaaacgagaattcgtttcaaatatagtagacgaagctcgttgtattaaaaggaacgatcttgttgaggccttatccgatgcccttccgaaaggaaccatccggttcggttctcatattgtttctattgagcaggacaaaactacgttgtttccggttgttcacttagccaatggaaatagcatcaaagccaaggtcctgattggatgcgatggtgccaattctatcgtcagtgattatttgcagttaaacccgaaaaaggcgtttgcttgtcgtgcggtgagagggtttactaagtacccaaacggccatggatttccacaagaggttctaaggataaagcaaggaaatgtcttaataggaaggcttcctttgacggataatcaagtcttttggtttctagtacatatgcaagacaataatcacaatggtaaagatcaagaatcgattgcgaatctgtgtcgaaaatgggccgatgacttgtctgaagattggaaagaaatggtaaaaatatgcaatgtggagtcattaacactcacacacttaaggtaccgagcgccatcggaaatcatgttagggaaatttcgtcgtgggacagtgactgtagccggcgatgcgatgcacgtgatgggtccgttcttggcacagggcggctcagcggcgctagaggatgcggttgttttagctaggtgtctagctaggaaagttggtccggaccacggagacttgttaaaggattgttcgatgaaaaacattgaagaagctattgatgagtatgtggatgaacgtaggatgagattactcgggctttcggtgcagacttatttgaccggacgttcgctacaaacgtcatcaaaggttctgaggctaatgtttatagctttgttgttacttttgtttggtcgtgatcaaattcgtcatactaggtacgactgtggccgtctctagagatttgatggacattttgtattttttagtgtgaggttgtgtgctttaaactttttttgtgtgtttctttttcttataacatcctcctttctcaatataacaagagtttacatgaccaaaaaaaaaaaaaaaaagggcggcaacaannnnnnnnnnnnnnnnnnnnnnnnnnnnnnnnnnnnnnnnnnnnnnnnnnnnnnnnnnnnnnnnnnnnnnnnnnnnnnnn

SEQ ID NO: 98223 - DNA, 546 bp, Arabidopsis thaliana columbia
atgatctgccagctacaaatacgactcactttagggaaagctcgtacgcctgcaggtaccggtccggaattcccgggtcgacccacgcgtccgaaattctcagcttctatacaaacctttctcaattcttcttgacattagggtttcctctttctttgagagggctaaaaccctaatatatccctctcattgactaaagagttaagcctactctatctactttggaagcgaaattcaaagggtaaggtaaaagcccttgaaagaggaagaaagatacaagatcctcaaagaacctaaagatctaaaggttgtaagaagaaaaacaaatggcgtcgtcatcaaactcatacaactcaccatgcgcggcgtgcaagtttcttcgccggaaatgcatgccgggatgcatattcgcgccatattttccaccggaggagccacacaaattcgccaacgtccacaaaatctttggagcaagcaacgtcacgaagctcctcaacgagctcctccctcaccaacgtgaagacgcagtcaactccttagcctatg

SEQ ID NO: 98224 - DNA, 707 bp, Arabidopsis thaliana columbia
  unsure (1)..(707): unsure at all n locations
gggccncttggggganncaagntttnctcaaaangcttngggcnagggggntncaaananccggttggaaaatttaaggccaaatccccccggggaacttttggaattttccaaggccaacaaagtccccggcgggttgccccggggncccaaatgggccccttcatcctgggggaatgaaacccccaggaaaccttctaccccaggggaaagcaaagctgcacaaccggtgagcatgtacctctattccccgtgtggaatcattagaggtgtcctctccaacttggggataccttgtgctgtctctgcagatatatcaagccttcccacatgctctttcgtgattcgggtcaaggcttgattctgcatttagctcgagtacttggctttatactttcaaggaagatagatccttcgggtctgatcaatctaaaacccattgcaggcttctgtttgctgttcttttgacacactttagccttgtggtgcttgttttaaacagtgagggcttggtttcatgtttgaaatgacttttatttttctgttgtaaatttttgttgatatcttatatacagtaattcctggtgcatctccatttcttttccaaaaaaaaaaaaaaaaaaaaaaaaaaanagcggcagctctagaggatccaagcttacgtacgcgtgcatgcgacgtcatagatcttctatagtgcgtcctaa

SEQ ID NO: 98225 - DNA, 1008 bp, Arabidopsis thaliana columbia
  unsure (1)..(1008): unsure at all n locations
nnnnnnnnnnnnnnnnnnnnnnnnnnnnnnnnnnnnnnnnnnnnnnnnnnnnnnnnnnnnnnnnnnnnnnnnnnccacgcgtccgcccacgcgtccgtacggctgcgtgccaactaacggtgggaaaccggtggagagaagacggaaagagtctgagagagagagaagaaatggggagagaagtggcggagagctgtgtagacactatgttaatggagatggtggcgatgtacagtggccgattctatgctaacaagccggaactcgccgctcggaggatcgaggccattggttatcaggtcggccaccagctctccgagaggtacactatggaaagaccaaggttcagtgaccatctagaggcaatcaagtttatctgcaaagacttctggtctgaggtcttcaagaagcagattgataatttaaagacaaatcaccggggtacttttgtattacaagacaacaagttccggtggttgtctcgtgtctcaattgacccttcatctgagaatgaaacccaagatccttctactccaggggaaagcaaagctgcacaagcggtgagcatgtacctctattttccgtgtggaatcattagaagtgtcctctccaacttggggatacccttgtgctggctctgcagatatatcaagcccttcccacatggctcttttcgtgaattcgggtccaaagggctggatttcttgcatttttaggcctcggaggttacctttgggccttttaattaacttttttccaaagggggaaaggaaattagtattccccctcttcggggagttcctggggaatccaaaatacctctaaaaaacccccccatattgtgccaaggggcctttcctggggtttcgggcctggatctcccttttttggaccaccaaccctttaaagccccctttgtgtgggggcctcttggttttttaaaacaagggggaggggccctggggtttccattgttttggaaaaggaacttttaatatttttccgggc

SEQ ID NO: 98226 - DNA, 607 bp, Arabidopsis thaliana columbia
  unsure (1)..(607): unsure at all n locations
aggtcacaacgactcactattgggaaagctggcacgcctgcaggtaccggtccggaattcccgggtcgacccacgcgtgcgtacggctgcgagaagacgacagaagggtacggctgcgagaagacgacagaaggggattcttaacgggaactttgattgggctagcttggcaggtcttaatccaattccagagctagctccgaccaatggattaccgagttacggtggttacgatgcgtttcgagcggcggaaggtggggcggagagtgggcatgtgaatcggcagcagaactcgagcgggttgactcagagtttcgggtacagctcgagtgggtttggtgtttcgggtcaaacattcgagtttaggcaatgagagagatgtgaagttactgatgggtgaaaaaagtaaaaaaaaacttggagatagtagagtggcaattgatgtaaataatagggatttatatggggcttttaccgattcggtgaggcttaggattccactaaggaaaaaggctcgactggggactagtttgatccaacttgacggcccacaaatgtgtaatgtttctcaacggagagaaaaataaatggtcaccaatatttttnc

SEQ ID NO: 98227 - DNA, 732 bp, Arabidopsis thaliana columbia
ttttaaagatgaactaacagagaggtatcctgaagcaaggagagcttacttaaagagtggaggagatttcccattcctatcacggcccgacgaagtcaatttgcatctacagctacacttaaggcgggtaggagtagaaccacgacccgaagtggttaaaagcattccaaaaggcggcgcagatggcacagacggtagcagccagagcaagaagaagagtgatgaggagaaggacgaccgtaacaacaatatgcctcaagactctggaagctcatcttcagatcaatcaccgacatttccagaaagttccggaagctccaacgatccgcctttacccacagacaccattcagttactgagttcatcattgaacaacctcatattagttcaactcgctggtgaagtttatcagtcttgtgtggttttcacattgtgttactgtacattggttttggttcacggtggtggttttatctccagacaattggtttagtgttctttatttatttattacctcttttgttgtttaaatctttttacttttgggtttctttgatctgttttggtttctcttgactttttgtataagtttgtaagacaaagcaagagttctctgtatgtttcaagttattacacttttggaagaaaactttggttgggttttgggattctctagaggatccaagcttacgtacgcgtgcatgcgacgtcatagctcgtcggatagtgtaa

SEQ ID NO: 98228 - DNA, 409 bp, Arabidopsis thaliana columbia
gaaaacaagttggaggaaaaagagagacacaactcacaacaacatcaaggttttaactaaatttaattttgtcataactattcatatatagtcaaatggctaacaaagctctcattcatctcctcgtcatcttcttcttggctctatcacacatcttcttcttcccttcccatgcttcgagacttgggagtttgatggagaagccaaaaattgttcgacctcaacaagatacactaatggatgtgaccaaggacgtcgaagaaaggatggtgatggagttaaacgactatccattttcgggtgcaaacaatcgccacttgccacgacaacgacgctgcatccttgagtgctgatagatatataacatgacgacaatcgacatactatgattatagccagtatcgaataa

SEQ ID NO: 98229 - DNA, 803 bp, Arabidopsis thaliana columbia
  unsure (1)..(803): unsure at all n locations
nnnnnnnnnnnnnnnnnnnnnnnnnntcgctcctatagaaagtggacgctgcggtccggtcggaattccgggcgaccacgcgtccggggaaaagaaatgtgggcgattacgagagtgataagccggcgagttcatggaacaagttttattactattccaaaactctcaggtttctctattgtatctcccaaacaagttgaggtagagtatgcagatggaaccaagttcaatttttcatcagagtttctgagaattcatagtccagctgctgatggaaaagtcagatcaatcggtggtgaaaaggtgatatctggaaggcggtatgtaggaatcatgtctgcagaaccggttggaaactacggggtaaggttagtgtttgatgacttgcatagaacagggatatatccatgggattatttctacgagcttgggagcaataagtttggtcttatgaggaactatatcaagactcttcaaaagcataatctcagccgtgaacctcctccttcaagaaagagatgattctgatgatcaatgttagtatttaacattgttcaaaatgtttgatagattctctttttgcagagaaaccttgaatcttcttgtcttgtttcagagttaccggttgttgctttttggctgttgttgttgtctttattactattgttgttgatgttagtgttgattgatctataagttgtctttagagaacaaaaaaaaaaaaaaagggcggccgctctagaggatccaagcttacgtacgcgtgcatgcgacgtcatagtacttctatagttcgtcctaaa

SEQ ID NO: 98230 - DNA, 562 bp, Arabidopsis thaliana columbia
  unsure (1)..(562): unsure at all n locations
caacatgtcctgctgatttgggaggcaagtgtagtgattctnatgactggcaaggtgatttnttccctgaaatccccaagattaagtatgagggaccttcgagtaagaacccacttgcttacaggtggtataacgctgaagaagagattcttgggaagaaaatgaaggattggtttagattcagtgttgcgttttggcatactttccgtgggactggaggtgatccctttggtgctgctactaagtattggccttgggaagatggtactaactctgtgtctatggctaagagaagaatgaagagctaactttgagttcttgaagaaacttggagttgattggtggtgttttcatgacagagaccatagcaccctgatggcactacacttcgaggagtctaacaaaaaacttgggatgaaagttatcgaactcgccaaagaactccaaagggggagcaaaatccaaaccattgtggggaacagctcagcttttcttgcatccccggtatatgcccgggggagcgaccagctctgaagttggagtgtatgcttacgctgctgct

SEQ ID NO: 98231 - DNA, 2057 bp, Arabidopsis thaliana columbia
  unsure (1)..(2057): unsure at all n locations
cgcctgcaggtaccggtccggaattcccgggtctgacccacgcggtgcagctgcaaatcacacaaaaacaaacaaaactttgcttacgtcacatcattatctgtgactaattcttaatcatcatcatcatcatcacttacttaaatctaaaaaaatctctgtttgtatatatattatctttgcgatttttatccaaatcttccaaagcttagttttttttttttttcaatttctctcttgcgttttcgattttattacaagaactttgttttgggcttcatccatcgttcaaggttcgttgaaaactatgaagaaagttgagttttttatgctccttctctgcttcatcgcagcgtcatctctagtgtctgctgatccaccaacatgtcctgctgatttgggaggcaagtgtagtgattctgatgactggcaaggtgatttcttccctgaaatccccaagattaagtatgagggaccttcgagtaagaacccacttgcttacaggtggtataacgctgaagaagagattcttgggaagaaaatgaaggattggtttagattcagtgttgcgttttggcatactttccgtgggactggaggtgatccatttggtgctgctacctaagtattggccctgggaagatgggacctacccttgggctattggttaaaaaaaaatggaaacctacctttaagtcctggaaaaacctggaagtggaatggggggggtttcaatgacagagacatagcacctgatggcactacactttgaggaatctaacaaaaacttggatgaagttatcgaactcgccaaagaactccaaaaggggagcaaaatcaaaccattgtggggaacagctcagcttttcttgcatcctcgttatatgcacggaggagcgaccagctctgaagttggagtgtatgcttacgctgctgctcaggtgaagaaagccatggaggtaacacattacttaggtggtgaaaactacgttttttggggtggtcgtgaaggttatcagacactcttgaacactgatatgggaagagagcttgatcatctagccaggttctttgaagctgctgttgcttacaagaagaagattggattcaaaggcacgcttttaatcgagcccaagcctcaagaacccaccaagcaccagtatgactgggatgctgcaacagctgccaatttcttgaggaaatatggtcttattgatgagtttaagctcaacattgagtgtaaccatgccacgctctctggtcacacttgtcatcacgagcttgaaactgcaagaattaatggtttacttggcaacattgatgcaaacactggcgatgctcaaactggatgggatacagatcagtttcttacagatgttggagaagcaaccatggttatgatgagtgtcatcaaaaatggtgggattgctccaggcggcttcaactttgacgctaaactgcgaagagagagtacagacgtggaagacttattcattgctcatattagtggaatggatacaatggctcgtggactgagaaatgcagtcaaaatcttggaggagggaagtctaagtgaattggtacgcaagcgatatgcaacttgggactctgagcttgggaagcaaatagaagaaggaaaagctgattttgagtatcttgagaagaaagctaaagagtttggagaaccaaaggtttcttctgctaaacaggaactcgctgagatgattttccaatctgcaatgtaagaagaagaacaagaaggctttttatgtttattaaaagtatcgtcttttttagtttccctcgcatctttgagaagtttgaaaaccaaaacattggaaaataagatgattagagaggttggtttcattatttcagttgatgtacccatgggttcacaccccaaattacctttaaattgtgaaaacccanaaaaaaangggcgggcccggccctagangggtnccaagccttacggacgcgtgcatgcggcggcatagccccctccaanaggggccccnaaaatccattcaccnggcggccgnttncaaacgccg

SEQ ID NO: 98232 - DNA, 1109 bp, Arabidopsis thaliana columbia
  unsure (1)..(1109): unsure at all n locations
nnnnnnnnnnnnnnnnnnnnnnnnnnnnnnnnnnnnnnnnnnnnnnnnnnnnnnnnnnnnnnnnnnnnnnnnnnnnnnnnnnnccacgcgtccgcggacgcgtgggcacgcttttaatcgagcccaagcctcaagaacccaccaagcaccagtatgactgggatgctgcaacagctgccaatttcttgaggaaatatggtcttattgatgagtttaagctcaacattgagtgtaaccatgccacgctctctggtcacacttgtcatcacgagcttgaaactgcaagaattaatggtttacttggcaacattgatgcaaacactggcgatgctcaaactggatgggatacagatcagtttcttacagatgttggagaagcaaccatggttatgatgagtgtcatcaaaaatggtgggattgctccaggcggcttcaactttgacgctaaactgcgaagagagagtacagacgtggaagacttattcattgctcatattagtggaatggatacaatggctcgtggactgagaaatgcagtcaaaatcttggaggttagttaagatatgaatagataagttttataaaagaaccaaagagtgtagctttaacttggtttcggtgtggtaaaggagggaagtctaagtgaattggtacgcaagcgatatgcaacttgggactctgagcttgggaagcaaatagaagaaggaaaagctgattttgagtatcttgagaagaaagctaaagagtttggagaaccaaaggtttcttctgctaaacaggaactcgctgagatgattttccaatctgcaatgtaagaagaagaacaagaaggctttttatgtttattaaaagtatcgtcttttttagtttccctcgcatctttgagaagtttgaaaaccaaaacattggaaaataagatgattagagaggttggtttcattatttcagttgatgtactatggtttcacactctaattactttaaattgaataacaaaaaactgtttaggcctttaaaaaaaaaaaaaaaaaagnnnnnnnnnnnnnnnnnnnnnnnnnnnnnnnnnnnnnnnnnnnnnnnnnnnnnnnnnnnnnnnnntgtcctannnn

SEQ ID NO: 98233 - DNA, 296 bp, Arabidopsis thaliana columbia
ggctcctttcttcgtgttgctcgagttcttcaatcgttttcgggtatgaaccatatcccggttttcaagcgcgtgtgaatgccaaggtagaaagtgacatcaaggaatataggccacaagaagcagaagaagaataagatcacataagcttggattatatataactgaagaacttgaacccattgtcgtgtttctataaccgaaatgataataagaccaccatgatccatggattgatgtattggtgtgtaaactatgtttcaatatattgaatataatatgtttcagtcaaaaaa

SEQ ID NO: 98234 - DNA, 379 bp, Arabidopsis thaliana columbia
agaagggggaagacgaagaaggactaagacatcacgaggaacacgatgggtgaagcggtcaaggatggagttatccttgctcgttgtctaggtgaagcgataaaggcaaagagtctgaaaggtgaaacagaagaaaatgaagaagagggttataagaggattgaagaaggtttgaagaagtatgcaggagaaaggaaatggagaagcattgatcttataacaacggcatatacagtaggattcatacagcagagcagagggaagtggatgaacatgttcagagacaggttcctgtcgtcttacctttctaggatgctgctgaaaaactcccatttcgattgcggaatccttgtcccatgatgattctcaaacataagtc

SEQ ID NO: 98235 - DNA, 512 bp, Arabidopsis thaliana columbia
  unsure (1)..(512): unsure at all n locations
gatacttccnnnnnnnnnnnnnnnnnnnnnnnnnnnnnnnnnnnnnnnnnnnnnnnnnnnnnnnnntcgttggtcgtcgcccacggctacggcggggcgtgttaccacagaaggggaagtgaaagtgaagagctttttcgaagaacatttgcacactgatgaagagatccgttactgcgttgcaggaagcggttactttgatgtgagggatcgcaatgaagcttggattagagtatgggtaaagaagggaggtatgatagtcttacctgctggaatatatcatcgcttcaccgtagactcagacaactatatcaaggcaatgcggcttttcgtgggtgaaccggtctggacaccatacaatcgcccacacgaccacctccctgcaaggaaagagtacattgataatttcgtgaaggtgaatgaaggtggtgtcatagacgcgtcagcctagaggattctcagtcttatgcatcagattctcataaactaagcatacagtaaagaaagctttc

SEQ ID NO: 98236 - DNA, 917 bp, Arabidopsis thaliana columbia
agaaggggatcgagtaatcgggtggttttgaagacgaagaaggactaagacatcacgaggaacacgatgggtgaagcggtcaaggatgggagagaagaagtgattcaagcttggtatatggatgatagtgaagaggatcagagacttcctcaccacaaggatcctaaagagtttgtatcgttggacaaacttgcagagctgggagtacttagctggagacttgatgctgataactatgaaaccgatgaggatttgaaaaagatccgtgaatctcgtggttactcttacatggacttttgtgaggtatgcccggaaaagcttccaaactatgaagtgaaagtgaagagctttttcgaagaacatttgcacactgatgaggagatccgttactgcgttgcaggaactggttactttgatgtgagagatcgcaatgaagcttggattagggtatgggtaaggaagggggctatgatagtcttacctgctgggactatcatcgcttcaccgtggactctgacaactatatcaaggcaatgcggcttttcgtgggtgaaccggtatggacaccatacaatcgcccacacgaccatcttcctgcaaggaaaagaatatgtcgataacttcatggtcaatgcctcggcttagagagcttcctctctctatatctggctttctgaaaccaggatctataaacaaggcctacaataaagaaagctttcctgtcaagtattggatatttatatgtattcctgtgtagaatgatggcttttggtatgcttgagttgttgtaaacttagttacactctctgatatgtctctctttaccatctttgtcgtatcccatatacgaaaagattacattgggattcatattgtcttacgttcgttcctatgtgcaatatgttgagtttttacac

SEQ ID NO: 98237 - DNA, 947 bp, Arabidopsis thaliana columbia
  unsure (1)..(947): unsure at all n locations
gacgaagaggaatcataaaaagcctaacgaagaagacgaagaagaagaggaacacgatgggtgaagcggtcaaggatgggagagaagaagtgatccaggcttggtatatggatgatagcgaagaggatcagagacttcctcaccacaaggatcctaaggagtttctatcgttggacaaacttgcagagctgggagtacttagctggagacttgatgctgataactatgaaaccgatgaggatttgaaaaagatccgcgaatctcgtggttactcttacatggacttttgtgaggtatgcccggaaaagcttccaaactatgaagtgaaagtgaagagctttttcgaagaacatttgcacactgatgaagagatccgttactgcgttgcaggaagcggttactttgatgtgagggatcgcaatgaagcttggattagggtatgggtaaagaagggaggtatgatagtcttacctgctggaatatatcatcgcttcaccgtagactcagacaactatatcaaggcaatgcggcttttcgtgggtgaaccggtctggacaccatacaatcgcccacacgaccacctccctgcaaggaaagagtacatcgataatttcgtgaaggtgaatgaaggtggtgtcatagacgcgtcagcctagaggattctcagtcttatgcatcagatttctataaactaagcatacaataaagagagctttctgtctcatgttggatattatgtcatctacagatccacttgtgaagaaactttgattcgtgtggctttggcattatggttgtgttgtaactgtatttatagtttatactccagaaatcaaactgtgttacattaaaaaaaaaaaaaaaaaaaaaagnnnnnnnnnnnnnnnnnnnnnnnnnnnnnnnnnnnnnnnnnnnnnnnnnnnnnnnnnnnnnnnnnnnnnngaaat

SEQ ID NO: 98238 - DNA, 1621 bp, Arabidopsis thaliana columbia
  unsure (1)..(1621): unsure at all n locations
nnnnnnnnnnnnnnnnnnnnnnnnnnnnnnnnnnnnnnnnnnnnnnnnnnnnnnnnnnnnnnnnnnnnnnnnnnnnnnnnnnnccacgcgtccgaaatactagagaggaagaaaaacagagctttctttctaagatcatcaacgcaccatggaagaagaaggcagcccagatatcatcatcgttggcgccggtatctccggcctttccaccgctgttggactacacaggcttgggatcagaagcatggtgctggaatcttcggagacactgagagcgacaggatttgcatttaccacttggttcaatgcttggaaggccatggaagctctcggcgtttctcagcatattcgcagtctccatgatcgccttgaaggatgggtggttggaacaatttctgcaggaactcctcccacagagatgctgtttccagaatccgaagaatatgagtctcgatgcgtacagaggaagctgttgttagaggctctagcaggtgagttgcctgaagagaccatcaggttttcgtctaaggttgttcatattgaattgtctggatgctacaagaaggttcatctctccgacgggaccattctcaaaaccaaggttttggtagggtgcgatggagtgtactcagtggttggtaagtggctaggcttcaaaaatcccgctacaactgcccggttagcaatccgagggctcacacattttccggaaggccatggatttgggaaaaggttcttccagttttatggagacggcgttcgttccggttttatcccatgtgaccacaacactgtctactggttcctaacccacacctccactgatatagatgaggagacaaattcggaaatcctcaaagagtttgtgctgaacaagatcaaagacttgcctgaaaacattaagaatgtggtggagaccactgatcttgatagcatggtgatgtctcaactgaagtaccgacctccatgggaactgctatggtcaaacatcacaaaagacaacgtgtgcgttgcaggagatgcacttcacccaatgactcctgatatcggacaaggaggttgctcagccatggaggatggagttatccttgctcgttgtctaggtgaagcgataaaggcaaagagtctgaaaggtgaaacagaagaaaatgaagaagagggttataagaggattgaagaaggtttgaagaagtatgcaggagaaaggaaatggagaagcattgatcttataacaacggcatatacagtaggattcatacagcagagcagagggaagtggatgaacatgttcagagacaggttcctgtcgtcttacctttctaggatgctgctgaaaaagtcccatttcgattgcggaagccttgtcccatgatgattctcaaacataagtcaaaagcttgtgattcttcttgtcatcaccaactgcagaacagttttcacctttggtttgcttcaaagactatctatctgtttagtgttatttcatataacaaactcagaattaataaagtaagtttgtgtagtgcccaaaaaaaaaaaaaaaaaaaaagnnnnnnnnnnnnnnnnnnnnnnnnnnnnnnnnnnnnnnnnnnnnnnnnnnnnnnnnnnnnnnnnnnnngcc

SEQ ID NO: 98239 - DNA, 415 bp, Arabidopsis thaliana columbia
aaaccaacagaacacaacaatacaacatctcagaaaaaaaaaaaccactcctcgatgtctgatcaacagcttgaaacacagatcaacttctggggagagacttcagaagacgattacttgaatctcaaaggcatcattcggctccaaatctttcttcacttcccctcgaggtctcaaccgcttcactcgttcagggcttccctcttcctcttctccgccacgtggtctcatcttcatggtccatggctacggcaatgacgtcagctggactttccagtccactcccagttttcttgctcagatgggtttcgcttgctttgctctcgacatcgaaggtcatggccgatctgacggtgtccgcgcctatgttccctccgtagatctagtcgtcgatgacatcatctctttctttaat

SEQ ID NO: 98240 - DNA, 344 bp, Arabidopsis thaliana columbia
cgagagacgacagaaggggaacaccacaaacacaaacaaacatatagaaaaagagagaggaggataataatatggcgagcaagaaagcagctatggttatgatggcgatgatcgtgataatggctatgttggtcgatacatcagtagcgatagatctctgcggcatgagccaggatgagttgaatgagtgcaaaccagcggttagcaaggagaatccgacgagcccatcacagccttgctgcaccgctctgcaacacgctgattttgcatgtctttgtggttacaagaactctccatggctcggttctttcggtgttgatcctgaactcgcttctgctctcccc

SEQ ID NO: 98241 - DNA, 462 bp, Arabidopsis thaliana columbia
ccttattttgtgttcggattaaatctcgatcgcgatttgggccaatatctcctagcatcgagagatttctattctggctaaattttgtgttttctcaggtggataagaaattttctctttgtcgttttcctcgataattttcggattacggcgacgaatcacattgttttttggtttcaaattttctgatatttccaaaaaaacaaaaaaatctgatttttgagaaaaaagcactgcaacggatcgtggacaacgctctcgctgtaaccaaagaatcagtaaaaactgttacatatgagtctttgaataacattgcgaggtgcataaatggagtatcagctcttctgttgacccttctcccagggaaggctaatattcttgaaggcttacatggctgggaactcaggcctacgtttcgtggaccacgtttaccacggtggatgcataatggggcctcttctt

SEQ ID NO: 98242 - DNA, 675 bp, Arabidopsis thaliana columbia
  unsure (1)..(675): unsure at all n locations
atgatacctccagcgtccatacngactcactatagggaaagctggtacgcctgcaggtaccggtccggaattcccgggtcgacccacgcgtccgcggacgcgtgggatcgagagatttctattctggctaaattttgtgttttctcaggtggataagaaattttctctttgtcgttttcctcgataattttcggattacggcgacgaatcagattgttttttggtttcaaattttctgatatttccaaaaaaacaaaaaaatctgatttttgagaaaaaagcaatgcaacggatcgtggacaacgctctcgctgtaaccaaagatgcagatcagtaaaaactgttacatatgagtctttgaataacattgcgaggtgcataaatggagtatcagctcttctgttgacccttctcccagggaaggctaatattcttgaaggcttacatggctgggaactcaggcctacgtttcggggaccacgtttaccacggtggatgcataatggggtctcttctttcaatgagttcattcatgagctttctgttgattctgatacttcaagcttggagtattcttctggagaagatagtgatggtcctttgcctccatcaccatcatctcaaagctcacgcctctcttgggctagcacttctgcaagttctgaaaaccactgg

SEQ ID NO: 98243 - DNA, 556 bp, Arabidopsis thaliana columbia
atacgactcactttagggaaagctcgtacgcctgcaggtaccggtccggaattcccgggtcgacccacgcgtccttacggctgcgagaagagacagaagggtacggctgcgagaagacgacagaaggggaagaagtagcagaacaatggcgacttctcagcaatttttaaaccctacactcttcaaatccttagcttcctcaaacaaaaactcatgtactctctgcccatctcctttcttgcaactcaagtccgcctccacaattttcaattacaaaccacttacttcctcctccgccacgatcatcacacgcgtcgctgcatcatcctccgattcaggcgagtcaataaccagagagactttccacggcctctgcttcgtcttgaaagacaacatcgacaccgatcaaataatccccgccgagtacggcactctcatcccttcgattccagaagatcgcgagaaactcggctctttcgcgcttaacggcttaccaaaattctacaacgaacgtttcgttgttccaggagagatgaaatcaaagtactcagtcatc

SEQ ID NO: 98244 - DNA, 647 bp, Arabidopsis thaliana columbia
  unsure (1)..(647): unsure at all n locations
aactggggtcaaaccccccttttcccggtgggccccgaaanccctttttancaaaagggnttcccnatcccctncctgggaaaggggcccccggntaccctttgnccggaaaccaaccgggcccttaatcttaccgggaattactggcacccccccgtcaagggggtcccttaggaaaagttaccggctttggaaactgcttcccccatgggacttgctcctcagatgaagggaggaaggtcccagatgcatccttcatcaatccctctagatgatatcgcacgagttgattttggagcggtcgaggttgtccagtgcctaattgaacaccacaatgcgattttcactgatgcagccgagactgtatggaggtgaaaccaccacagttaaccaatattgatctggttacaagaacatatgcattttgatctggatgatgattgactagtggtttcagtaaataagatgttgtttcatatttggttcttctgtaacaatttttagactttagaactctgatgattaaaagataagtttttcttataagaaaatcaagnnnnnnnnnnnnnnnnnnnnnnnnnnnnnnnnnnnnnnnnnnnnnnnnnnnnnnnnnnnnnnnnnnnnnnnnnnnnnnnnnnnnnnnnnnn

SEQ ID NO: 98245 - DNA, 540 bp, Arabidopsis thaliana columbia
ccctagctatggaaatggctccagtgatcatgtggcgagaagacaacaggcctgaatcttatcgggaatactggagacgcccgtcaaggagtcctaagaaaagtaacgactttgaaactgctactccatgggacttgctctcaggtaaacacaaaaacacttggctcctatactctttgaagcacagtttcattacgatcattcttctctttcatggttaatggttataaacagatgaaggagaaggtccagatgcatcctcatcaatccctctagatgatatcgcacgagttgattttggagcggtcgaggttgtccagtgcctaattgaacaccacaatgcgattttcactgatgcagccgagactgtatggaggtgaaaccaccacagttaaccaatattgatctggttacaagaacatatgcattttgatctggatgatgattgactagtggtttcagtaaataagatctcgagccgaattccgagcttacgtacgcgtgcaggcgacgtcataactcttctatagttgtacctaa

SEQ ID NO: 98246 - DNA, 434 bp, Arabidopsis thaliana columbia
aaccatctctttctctctttctcaaaatcttgtttattgttttaataaaacaaagaaattaaaaagatgatggttacattagtactaaagtacgtcctcgtgatagtcatgaccttgatattaagagtcctatacgactccatttgttgctacttcctcacaccaagacgaatcaagaagtttatggaacgtcaaggcatcacggggcctaaaccccgtctcctcaccggaaacatcattgatatctccaaaatgctctctcactccgcttctaacgactgctcttccatccaccacaacatcgtcccacgccttcttcctcattacgtctcttggtccaaacaatatgggaagagatttataatgtggaacgggacagaaccgagactatgcctaacggagaccgagatgattaaagaattgctaacgaagca

SEQ ID NO: 98247 - DNA, 1046 bp, Arabidopsis thaliana columbia
  unsure (1)..(1046): unsure at all n locations
nnnnnnnnnnnnnnnnnnnnnnnnnnnnnnnnnnnnnnnnnnnnnnnnnnnnacgcgtcaacccacgcgccacgagaaaccctaaagtctctgtttttgagaatttttctaccgatagatccaagcgaattgatctagaggaattgatccaacatgggtaacacagataagctgatgaatcagatattcgatttgaaatttacgtcaaagtctctgcaaaggcaatcaaggaagtgtgagaaggaagagaaagcagagaaattgaaggtgaagaaggctatcgagaagggtaatatggatggtgctcggatctacgctgagaacgccattcgtaagcgtagcgagcagatgaactatctccgtctcgcttctcgccttgacgctgttgttgctcgtcttgatactcaggctaagatgaccaccatcaccaaatccatgaccaatatcgtcaaatcccttgagtcttctcttgccacagggaatctacagaagatgtcagagacaatggattcattcgagaagcagtttgtgaacatggaggtccaagctgagttcatggagaatgctatggctggttcaacttcattgtccactccagaaggcgaagtcaacagccttatgcagcaggtggcagatgactatggtttggaagtctctgtggggcttcctcagcctgctggtcatgccattcctactaagactgaggagaaagtcgatgaggatgatttgtcgaggaggcttgcggagcttaaagccagaggataaatgcgctaaccaacattcatgcttggattacctgccactttgcatgcgatccttatcgaattgttgcttctattatccgcaaacacgggcgtatttgtgtatattgctcactttgaaatatgctttgtttataactttatataaaaaaccttcgtgtgtttttagtttttaccatttgaatgatatgctttccttttgagttgttcattaaagagaaaaaaaaaaaaaaagggcggccgctctagaggatccaagcttacgtacgcgtgcatgcgacgtca

SEQ ID NO: 98248 - DNA, 503 bp, Arabidopsis thaliana columbia
  unsure (1)..(503): unsure at all n locations
tnnnnnnnnnnnnnnnnnnnnnnnnnnnnnnnnnnnnnnnnnnnnnnnnnnnnnnnnnnnnnnnnccacgcgtccgtacggctgcgagaagacgcagaaggggaggatgctacaaaagaaaaaagagatcggagacgtgtactatagagtcgactatacttgaggacgcattttcttggaggaaatatggacaaaaggagattcttaatgccaaattcccaagaagttactttagatgcacacacaagtatacccaagggtgcaaggcaacaaagcaagtccagaaggttgagctcgaacccaagatgttcagtatcacatacataggaaaccacacgtggtacaccaacgcagaaactcccaagagcaagacttgtgaccatcatgatgagatcttcatggattccgaagatcacaagagtcctagtttatctacctaaatgaaggaagaagacactcctcatcgtcatcatggatcgtccacggagaataacttgtcattg

SEQ ID NO: 98249 - DNA, 555 bp, Arabidopsis thaliana columbia
ggcgaagggttctttgtcttcttcccccaactgagcaagattgttttccttaagagcttcatcgtcatcatccgagaattggagcagagatacgaagatttggcgaaaaatggggagcgagccaacaaaagtgatggtggcggtgaacgcttcgacgatcaaagactatcctaacccttcgattagctgcaaaagagcattcgaatggactctggagaagatcgtaaggtccaacacttccgatttcaagattctcttgctccacgtacaagtcgtcgacgaagacggttttgatgacgtggatagcatttatgcttcccctgaggatttccgagacatgagacaatctaacaaggcaaaaggtcttcaccttctcgagtttttcgttaataaatgtcatgagattggggttggttgcgaggcctggattaagacaggtgatcccaaggatgtcatatgccaagaagtgaagcgagttcgaccagattttctggtcgtgggaaatcgtggacttggccggtttcaaaaggtctttgtggggactgtgagtgcgtt

SEQ ID NO: 98250 - DNA, 242 bp, Arabidopsis thaliana columbia
aaacaacacagagggagacaacacgagattttacgattactcaccaactctacattcataacactttcaccccaaagggcctacatggtcagctctgggaatgaaactggcgcatggaccaaggccatcacaacggccttgatctcacttcgtgaacatcataccttcactttccgatgttaacactcgcatcaatcaatccgtatctagatgtacaacatcataccgtaacagctctgtca

SEQ ID NO: 98251 - DNA, 320 bp, Arabidopsis thaliana columbia
caaggattcacagagaccacagaatcgatgtgttcatgtaacatgaacttgagggcagtctcactggctgccacatttgcgctgggtcaccacaagtcaaacattgggtacgttggtgttgcagaaaagacacgtggccgacgcaatgacaaaaactgaggaccattacggggacaagcatcctaatgttgctgtgattttaactcctgtggctctgacgtatggaaatcaatcatatcatgagcactcacgttctatcctaattcacaacggcctctacagatgagcattcgagctcatcacaccacctccactggatt

SEQ ID NO: 98252 - DNA, 370 bp, Arabidopsis thaliana columbia
cacggattcacaaagaccacagaatcgaactgttcatataacatgaccttgagggcagtctcacagactgccacatttgggcagggtcaccacaagtcaaacattgggtactttggcgattacgagaaaagacacgtgtaccgatgcaatgacacgaactgaggaccattacaggaacaggcatcctcttggtgctgtgcattaaactcctgtgtctcagactgtttggaatctttgatttcatcagcactcacgtcctcgcctacacctcaacgccctctgaagatgaacattctggcccatcactccaactccactgtcttcctttcggactctcaatatgattttcatgtaataatatctttcacaa

SEQ ID NO: 98253 - DNA, 551 bp, Arabidopsis thaliana columbia
  unsure (1)..(551): unsure at all n locations
caataatctcagcttgaatcacactgacgaaggcatcttcctgcgattatggcgtcgccggcaggtgaaacagcagcggttgttgagggcggagatgggcagcagcaacgacaagctggtgggtttgggcagacaattaccggaatcataagaatcgccgtcttctgttactttgcttctaagttcttttctcccaaacaaaaacctgcggatccttccaagcctactcatctcatgtccaatctatttcagaggggcgagcccatagatatgtggttttatctttcggagcatgagaaattcaatgacttcggcaatgaaggtgcgcttatttggcatgagacaaacataccttaatgctgtgtggaaaccagagagcactaggaccttgtcaatgacggacttccttccgnnggacttagnataattgaaggctgaatgctangccttctttgctcnanctggtaacccataggcttaaggnnccnnaancagcctttaantctttggaggcnnnccnttgaaattnttccaagggaaggggtagggnt

SEQ ID NO: 98254 - DNA, 233 bp, Arabidopsis thaliana columbia
ggactgctgcagaagaacaccatggaggtaaagctgcacacgatcgacatggggggatcaacaatgaacagcacagcggcttatgatcatagcggagagagtctcttcgcacttcatctcccgattttgtacgcacagtcccaatgctcagcatgaatcgtccgcccaccgcacatccaacttcctcgaactcatccatctagaataccacgtattatcacagagctcatggg

SEQ ID NO: 98255 - DNA, 364 bp, Arabidopsis thaliana columbia
ggagtgcgacaaaggaaagcaatggaggagatgatgaacacgatggacatggagggatcaacaatgaacggcacggcggcggaagatctagcggagagactctcttctctctacaatctctattttctacgcgccgtccagttctccgctgcatcgtccgacgaaagcacatccatcctcatcgaactcctccgtcgagatcacgccgtttttctacagagatcaggatcggtgctactggtgtatgagattgcttgcatttgatgctacgaaacatgactacgaggttcattggcatttgaatcgcctgcggaacagatgtaatccgacttcagcagagattatatcgaggtctgtatctgtg

SEQ ID NO: 98256 - DNA, 362 bp, Arabidopsis thaliana columbia
gggacaccccaaatcgaatctgcttctaaccagctccaacctctcaccacgctagacgaacattacattccccaaagttctagataatgtgcgttactttcactgctaacgatcacgttggcttatgttcagctcagttgtatcgtgaaaaacatcgtttgcatgaggctgctagtatccaatgttccgaccatgcttagcattaatgccgttgtctccaatgatgaatatatttgtgcagtaatcagtacgctttatgattatgaagtgggacacaggacatctaggtctcacactcatcatcaatctcgagcctatgcataatcaacaatatatcagtcatacacataaccttacaggtg

SEQ ID NO: 98257 - DNA, 309 bp, Arabidopsis thaliana columbia
gtgacacccgaagtcgcatctgcgactaaacagcttcaacttatcaccacgcaagacgaacattccattcccacagagttcagataaagtgcgtgaaattacacggtaaacttcacgttgccttgggttcagcatcagttttatcgtgtgaagcatcgtttgcctgaggcagatattacccaatatcacgcccatgctcatgcattattctgttgtctacaatgatgagaatattgttgcagtaatccgtacgctggataagggtgatgtgggatacaggaattctaggtctcacacggttcatcattc

SEQ ID NO: 98258 - DNA, 328 bp, Arabidopsis thaliana columbia
aacaggcgtcagtacagcagagaagggtacagatgcaaaaagactcaatcagggcacagcagcaaggaattaaacatgatgcgtagaacacatgtcaacatcaatatttgcatcagcttatggtagccgtaatcggatgcatcactgaccgttagcatccgtcactcgcaaacccgcaggctacactgcaggtcatcaatgtcggtctactcggcaccatagtttcacacaacgagctcgtcatctccttcagcactgaccacactcgtatcaaaattatcaacaccgacatcacctccgcaatgcactccaacatgaacttgacgga

SEQ ID NO: 98259 - DNA, 302 bp, Arabidopsis thaliana columbia
tacagctgcgaaaagactacatcagggtacggctgcgaggaatacgacataatgcggagaacacatgtcaacaacaatattttgatcatcttgtgatagacataacggcatgctatcactgatgctatcatccgtgacactcaaaccacctggtttcacggtggtcaacactgcggctacaggactaccgtcgctcacaagagctcgtccctccttcaacactgtccccagtcgcatcaaaattatcaacaccgacaaccccttcccaaattaacgccaacatgaacttgacggacggcgtc

SEQ ID NO: 98260 - DNA, 1018 bp, Arabidopsis thaliana columbia
  unsure (1)..(1018): unsure at all n locations
aatacgactcattanagggaagacggtacgcctgcaggtaccggtccggaattccgtacgaccagcgtaagctggctgcgagaagagacagaagggggaggacctactgctgaatcacgtggatccttaaatctgaatatccaatactggacaagtcgaggttgggcatttgttgatgtcaattatggtggaagcacaggttatggtcgagagtatcgagagcggttgttaaggcagtggggaatagtcgacgttgatgactgttgtggctgtgctaaatacttggtatcttctggcaaggcagatgttaagcagctctgtatatctggcggttctgcaggaggttacacaactcttgcatcattggcgttcagggatgttttcaaagctggagcgtccttatacggagtggctgatttaaaaatgttgaaagaagaaggtcataaatttgaatcccgttatatcgacaatcttgttggagatgaaaaagatttctatgagagatcaccaatcaatttcgtcgataagttctcttgtcccatcatccttttccaaggactagaagacaaggttgtaactccagatcaatcacgtaaaatctatgaagcattaaagaaaaaaggtctgcctgttgctcttgtcgagtacgaaggagaacaacacggttttcgcaaggcggaaaacatcaaatacacacttgagcaacagatggtgttctttgcccgagtggttggagggttcaaagttgctgatgacatcactcctttgaaaattgacaacttcgacacttagaaaacgatgcttaaatagatatgtttggaaaagatttgctttttttttattatttagagaaaatacatgcttggactaacgttttcggataatttgttcatcaaaagtccaaaaccttctatattcactagaaaaaaaaaaaaaaaaaaaaagggcgccgactctagaggatccaaggttacgtacgcgtgcatgcgacgtcatagatcttctataggtcgtctaa

SEQ ID NO: 98261 - DNA, 537 bp, Arabidopsis thaliana columbia
  unsure (1)..(537): unsure at all n locations
gggggngtttttaaatttttacaaatttggatttgttcaaccttcaggcagggctcaaaactcggaaaacaaaagggagagagaaagtctcaaaccaaactcacaccaataaaaattgattacgcataattaaaaaaacaagataatatacaaaaatagaaaagatacacaaatttcgagatgaaacgatttaagtcgacgggtatgacgtcagcccagaagtctcagtcgtcgccgcttcttcatccaagaaaagatcctccgtcttcctaaccaccgaatggatcaaaaccaacacagctccggtcgcaagcgctccaacaatattaaacgtcgcgttggtcaacaggagtaaaacgacggttaacaccgataaaacaatcaagaccgtccgatcatcgatctgaaaccggaacagcttgataggctcatcacggagaaaatacagaaagatccaaacaacgaccaagacggtgaagacgatgagcgatgtcggatgccagatcaagctgaagaagataacgatcaagacaacga

SEQ ID NO: 98262 - DNA, 959 bp, Arabidopsis thaliana columbia
  unsure (1)..(959): unsure at all n locations
nnnnnnnnnnnnnnnnnnnnnnnnnnnnnnnnnnnnnnnnnnnnnnnnnnnnnnnnnnnnnnnnnnnnnccacgcgtccgtacggtgcgagaagacgacagaagggggatttaagtcgacgggtatgacgtcagcccagaagtctcagtcgtcgccgcttcttcaaacgagaaaagatcctccgtcttcctaaccaccgaatggatcaaaaccaacacagctccggtcacaagcgctccaacaatattaaacgtcgcgttggtcaacaggagtaaaacgacggttaacaccgataaaacaatcaagaccgtccgatcatcgatctgaaaccggaacagcttgataggctcatcacggagaaaatacagaaagatccaaacaacgaccaagacggtgaagacgatgagcgatgtcggatgccagatcaagctgaagaagataacgatcaagacaacgattgcgtagttcatacggaagtaagcaagattggtcttgattcttgtgaacgcatcggagacaccgtgaggcagtcccatggagtggaaatcgaacatcactctccaagcacggcgcgtggctagcccggctttgatacggtgtttagcgcgtgagagagactcgacatccaccaacggagatgcatgagacgacgtcggaatcgcaccgtagttcgtcattagtaatatcgggttatggtttagcgcgtgtgagattgaatagagaaagtaaatgaaaagactgtttgttatgtgtatatatgaattctgaaaggtcccaagaattaggtgatacacatttgcatatggcgttttctaaactaatctatgtttatgaaataaaacaaaatttaatttaaaaaaaaaaaaaaaaaaaaaaaacnnnagcggccgctctagaggatccaagcttacgtacgcgtgcatgcgacgtcatagatcttcntatagtgcgtcctaaat

SEQ ID NO: 98263 - DNA, 379 bp, Arabidopsis thaliana columbia
ccggtacgacaacacaacggtacgggagcgaaaagtcaactgttaggttgtgctcccatccaactccactctcgcattgatcccatacttccatcttcgggtacatcatgtacatatgacgacataatggaaattatgtcccttttaggtttaacatcattcatgcatttccattcatcttaaaaattatcctacataaaatttcgagtagggttagcatcgaggggagaaacgtggaccaacatgatacaccctccaaagtattcaccatattgaaacattgacatgtatccctttttcttttctgtgtatacttaattttactgtaggtcacatcatttaatacttgtatacaggcaactaccttacattgaccaat

SEQ ID NO: 98264 - DNA, 393 bp, Arabidopsis thaliana columbia
caaaaccccaaactctctctacgaaggcggatgcacgcttctctgtctccctccactctcgagtctcgtcccctctgtgtgtgattatcttctttggtgttgttgatgctggagatctcttattcagattgatcacgcctgaaaggtttattaggatttggcaaaaggatggatagaatcaacggtctatcagatctcttctgatttgaattctagggcgtttgtttggaagaatcattgcttctttggttgaggatctttgtgaaacgctgggattttgtgttctagacttctagggtttttgaagcaagctgtagcataaggaaaattttgagaatgaaaggtgaaagagaagttaagaatggtgtttctgaggaagagagagaagtgaag

SEQ ID NO: 98265 - DNA, 264 bp, Arabidopsis thaliana columbia
cgagatgcggggaaagagagacagggataatggcgttcagtgcgtgtttcctacactagaccgcattggcttcatcagccggacgatcatcaccttcctcctcatcccagcgtcacatgtcgctctccagacctgttcagatcatctgtaaggctcaagatctctcatgaagactataactccgcctgtctcacgccgtcatgctctcactctcctcgtcggcgccgctgctgttggttccaaagtgtctcctgctgatgccgg

SEQ ID NO: 98266 - DNA, 364 bp, Arabidopsis thaliana columbia
gactccagctctgctcaaagaattgggtatagcagaaggttacactccggcaaagttcaaagagatgccttactgggtaaacaagctgtcgatgggattacattgcgttgatgctttcattcgataaactcagcagcggtcgtagcattctgagagttggctctgtcagactctcaatgattcatccaacatcatcaaccacacgagcacctaaacagtcactctcaatacgtcttagtctccctctgcagaaatctatgaagcgagctcactttatactcgagatcaacctctacttaccatgtcactcctccatgtaaaaataatgtgttcgcttgctcaaccttctacaattcacaattcc

SEQ ID NO: 98267 - DNA, 362 bp, Arabidopsis thaliana columbia
gactccacttctgctcaaagaattgggtatcgcagacgattagactcaggcaaagatccaagaggtgccatactaggtacaccaactggcgatgggattccattccgttggtgctttcatcgataaactcagcagcggtcgtggcatactgagatttggatctgtcacactctcaagacctcgtccacatcatcaactcacagctcctaaacgacacctacatacgccttgtctccctcgcagaattctgtgaaaccggtcactatatacccgaactccaccttcaccacgatgtcactgctccagttaaaatcaatgttttcgctaactaaaccttcaacgattcacaactcctactgcat

SEQ ID NO: 98268 - DNA, 812 bp, Arabidopsis thaliana columbia
  unsure (1)..(812): unsure at all n locations
nnnnnnnnnnnnnnnnnnnnnnnnnnnnnnnnnnnnnnnnnnnnnnnnnnnnnnnnnnnnnnnnnnnnnnnnnnnnnnnnnnnccacgcgtccggttcttttaagagaaccaaccaggacaactatggcatgaagttgagttgggaagagcagtttctgtcagaaattctagatcaaaaggacctaaagataagccaattaggtgtggtgaaacagaggctaaagcataagaaagtacttatcgttcttgatgatgtggataatctagagctattaaagactttagtgggacaaaccgggtggtttggacctggaagcagaattatcgtgaccactcaagataggatccttctcaagtctcacaagattgatcatatttatgaggtggggtacccatcgagaaaattggctcttcggattttatgtcgatctgctttcgacagaaactccccacctgatggtttcatgcagcttgcaaatgaagttacagagcttgttggtaatcttcctttggctctcaatatcatgggttcgtctttgaaagggagggacaaggaagagtggatagagatgatgcctagtctccgaaatagtttggtggatggagaaattctgaaacattaagagtcagctatgatcgattacatgggaattatcaagaaatattcctttatattggcgggttactaaattgctgtggagtcgatacattataagcatgnctnggagatatgctatcattgggttgaaaatactggctgagaagtccctcatacatatatcaccactggacaaaactggagagatgcaca

SEQ ID NO: 98269 - DNA, 397 bp, Arabidopsis thaliana columbia
catttttctctctctacctaaccaatcctaagctcatctctctatctccaatggagtccgccgcactatcccgaatcggtctcgccggactcgccgtgatgggccaaaacctcgccttaaacatcgccgagaaaggtttcccaatctcagtctacaatcgaaccacttccaaagtcgacgaaaccctagatcgagccgccgtcgaaggaaacctcccagtctccggccaatactctccccgcgatttcgtcctctcgatccaacggcctagatctctcatcatcctcgtcaaagctggagctcccgttgaccaaacaatcgacgccttctccgaatacatggagccaggagattgcatcatcgacggtggaaacgaatggtatcagaacacagagcg

SEQ ID NO: 98270 - DNA, 493 bp, Arabidopsis thaliana columbia
  unsure (1)..(493): unsure at all n locations
accaagcgtccgcgccactctctctcccccatcaccaccaacctccgtcaaaaccctaaaccactatctctctctctctcttcatatcgcaacaatggagtccgtcgctctatctcgcataggtctcgccggtctcgcagtcatgggacaaaacctcgccttaaacatcgccgataaaggattcccaatctccgtctacaatcgaaccacttccaaagtcgacgaaaccttagatcgtgcctccaacgaaggaaaactcccagtcgctggtcaatactcgcctcgcgatttcgttctctcgatccaacggcctagatccgttatcatccttgtcaaagccggtgctcccgttgaccaaaccatctctgctctctctgaatacatggagcctggtgattgtatcatcgacggtggaaatgagtggtatcagaacacagagcgacgaatcgttgaagctgagaagaaaggatngctttatttaggtatgggagtc

SEQ ID NO: 98271 - DNA, 705 bp, Arabidopsis thaliana columbia
gggggggggggggggataggggagctccttggaattaaaagaaacctttttttttcttaactttgtccgtcgccgcctgaaaacggggtagctctctcacttcagctttccaattaaagggaacaaagctttgatttttgccgcagtcagaagcattactttgcaagaacaagtgtgtaaacaaagatgaggagctcccaaaacggcggcgcaatgggtggacgagctgccggaaccggcggaggaggaccgtcggctccagttgacaaagaagttgactacgctcagtacttctgtacttactccttcctataccaccagaaggatatgctctccgaccgtgtccgtatggatgcttacttcaacgccgtcttccagaacaaacatcactttgagggcaagactgttttagacgtgggcaccgggagtggaattcttgcaatttggtcagctcaagctggtgccaggaaggtttatgccgttgaagctactaagatggctgatcatgctcgtgcccttgtcaaagccaataaccttgaccatattgtagaagtcattgaaggatctgtcgaggatatttcattgcctgagaaagttgatgtaattatctcggagtggatgggatacttccttctgcgggagtccatgtttgattctgtgattagtgcgagaaagttgatgtaattatctcggagtggatgggat

SEQ ID NO: 98272 - DNA, 451 bp, Arabidopsis thaliana columbia
ctgtgaggttgaggaagcagagtgaagagaaagatagagagataagaagaagccatgggttcgatttcgatgcacataactccctctactgctctccctatacgccatttcagagctagagtctcttgttgctcttctgggcatgtatcatttatcaaagatgttgctgccactgaacctccaatgcatcttcatcacttactcaaagtgcttcaaacaagaggtgagacaatcatatctcctggagctaagcagggactgatccctcttgctattccgctttcgaagaattcgtcaggctctgttactgcgcttttgagatggcctactgctccaccaggaatggatatgccggttgtggaagtttggaggagtggagtcaggcttatagctagaaatgtagatgaatacattcaccggattctagttgaagaagatgcacaagagttga

SEQ ID NO: 98273 - DNA, 1130 bp, Arabidopsis thaliana columbia
  unsure (1)..(1130): unsure at all n locations
ccnnnnnnnnnnnnnnnnnnnnnnnnnnnnnnnnnnnnnnnnnnnnnnnnnnnnnnnnnnnnnnnnnnnnnnccacgcgtccgtacggctgcgagaagacacagaagggagcgagactcatttgttgaagctctcaaatccgccttcttatcgatgtttcttctatatacattcggttgcctagaatctctctcatttgcccacttatctgcgccgccgacctacagaatctcggagaaaccttaccggcggggcgggaaccatgcgtcttcactcagcaattactcttcgaaatctgttcaccagaaagtctctccgaatcccacagaatctaagcattaccgcttccccgttattgattggagatgtctccggtcaaatcaaaccttcatcaacgtctcactattcgaaatctagtctctcagaagcgtcatcatcatcatctagctcactaattttccagatcccaaacaacgcttcattcttcctggaaaatcagaggagatacagcaccggctccagcagcggttcaccgccagatgtaaaccaaggttagtggccgggatttaatctcaagttcgctgaagctcgtgaagagatcgaaatggctatggatgcgaaggagacggtttacttcaacgaagaagcggagtgcgcgagagacgccgtggcagaggttttggagatgtttcaaggtttgctcgggaaagtaacagagaaggagaaagcttctctgcgacgatccatgggactcaagatcgaacagctaaaagctgagcttgaacagctgaacgaatgatcgattgctgattttgattccgtggagaaacgaagaggttagcagaaattttcctcttcttcaccgagccattgttgttagctgattatcatctgtgtgtgccttaataaatctactccatttaggtcaaattcagagcatttgcaatgcttgtgagttgtgactgtactcttttgattacaggaaaagaaaacttgaaacagtttattataagtttctattgcagtgagcttcgttgagtgtgttgatctttgaaaaaaaaaaaaaaagggcggccgctctagaggatccaagcttacgtacgcgtgcatgcgacgtcatagatggtcta

SEQ ID NO: 98274 - DNA, 364 bp, Arabidopsis thaliana columbia
tggaggcgttcttgatcatactctcagtcacccagcttatttacatcgcagcagttcatggcgtgaggagaccttaaggaatcattcatgggcgtcggatttcttttcttcctagtgtggcaatcatccgaaactcgggattgtgtgtgtgagcgtttgtatttgtgtgagtgtgctttattttcttcataggaagcttaagataaattcatgcattctttatgtacaaaaggattagatcttgttttgtgtgttgtcactttgtgttcatggaataaaatcgaactttgaggcaaaaaatcaaaagatacaatcctatttacaccaacaacaagtagaaaaaagctggcgctctaaaggatcc

SEQ ID NO: 98275 - DNA, 778 bp, Arabidopsis thaliana columbia
  unsure (1)..(778): unsure at all n locations
agggaaggttggtccccttgcaggtcccggtccgaatttcccggttcaacccaggggtccggagaacaacaaaggggagaccgtaattcacgataactatgagctcaaggccagagaggcttctgcacttaagaagatcgaagagttatctaagttgctagaagaagcttcttccacacatgagaaaggggaagagattactaataccaatccttttgataacagtaccggagaacaaaaagtacaagaaagtcctttggaagctattgatagacatttgaaagatgacacaacaattcattggtcagctcacaacgttcaagtaataggaaaaggagagaaaggtaaagataaagacaccgtggaaagcgaagtgtatcatttagaaaagagagaagcttcttcagagagagacacagagcatgactttgctgaagaagaagtcgactccaaagcagaaggtagtgagaactttgatcagttaagtaatggtttgtctttagcagaacaaacagaagatgtggtctcaaaggcccagcaccagacaaagaagaagcctttgcttcggaagtttgcaaatttactgaaaaagaagagcagtagccagaaatagaggtagatgtgatgttttactacaatctctgtcgcaactgaccattccaaattcaatgaaaggtctttgatctcaaaaaaaaaaaaaaaaaaaaaacaaagggcggccgctctagaggatccaagcttacgtacgcgtgcatgtgacgtcatnnnnnnnnnnnnn

SEQ ID NO: 98276 - DNA, 394 bp, Arabidopsis thaliana columbia
ggtgtatacaagaagatatgcaaacgagaccctcgatgagcaaagttgttcaaatgcttgaaggtgtttttccggtggtccagccacctagttcttccactatgggatcgagactttactcaagcttctttaagtccatcagcgaggacggcggtgctactacgtcatctggaccgtccgattgtaacagtgagaattatctctccgccgtgagactctccggtccgagatagcaatctttttagccaatttttagtatcttatataataggtttttggctcaccatgttttgttgtatattgtttttgtgttacatcttaaaagaatagccatcactcagttttgtaacgttccgagatcaattatttcatagattacccgtctgtttttctt

SEQ ID NO: 98277 - DNA, 375 bp, Arabidopsis thaliana columbia
ttgatcttgacaaaaatgtatttactcataacttagttagttatttcatttgatcttaatttgtcagaagctaaactatttttcttccaaattttcaggggaagatatctccggatgatatcaaacgcatggcaaaggacttgggtgagaatttcactgatgctgagatacgagagatggttgaagaagcagaccgagaccgtaagtgtcctaaaccttttttctcattctcttgtggcacaatgcttggtttgactaaagatatatgatacattactgaaaactgcaggtgatggtgtagtgaccaacggatgacttcatgaggctgaccgggagaactgcttatggtggtaactagaaaggttgttgctgttc

SEQ ID NO: 98278 - DNA, 739 bp, Arabidopsis thaliana columbia
cccacgcgtccgagaaacgttagatttctttatacgcgcaaactgaaagagctttgatcgatcgatttggaggattcgtagaagatatgtcgagtatatacagaactgtttcgagaaaagagaaaccgagacgtcatcatggattgacgacacagaagaagcaagagattaaggaagcttttgagctatttgacactgatggttctggtaccattgatgctaaagagcttaatgttgctatgagggcgcttggttttgaaatgacggaagagcaaatcaacaaaatgatagctgatgtggataaagatggaagtggagctatagattttgatgagtttgttcatatgatgactgctaagattggtgaaagagacacaaaagaagagctcactaaagcattccagatcattgatcttgacaaaaatgggaagatatctccggatgatatcaaacgcatggcaaaggacttgggtgagaatttcactgatgctgagatacgagagatggttgaagaagcagaccgagaccgtgatggtgaagttaacatggatgaattcatgaggatgatgaggagaactgcttatggtggtaactagaaaggttgttgctgttcttaacgatatttgatgagctctattatagttctttaactgaggcttaattatctgtaatattattactgaagatacatatatcacagttttaatctatagctcagcttaatggcaaaaaaaaaaaa

SEQ ID NO: 98279 - DNA, 336 bp, Arabidopsis thaliana columbia
tggcaacacgacaacgagatacgggtgcggctgcaagacaacgagatacgggtacggctgcaagacaacaagataagggtacggcaagacggcattgcgtttacgatgagagaacgagacagaaagattcagttgcaaaaaatcgccagcatgattcggtgtcgatcagtcaacctgatggcacagctgagtgcatacttcagaaaggtacttctagcaacatgacgatattccggataccgatggccgacttcgtcacttcagtctcggtccaaggatatcacagccaggtacagctccaacaacacgaacaaaagctaccgctactctcatacc

SEQ ID NO: 98280 - DNA, 755 bp, Arabidopsis thaliana columbia
  unsure (1)..(755): unsure at all n locations
nnnnnnnnnnnnnnnnnnnnnnnnnnnnnnnnnnnnnnnnnnnnnnnnnnnnnnnnnnnnnnnnnnnnnnccacgcgtccgtacggctgcgagaagacgacagaagggatggttctttttaaaatcaaggaatctagtttttggaatatttttaacaatttttattgacaatttaaattctaatctatttgaaaactcacaaccattctgaaattaagagcaagacggctattttagatcatcaaacaatcaaatctgttctccgtgttgattggaggcgtacgacagacgctcctcttctctgtcgttactctggctttgttctcttgcataggtggttttgaccgttgagaagatgaagaagatttgttgggcttctcagttaagttgacattgggcttgttaggtgagtggcccaatatcccttttcctttgtttactgcagcgacgtcgttctgactcgttgacccttcatctgcatttgagtttttctccgatcttgtgtcagattctggagctgatgacggagccgtggagctcttgctaatacattcatggctaggcacagtttactgagtccgccttatgacagtcctctttcattgtacatattctctttttgatgataaataaatttaacattttgttgtgttcnaaaaaaaaaaaaaaagaaaaaaacnaaagcggacgctctagaggatccaagcttacgtacgcgtgcaggcgacgtcataatcttctatagtgcgtcctaa

SEQ ID NO: 98281 - DNA, 521 bp, Arabidopsis thaliana columbia
  unsure (1)..(521): unsure at all n locations
atgattttcgccggcannnnnnnnnnnnnnnnnnnnnnnnnnnnnnnnnnnnnnnnnnnnnnnnnnnnnnnnnnnnnnnnnnnccacgcgtccgcccacgcgtccgctcttctcattagatcctctctctctctctctcaaaaagagaaaatctcagagccagaagaagacaaatatatcttttctattcctcagatctctgaaatcgaagtttctcgaactgttttgttttgttttttttccgatgaggtgtaagagacacacagtagatttcagtagcagtatcggcgtttgtgcttcttgtctccgtgaacgactctttactctcgccgtttcaaccgccgcgtctgaaaacgacgataacgatcatcgtcattctcgtatttctccacctcctctgctttttcctcgttctgtttctccttacgttgctcctagaaaatccgacgccggaaccggaaccggagctggaggaagagactccgtagcttcttctaataaccgattcttcgcaacgccgc

SEQ ID NO: 98282 - DNA, 481 bp, Arabidopsis thaliana columbia
  unsure (1)..(481): unsure at all n locations
ttgttcatgaccttgttatgtatgttatgagcaggcagtagcatacttgtgtgtggcgggggttgcaaccgcggcgcagtctgcggcctttgcaaagttgggtgagccagagcttcaatggatgaagatttgtaatatgtatgggaagttctgtaaccaagtgggtgaaggaattgcgagcgctttgtttgcttgcattggaatggttttgatctcttgcatttcggctttcggtgtctttcgtttgtacggcggaagcaaatctaggccaagctcacggtggtgaaggcctgtagtggtcttggaccaaccttgtttgtggaacctctattaaatgttgtggtgtgtgtcctcttatctctcagtgtgtatcccgctattacttactgtcatgatctcagctgatctataaacataatcatggcaattatggttgtttgatgaggataaaaattagttttttnnnnnnnnnnnnnnnnnn

SEQ ID NO: 98283 - DNA, 514 bp, Arabidopsis thaliana columbia
  unsure (1)..(514): unsure at all n locations
nnnnnnnnnnnnnnnnnnnnnnnnnnnnnnnnnnnnnnnnnnnnnnnnnnnnnnnnnnnnnnnnnnnccacgcgtccgtacggctgcgagaagacgacagaagggggataataccatgaaattagggtttacgaagcttttaatcgtctctccttcccaatttcttccagaatggccgacgaagaagattctctctctcaattcgatatatccaaagaggaaacggattagttagtttcagaggtgattagattcatactgttcaagtttcaccaaagctcaggaactccaattaaaagagaagatttgactcagattgttactaagaactatcgtcaacgaaatctcgctacacacgtgattaacgaagcgaagaagaagctctctaatgtctttgggtatgatttgaaagaacttcaacgtgctcgttcttcttctactggtcaatctaggcttcctcagtcacagagttctgttgactcgaaatcgtatgtgcttgttagtgaattgccgt

SEQ ID NO: 98284 - DNA, 545 bp, Arabidopsis thaliana columbia
  unsure (1)..(545): unsure at all n locations
nnnnnnnnnnnnnnnnnnnnnnnnnnnnnnnnnnnnnnnnnnnnnnnnnnnnnnnnnnnnnnnnnnccacgcgtacgcccacgcgtncgcccacgcgtncgcccacgcgttcgcccacgcgtncgtacggctgcgagaagacgacagaaggggagctagaacatgattacgccgatttttacaaaagttgtgtacaaaagagagcgtggcatatccgtccgctatcggtttacaacaggggatttgaggagaaggctgagagaggaaagaaagcgaacattgatgaggctgaatgcctcaaatggcttgactccaagaaaccaaattcagtcatttatgtttcctttgggagcgtggctttcttcaagaatgaacagttattcgagatcgctgcagggttagaagcttccggtacaagtttcatttgggttgttaggaaaaccaaagatgatagagaagaatggttaccagaagggttcgaagagagggtgaaagggaaaggtatgataataagaggatgggcacacaggtgctgatacttgacc

SEQ ID NO: 98285 - DNA, 775 bp, Arabidopsis thaliana columbia
  unsure (1)..(775): unsure at all n locations
atacgactcactanagggaaagacggtacgcctgcaggtaccggtccggaattcccgtgtcgacccacgcgtccgtcattttccgatagaagaacttttttcacggcggcgataacaaatcaccggctaataaaggaaggaaaagaagaagaagagaagctatgacaacaatcagtcttcgcaagagtaacaccagactcccaccggaggtgaatcgcgtgctctacgttcgtaaccttccctttaacataacgagcgaagagatgtacgatatcttcggcaagtacggcgcaattcgccagattcgaatcggttgcgacaaggcgacgaaaggtactgccttcgtcgtttacgaggatatctacgatgccaagaacgccgtcgaccatctctctggcttcaacgtcgcgaatcggtacctaatcgtgttatactaccagcacgcgaagatgagcaagaagtttgaccagaagaagagtgaagatgagatcaccaagttgcaggagaagtatggagtctctaccaaagataagtaattgtccttgaattcgatcttcttatggtcgttctgttactgcaacaatttagggttttgaaattctgggagatgtgaaactttcttttatctgtatgaatttagtggagttctttatgtaaggtttgctcttttgtcatttacatcgaccaagcaatgaaaaatacatcttttaatcccaaaaaaaagaaaaaaaaaagggcggaagctctagaggatccaagcttacgtacgcgtgca

SEQ ID NO: 98286 - DNA, 575 bp, Arabidopsis thaliana columbia
atacgactcaccttagggaaagctcgtacgcctgcaggtaccggtccggaattcccgggtcgacccacgcgtccgggcttggtacgattgacttctcattcaccttcttcttcttcaagtgtgctcagaaggcaagagttcttggtacgaacgctttgtgggtcaccaatcatcagagcaatgagttccacatcagaggccgacgctgagagtgttcttagaaccgtgacgccatcgctcgatctcaaacgacacaaaggccaagctgggaagatagctgtgattggaggatgtcgtgaatacacaggagctccatacttcgctgccatttcagctttgaaaatcggtgctgatttgtctcatgtattctgcacgaaagatgcagctcctgttataaagagctatagtcctgagcttatagttcaccctgttcttgaggaatcatatagcatcagtcaactcagtgaagaagataaaagagaagttcaagataaagtgcttggagaagtcggtaaatggatggaaagatttgattgtcttgttattggtcctggtttgggaagagatccatttct

SEQ ID NO: 98287 - DNA, 284 bp, Arabidopsis thaliana columbia
ggtattttgataaactggcaagttccagggccacaaattgaggctgtgaccaatgacaacttgattatcaatgtatacaacaccttggacgagcctttccgcttatcttggaatggagtgctgcagaggagaaactcgtggcaggatggagtgtatggtaccaattgtccaattctaccagggcataacttcacttatgttcttcaagtgaaggatcagatacgtagctacttctactacccttcgcttgcgtttcacaaggcagcaggacgttatggtggatt

SEQ ID NO: 98288 - DNA, 196 bp, Arabidopsis thaliana columbia
gctccttcttgttcttcatcatcttcttcgctcactcctagtttcccacgtattcacttgtcaggagcaaaacccatttctctttcttgcagaggaacacgattgtgctccttgaaagggtctaagactctttggggtacaaaaagttttgtgcttggggctgggaacatgaccatggcagaggttgattctcatg

SEQ ID NO: 98289 - DNA, 904 bp, Arabidopsis thaliana columbia
ttaggtccactatagaagagctatgacgtcgcatgcacgcgtacgtaagctcggaattcggctcgagaccaactccttggtaaaaggaagatacaggatctggtttcgcaggtggatgtacatgcgaaactggatcctgatgttgaagacctccttttggaggtggcagatgacttcattgattcggtcacatcttttgcatgtagcttggctaagcatcgtaaatcatctgtattggagcccaaggatatattactccacctagagaaaaacttgcacttgacaattcctggattctcaagtgaggataaacgtcaaacaaaaactgtaccaactgatctccacaagaagcgacttgcaatggtgcgtgcattactagaatcctcaaaaccagagacgaatgcaagcaattccaaggaaactatgagacaagcgatggtgaacccaaatggtccgaatcatctcttaagaccctcccaaaggtcagaacaattggtttcgcagacatccggtcctcacatattacaacacatgacaccgatcctaaaggaccttgaataatagcaaccctgagccagctcctcactgcctatgttcatccttctgggttgcaggagtttacacatctatggagagttgaaggcacaagtagtgaaactgtatgtattatatataaaattcatgagtcttataggcaatcaaataatacagttatttttttcgtagttgtgggactttctaactatttcgtcttcttttttagtgggtttttgttttttccttttgtaattttagttgtcctctccattttaagcttaaaaattttgcggccgcgaattcgatatcaagcttatcgataccgtcgacctcgagggggggctccggtacacaattcgcccgtagt

SEQ ID NO: 98290 - DNA, 1834 bp, Arabidopsis thaliana columbia
  unsure (1)..(1834): unsure at all n locations
nnnnnnnnnnnnnnnnnnnnnnnnnnnnnnnnnnnnnnnnnnnnnnnnnnnnnnnnnnnnnnnnnnccacgcgtccgctctgacttaaaacatttattttatcttcttcttgttctctctttctctttctctcatcactatgaagagtttcaacacagaaggacacaaccactccacggcggaatccggcgatgcctacaccgtgtcggacccgacaaagaacgtcgatgaagatggtcgagagaagcgtaccgggacgtggcttacggcgagtgcgcatattatcacggcggtgataggctccggagtgttgtctttagcatgggctatagctcagcttggttggatcgcagggacatcgatcttactcattttctcgttcattacttacttcacctccaccatgcttgccgattgctaccgtgcgccggatcccgtcaccggaaaacggaattacacttacatggacgttgttcgatcttacctcggtggtaggaaagtgcagctctgtggagtggcacaatatgggaatctgattggggtcactgttggttacaccatcactgcttctattagtttggtagcggtagggaaatcgaactgcttccacgataaagggcacactgcggattgtactatatcgaattatccgtatatggcggtttttggcattattcaggttattcttagccagatcccaaatttccacaagctctcttttctttccattatggccgcggtcatgtcctttacttatgcaactattggaatcggtctagccatcgcaaccgtcgcaggtgggaaagtgggtaagacgagtatgacgggcacagcggttggagtagatgtaaccgcagctcaaaagatatggagatcgtttcaagcggttggggacatagcgttcgcctatgcttatgccacggttctcatcgagattcaggatacactaagatctagcccagctgagaacaaagccatgaaaagagcaagtcttgtgggagtatcaaccaccacttttttctacatcttatgtggatgcatcggctatgctgcatttggaaacaatgcccctggagatttcctcacagatttcgggtttttcgagcccttttggctcattgactttgcaaacgcttgcatcgctgtccaccttattggtgcctatcaggtgttcgcgcagccgatattccagtttgttgagaaaaaatgcaacagaaactatccagacaacaagttcatcacttctgaatattcagtaaacgtacctttccttggaaaattcaacattagcctcttcagattggtgtggaggacagcttatgtggttataaccactgttgtagctatgatattccctttcttcaacgcgatcttaggtcttatcggagcagcttccttctggcctttaacggtttatttccctgtggagatgcacattgcacaaaccaagattaagaagtactctgctagatggattgcgctgaaaacgatgtgctatgtttgcttgatcgtctcgctcttagctgcagccggatccatcgcaggacttataagtagtgtcaaaacctacaagcccttccggactatgcatgagtgagtttgagatcctcaagagagtcaaaaatatatgtagtagtttggtctttctgttaaactatctggtgtctaaatccaatgagaatgctttattgctaaaacttcatgaatctctctgtatctacatctttcaatctaatacatatgagctcttccaaaaaaaaaaaaaaaaggcgcacgctctagaggatccaagcttacgtacgcgtgcatgtgacgtcaagaatcttctaagtgt

SEQ ID NO: 98291 - DNA, 701 bp, Arabidopsis thaliana columbia
  unsure (1)..(701): unsure at all n locations
ttaggtacaactatagaagatctatgacgtcgcctgcacgcgtacgtaagctcggaattcggctcgaggaagaaagtttcaagaactcacctaaaacacaaacaaaggaactccactttttttccacaccacatcacaccatgtttagagccatgagcacaaggaaaatccatggtggctacgaaaagctcggcgatgaagaagcgagactgaagagggtctctagcgttccggctagtgtttatggtcattcaagaaacccggttcaagaagtgaagaagacaccgacagcgaaaccaaccggtggttctgttcatcctttgtttagtttctttgacgttcattttcaaagaaagaagaagaatacggcgaagaagaagagtttagcaacggcgaaaccagagtttgctaggtatatggagtatgtgagagaaggaggtgtgtgggatccgagttctaacgcaccagtgattcattacagatagattcgtcaaggaaaatgaataaaagatttgtatatcgtcttttttttccaagatatataatctatgagaaagccccccccaaagaaaaaaaaaaaaaaaaaaanaaaggnnnnnnnnnnnnnnnnnnnnnnnnnnnnnnnnnnnnnnnnnnnnnnnnnnnnnnnnnnnnnnnnnnnnnnnnnnnnnnnnnnnnnnnnnnnnnnnnnnnnatatcat

SEQ ID NO: 98292 - DNA, 446 bp, Arabidopsis thaliana columbia
  unsure (1)..(446): unsure at all n locations
cactagtgttcgtnatctttnttcgattgaagtttgggaagtggtgatggtaataggagcagcagcgcgtgtagccatcggcggttgtcgaaagctcatctcgtcacatacctccctcctcctcgtctcttctcagtgtcgccagatgagtatggacgcacaaagcgtttctgaaaagcttaggagttctggtctattacgaactcaaggtctaattggaggcaagtggcttgactcgtatgacaataagacaatcaaggttaacaatccagcaaccggtgaaattatagctgatgttgcatgtatgggaacaaaagcagacaaagtgatgctattgcttcttccttatgaaagcatttacttcttttgagcaagattaactactgnagtggggngaaaagttttacgggtgatgggnattnncctncttcttttacacaaggaaa

SEQ ID NO: 98293 - DNA, 971 bp, Arabidopsis thaliana columbia
  unsure (1)..(971): unsure at all n locations
nnnnnnnnnnnnnnnnnnnnnnnnnnnnnnnnnnnnnnnnnnnnnnnnnnnnnnnnnnnnnnnnnnccacgcgtccgctaacttcttcttcttctcctttcagaaacccagcgaccatcttcttcaccggttatggtgacttcggagggattagcaagcgttgattcttggttatatcgccaaggtttcaacgttgattcatggttgctttctgataccttctctcacgacaacgatttgctcgcaagagctctccataccaccgtcacagcccctcatactctcactccttcctctgctttcttcgattcctccgctgtttctcacccttcttccactaacacactctcctctaccgtctccggtgcttctgatccagaaatcatcggcggaggagctaaacggaaacgtaactgccttcttaccgacggtaaagccgccaagcgccgcgctcgtgcttccaagaaatctcagactactttcataacggcggatccgtccaactttcgtcagatggttcagcaagtgactggcgccaagtacatcgatgactcttcttcctttggtattttcgatccgattgtcaagccggagccgcttaggttcgttaacaaactgccttgtggtccttcggatcgatccacggcggttccaatgctcgacacatcagcatttttgtctaatcatcaccaggagaatctcgcagtgggaaatgctttctccggtaacagcagcagtgtaggattaccgtcggggaagccaagtgcaacggccgaccccggtggttctgccgtggagtttgataattacccaacatttccaacgcttgaatcgtggaaggttatgtgatctgtttctttcagtcttagacgtaatctttaactttttaggtttgttttctttgcatcccttcatgaataatcttgttcatagtttttgtttatcgatgtaatggatcaaaaaaaaaaaaa

SEQ ID NO: 98294 - DNA, 784 bp, Arabidopsis thaliana columbia
  unsure (1)..(784): unsure at all n locations
cgagcaacgaagaagaagacctaaaagatcgggacttgaaactatgatcaaatcagaagcagatctctccgatgtgatcgtgattcgtgacgtttgggcttataatctcgagtcagagtttgacctaatcagaggaatcgtcgaagattacccattcatctcaatggatacagaatttcccggcgtgatttacaaggcggatctcgacgttctccgccgtggaaaccctaattatctctacaatcttctcaaatccaacgttgacgctttaagtttgatccaagtcggtcttactctctccgacgccgacggaaacctcccagatctcggcggtcaaaaaaaccgtcgatacatctgggaattcaatttccgtgacttcgacgtggagcgtgatccacacgctcctgattcgatcgagctactccgtcgtcacgggatcgatttcgagcggaaccgtcgcgaaggtgttgaatcggagaggttcgcggantgatgatgtcatcggggttgatctgtaacgagtctgtnagctgggtgacgtttcacagcgcgtatgattttggttaccttgtgaagattctcacgngccggcancttcccggtggccgttgcggtgagtttttaaggggttncttaagaggntttctttcggtgaanaggggtttantaaatgtgaaaaannatttntnagggttttttgaggcnaaagggttttattgggggggttttnnccccggnttcccngggcccttnaaaattaaacccngggggttggggnaattct

SEQ ID NO: 98295 - DNA, 457 bp, Arabidopsis thaliana columbia
aggtgcactatagaagagctatgacgtcgcatgcacgcgtacgtaagctcggaattcggctcgaggggataaatcgcgcgacgactctttcttctctcacatgtcatactaatacctaagtcgtcgtctctggcagagaaaattcggattcgattgagagatggagaactctgtggatctagtaccggcgatggttgtatttctcgccgcagtccacgttatcgccttggtttactggatttatagattggcctctgatcgtccacctcagaggaaaaaaattcagtgaggtaactacgattcatcgattggtggattacgattccgatctgatgttgcgtttatcggcgtttttgtgattgttaagtttgatgaatttgtccttaagtaactttttggaattgaacttggtagtttcttgtgtttatgggaagtgatagattttgttacattttcc

SEQ ID NO: 98296 - DNA, 438 bp, Arabidopsis thaliana columbia
aggtgcactatagaagagctatgacgtcgcatgcacgcgtacgtaagctcggaattcggctcgaggaaagaattaagggtcgagcggacttggagaagagaagagaagatggttggcgcgaatctgaaagcggagacgatggctctaatggacaagagaacagccatggagacggagatgaactctattgtcgaacgtctctgcaatcccggtggtcctggtctctccggcaatctcatcgactcggagggatttcctcgggaagatattgacattcccatggtgagaactgagcgccgtcgtcttgctggggatttctcttttcttgggctgaattagcccatagggtagggtgagactacaactccaagagttaagggagtgagcacggggagataacggtaaagataaatgtgaacattcaaattcttcattcag

SEQ ID NO: 98297 - DNA, 504 bp, Arabidopsis thaliana columbia
  unsure (1)..(504): unsure at all n locations
nnnnnnnnnnnnnnnnnnnnnnnnnnnnnnnnnnnnnnnnnnnnnnnnnnnnnnnnnnnnnnnnnnccacgcgtccgcggacgcgtgggtctcactaccacgagctcttcatctccacttccttctccgacaacgcttccgtcgctctaaacctccacaccctcacgcgccgccctcatgtagccggtacagtggccaacgctgaagcagcggaatatgttcgctctgttttcacctcctctgctctcaaatcacacgtcgttgcttaccaagtgtctctaacttacccagttcatcgctctttggtactaacgccgacagactctgcaaagccaatcactttcttgctggaacaagaaaaactcggagacaatccttatgctaatgaagtgatgcctacttttcatggatacgctaagtcaggtaacgtttcaggtccagtggtttatgcacactatggacgagtggaagatttcgtgagactcaagaaagatatgggcgtga

SEQ ID NO: 98298 - DNA, 400 bp, Arabidopsis thaliana columbia
aaggttgagaagaaatcaacagagacacaagcaaagaatcaacgattgtaaacattaaaattccaagatgaggcgactccgttactcatcactacttggttttctgtatgtacaacagagataataatcatagctatggactatggttcaagcttcatctgaagcgttggctcagaacagttgttgttgttgttgttgctctgttgctggaggatatctccaaaacccatctgaacaatgctttgcaggtcattattttcccagaatcctggtgtctcagtgtgaacaaatccatcgtttgaggggaattgtgtgtctgagaatcttggcatgttcttgccaagtgaatagtatgctgatgggagtcgttaacgcagtctctttacgcaatggcttgctc

SEQ ID NO: 98299 - DNA, 391 bp, Arabidopsis thaliana columbia
  unsure (1)..(391): unsure at all n locations
tcgcgatctagaactagttagtcattttttttttattaagaatcccaaatgggcttatggaagatgggccaaacgacaaatacacggttacagaatgaaagaagcccaaaacaaacccagcgaaaacaagatcagaaccgtgcggtacaccggaaacacgaacatcgccttctagaaccgacgctagcaaggacgactcctatgtggctacgacctcgacatcaaacttttggcttgagctagcgaaccccgccgcaaatcaacgccaagaacaagcctaacctggaacaatcctttcggaaaagggagaaccgccacaaccgagacccaatccctcctctcccaacctagcaanacgaaggattcgaaacttacccccatctccactgat

SEQ ID NO: 98300 - DNA, 544 bp, Arabidopsis thaliana columbia
cgcatgcacgcgtacgtaagcttggatcctttagagcggccgctttcttttttttttttttttttttttttttttttaaaggaaaaaattctcatttcaaatcaagagaattgcaaagggaacaaacaattagaatttaatttggaagtttgaatgtaaagttacaagtacatatcaagattggttccttagtaaacaatgatcataacaaataactacgctcatttgccagggagccaaatactgcatcagcttcagaattttcttagctcttccaaggtcaagtttctggacttgacgcatcaagaatgggttgtgaaaacgattcctcgtagcttaggtagacacatagtcatggcttcaacgtatcacagctagtttcattaacttctgcagactcatccagtttgttaatgggctgggaaaacgattgcaggagagttttttgtgcaggtaactcggcaatgaaaagcaatgtttgagcccaaccagcatattcaccatttttactcacaaaggcttctgcaactcggccatggagttt

SEQ ID NO: 98301 - DNA, 866 bp, Arabidopsis thaliana columbia
  unsure (1)..(866): unsure at all n locations
nnnnnnnnnnnnnnnnnnnnnnnnnnnnnnnnnnnnnnnnnnnnnnnnnnnnnnnnnnnnnnnnnnnnnncttttttttttttttttttgtcaattattttttttttgtcacaagtgtcttattaatgttacaaagccaagtgaacagacccaattatacatagccaaagaaacaagcctacagtttaaaaaacaaacataacccataaaacaacaaaagcccaaagcccaaataaattcctttgccagaaggaaaagtgacgtgaacagcgcaaagagcacgtggcaagtcgaaaagagatggaagacacgtgggaagttgaagaggagagaatttccgatcaccggaaagtagaggtgacaccggaatcttcattccaagcagaaaatgtccagaatcttattcatcttcttcgcccgaagaattagaggcgaaattccaattgagtgttgatgaaattatgactccacttgatgaaaatctgaaaccttcttcatcttcttcttcaaaacttttcaatcggaaaggaaaatttatttttttagaacttgcttacatcaacccaaaaccggacaaaagccgggacataagccatccgaatctctcgaagacgaatcgatggagacgaagccagccaccgttgcggaagaagccaatcgatgctggaagtttgccggccaacggtgcataacagagccaccgatgccagaagaaaagttttgactgcttaataagccagtgaaacgccccatgaaattgcaacagaagtttttataaaaactcttgccgacgcaatcatatcgaaaacttttctttctctatgtattataaaggagagagaagagagagagaaaagttctcagtc

SEQ ID NO: 98302 - DNA, 477 bp, Arabidopsis thaliana columbia
gatgcttggatcctctagagcggttgccccaggcgggcgaaccttttttttttttcgagcacaaacccatcaaagatggtgcgacaagagtaaatgaagagatatatattctacatgggctcgcatcgttgttacatttcatcacccaaaacttgaagagaaaaaaagacagcgaataagcaacagtgatcgaatgttgggactgtcaattaaggagagcagcaacctcttttgccagctccagatgtgtcttcaacgttaatcgttgttccttgccccggaatggcagaattagcagccgctgcttcttgagcagccaaagctgtttttgctgatgatgtggtaaatctctgctaacacggattgaaatgctgtctccacattggtggcttcaagagctgatgtctccaagaaagagagaccttctgtctcagctagagtctgtccatcttcctccgcaactgatctcaagtggga

SEQ ID NO: 98303 - DNA, 563 bp, Arabidopsis thaliana columbia
  unsure (1)..(563): unsure at all n locations
taggtcnnnnnnnnnnnnnnnnnnnnnnnnnnnnnnnnnnnnnnnnnnnnnnnnnnnnnnatactattctttctttttttttttctttagaagttcaaaactttataatgcctatatgaggaagggaagaaaaatcgtgaagaatgttcatataccaattcactcatgagaaagagaagaacagtctccaaaatatattcagagaatccaagaactgttatcatctttcacctttgattcctctgaccatatctgcttcaccttctcccacaccaaatctcctccctttgaagtaaattcgacagtcgttttgcagcattggctttcatcctcgcattgctcccacttatcaaacttcactatccatttgccaggaatggtgtctgttaccagaacctgatctacccaaacccaaaacttcttccctcttttgtcaccataacacttcttcagctcatcaatggtgtctctcagagatttttctgcacctgatggatgaaaaaggacagcagcatggaggccatgaatcttttgaagctggtatggatgcncnanagnncttg

SEQ ID NO: 98304 - DNA, 449 bp, Arabidopsis thaliana columbia
ttgcctaagctagatttgattccctctcttcgatttttaattccttgctcctctgctcgtttctctaccggcgacgtaacctctctgtctctgttctgttccttgcctgctcgaggtgtgcatcttcttggaatcagctgactttgcggtcaatcggatttcttgggattgtttggagaaactttggaggtgatggacaacaaaaatgatcaggatattgatgttagatcagtggttgaagctgtttccgccgatctttcctttggtgctcccctctatgtggttgagagcatgtgcatgcgctgccaagaaaatggaacaaccagatttctattgaccttaattcctcacttcagaaaggtcttaatatctgcatttgaatgtccgcattgcggggaaatgaataatgaagttcagttcgcatgcgagattcaaccccgtggatgctg

SEQ ID NO: 98305 - DNA, 532 bp, Arabidopsis thaliana columbia
  unsure (1)..(532): unsure at all n locations
nnnnnnnnnnnnnnnnnnnnnnnnnnnnnnnnnnnnnnnnnnnnnnnnnnnnnnnnnnnnnnnnnnnnnnnnnnnnnnnnnnnnnnnnnnnnnnnnnnnnccttttttttttttttttttagcgaataatcattcaatactcattaatatttttccttacaaaaacaaaaatcagtaattttccttttactctggtcttgtaaatgttatctaccggtatatttcacttcagtacttttcttttacaaaaattataactatgaccccatcttcctataattgaagtatggaaccctattgtcaataacaacccaaatcatcatcatttgactctgttcttaactctcattctgatgctgcttaagcaaataagcctcatcgtgttcttcagctccaaaacacttcacttcgatctcatcttcctcttcattgagttgttgcatctctgactcgatcaaggcttgcatttttgctctgtctcggtccctcgggtatgtgcaatataggaacgagtagattgtgcaacagatca

SEQ ID NO: 98306 - DNA, 538 bp, Arabidopsis thaliana columbia
  unsure (1)..(538): unsure at all n locations
aattgtatagttattagcattaaacaaaatgtgattatttatttacatggaaccatacaataaaacattacataagaaaaatatctctctccaacgatatgtatggaagataataaagcaaaacaatctaaaataagaatcaataaacaagtgtaatatgatgaactcgaagaagactataatagcattgactcttgactagcaatcaaaagtcaacgtcacacttggtcggctgaaaaacaaacccgctggttgaattagaggtaagaggaaccttgagatcgcacttgatcttgggcttgaacctccacgacttgatcaacccaaacttaaacctaatccttaagtctcagcttggcatcgatcccataggatctggggtttcacatcctcggtcaaaatccttcctctctccggcggtaagcagcaccaattggggnccncgngttaggtccaacaccggngggtcctatggcccgggaaaactcgggatggtggtacccaaccggacggggtnccgggganccccgctcgttta

SEQ ID NO: 98307 - DNA, 575 bp, Arabidopsis thaliana columbia
  unsure (1)..(575): unsure at all n locations
nnnnnnnnnnnnnnnnnnnnnnnnnnnnnnnnnnnnnnnnnnnnnnnnnnnnnnnnnnnnnnnnnnnnnnnnnnnnnnnnnnnnnnnnnnnngacgtcgaacgcacgcgtacgtaagcttggatcctctagagcggtgaggagattacttttctttctactacaatttcatgcacatacatatgtcacaacgtacaataaaaatagcagaaataattacaaccacactttgaataacgatttcttcattttaacttattcaaacaagatcttttagtttactaggctttggacttaaccagaatcaactactttggggagtccttaaatgcttccgtttagccttcttgggctcaactcctaaccattgttgaatgagctcaaacactctttcatcacggagaagcccccgggggctacccgaaactcctacgctagcaactgctttaaactgagcagctgcagctgattcagcagggacaggtccatctccatctacatatgtatactcaggcatagttgacatatttcagacaaatcgtttatcggagaaggctctgggccataacaaacatc

SEQ ID NO: 98308 - DNA, 543 bp, Arabidopsis thaliana columbia
  unsure (1)..(543): unsure at all n locations
nnnnnnnnnnnnnnnnnnnnnnnnnnnnnnnnnnnnnnnnnnnnnnnnnnnnnnnnnnnnnnnnnnnnnnnnnnnnnnnnnnnnnnnnnnnnnnnnncctttttttttttttttttttttgggtgtaaactcaatgatttgggattctattatccttttgtttaatccaccacctaaaccattgttaggatgagtaatgaagcctcttaattgtctatttcagctacagaacaaatgctatttgtttagttgggttctccatacaaaagttgaaaaccactgttctctactttgcaataatagacttcatcaccgactagctttcacagaagctttcaccatatccagacccccagatgataatccaaggaagtatctgctgctcataccaaacggaaatggcacctctgccttgccatatccttggtgtgacagataagacgacttttgcaccttgcctcataacttgaacagaaacggcttgtccctggttagactgagcttcagcggcagcctttgcacaggttgtcaccaccctccacg

SEQ ID NO: 98309 - DNA, 405 bp, Arabidopsis thaliana columbia
tgcaaaccaaacaggaagaagaaaagaaacacaaaatcaacaacaatggcggtgaacaagaaagtttcatggagatcacgaagcgttggatgtttaggagatccagaggccctaatggcatcttcaaagacacctaacagaagatatgacgtcatcaagaaacagagctcttttcagagactatcgatacttgagatgagcaatccaagttccaacactttgtcagaagatctatcgatttctttggccggatcagatcttcatgtgtttaccctagcggagcttaaagtcattacacaaagcttttcatcgaccaattttctaggtgaaggtgggtttggtcctgttcataagggtttcattgatgataagctacgtcctggtcttaaagctcagcctgttgct

SEQ ID NO: 98310 - DNA, 151 bp, Arabidopsis thaliana columbia
tgttctcgagaagggacctgaagcaggcgactttcctcttctcctcttacggattgtatagattcttctcttcaaatttttggaaaattcaatctatatgttataccaaaatagcttcctttgtgaagtcctattgaatctctcgcctttc

SEQ ID NO: 98311 - DNA, 707 bp, Arabidopsis thaliana columbia
  unsure (1)..(707): unsure at all n locations
atgttctccnnnnnnnnnnnnnnnnnnnnntagggaaagctgcgacgcctgcaggtaccggtccggaatcccgggtctcccacgcgtccggtttaatacatgtcctcttcgatggaaaccaattcacgggcgaaattccagagaccctcagtctcgttaaaacgttgacggtgttacgccttgataggaacaaactcattggagatattccttcatatcttaacaatctcacaaatcttaacgaactgtacttggccaacaacagatttactggtactcttccaaatttaaccagcttgaccagtctctacacattggatgtgagcaataacactttggatttctcacccattccatcatggatctcttcattaccctccctatcaacattaaggatggaagggatccaacttaatggtccaataccaatctcatttttcagccctcctcagttgcagactgttatcttaaagcgaaatagtatagtggaaagcttagaactttggacagacgttagcagccagttggagttngtggatttacactacaatgnactaactgattataaaccatcagctaataaagtcctccaagtaatattggcaaataatccagtgtgtctagaggcgggaaacgggccgagttactgttcagcaatccaacacagtacctcatgttctacactcacaacaaactgttctccatgc

SEQ ID NO: 98312 - DNA, 549 bp, Arabidopsis thaliana columbia
taggtagcactactagaagagctatgacgtcgcatgcacgcgtacgtaagctcggaattcggctcgagtccgaatccaattgcttcaattgatttcagaggaactatagttgggattaaaccggctccggttattgcttctttctccggtagaggaccaaacggtttaagcccggagattcttaaaccggatttgattgctcccggagttaacatcctcgccgcatggacagacgctgttggacctacaggtttgccgtcagatccaaggaaaacggaattcaacattctctccggtacttcaatggcatgtcctcacgttagtggtgcggcggcgcttctcaaatccgctcatccagattggagccctgccgtgatacgatcggcaatgatgacaacgactaacctcgtcgataactctaaccgctcgttgatcgatgaatccaccgggaaatcggccacgccttatgattacgggtcgggtcacttaaatttgggccgggctatgaatccgggtcttgtctacgatataactaatgatgattacatt

SEQ ID NO: 98313 - DNA, 562 bp, Arabidopsis thaliana columbia
  unsure (1)..(562): unsure at all n locations
cttgattcgttcgacttttcccgaattgaaattaaaggtttactacttcgatccggagattgtacggacgctgatctcaacctccgtgagacaagcgctcgagcagccgttgaattacgctagaaattacctagctgaccttctcgagccttgcgtgcgtcgcgtgatctacctagattccgatctaatcgtcgtcgacgacatcgcaaagctctggatgacgaaactgggatcgaaaacgatcggagctcccgagtactgtcacgcgaacttcacaaagtatttcacaccggcgttctggtccgacgagaggttctccggagctttctccgggaggaaaccgtgctacttcaacacgggagtgatggtgatggatctagagagatggaggcgcgtagggtacacggaggtgatagagaaatggatggagattcagaagagtgataggatttacgagctgggatcattgccgccgttcttgttggtgttcgccggagaagtagctccgatagagcatcggtggaccacatgggcttggtgannaacgtaaaagaacttnaaa

SEQ ID NO: 98314 - DNA, 486 bp, Arabidopsis thaliana columbia
  unsure (1)..(486): unsure at all n locations
tcttctttatccctttttgctcttattacaacttttttttttccatgtatttcctcaaattttaatattttnnctttacngtatattcatcaaatctcaagttctctaatttcccattcgacctcgaaatttgaccaatttctcttctctcaaatttcagattctcttcctctgaaaaaaatcaaaaaaccaagtcttctaattccatctcctctctgtacccatctcctaaaaatctcaactttgagtcaaaattttgtcttctctcaaaccaattcatagttctaaaaatctcacctttatctcaaatttttaatctttcatctgatttctgaaacccaaattctctaatctcatctttgagccaaaaagtttcaatctttcctctgatttctgaaaccaaaaatctctaatttcaaaaaaaaaaaatctcacctttgggtcaaaaatgtcagtagcttgtggactagaatgtgtcttctgtgt

SEQ ID NO: 98315 - DNA, 566 bp, Arabidopsis thaliana columbia
  unsure (1)..(566): unsure at all n locations
ggacgtgcctggcccccttccgtaagcttggaatttaggttcgagctttatttggcaactacgcacggatccgccgcccaaagatcgcctgcatgaggcagcactgacagtcagtgttgaatagcagaccagttgacctgtcacgacagtaaacggcgagttgaggactgcatgcttagcgcatccagttgttgtgagtcgaatgcgggggacagcacgacaatatagtttgttgatgcttgttaagtagcattgttcttctggtgttcctacagcacagcatcttgtagcagtgcatccaagtcttatctagccttcgtatttacagctgtaaatagcctgcaggctgtacggtacattcacttcaccaatgcttaaattttaagcccttgttggcccctgttgatacttcattacacaagtgggtttttaaaagccagccagccccttaaaaaatagaattaannnnnnnnnnnnnnnnnnnnnnnnnnnnnnnnnnnnnnnnnnnnnnnnnnnnnnnnnnnnnnnnnnnnnnnnnnnnnnnnnnnnnnnnnnnnnnnnnnnnn

SEQ ID NO: 98316 - DNA, 444 bp, Arabidopsis thaliana columbia
gcagctgagtcgctctgatctctctacttccctcacaccctagaactcagcaacaatggccgttaccttttcagatctacacacagaggagggtgtcaaatccgaggaggagcacctagccggaaaaacctacatctccggagatcaaatggctgtggatgatgtcaaggattacgctgccggtccagtgaaacccagtgatgccttacccaatgctggcaagcggtactaggtacgaggcgtcccagcctgctaagggatcccctggagaggccagtgcagtacaagacgaggtctttgctgctgatgactccagctgaaggagcatgtgccgcctgcaacagtcttctgatgttaagcgaccacatgtatcattatggtgacctgtaccttcttcttacaagggatggaggaaagggctattgtgccttaagaggcaccatg

SEQ ID NO: 98317 - DNA, 751 bp, Arabidopsis thaliana columbia
attaacgaggggctaaaggagaaagaaacagaagaatcagcaattttagttaatctcgatgaagagacttgcctgaggatgcaaacctgcgtctttcagtgacattgactctttgtctctcccatacactgtccttgggaagtttgtgattaagctgtactcttctgtatctaagagtccaagtgaatccacgtagtcatacaatgtctggatcttggtttcgctcttaaacatcctcccttttctttctccattcgggaaccgaactaacacttgtgtaacatcagggcctttctcaggatatactcttttaggtttcaacagcagcttagtctctctgatctctctacctccctctctccctaaaactcagcaacaatggccgttaccttttcagatctacacacagaggagggtgtcaaatccgtggaggagcacctcgccggaaaaacctacatctccggagatcaattgtctgaggacgacgtcaagggctacgactggcgctccagtgaaacccaccgatgccttacacaatgctagcatgatggaactagtacgacgcttcccaacttgcttaaatgttccctggaaagggccgctgggtgcaacaatcaggagaatagggctatcagatcaggtgcttaaggatatgggcctatctggtaaaatcccagattctcttgaatactgtccgagtgttacaaaaacccgatctttatagaaatccgatgtggggaaatatccctac

SEQ ID NO: 98318 - DNA, 911 bp, Arabidopsis thaliana columbia
atagcagagctttgacgtcgcatgcacgcgtacgtaagcttggatcctctagagcggccgctcgcgatctagtctcacagctcaggatatactcttttaggtttcaacagcagcttagtctctctgatctctctacctccctcacaccctaaaactcagcaacaatggccgttaccttttcagatctacacacagaggagggtgtcaaatccgtggaggagcacctcgccggaaaaacctacatctccggagatcaattgtctgtggatgatgtcaaggtttacgctgccgttccagtgaaacccagcgatgccttccccaatgctagcaagtggtacgagtccgtggcttcccaacttgctaaaagtttccctggaaaggccgttggagtacaattcggtggctctgctgctgctgctccagctgttgaagctgaggcacctgcagctgcagctgatgatgatgatgacatggatctctttggtgacgagaccgaagaagaaaagaaagctgcagaggagagggaggctgctaagaaggacaccaagaagcctaaagagagtggaaagtcttctgtgctcatggatgttaagccatgggatgatgaaaccgacatgaagaaactggaagaggctgttcgtggtgttgagatgcctggtcttttctggggagcctcaaaacttgtaccagttggttatgggatcaagaaactcacaattatgttcacgattgttgatgacctcgtgtccccggacaacctcattgaagacttcctcacctcagagcctaacaacgagtacatccagagttgtgacattgtccgcacgcgtgggtcgacccgggaattccggaccggtacctgcaggcgtgccagctttcccaatagtgagtcgtagagagctggagtatca

SEQ ID NO: 98319 - DNA, 816 bp, Arabidopsis thaliana columbia
  unsure (1)..(816): unsure at all n locations
aaccaaactttatttaatgggcctttaccccgggggctctagggaaaataggattggttggtgggaaaaattgtgttggaaaccggggaattatacccatattttttcaaccaacaggggaaaccaagcttaatggccccatgtatttacgccaaagcttctaaatacgactcccctaatagggaaaagttggtacccttgcaggaaccggtccgaaattcccgggtcgacccacgcgtccaaaaaaaaaaagctgcagaggagagggaggctgttaaaaaggacaccaagaagcctaaagagagtggaaagtcttctgtgctcatggatgttaagccatgggatgatgaaaccgacatgaagaaactggaagaggctgttcgtggtgttgagatgcctggtcttttctggggagcctcaaaacttgtaccagttggttatgggatcaagaaactcacaattatgttcacgattgttgatgacctcgtgtccccggacaacctcattgaagacttcctcacctcagagcctaacaacgagtacatccagagttgtgacattgtcgctttcaacaagatttagagacttcaaatttctccttaccgaaacatatctgaatttcaagttttgttttcgtttgtgttgtttaccgaaatgtttctttcctagttgcaagaccgctttcatgttacaataacactaaattttcaatggttactattccgttgcatcaaaaaaaaaaaaaaagggcggccgctctagaggatccaagcttacgtacgcgtgcatgcgccgtcatagnnnnnnnnnnnnnnt

SEQ ID NO: 98320 - DNA, 848 bp, Arabidopsis thaliana columbia
tggccgttcgcagtaccgcaccggaattcccgggtcgacccacgcgtccgagatgttactcaagccattgatgccagtcatctcactgccatcattacaggtggaacaagtgggattggattggaggcagctagagtgttagcaatgagaggagctcatgtcatcattgccgcaagaaacccaaaagctgctaatgagtctaaagagatgattcttcagatgaaccctaatgctcgcgtctactatctccagatcgatgtctcttccatcaaatcagtcagatccttcgttgatcagtttcttgcccttaatgttcctctcaacattctcataaacaatgcaagtgttatgttttgtcctttcaagctcaccgaagatgggattgaatcacaattcgcaacaaaccacattgggcattttctgttgacgaatctgcttctggacaaaatgaaaagtaccgcaagagaaagtggagtccaaggaaggattgtgaatctgtcatctattgctcatacttatacttactctgaaggtatcaaggtccaaggcatcaatgaccctgctggatattcggagagaagggcttatggacagtccagactctcaaacttgttgcactccaatgcactctctcgtagactacaggaagaaagtgtgaaccttcactataaatttcggtgcacccttggtctttggcacccactaattcctttttcgttacttccgggtttaagcaatgacaggctctttaaagggctaattgaccttttccttcttttgggggaaaaaaatattgacccttgaggggaggccagccaacacaaccattgccttcccgtttggccacc

SEQ ID NO: 98321 - DNA, 503 bp, Arabidopsis thaliana columbia
  unsure (1)..(503): unsure at all n locations
agctatgcattatgttccaccgagaatttcaatggctgctgctagagaagaagctgaacaagtcatgtttggtgctttagataaccttttcgctaacactaatgtgaaaccaaaggatattggaatccttgttgtgaattgtagtctctttaatccaactccttcgttatctgcaatgattgtgaacaagtataagcttagaggtaacattagaagctacaatctaggcggtatgggttgcagcgcgggagttatcgctgtggatcttgctaaagacatgttgttggtacataggaacacttatgcgggttgttgtttctacttgagaacattactcagaattggtattttgggtaacaaggaatccgatgttgataccgaactgcttgtttccgagttcggtggctctgcggttttccttttcgaacaagtcggggggccaaaanacgggttnangtacagggntttaccatntnggtnaggncnnccccnngggncgngtt

SEQ ID NO: 98322 - DNA, 489 bp, Arabidopsis thaliana columbia
ctatgacgacgcatgcacgcgtacgtaagctcggaattcgtctcgagcttggctcagacattcctttgtctgatcgtgaacttgtagtagtgttttcgtgatagaaaattttcaaagttaatgtgcatacactagctagtgaagaagaagaagactaactaagaatggaaggaacttgttttctccgtggacaacctctcacaacaataccctctcttcccagcagaaaagggtttcttctccaaagatggaagaccaatcggattgtcaggttttcaggttttaagaatcactcggtttctggaaagtcgaggtctttcgatcttagcctcagagcttcaggtcccattagagcaagctctgttgtaacagaagctagccctaccaacttaaattccaaagatgatgaccttgtctttgtacccggggctactggtaaagtgggctctagaactgggagagacctctggagctgggatttccggttaa

SEQ ID NO: 98323 - DNA, 1004 bp, Arabidopsis thaliana columbia
aaataagttcctcgagaaagaaaaaagctcgccgattattcaagatggaattctaatggatctgaccgaaacacacaacgaaaagaacaagaagggcgtggagaaccgccaagctgatgaacacgctttatgccaagaaggagatgcgaattctgatggtaggacctgatgctgctggtaagaccacaatcttgtacaagctcaagctcggagagattgtcaccaccattcccaccatcgggtttaatgtggagacggttgagtacaagaacatcagcttcacggtttgggatgtcgggggtcaggacaagatccgtcccttgtggagacactacttccaaaacactcaaggtctgatatttgttgttgatagcaatgacagagaccgtgttgttgaagccagagatgaacttcacaggatgttgaatgaagatgagcttcgggatgcagtattgcttgtgtttgccaacaagcaggatcctccaaacgctatgaatgctgctgagattactgataagcttggccttcactcactccggcaacgccactggtacatcccaaagcacatgcgcaactagcggtgaaggggctctatgaaggtctggattggctttccaacaacattgctagcaaagcttgaggttatctcgaccagatagttttggtgaggggattgaagctttctctccggagtcgacttgatttcttgtggtttaagacctgctcgatttgtttcatgtttaactgtcaccgtttctcctttttgctaactcttctcgaatgtttgaattcttctaggctttaaaagacttctttttttttttttaattggagttaaaaaatcacatcacttattttcatatagtaaatcaatgttatctgttcactcatcggtaggagctttatgcgcgatgatccttctttgttctccacattgcaatctgtaaacaccaaacctgtaagatcaattggtttactctgccttggtcaaaatcctaattcct

SEQ ID NO: 98324 - DNA, 519 bp, Arabidopsis thaliana columbia
  unsure (1)..(519): unsure at all n locations
gaccatttnttgttctttggacgaccatcggcgacagtnttaagtctagagtcttcttcttcttcggcgtagcctttcttccccccggcttgaaagaagaagatggggctgtccttcggtaagctgttcagcaagctctttgcgaagaaagagatgcgtatcctcatggtgggtctcgatgctgcctggtaagaccaccatcctgtacaagctcaagcttggcgagatcgtcaccaccattccaaccattggtttcaatgtggagactgtggaatacaagaacatcagcttcaccgtctgggatgtcgggggtcaggacaagattcgtccattgtggaggcactacttccagaacacgcaggggctgatcttctgtggtggacagcaacggcccgtgaccgtgttttttggagccaganttggnttcacagatttttgaccgaggtnagttaganatcnttcctccggtttttctaanaagaangctttcccaatggngttacccnnttgnnaccnnaa

SEQ ID NO: 98325 - DNA, 963 bp, Arabidopsis thaliana columbia
  unsure (1)..(963): unsure at all n locations
cacaatcgtctttgtgctgctgattggaagcttctctctctctcggtttagatccctttcaattctccaaaggatcaacagttaaaaggaaaatggggctttcatttgcaaagctttttagccggctttttgccaagaaggagatgcgaatccttatggttggtcttgatgctgctggtaagaccaccattttgtacaagctcaagcttggtgagattgtcaccaccattcccaccatcgggtttaatgtggagacggttgagtacaagaacatcagcttcacggtttgggatgtcgggggtcaggacaagatccgtccctttgtggagacactacttccaaaacactcaaggtctgatatttgttgttgatagcaatgacagagaccgtgttgttgaagccagagatgaacttcacaggatgttgaatgaggacgagctgcgtgatgctgtgttgcttgtgtttgccaacaagcaagatcttccaaatgctatgaacgctgctgaaatcacagataagcttggccttcactccctccgtcagcgtcattggtatatccagagcacatgtgccacttcaggtgaagggctttatgaaggtctggactggctctccaacaacatcgctggcaaggcatgatgagggagaaattgcgttgcatcgagatgattctgtctgctgtgttgggatctctctctgtcttgatgcaagagagattataaatattatctgaacctttttgcttttttgggtatgtgaatgtttcttattgtgcaagtagatggtcttgtacctaaaaatttactagaagaacccttttaaatagctttcgtgtattgtgcctggattaatatgattgattgttttgctttaaaaaaaaaaaaaaaagnnnnnnnnnnnnnnnnnnnnnnnnnnnnnnnnnnnnnnnnnnnnnnnnnnnnnnnnnnnnnnnnnnnnnnnnnn

SEQ ID NO: 98326 - DNA, 895 bp, Arabidopsis thaliana columbia
  unsure (1)..(895): unsure at all n locations
nnnnnnnnnnnnnnnnnnnnnnnnnnnnnnnnnnnnnnnnnnnnnnnnnnnnnnnnnnnnnnnnnnnnnnnncccacgcgtccccacgcgtctcttaagcttctctcacatttctctttcaaatttcttcgagtctctctcgctctctccgtttcttcgcggtctctctctctcagatctctccgaaacattcttcgtagtgaagcaaaatggggttgagtttcgccaagctgtttagcaggctttttgccaagaaggagatgcgaattctgatggttggtcttgatgctgctggtaagaccacaatcttgtacaagctcaagctcggagagattgtcaccaccatccctactattggtttcaatgtggaaactgtggaatacaagaacattagtttcaccgtgtgggatgtcgggggtcaggacaagatccgtcccttgtggagacactacttccagaacactcaaggtctaatctttgttgttgatagcaatgacagagacagagttgttgaggctcgagatgaactccacaggatgctgaatgaggacgagctgcgtgatgctgtgttgcttgtgtttgccaacaagcaagatcttccaaatgctatgaacgctgctgaaatcacagataagcttggcccttcaattccctccgtcaagcgtcaattggtattttccaggagcacatgtgccactttaagggtgaagggcttttatgaaggcttggccctggttctccaacaaaactcgggggaaaagcattttttagggtgaaatttccgtttnatcgngggtgattcttgcctcctgnntttgggcctcnnntgcctttnatnaaagggggttttnaaaattntttgaccttttgcttttttgggattgaatgtnctntt

SEQ ID NO: 98327 - DNA, 911 bp, Arabidopsis thaliana columbia
  unsure (1)..(911): unsure at all n locations
ccggaatttccgggtcgacccacccgtccgcctctcacgttcgaagaccatttcttgttctttggacgaccatcggcgacagtgttaagtctagagtcttcttcttcttcggcgtagttttttccccggcttgaaaaatgggtctatccttcggaaagttgttcagcaagctctttgcaaagaaagagatgcgtatcctcatggtgggtctcgatgcagctggtaagactacgatcttgtacaagctcaagcttggagagatcgtgactacgattccaaccattggtttcaatgtggagactgtggaatacaagaacattagctttaccgtgtgggatgtcgggggtcaagacaagattcgtccattgtggaggcactacttccagaacactcagggacttatctttgtggtggacagcaatgatcgtgaccgtgttgtggaagccagagatgagcttcacagaatgttgaacgaagatgagttgagagatgctgtgcttctcgtttttgcttaacaagcaagatcttccaaatgcgatgaacgccgctgagataaccgataagcttggacttcactctctccgtcaacgacactggtacatacagagcacatgtgctacctccggagaagggctttatgagggacttgactggctctctaacaacatcgcaaacaaggcttaggagaacaacgtgtggtttggtttttaatcgaggagagtcttgtcttcttccttctatcttttgttctttcgtctcaaactcttatcatttcatactctttgttcttcgctctaataatttacaagtttttttttttgttgcttttatcctataattcagactcttataaaatggggcccaatttcggcggatattccaatttttttttttttnnnnnnnnnnnnnnn

SEQ ID NO: 98328 - DNA, 1045 bp, Arabidopsis thaliana columbia
  unsure (1)..(1045): unsure at all n locations
nnnnnnnnnnnnnnnnnnnnnnnnnnnnnnnnnnnnnnnnnnnnnnnncccacgcgtccgcaagaaaaaaaaagcgtccggaaacgttcgaaggccattttctttggacgaccatcggcgttaaggagagagcttagatctcgtgccgtcgtgcgacgttgttttccggcttgatcaaaatggggttgtcattcggaaagttgttcagcaggctctttgcgaagaaagagatgcgtattctgatggttggtctcgatgctgctggtaagacgactatcctctacaagctcaaacttggagagatcgtcaccactattccaaccattgggttcaacgttgagactgttgaatacaagaacatcagcttcaccgtgtgggatgttgggggtcaagacaagatccgtccattgtggagacattacttccagaacacacagggacttatctttgttgtggacagcaatgatcgtgaccgtgttgttgaagccagggacgagcttcacaggatgctgaatgaggatgagttgagggatgcgtgcttcttgtttttgctaacaagcaagatcttccaaacgcgatgaacgctgctgagataactgaaagcttgggcttcattctcttcgtcaacgacactggtacattcagagcacatgtgccacctctggagaaggactctatgagggacttgactggctctccaacaacatcgcaagcaaggcatagatggaatgttagccagattcctcttctgcttgtttggtttacaaatcaaagacagaggtctgtttctctagtactaaaagatttattattatattcttcttcgtcacttatctcaaacgcagatcattttacactttgtacttccccttcaataacttgttacttctctcgtttgcttcctgaatttgagtatatcatttttacatctgcttttcatcaaagcataaagcatctttcgaaacaaaaattgaaccgaatttttctgtaaactgatcaaatgtgtgaagaagacctgttatttggaatatttattttgtcactc

SEQ ID NO: 98329 - DNA, 528 bp, Arabidopsis thaliana columbia
  unsure (1)..(528): unsure at all n locations
cggacgcaacaacacaacacacgcagaagagagagagagaacaaaaaaaagaaggagcggttacatattctctggtctgtcacaagaaaaatggatatctgtatggacaaggagccagatggtgtggtggtctatgcgaacggtgattcgtgtaatccaaaccaagaaaatgtttctgagcctctcttagattcagtatcacgcgatgatgctaatgtacatacagagcttcgatatggggaagagaacatcgaagtaaacgaatatgatgttaaagagtgtactagtgagatccccgttggtaagccgataggagatgattttgagtctaaagatgtcactaagtcaagtttacatgcaaagcatgcttcaaaatcaggtagagggattaacaaaacaagggacacccgttccacaaccgttttttttgcaaccttagaaacgtgcttcatctncancggtcgnttacttgtgattttcggataactggtttnaaagttccgntggcatagtagtcaagnagnacct

SEQ ID NO: 98330 - DNA, 585 bp, Arabidopsis thaliana columbia
  unsure (1)..(585): unsure at all n locations
gcatacgttnttttttggcncccacagcnncctgaatgacggntgacacctggagaatggaagccccagcggcggaannggangaaatctgtttcaggtgaaggaggaagagacggttgttgtagctgagaaggttgttgttttaactgctgaggaagttcagaagaaggcacttgaggagtttaaggagcttgtaagggaggctttgaacaaacgtgaattcactgctccggtgacgccggttaaggaagagaaaacagaggagaagaaaacagaggaggaaactaaagaggaagagaaaacagaggagaagaaagaagagacaacgactgaggttaaggttgaagaagagaaaccggcggttccagcggcggaggaggagaaatcatcagaggctgctccggttgagaccaaatctnaggagaaacctgaagagaaagcagaggtaacaaccgngaaagcatccatttccggagnaggttggacccanaccnttgnangaatccgagnatctttcggnntcttttttaccaccttganttccnccnttcacctttcgttgtanaactttcccctttcntntgg

SEQ ID NO: 98331 - DNA, 633 bp, Arabidopsis thaliana columbia
  unsure (1)..(633): unsure at all n locations
cctcgaaccnatcccaaaaaaaacctcttgaccanttccgttaaaaggggagacttaacatacaaaaaccccctgtccccgagaacccanaccgggacccatccttaacccggcaaccaccccaaccctattgaattccctccttctggaggcctgcacgctttcatgggagcttagggttttgggtcctgatgtgacctaccgggagctcagtttgagccaaccacaccgaaggaagctatgctgtgaccgtcccctaagacacggaagattgggatccacccgatgaaccggtgataaccgattcttttaaggtgggtgaaccgggaaagattgtgatcacaatcgacaaccagacttccaagaagaagaaagtgctctacaggttcacaactcaataaaaggtctgatctttgaaatccaaatccaaggaagaaccaccaaaaatgttattttgttatttgggggaaacaaattttaattaattaatttagtttgttatttattatgtaattttgaaatctcaagatgtggttgtgtttttgctttgttttggtattgggggttgttttcgtgtgtggagaatatgtgattaaaattcaacagnaagtaaagaacacttngctgaggnnc

SEQ ID NO: 98332 - DNA, 845 bp, Arabidopsis thaliana columbia
  unsure (1)..(845): unsure at all n locations
atgatctccnnnnnnnnnnnnnnnnnnnnnnnnnnnnnnnnnnnnnnnnnnnnnnnnnnnnnnnnnnnnnnnnnnnnnnnnnnnnnnnnnnnnnnnnnnnnnnncggccgcagatggtccttgctggtccatccaaatctgccgatactattttcaaatacatagctcctgaacaagttcccgttaaatacggtggacttagcaaagatactcctttgaccgaagaaaccataacggaagccatcgttaaaccggcagcaaactacactattgaattgcctgcttctgaagcttgcacgctttcatgggagcttagggttttgggtgctgatgtgagctacagagctcagtttgagccaaccccccaaggaagctatgcttgtgatcgtctctaagacacggaagattggatcaacccatgaaccggtgataaccgatttccttttagggtgggtgaaccgggaaagattgtgatcacaatcgacaaccagtcttccaagaagaagaaagtgctctacaggttcaaaactcaataaaaggtctgatctttgaaatccaaatccaaggaagaagcaaaaaaaatgttattttgttatttgggggaaacaaattttaattaattaaaatagtttgttatttattatgtaattttgaaatctcaagatgtggttgtgtttttgctttgttttggtattgggggttgttttcgtgtgtggagaaatatgtgattaaaattccaaagaaagtaaagaacactttgtttcatgaaaaaaaaaaaaaagggcggccgctctagaggatccaagcttacgtacgcgtgcatgcgacgtcaagcatcttctata

SEQ ID NO: 98333 - DNA, 693 bp, Arabidopsis thaliana columbia
tggagctcaccagggtggcgggcgctctagactagtggatccccgggctagaagaattcgaggtcgcagatggtccttgctgggtcatccaaaatctgccgatactattttcaatacatagcccctgaacaagtccccgttaatccggtggccttagccaagatcccccttcgctagaccgaagaacccatcacggaagccatcgttaaacccggcagcaaactccactattgaattgcctgcttctgaggcttgccaccgctttcatgggagcttagggttttgggtgctgatgtgagctacggagctcagtttgagccacccaccgaaggaagctatgctgtgatcgtctctaagacacggaagattggatcaaccgatgaaccggtgataaccgattcttttaaggtgggtgaaccgggaaagattgtgatcacaatcgacaaccagacttccaagaagaagaaagtgctctacaggttcaaaactcaataaaaggtctgatctttgaaatccaaatccaaggaagaagcaaaaaaaatgttattttgttatttgggggaaacaaattttaattaattaatttagtttgttatttattatgtaattttgaaatctcaagatgtggttgtgttttgcgcggccgcgaattcgatatcaagcttatcgataccctcgacaacaagggggggc

SEQ ID NO: 98334 - DNA, 593 bp, Arabidopsis thaliana columbia
  unsure (1)..(593): unsure at all n locations
aaacccaatttaacttaatctggagctccaccggggtggcggctcgctctagaactagtggatcccccgggctgttttatttttcggccgcggagaaacctattaccgatgaggtggctactattcctacccctgcggcagagaaagaggaagttgctgctcctgtctctgatgagaaggcggttccagacaaggaggtgactccggagaaggaagccccagcggcggaagcggagaaatctgtttcggtgaaggaggaacagacggttgttgccgctgacaaggctgctgctttaactgctgaggaagttcagaagaaggcacttgaggagtttaaggagcttgcaagggaggctttgaacaaacgtgaattcactgctccggtgacgccggttaaggaagagaaaacagagnngatgaaaacagnggaggaaactaaagagggangtgaaaacagaggagangaaagaagaggcaaccgccttaggttanggttnatgaagagaanccngccgttncaccgccgaggtggngaatnatcagaggctttccgtttannccaatcttngnggancnttagggaaacnngggtt

SEQ ID NO: 98335 - DNA, 1593 bp, Arabidopsis thaliana columbia
  unsure (1)..(1593): unsure at all n locations
taatacgactcatatagggaaagctggtacgcctgcaggtaccggtccggaattcccgtgtcgacccacgcgtccggagaaacctgaagagaaagcagaggtaacaaccgagaaagcatccagtgccgaagaagatggaaccaagaccgtggaagcaatcgaagaatctatcgtctctgtttcaccacctgaatccgccgtagcacctgtcgtggtttatactgtcgccgttgctgaggcagagccagtggagccggaagaagtctcgatctggggagttccactactccaagacgagagatctgacgtgatcctcacgaaattcctccgtgcaagagactttaaggtcaaagaagctttaaccatgcttaaaaacaccgtccagtggcgtaaagaaaacaaaatcgacgaactcgttgaatccggagaagaagtgagtgagttcgagaagatggtgtttgctcacggtgttgacaaagaaggacacgtcgtgatctacagttcttacggtgagtttcagaacaaggagcttttctccgacaaggagaagcttaacaagttcctcagctggaggattcagctacaagagaagtgtgtgagagctattgatttcagcaaccctgaagcgaagtcttcgtttgtgttcgtcagcgacttcaggaacgctccaggacttggtaaaagagccttgtggcaattcatcagacgcgctgttaaacaattcgaggacaattatcctgaattcgccgctaaaagagctattcatcaatgtcccatggtggtacattccatactacaaaacattcggatctatcatcacatccccaaggactaggagcaagatggtccttgctggtccatccaaatctgccgatactattttcaaatacatagctcctgaacaagttcccgttaaatacggtggacttagcaaagatactcctttgaccgaagaaaccataacggaagccatcgttaaaccggcagcaaactacactattgaattgcctgcttctgaggcttgcacgctttcatgggagcttagggttttgggtgctgatgtgagctacggagctcagtttgagccaaccaccgaaggaagctatgctgtgatcgtctctaagacacggaagattggatcaaccgatgaaccggtgataaccgattcttttaaggtgggtgaaccgggaaagattgtgatcacaatcgacaaccagacttccaagaagaagaaagtgctctacaggttcaaaactcaataaaaggtctgatctttgaaatccaaatccaaggaagaagcaaaaaaaatgttattttgttatttgggggaaacaaattttaattaattaatttagtttgttatttattatgtaattttgaaatctcaagatgtggttgtgtttttgctttgttttggtattgggggttgttttcgtgtgtggagaatatgtgattaaaattcaaaagaaactaaagaacactttgtttcatgatttcttacccaaaaaaaaaaaaaaaaaataaagnnnnnnnnnnnnnnnnnnnnnnnnnnncnnnttgggagctgaanngggcgtnnnnnnnnnnnnnnnn

SEQ ID NO: 98336 - DNA, 1299 bp, Arabidopsis thaliana columbia
  unsure (1)..(1299): unsure at all n locations
cctctncttcctcttctctcncctcacaactcaaaactctctccatctctcttctaaaatcagacaagaaagatggctcaagaggaagtacagaaatcggctgatgtcgctgctgctccggtggtgaaggagaaacctattaccgataaggaggttactattcctacccctgtggcagagaaagaggaagttgctgctcctgtctctgatgagaaggcggttccagagaaggaggtgactccggagaaggaagccccagcggcggaagcggagaaatctgtttcggtgaaggaggaagagacggttgttgtagctgagaaggttgttgttttaactgctgaggaagttcagaagaaggcacttgaggagtttaaggagcttgtaagggaggctttgaacaaacgtgaattcactgctccggtgacgccggttaaggaagagaaaacagaggagaagaaaacagaggaggaaactaaagaggaagagaaaacagaggagaagaaagaagagacaacgactgaggttaaggttgaagaagagaaaccggcggttccagcggcggaggaggagaaatcatcagaggctgctccggttgagaccaaatctgaggagaaacctgaagagaaagcagaggtaacaaccgagaaagcatccagtgccgaagaagatggaaccaagaccgtggaagcaatcgaagaatctatcgtctctggtttcaccacctgaatccgccgtagcacctgtcgtggtagagactgtcgccgttgctgaggcagagccagtggagccggaagaagtctcgatctggggagttccactactccaagacgagagatctgacgtgatcctcacgaaattcctccgtgcaagagactttaaggtcaaagaagctttaaccatgcttaaaaacaccgtccagtggcgtaaagaaaacaaaatcgacgaactcgttgaatccggagaagaagtgagtgagttcgagaagatggtgtttgctcacggtgttgacaaagaaggacacgtcgtgatctacagttcttacggtgagtttcagaacaaggagcttttctcccgacaaggagaagcttaacaagttcctcagcttggnggattcagctacaagagaagtgtgttagagctatttgatttcaagcaaacccttnaaggcgaagtcttcgnttttgtnttccgtcaagccgactttnaagggaaccnctccaagggncctttnggtnaaaaanaagcccttttttgggcaaattccattcanaaccgncgcttgnttanaanaaattttcg

SEQ ID NO: 98337 - DNA, 499 bp, Arabidopsis thaliana columbia
ttttaggtgcactatagaagagctatgacgtcgcatgcacgcgtacgtaagctcggaattcggctcgagcgaggacggagttcatccactggcttcaggacatcccagatcaaaaggctatcgttggccagtactgccgatacacagctgagatcaagaccggagtcaacatcaagcaaatggtcaaccgtgcccttcaattcgcgacgagtgacccggctgggccggtatacttgtgtgcgtgccagggaagtcatggagtccgagatcgaaccatactccttgaatcaagacttgtggtctccagtcgagatgggcggactccctgaccaggcagccagcaagattgccaacgccctggccggtgccgagaaacctctggttgtgacgggatacgcggctaggaaccacgacgcaccgtctgcccttgtcgagctagctgatacggtgaagggcttgaaatcctcgatggtgccggagtgaaatgttttttccaggc

SEQ ID NO: 98338 - DNA, 929 bp, Arabidopsis thaliana columbia
  unsure (1)..(929): unsure at all n locations
aggtgcactatagaagagctatgacgtcgcatgcacgcgtacgtaagctcggaattcggctcgagcaaaagatcaaacggcggcccccgagtcaccttcttctaatgcagaagctctggttgctgttgagccgcgtccatatgggacctttaatacgattcgagaggtttacgatgaagctggaataactggcttctggaaaggtgtaattccaacattgatcatggtaagtaatccgtcaatgcaatttatgttgtacgagacaatgctaaccaagctgaagaaaaagcgtgccttgaagggtagcaacaacgttaccgctttggagacatttcttctcggagctgtggcgaaactcggagctacagtcacaacttaccctctcttggttgtaaagtcgcgacttcaagccaaacaggtcacaacaggggacaaaagacaacaatacaaaggaacattggacgcgattctgaaaatgattcgatatgaagggctttacgggttttataaagggatgagcacaaagattgtgcagagcgttttagctgctgcggttctgttcatgatcaaggaagagcttgtcaagggagctaagctgttgctctcaaacgctacctctagctaagtcaagtccaagccttcttgaatgaacgctagtagttagaaataaataaaaatagattaaatttccaatagttttcttgattaattattacactattgggattgttgttcatttcctgatgattgcaattgattattgtaatttctgcaagattctttagtaatgaaatctgaataaagtttggcaaaaaaaaaaaaaaaaaaggnnnnnnnnnnnnnnnnnnnnnnnnnnnnnnnnnnnnnnnnnnnnnnnnnnnnnnnnnnnnnnnnnnnnnnnnnnnnnnnnnnnnnnnnnnnnntagctg

SEQ ID NO: 98339 - DNA, 528 bp, Arabidopsis thaliana columbia
  unsure (1)..(528): unsure at all n locations
tggccccctttcccggatcggttagttttcttatccggaatccgatttgggtgattgttacgcgtatgcagacccccagaaaaatgtcaaaagatcaatcagcggcccccgagtccccttcttctaatgcagaggctctggtcgctgttgacccgcgtccatatgggacctttaatacgattcgagaggtttacgatgaagctggaataactggcttctggaaaggtgtaattccaccattgatcatggtcagtaatccgtcaatgcaatttatgttgtgcgcgccaacgctaaccaaggtgaataaaaagcgtgccttcccgggtggcnnccnnccctccaaaatgaggggtttttcttctcggagctgtggcgaaactcggagctacagtcacaacttaccatatcttggttgtaaagtcgcgacttcaagccaaacaggtcacaaccgcgggcaaaagaaaaaaaaaaaaaaaaaaaagatagcggccgctctaaaggatccaagcttacgcacacgtgcgtgcg

SEQ ID NO: 98340 - DNA, 699 bp, Arabidopsis thaliana columbia
gaatgttttaggtgcactatagaagagctatgacgtcgcatcgcacgcgtacgtaagctcggaattcgctcgaggtacactcaagaagatccaaatcttcctctttagagctcgaaaccctgctgctgatatacccgagtattttcttggaggaatagaccaagatcagtcaaatgatcatatggaacttccatctcctcttcaatgttctgtgaaagtgaagttcccacaatctgatccattcttggtgaacatgcttgactaccagatcattcctttaggctttcaatacataatgatcggttgggatcctgaatcattggcaaatggttacgtaggcgttgcttttcttccggtaaagaagaacggaggagacgaattcgttgtgcttcttcgctaccgtaatcatttgttggtgttgagaagttctgaaatgaggtggatgaaggtcaagaaaacctccattgcttcatgcaagggttttagtcagttttagaggtagattttatgtaacttttcttaacggggacatttacgttttcgatccttattcgttggaacagactctcctgatgccctcagagcctctgcgctcgagcaagtatctgattccaaatggcagtgatgagcttttcctggttgagaagttcaacccatttcctgaagctgatgtattggatttgagtcggttcgcatgta

SEQ ID NO: 98341 - DNA, 698 bp, Arabidopsis thaliana columbia
  unsure (1)..(698): unsure at all n locations
cccacgcgtccgcccacgcgtccgtgaggaggttgataagatggtgtgcttatctcacgtatgtggaagctagattaggggatagggttttatatgctgatgagatattgaaagatgggttttgcttgaatatgattgagactcctttgtgtcctttgaaagttgtgactaatcttcaagaagctgtttgggatgctgatattgtcatcaatggtttaccatcaactgagacgtttcaggtgttcaatgagattagtaagtattggaaagagagggttaatgctcctgttattatctctttggctaaaggtgtggaagcagagtttgagcctcatcctcggattgttactcctacgcaaatgatccatcgagcgactggtattcctcttgagaacattctctaccttgggggacctaatattgcttccgaggtatacaataaagagtacgccaatgcacggatttncgggtctnaaaaatggaggaagcctttgggaaagtttctaaggcagtctcatttcatagtctgggntaatagtgaccncattactcatgaaagtaatggggtggcttnaaggaatgttttatgnccattgggtgcaaggaattggtggntacacttgacctaagggaaaagtnnctaccccccaaatcaagtgtacttttcgcanttntaccttcannggatggtttttatt

SEQ ID NO: 98342 - DNA, 576 bp, Arabidopsis thaliana columbia
  unsure (1)..(576): unsure at all n locations
ttccaagtcacgacggtgtaaacgacggccagtgccaagctaccctcactaaaggaaaaaccagcttgcatgcccgcaggtcgactctagaggatcccctcggggaattccaattccacattttcaagaaataaggaggcaaaaatgttcatatatgaattggaattatttgttttcttattaggcctatcctgaagccaaaggaaatgagatcggaattcctcggggaattccaattccacattttcaagaaataaggaggcaaaaatgttcatatatgaattggaattatttgttttcttattaggcctatcctgaagccaaaggaaatgagatcggaattcctcggggaattccaattccacattttcaagaaataaggaggcaaaaatgttcatatatgaattggaattatttgttttcttattaggcctatcctgaagccaaaggaaatgagatcggaattcctcgggggtaccgagctcgaattnnnnnnnnnnnnnnnnnnnnnnnnnnnnnnnnnnnnnnnnnnnnnnnnnnnnnnnnnnnnnnnnnnnnnnnnnnnnnnnnnnnnnn

SEQ ID NO: 98343 - DNA, 812 bp, Arabidopsis thaliana columbia
cgaaccacgcatctgcccacgcgtccgcccacgcgtccgcttcttcttggtctcttctccatctcatcggagctgatctcgaattgttctccgttcatttgttacggtggagatgacatcggatcaccgcgacgctcttttctctctggaactggaatcgcctgatccggacgaaggaggtgtagcagacggaggagaatctgataccgacgaggatttgcgcgacaacgatgatgttgttatgccgggaacgaacgaagctgaagctgaagacgacgatcccgaagaggaagatctcaattctccgtctacatcatcactccccatggtttctacgatctcagcgactgctgttgtttccgggaccccgacggcgacttcctctacaggcgccgtgaccgttgcacttccggctggatccgccgtccctgtctccgtgattcccgttgattccgatccgaagtggcaccgtatgacggagatcgtccatcagagaccaccgatcgatgattctagacgccttttccagaggctgtggacagacgaagacgagatcgagcttcttcgtggttttctcgattacatgacgatgcaccgcggaagcagctcgcatccgccggatacggcgccgttttatgagcagataaagtcgaaacttcagctggatttcaacaagaaccagctggtggagaagcttcggagattgaagaagaagtacaggaatgtgatgagcaagatcagctctggttaagaggtattcttccagagccctcatgatcagtctacttttcgagatttctagaaaaatctgg

SEQ ID NO: 98344 - DNA, 673 bp, Arabidopsis thaliana columbia
  unsure (1)..(673): unsure at all n locations
cagcttgccaaagacattgagaaaatgtctgatgaagcagctgcaaattttgccgtcttgcaactccagagaattcttcccgatgcattgcctccggtacagtatctcgtatcgaggtggggatcggatgtgaattcaatgggatcttatagctacgatatcgtgggaaaacctcatgatctctacgagaggcttagggttccagtggataacttattctttgccggtgaagcgacgagctcgagcttcccgggctcggttcacggcgcttattcaactggattgatggcagctgaagattgtaggatgcgagttctggagcggtatggtgagttggatctgttccagcctgtgatgggcgaggaaggacctgcctctgtacctcttcttatatctcgtctctaaactccatcagttatcgtttactagaaggaacctcaagtgatgattgtcttaatatgaaactaaaattattctcgtgtcggatcgtttaaaacattcccagtcttattttctcagtgtttttaattcaataaattggaacattatatccttgtgatattatttatatatgataatcatctttaagaaaaaaaaaaaaaaaagnnnnnnnnnnnnnnnnnnnnnnnnnnnnnnnnnnnnnnnnnnnnnnnnnnnnnnnnnnnnnnnnnnn

SEQ ID NO: 98345 - DNA, 136 bp, Arabidopsis thaliana columbia
agctgatcaagaccgtttcttcaacgccttctcttccgcgtttgtaaaattgtcgtcttacaaagtgttaaccgggactgaagcagtacttagaagcgtgtgtgacaaggttgattgatgtatatttataattatc

SEQ ID NO: 98346 - DNA, 558 bp, Arabidopsis thaliana columbia
  unsure (1)..(558): unsure at all n locations
ttgtnnnnnnnnnnnnnnnnnnnnnnnnnnnnnnnnnnnnnnnnnnnnnnnnnnnnnnnnnnnnnggctcgagctcatcatcttgttataataacgatgatgggaggaatattttcgttattttgttttctttgtatatatatattaattaggttggagaactcattggtggaagccaaagggaagaacgatatgatgttatcaaacagaggatcgaggagatgggtctaccaatggagccatatgagtggtacctagacttgcgtcgttatggaacagtgaagcattgtggatttggacttggcttcgaacgtatgattcagttcgctacaggaattgataacatcagagatgttattcctttccctcgctatcctggaaaagctgatctctgattcctctctagacacacaattctggtctggtctcgacatggttttagtttccttttaaattggttaaatgaaaattgtattgatttttatctatactctgtttctcaagctgtgagagctaatatgaagggaaacaaagttatatgaagggaaacaaagttat

SEQ ID NO: 98347 - DNA, 1062 bp, Arabidopsis thaliana columbia
  unsure (1)..(1062): unsure at all n locations
atgannnnnnnnnnnnnnnnnnnnnnnnnnnnnnnnnnnnnnnnnnnnnnnnnnnnnnnnnnnnnnnnnnnnnnnnnnnnnnccacgcgtccgaaattacgacgttgaagctccctcagtctaaaggattcggaggttgacgctgaactaaataatgggagaagagctgcaatatcagcagaatggttcatctgtgacatctaattatggttatggaagttcgcttgcttacgatcaatctcaagacattgaatctgccgcaaacactgctcttctccgagaacaagaaatagaaacgcagaagattatacaaggtcaaagagaagctgggacttcagtagccggagactctaagcataacactgatattcttcgagatcgtgctgaccccaatgctctaaaggaacatttgctaaagttcactgcacatcatagagcagaagcagcggcaaagcgtggtgggagtgtgagtacatgcggagaaggtaatgtggatgttggaaacggttatggtataccgggtggagttgcatacgcgggtcactccgagctcagtgggaagcctgaacctaccaatgcttcaaacaatttgcctgaatatctcaaacaaaaattaaaggccaggggaattctcagagatggtgcaggggctgttacatccaacccagaagatacatcagcggttagttggaatagacaggcaactttaccttttcaggctaatgcaagcaccttaccattaggatgggtagatgcaaaanatcctgccagtggtgctacctatnactataaccagcacactggaacatgccagtgggaaaggcctgttgagctttctttatgccacttcaagtgaccacctgtacttnctaaaagaagagtggattgaacatttgatgaagnatctggccataaggatttctcaatncaaaggcacatgtgntnaagtgggacctccagnttttttncaanagcccgttgcacaaactttacaacggtgtncccaagnccggtattnggngggggggatcccatttagntccaantnaggggttnggggnt

SEQ ID NO: 98348 - DNA, 536 bp, Arabidopsis thaliana columbia
taggtacaactactagaagagttatgacgtcgcacgcacgcgtacgtaagctcggaattcggctcgagtggaggtgaaccggaatgtagtcctgtggtttaccagattcaagataatctcaaacaacctgtcttcagctgcaaattcagctccgatcgtaacggaagatctcggtctctaccatcaggatttacatatagtagtagaggatggattacaagaacattatcaggtgaccagtgggaaaagaaacaagcgagagaacgtaaaggttggatgataacgatccatgatctttcgggatcacctgtagcagcagcttcaatgatcactcctttcgtggcatctccagggtctgatcgtgtttctagatcaaaccctggggcgtggctaatccttaggcctcatgggacttgtgtcagtagttggaaaccggggcgacgtcttgaggcttggggtgagagaggagctattgatggattggggtacaaggtccaactcgggagggataacagtactagcacccggctttccta

SEQ ID NO: 98349 - DNA, 833 bp, Arabidopsis thaliana columbia
  unsure (1)..(833): unsure at all n locations
gagttatgataggattggcattttatttattagaactttatttcattatcatgtttttttcttctgaaacttatgataaaaaaatgtttaactcatgcaaaagacttttaactagtgggagataatggtgaaactcttttatttttgtccgtcttttcataattgccaatatatgtgatgtataattgcgggatatatgtgattgatatcatgacttaccactttatattattattttttttatcagaaaaatccgtacagaaaaggaatctctctcactctcacaaatggcaacgcttttaggtttctctcagactaagtttcaccattgcggcgtctggatttctacgccgccgtgctcatcttcttccacggtagtctcaatggtgggcttgaatcggactgattcgaaaaagctccgttcagatttcctcggccagattggttacgaagatcggagacaagtaagacacagttactgtagaagctcattagctgtgaaaatgtcgtgggacggtcctnttgcttccgtcaagttgatcatccaaggnaaaaacctcgagttatcagagccaattaagcagcatgttgaaagagaaagtaggcaaatcttttcagaaacacaagtcatcttgtnagagaaagttgatgtaaagactctctggttccggtgggttggagaagttttnggtaaaaggnccctngggatttcgaagattgttnaggtgncaattgttttaaaaaagaagccatggntgttttcccgtncttgaggaagattcttnagncnagtntncngctttntatncnctttggatnaaccgntaatacca

SEQ ID NO: 98350 - DNA, 639 bp, Arabidopsis thaliana columbia
  unsure (1)..(639): unsure at all n locations
acgactcactatttggaaagctggtccgcctgcaggtaccggtccggaattcccgggtcgacccacgcgtgccaagcttcacttctcagaagaaagtaagatctgcgaatctctctcactctcacaaatggcaacgcttttaggtttctctcagactaagtttcaccattgcggcgtctggatttctacgccgccgtgctcatcttcttccacggtagtctcaatggtgggcttgaatcggactgattcgaaaaagctccgttcagatttcctcggccagattggttacgaagatcggagacaagtaagacacagttactgtagaagctcattagctgtgaaaatgtcgtgggacggtcctcttgcttccgtcaagttgatcatccaaggaaaaaacctcgagttatcagagccaattaagcagcatgttgaagagaaagtaggcaaatctgttcagaaacacagtcatcttgtgagagaagttgatgtaagactctctgttcgtggtgggagagtttggtaaaggccctaggattcgaagatgtgaggtgccattttttacaaagaagcaatggtttttttccggcctnngggaanttcctttggcagattacngtttttncgccttggnncancgnt

SEQ ID NO: 98351 - DNA, 1384 bp, Arabidopsis thaliana columbia
cggacgcgtccgcccacccctcacacatttcttatcttttgctctcaatagattccattgattcaaaacaaaattttcattaagatttcacaacctccacacacttccaaacacaattaaagagaggaaaaagaatcaataaccctataaataaaaaatcagacaaacagaagtttcctcttcttcttccttaagctagtaccttttgttcttgaaattagggttaatttcttttttccaaataccatcaattctccagaccataaaaactcaaaaagatcagatctttcctctgaaaaagagatacccaacttatgtttttgtgtgtctgtatatagataaacattacatacccatatttgtgtatagacataaaaagtggaaattaaggtaacaaaaagaaatgggaagaggaagagtagagctgaagaggatagagaacaaaatcaacagacaagtaacgtttgcaaagcgtaggaacggtttgttgaagaaagcttatgaattgtctgttctctgtgatgctgaagttgctctcatcatcttctccaaccgtggaaagctctatgagttttgcagctcctcaaacatgctcaagacacttgatcggtaccagaaatgcagctatggatccattgaagtcaacaacaaacctgccaaagaacttgagaacagctacagagaatatctgaagcttaagggtagatatgagaaccttcaacgtcaacagagaaatcttcttggggaggatttaggacctttgaattcaaaggagttagagcagcttgagcgtcaactggacggctctctcaagcaagttcggtccatcaagacacagtacatgcttgaccagctctcggatcttcaaaataaagagcaaatgttgcttgaaaccaatagagctttggcaatgaagctggatgatatgattggtgtgagaagtcatcatatgggaggatgggaaggcggtgaacagaatgttacctacgcgcatcatcaagctcagtctcagggactataccagcctcttgaatgcaatccaactctgcaaatggggtatgataatccagtatgctctgagcaaatcactgcgacaacacaagctcaggcgcagccgggaaacggttacattccaggatggatgctctgagaatcatgtactgtgatgaagctcacccacaaaagaccttatatatatataaagtatagatacaagacttggatttgtagacataagtggctaatataatggtcctgaggatcttctagacatttgtatcttttgggaatccttgcttatattaagaattcaaatgtgcggagcttgttttagcgctgaaccatgactctggttaattatcgtgtaatgagaaacatttgggtc

SEQ ID NO: 98352 - DNA, 859 bp, Arabidopsis thaliana columbia
  unsure (1)..(859): unsure at all n locations
atgatatggccagcatctatacngactcactatagggaaagctggtacgcctgcaggtaccggtccggaattcccgtgtcgacccacgcgtccgcccacgcgtccgcggacgcgtgggctcacaaaaacctcacctttccaccataacattgtttctgttctacttcacagaagaacagagacaaaagaaagaacgggtctttggtcggaaagttcgactcttttagcatcttcagatgttctaatctcgaaaaaaatgcaactttactctgcaattttccgaggacatatcagacctaacgccgtcgtcggtgctgcctccatgtttattcaacataattccatccagcttcatcggagccctaaattgttgttgagaccttcctctgtagtaaggtctcttcattgccggaggtcaggtggattggttacgcattctcagaggtcaagggtcttgtgtgtgaaagcagctcgtggtgatgcttcttcttcgactcttggaatagagtggagagcagctaatttaccatattttcagaggcaaaactctggctatggacgtattgcttacaatgactatgaatcaagtgatgagtcggatagagatgttgggtcctctcagtctcagcaaatggcgggttcgactcttgataacattgatcaatggagatttaaactaactatgcttctccggaacaaagaagaccaagaangtgtttcaagggagagaaaagatcggcgtgattntgatcatatctctgctntggcactangatggganacacagccgtcagattcgaagattgtgtcattagaagctcctttgcaatatgacctgactgatgtaacgcccaagaga

SEQ ID NO: 98353 - DNA, 432 bp, Arabidopsis thaliana columbia
ttttttttttagagcacaagtaaaatgcattttatatatatacacagtatcacccacggttaattactgtttagtctatacaaagtattttcaattattgcaagtaaaattaatacattgtttcacaagctatttattatccctcaagtcctcaagagaacgcttccgggatccgagattacgttccagcgtctgaggtgtaggtggtgttcttccacggcggaagagcactgccagagaccttgttttccgacaaagatcaaaaacagaggaggcctcaatctcagcgacaccttcacaccctttccctcccccttgtaataggtcacagtatctaacagcctcattcacatcttcgaaaaccagaactccatctcgaatgtcttctacgagcatatcgaatttaggggtgggtctagcctgctttggcct

SEQ ID NO: 98354 - DNA, 523 bp, Arabidopsis thaliana columbia
  unsure (1)..(523): unsure at all n locations
nnnnnnnnnnnnnnnnnnnnnnnnnnnnnnnnnnnnnnnnnnnnnnnnnnnnnnnnnnnnnnnnnnnnnnnnnnnnnnnnnnnnnnnnnnnnnnnnntttttttttaaaacatttacttgttactaaattttgagatagtatcacatttctagagtgtaagtttgaagataaatttacagaaaaattataagtatcacaagtatacagattgattacttagacagcagctggtgttggtgctgatgctggagttgtcgttgttgaagaaggaactcggttttccggggggatctcagtaaactcggaaagaattgccctgaattcgtcaccgccaatagtttctttctcgagaagcacttcaacgagcttatccatggcttcacgattgttctttatgtggcttagagctatctcatatgcactgtctgatagtttcttcaccgcagaatcaatgtcttctgcaagcttctcagacatggagtttcttgccatcattctcatgatgacatccgtttgggccga

SEQ ID NO: 98355 - DNA, 521 bp, Arabidopsis thaliana columbia
aatacgactcacttagggaaagctcgtacgcctgcaggtaccggtccggaattcccggttcgacccagcggtgcgaaaacatcaaatcatgagtgggcaagagaatcatgatcatggccggatctcttctacgcccgccgccgcgtcggagccttccaaggctgctgctcactcctctgactacgctccttaccctaagctcgatcctaccgacgtcactcctcctcctcctcagcctattcccaccggtgccgccgcaaccaccatgccagcggaatccaatccttacgtttctccttcccctgccccaaggaatacgatggattcggtgaaggatacgttagggaaatgggggaaaatggctgccgacgccaccaagaaggcggaggatctcgccggaaatttttggcagcacttgaaaacaggcccaagtgtagcagatgctgctgtttcacgaattgctcaggggacaaaaatacttgcagagggtggatacgagaaggtcttcaagcaacatttga

SEQ ID NO: 98356 - DNA, 557 bp, Arabidopsis thaliana columbia
  unsure (1)..(557): unsure at all n locations
nnnnnnnnnnnnnnnnnnnnnnnnnnnnnnnnnnnnnnnnnnnnnnnnnnnnnnnnnnnnnnnnnnnnnnnnnnnnnnnnnnnnnnnnnnnnnnnnnnnnnnnnnnnnnnnnnnnnnnnnnnctgtgttgatttttttttcggcaacttttgggtctctatatatatatataaaagatatggaagttcatgtgaaacaattgagtgttgttatgggacgtagttgtatcgattaaagagataacagagattgttcatctaggaagctgtctcaatggtttgaatgcattcaagaacagatgcatttttggacattgcagccattagagcttcatggatggtcttgttgtttttgagaagagaagcagagtaaagaacagcccatcttgttagattttgctgctgctcgttgctgattttgggttggcttctgtttatgaatctctgaagagagaagagatctgcagattggccaattactttgtcatacttcagaccctcggcgggaagtccagccattgccaacagagccacctatcgagctcctttgagcaagct

SEQ ID NO: 98357 - DNA, 613 bp, Arabidopsis thaliana columbia
  unsure (1)..(613): unsure at all n locations
nnnnnnnnnnnnnnnnnnnnnnnnnnnnnnnnnnnnnnnnnnnnnnnnnnnnnnnnnnnnnnnnnnnnnnnnnnnnnnnnnnnnnnnncttttttttttttttttcatgagacaaccatttttatagacatatttgtctgatgttgataacaagaaagttgagaacaaaacaaatattaagactcagggacaagtattctagtcatcatcatatcacagtgacacaacatacacacttcagaacaaagggtaccattaaagatcacaaaatctaataaaaacagaaccaacagtacgtctcaggtatccaaagcgagattttcagcttgcctctcaagccgaagagccacaacaggaaatgtgttgacgatcattactcgtatttctcttgagaatctccaaatattaagttcgtcttccgcccttcctgtatgtactccgtatttataggcaaacgttacatagcctggctcattggtgaacaaaattgagttcccactcacaccacaaccatcaggaagctccttagctgagcagcagacatttccaaagtgtccaataaacaacacacggtctcccaaatcgatcacctcaaccaattgaccagcctcct

SEQ ID NO: 98358 - DNA, 1184 bp, Arabidopsis thaliana columbia
  unsure (1)..(1184): unsure at all n locations
nnnnnnnnnnnnnnnnnnnnnnnnnnnnnnnnnnnnnnnnnnnnnnnnnnnnnnnnnnnnnnnnnnnnnnnnnnnnnnnnnnccacgcgtccgccagattcgagcaaagcgaaggtcgcagctgcttcaatcttcgcgatcatcgatagaaaatcaaagatagactcgagcgatgagacagggacagtgttggagaacgttaagggagatattgagctgcgtcacttaagcttcacttatccagcaagaccagacattcagatctttcgtgatctttgcttaaccattcgcgcaggaaagactgttgctctggtaggagaaagcgggtcggggaaatcaacggtgatctcgctgttacaaagattttacgatccagattccggtcatataactttagatggagttgagctcaagaagctgcagttgaaatggttgagacaacaaatgggactagtgggacaagaacctgtcttgttcaacgacacgattcgagccaacattgcttatggcaaaggaagcgaagaggccgctaccgagtctgaaatcatagccgctgcagaacttgccaatgcacacaaattcatctctagcatacaacagggttatgacacagtggtgggagagagagggatccagttatccggaggacagaaacagcgggtggctatagcacgagccatcgtgatagagccgaagatattgcttttggacgaagcaacaagcgctcttgatgcggaatcagagcgagtggttacgatgctcttgaccgagtgatggaaaccgaaccccatggtggggcttaccggtatctaccattaaaacgctgactattgccgtagttagaacgggtgactcgctgagaaagggactcacgagacgttgatcaaaatcgaaggtggggtttatgcttcgcttgttcagcttcacatgactgcttctaattgatgtgatatatagttttggttttatgaaaagctaaaacttcagttttggcttgagtcaaaaactagccaatgtactaaaggttttgtatttatttttttgttgttgtttgtatacaagttaacgaagctgatatatatatcttgtctttcaagaaaaaaaaaaaaaaaaaaaaaagggcgcacgctctagaggatccaagcttacgtacgcgtgcaggcgacgtcataaatcttctatag

SEQ ID NO: 98359 - DNA, 936 bp, Arabidopsis thaliana columbia
  unsure (1)..(936): unsure at all n locations
tgatatgccnnnnnnnnnnnnnnnnnnnnnnnnnnnnactatagatgagctatgacgacacatgcacgcgtacgtaagcttggatcctctagagcggccgcccttttttttttttttttttttaaaacttcaatctctagttaaaatattaaggccaaacatcaaatgtcatacaaatcatagtttttatacatatgatttcctcgcaaatttatcgatatttccggttcaacatgaaccgttgagtaagcaaaacaaacctagtactcaaacccaagaaagaaaacccctcaacacacccacaaaaagtagtagtaagaaagcaaccaatcttctgaaaaaccggttatagattagacggttgtagtagatttccggacagtgtaacggtaagcagcaactttcttcttgcgagagagagtattgtcaacagagagaatgagcttcccagcttctactgtagtgaaagagttgcaaacagcttcatctgtagctttcatcttcttcggtttctcgacaacgatcgcgtaactctcttcagcgttaggaacaaactctgcactgtactctaaatcccancctccactactataatcaatgttatggttgcttcacctcaatgcctnaatctgaatgtaacttnctcaccaccctgatggaaattcagacgccggttttgcggccgttttgcgatcagtaggccggtagaccaccgatggaccgaatatttctggcaatgaatngaaaggttctgtgattgctttttgactaacaattgtttgtcttgataggatgcctgacttggagaccctgagccaggcgtatgatattatacaccataaggatttctgaaaaaagtctgtaaacatctactttttagtttttaaactgactgaatgataacacccgttaatgactttacctttcaaccgactc

SEQ ID NO: 98360 - DNA, 540 bp, Arabidopsis thaliana columbia
cgattgtattaggacacactatagaagagtcttgacgtcgcctgcacgcgtacgtaagcttggatcctctagagcggccgccctttttttttttttttagagagaaaaaaaaattgaatcaaaaccaaagcgaagcagtcaatggcagcattcagacagacaagaacatggtctctccagtttctatcttaattatacgtttctcaaaaaaaaaaagaccattcctttacgaccttcttgcatccaaggcaacaaacataggcgaagctaagagcttagtaccgtctgaaactgccatcatctcacaaaccctctttacttcgaagcgccctccagaatatgcgtttttgagaataggaagtcatagattggtgctcaatattggcgccttggaggcctagcctcagcttccgagactctaatttgtctaccgtccaaatcagcaccatccaaggacttgatggcattttggacctcttgagaagagtcgtatgtcacaaatccaaaacccttggatcgaccactgtccctgtcgtagat

SEQ ID NO: 98361 - DNA, 514 bp, Arabidopsis thaliana columbia
ttagaagactatgacgtcgcacgcacgcgtacgtaagctcggaattcggctcgagctcgcggacgtcaagaccaaggacgacaaggccgtcacctgcctcacggccaccgtgcagttcagccgcgacggctccgtcaatgttgtggacaacttcaaggccgactacaagcagagcctcaagaccaagtacaaaatcgacatctagattggctggagtagtagcagcagcacgagcggctgaacagttgccgcggatatcgcgaatggagatgttgtcgacggcgtccttttttcacttctctccaaagcatgacctgagcgttatcgtttgagcattttactttcgctgtcgcttacgcagatagaggtggatgtgcagaatgagaggtccgatggctggtagtttacggcgtaatgtctcatgtttccttggccatatatttaaagaattcggggtctttgggtatcctgtctatactggcagcccaaaccttttacttttacaaaaaaaaaa

SEQ ID NO: 98362 - DNA, 720 bp, Arabidopsis thaliana columbia
cccgccttccttaacttggaattcaggttgagggcctggtccaattttggagttagaaggttggccttggtagggattggaagccatgggaggtagtccgatggccctcgcacagggcagccaggacggaccacctggggtggagcgtatcacctcggccaaccgaatcttcaccaccaggctcatatctatggtccaccaactaaacaacgctcattccgatgctagtttcacttacatcaatgcttatggcgcttttcaggatataatcgccaatccctctgcttatgggtttacgaatacgaacactgcgtgttgcggaattggaaggaacggaggtcagctaacatgtttaccgggagaacccccgtgcttgaaccgagatgagtacgtgttttgggatgcatttcatccttcggctgctgcaaacacggccattgcaaaaagatcttacaatgcacaaagatcttccgacgtttatccgattgatatctcgcaattagcacagctttgaaaggacagagaataggagagttttacaacaattgtatgcttttcaggttataaattgaattattggaaatgattctgatgttatgtgtgtacccaaagtgttcgactttataaaaaaaaatagggattgcattaaaaaaaaaaaaaaaaaagggcggccgccgactagtgagctcgtcgacccaggaattaattccggaccggtac

SEQ ID NO: 98363 - DNA, 714 bp, Arabidopsis thaliana columbia
  unsure (1)..(714): unsure at all n locations
nnnnnnnnnnnnnnnnnnnnnnnnnnnnnnnnnnnnnnnnnnnnnnnnnnnnnnnnnnnnnnnnnnnnnnnnnnnnnnnnnnnccacgcgtccgcttctctttcttccttcctctccgatctccgttcacatctctctctcatctttatcttcttctttttttgccttgtgggttgaaagtttctatattttctctttctcttctgtttacataatccattttcagctcaagcagctgaagaataacgatcaagaaccaaaaaagaagaaaacgaatctgttcttagctttgatgggttcttgcttcagttctcgagtcaaagcagacatcttccacaatggtaagagcagcgatctttatggtctaagtctctcaagtcggaaatcgtcttcgactgtagcggcggctcagaagacggaaggggagatattgagttcgacccctgtcaaaagcttcacctttaacgaactcaaactcgccacaagaaacttcagaccagatagtgtgatcggagaaggtggctttggttgtgtcttttaaggctggttagatgagtccactctcactccgactaaccctggaaccggtttggtcatcgccgtttaaaagcttatccaagaaggttttcaaggtcaccgtgaatggctgacagagatcaattacttggggcaactgagtcacccaaatctagttaaactgatcggntattgctt

SEQ ID NO: 98364 - DNA, 1406 bp, Arabidopsis thaliana columbia
  unsure (1)..(1406): unsure at all n locations
aatccgattcacaaaaacttttcttcagattcacaatctcatcacaacccttcaaaaagagaaaagatctaaagaataaacaagagccctaatatcaaatcacaaccaaaaaaaccaaagaaagctaattaaagttttctctctagctattcctcttcttttcttgttcttgaaaactagggtttacttcaccaaaagataagatctttccccagaaaaagcaatacccaagtcatgtttctgtgtgtctgtatatagataaaacattacataccctaataaggttacacaaatagctataaaagagggaaaataagatagggattttttggggtgaggaaagatgggaagaggaagagtagagctcaagaggatagagaacaaaatcaacagacaagtgacgtttgctaaacgtagaaatggtttgctgaaaaaagcttatgagctttctgttctctgcgatgctgaagtctctctcatcgtcttctccaaccgtggcaagctctacgagttctgcagcacctccaacatgctcaagacactggaaaggtatcagaagtgtagctatggctccattgaagtcaacaacaaacctgctaaagagcttgagaacagctacagagagtacttgaagctgaaaggtagatatgaaaatctgcaacgtcagcagagaaatcttcttggagaggatcttggacctctgaattcaaaggagctagagcagcttgagcgtcaactagacggctctctgaagcaagttcgctgcatcaagacacagtatatgcttgaccagctctctgatcttcaaggtaaggagcatatcttgcttgatgccaacagagctttgtcaatgaagctggaagatatgatcggcgtgagacatcaccatataggaggaggatgggaaggtggtgatcaacagaatattgcctatggacatcctcaggctcattctcagggactataccaatctcttgaatgtgatcccactttgcaaattggatatagccatccagtgtgctcagagcaaatggctgtgacggtgcaaggtcagtcccaacaaggaaacggctacatccctggctggatgctgtgagcgatacttcttcccccaataaagatcttaagcaagtactggtggggtcttcgtggtgtgatcttagatcttatgcatatgaataataatgttattgcacaagacttttgcttttgtagacacaagtggctatagctgtaatagccttcaacatctctcttctgtttcaggatttgtttgtgcctattgtaattgcttatatatgtatggtttgtataatgtgtgaaatgttaacatcgaccatgtctcatctggtgnnnnnnnnnnnnnnnnnnnnnnnnnnnnnnnnnnnnnnnnnnnnnnnnnnnnn

SEQ ID NO: 98365 - DNA, 1187 bp, Arabidopsis thaliana columbia
ggcgacctatagattactatgacgtcgcatgcacgcgtacgtaagcttggatcctctagagcggccgcccttttttttttttttttacgcccttctccagatcttcgctttcgcttgtttcccttacaaaccttcagtgcatttttgttacatgcaatgatttcttcctcctcttcctcatctaatgagacatcttcatctgcggtaaaatcttcatcgccatcatcatcctcatcctcatcctcataatctccatcatcttccttttctgtctcgtgtgacacattgtcctgctcttccaatgccatcttcccgtcttcaccatcatgcaaagaatttgaatccacattttccacatccctctcttcctcttcatcaccatcctcctctggatagtctccatcttcatcctctatctcatagaaaactctccttcgctttcctaaacctatcctttggtgtttctctccatccaaagacccacttttcccaacagcattccttgaattccttatctcatcatcttcatcatccgcatcatcgagatccacatcctcgttgtcagacacaaccacctggttcgtctttcttgacttacatcccgtgatttttcgattaccacgaggaccagtcttcacttttgggcattcaacattcctcccccgcgccccttcctcttccacttcatctaattcctcatcctccaccgcatcagacccattaaaaccatcaaaggatggctcaccgtcaacagatgaggcatactcctccttgagatcagcctcagactcttcttcatcctcgtcggaaatcacataatcctcatctgactcatctgaacccttatccttagatctaacctttctattagaatttctagcccaagacgtgtttctctttcccatatgctcctcaaaataagatatagaaacaaaccactaaggcactaatctaaatctaaactcatcaaccaaaaacacaatgattccttcagctccgtcttgttctaaaaacttatatagcctagaccaaatcacccagaaatctcaaacctcaattctcgaattcagagcacgagatctccgatgaagaagacgaaacacttatgatttttccactaattttgtgaatcgtgatccttttccccgccttatttttctctctatttacaactattttttttggtt

SEQ ID NO: 98366 - DNA, 476 bp, Arabidopsis thaliana columbia
  unsure (1)..(476): unsure at all n locations
tacgtacaaaggaatattatctaaaagacgagagtacaagtgagaaatggcgttaaaggtgatcaagatctcccgagtcagccctgcaaccgcctccgtcgacccgctcattgtcccactctcgttctttgatttacagtggcttaaactcaaccctaccgagcaagtcttcttttacaaactcaccgaatcatcatcatctcgcgacgttttctactcctccatcctccccaagctcgagcgatctctttcactcatcctcactcactttcgcctattcacgggtcaccttaagtgggattcacaagatccaaagcggcatttagttgttctttcaggngncacacttctntttcaaaagtgggctgagacttgatgcggntttttcaangnatctctggnaaaaggntttngtccanaggntagaggttcggcngctaaatacncggggttccggttttttttnnncttggggg

SEQ ID NO: 98367 - DNA, 496 bp, Arabidopsis thaliana columbia
cgcagtcgcacccagaaactaaaaaaaactgcttcctctctctctctctcttcccatcatcatcgtcgtctctttctcagatcgattttcggttatgccgatcaacggttaatctccgccgtttgatttcatcgccggagaggatctttctccgtctacgtatgccctttcgtatacgcgtttcgtgttttgattttccccgaaacctttcgttgttctgggttactgtgtgaggaaggacgtgcaaatttgtttggaagttgtgttaagttaaagcagagtattggagatcgtctgatagagaagagaatagttcttgtgtaaggttatgggttcagtttgttgtgtagctgtgaaagacagaaaggttcctcctagtggtggacctgcgagttcatctgttcatcggaattcagcatgttcgccacaatggagttctcgacgtgataataggaggcgagtggctgatgagattgagggttcaccttattacagt

SEQ ID NO: 98368 - DNA, 519 bp, Arabidopsis thaliana columbia
  unsure (1)..(519): unsure at all n locations
nnnnnnnnnnnnnnnnnnnnnnnnnnnnnnnnnnnnnnnnnnnnnnnnnnnnnnnnnnnnnnnnnnnnnnnnnnnccacgcgtccgctcttcctatctcacagcgacaatctctatctctctctatctcttctccgctcacagcgaatctctctctctctctctctctctctctcttctccggtgtattccgttctccgggaatttctccgaagagggagagaggaaaaaaaaaacgtccgattcaatctcttcgttgctcgacgaatttttcttaagctttccttattggagatttgaagattctgagtggttgttatgataatgtgggtttgattagttcttcacacacagcttctctacgctcatggattcttctctcgatggagctgcaggtgactcatcgaaatgcagtgaaatgagtgttgatgagaagagacagcttgtttatgaactgtcgaagcaatcacatctagctgctgaggtcttgcaggcatggagccgccaagagattctacag

SEQ ID NO: 98369 - DNA, 511 bp, Arabidopsis thaliana columbia
cccccctcgattgccgccggtttccatagcctggatatcgaattcgcggccgccgaaaagggagagaggaaaaaaaaaccgtccgattcattctcttcgttgctcgacgaatttttcttaagctttccttattggagatttgaagattctgagtggttgttatgataatgtgggtttgattagttcttcacacacagcttctctacgctcatggattcttctctcgatggagctgcaggtgactcatcgaaatgcagtgaaatgagtgttgatgagaagagacagcttgtttatgaactgtcgaagcaatcacatctagctgctgaggtcttgcaggcatggagccgccaagagattctacagatcttatgcgcagaaatggggaaagaaaagggaagtatactggtttgacccaagtcaagttcatcgagacccttttgaaaatggtatcctgggaaaaactctggagagtgtgaagggaagaagagagattctgattgtttgcctattc

SEQ ID NO: 98370 - DNA, 808 bp, Arabidopsis thaliana columbia
  unsure (1)..(808): unsure at all n locations
aacaagaacacattgagtgttgtttatgagagaggtctcattggtatctatcatgactggtgtgaaggcttttcaacttatccaagaacatacgatttcattcacgctagtggtgtcttcagcttgtatcagcacagctgcaaacttgaggatattcttcttgaaactgatcggattttacgaccggaagggattgtgattttccgggatgaggttgatgttttgaatgatgtgaggaagatcgttgatggaatgagatgggatactaagttaatggatcatgaagacggtcctctcgtgccggagaagattcttgtcgccacgaagcagtattgggtagccggcgacgatggaaacaattctccgtcgtcttctaatagtgaagaagaataaaacaaaaacaaaaaactcctcaggttactaagcttgaagtgtagatctattttacaacataaaattcttatcaaaaaaggaaggaatcagaatttccattaaagaaaggtgtcaaaaaaaagttgtaaaactatatagtagtgatcaagacgaatatgtgcatttatgttttatttttgttccctagtttttaattttatttttttgaaggaagaaaaaattagttccatgtgtttttgcaagatagttgaaaccttggacgcttgttatgtatgatgcgatcttgacattttttaataacagttattttaaataaatttatgatataagcggaaacttctagaaaaannnnnnnnnnnnnnnnnnnnnnnnnnnnnnnnnnnnnnnnnnnnnnnnnnnnnnnnnnnnnccgggg

SEQ ID NO: 98371 - DNA, 636 bp, Arabidopsis thaliana columbia
  unsure (1)..(636): unsure at all n locations
aaaaaaaaaaagggaggccttaatggagcccacctctngctgnagggggataccgcatgcacgcgtgcgtaagctcggaattctgcttgagagaggttaaacagctactgagaaaagccacaacacaagaaatggttggctttgacaattacaaagagaatggtcatccttttcctcactcaatcaggcgttttcatccatcgcatgcctccacgactactttgaatgggcctgttacatcaggagcgggggacacaatggaagctcatcatcataactaccactgagaccacgccctgggctcctcaatagaaaaccatcaatttcaaatgccaacttcaccaaaggttctcatgatcccccgaccccgacaacatctttgtacttcccaaaaaccacaaggaacaagtgaggtcgagctggggcaattccggcaagttttcctctctcagaccgaatgaccaaaggtctcattctctctacactagaaagccgggaaggggggatgatgatccgcgggcaaaaccctagataaatcactctccattatcttgattcggacacacatgggaggtgggcattttataaaactcaaatgcgggctgggagacaaccttaaaagacaccggggaccac

SEQ ID NO: 98372 - DNA, 481 bp, Arabidopsis thaliana columbia
  unsure (1)..(481): unsure at all n locations
cagttacatcctgcagatgaagaatccttcaagcccttggattggccttcaaggctgaaaatcgcgattgggacggcaaaaggattggcatggcttcatcatagctgcaacccgagaatcatccatcgcaacataagctcgaaatgcatattgttgactgcagagtttgagccaaagatctcggatttcggtctagctaggctgatgaacccaattgatacccatttaagcacattcgtcaatggagaatttggggatttcggttatgttgctcccgagtattcaagaaccatggttgcaactcccaaaaggggatgtctacagcttcggctgttgtgcttctagagctagtaacgggccaaaaagcaacgagtgtaacaaaagtttctgaaggaaaaagcttngganggaaactttaagggtaaccncgtgggaatggtttncaaaggtttcaantgnttcaaactccaggnngcattng

SEQ ID NO: 98373 - DNA, 633 bp, Arabidopsis thaliana columbia
  unsure (1)..(633): unsure at all n locations
cccccctctgggtcgacggtatcgataagcttgatatcgaattcgcggccgcaacaaaaacaaacagagtggtttctctatgaaatcaacgtttctgttgttgttgttgttacttagtctcaatcttctctttgtctttgtttcatgtgcttcttccatagagtttgtttaccctaatttcacagcttctaacctcagattcgtcgatagctccaaaggagctttcctcttgtctcgtaattccatcttcaaagccggtttattcagtcccggcggcgatgattcctctaccggtttctacttctccgtcgtccatgtcgattccggttcaacaatctggtcatcaaatcgagattcccctgtttcaagctctggtacaatgaatcttactcctcaaggaatctctgttaattgaagatggtaaaagtcagataccagtttggtcaacgccggctttagcttctccggttaagtccctcggtaaacgacgcgggtaatccccttcctcctgatcactgaacggttccctaggggaancttgntttccaacgggccgatggcctgngaangctaagctgggnggcctgccggnnggcnnggntantncacggggnaagctgggggaccgggtnt

SEQ ID NO: 98374 - DNA, 492 bp, Arabidopsis thaliana columbia
tatagaaaaatctatgacgtcgcatgcacgcgtacgtaagctcggattccggctcgagtttttttttttttttttttaataaaagtacccttaattgattatattatttctccaacctcgttacacaatacagtactataaaacttgtaaatgaacaagaattacccacattatcgggtgactaatgttcgttccatcggaaaacaaaaacacaacatactcaaaaccaaaatctccataaacatatatagagctattaattatcatattaaactctcacacactcttattataaaatgttttgactcctgatattagaccaactgcaaaaactaaactaatcactccaagatttaacaatcaatcattattatgattactataatctatatattactattaaaataaacctttttgtaatgaggatattgtgatgatctgatcaaccgtgaaccattccatacgacagagccatgagcaaaacagcagcct

SEQ ID NO: 98375 - DNA, 549 bp, Arabidopsis thaliana columbia
  unsure (1)..(549): unsure at all n locations
atgatcttnnnnnnnnnnnnnnnnnnnnnnnnnnnnnnnnnnnnnnnnnnnnnnnnnnnnnnnnnnnnnnnnnnnnnnnnnnnccacgcgtccgcttaactctctctctttctctttcccctttcttcttctgagatacgcttctctactccactgccatggagctctaatgggtctctgcaattttcattcttttcctcttttcttctgagaatttcagctcaagaaccatggatgagtcttctcttgttcgttttgtgttccttctctgtttggtttcgtcgtctgtgttctgtttggctgagtctgaccaaaacgcaaccgtttcttctgctgtttacattgttactctcaaggaccgtccatctgttcatttctccggcagagaatcgagtgactctaaacacagccttaccgctacttcgtcccaaatttacagaacattgaaccgaagtgcttctattattagagttcacgattcattgctgagaaatgtattgagaaaggagaattaccttaagctttatagttaccactatcttatcaatg

SEQ ID NO: 98376 - DNA, 750 bp, Arabidopsis thaliana columbia
  unsure (1)..(750): unsure at all n locations
taggtgcactatagaagagctatgacgtcgcatgcacgcgtacgtaagctcggaattcggctcgaggaaacctccaaaaaaaaaaacctcagagaaagaagaagaaagaaacaatgagaggactctccacaaaacccgttgcgataatcatcgcaattctcaccgtccacttcttattcgccgccgtaacctcccaatcctccggcgatttcgtaccgatcgagtcgaaatgcaacggtaccatcgccgagtgctccttatccacggcggaggaagagttcgagatggactctgagatcaacaggcgtattttagcaacaacgaagtatataagctacggtgcgctgaggagaaacacagttccttgctcacgacgcggcgcatcttactacaattgccgacgtggagctcaggctaatccttactctcgtgggctgtagcgctattactcgttgcaggcgataatctctttctctatggactttaaaatttttactctcaaattccttttgcttttgatttttatacaaattttcagattaattaatttggtttgnattgggggttaccaaggttaaaactttgcaatgnaaaaanaggttccatacaggcncaaaaaaaaggttggnatatgaccagaaagggggcgggaattcctgaancccggggggncncaaggtntaaagggcgccccnggggngncccacnttttgncccntagggnggggaatcngccttgggaacagggga

SEQ ID NO: 98377 - DNA, 508 bp, Arabidopsis thaliana columbia
ggtgcactctagaagactatgacgtcgcatcgcacgcgtacgtaagctcggaattcggctcgaggcgatatatgcgcagtccaaaaaccaggagaagaaggcgtgaaccagagtgtaatccttcattgcctgcgtcttgcttcttcaagagcttctgcaacaacaaagataattagagatgcagttgaagcatacaaccggtgagaggagctcacagaaggtgaagccgcttcatgcgggggctaagtctgaagttttgggacctattgtagtttgtgttaggaagagacataattaaaacatttgctgggggcgtctgatggtaaatacaaattttagttgaaaaaatcttttgagcaacactaagctttaaaaacctctttttgttccacaaaaaaaaatggtccgttgttgtcggggtggggggcgtccaactatgaagcccgctacccccgaaatttatttcagagcggtgccctgtggcttccctgttttccttaagagagga

SEQ ID NO: 98378 - DNA, 473 bp, Arabidopsis thaliana columbia
  unsure (1)..(473): unsure at all n locations
cccaagttccttttcccccggtntgggcccctaaaaagnnttccaagantgcgccttggtagggcttaaattggggagaaagcctgtgaagctgggcctcccaggggatcaaatcgggaacccacaatcatcatgcggcagctgtgggctccggtgatgccttccgctgcggtacatgcccttacaagggtctgccacccttcaaattaggcgagaaggtaaccctatctcaaaacttccttgaagctgacatataagcatgtgaaaggcatcttcatacatgggtgtttctcgccgaggccaaaaccttttgctaatcgcagagtagtttcatcatttactttgtgccctttcgtataatttgtttgttggtacttcttttattttgtggctctaaaagcttgtagaatattgtttgggttgcccacaaagcacacaccttagtatccaccaaggacggttttgccttggtt

SEQ ID NO: 98379 - DNA, 776 bp, Arabidopsis thaliana columbia
cagctacattcgactcacattagggaaagctgcgccgcctgcaggtaccggtccggaattcccgggtcgacccgccagaaaagagcaaataggcggcacatcagttctcaacactcacgatggcgagaattaaggttcatgagcttagagataaatcaaagaccgatcttcagaatcagttgaaggaattcaaggctgaactcgctctcctccgtgtcgctaaagtcaccggaggcgctcccaacaagctctccaaaatcaaggttgtgaggaaatccattgctcaggtgttgacagtgatctcccagaagcagaaatctgctttaagagaggcatacaagaacaagaagctcttgcctcttgatctccgtcccaagaaaacacgagctatccgtagacgtctcaccaagcatcaggcttcgttgaagacagagcgtgagaagaagaaggagatgtatttcccagtgaggaagtacgctatcaaagtgtagtttcattctcccagctctagcttctagaaatgaattgattcagcctttgattatcggcttatgttatctcctctcttttttgtccaaccttattaattttagttgtactgaagttttgttatcacacaacctctctaaaatcattagtatttcataaatattgaatttattctgggttttgttgtctctttggtaaattttgatttttcggttgtttagagttaagggacgattgaatgaaggattgtaaacgaacatggttgatttatacggagaatttctgat

SEQ ID NO: 98380 - DNA, 635 bp, Arabidopsis thaliana columbia
tagggtttctaatctcttataacaacaccgcaaaagagtaaagggacgctagagagagctcgaagacgcaatggcgagaatcaaggttcatgagctgagggagaaatcaaaagctgatctttcgggtcagttgaaggaatttaaggcagagcttgctctccttcgtgtcgctaaggtcactggaggtgctcctaataagctctctaagatcaaggtggtgaggaagtcgattgctcaggtgttgacagtgatctcacagaaacaaaagtctgctttgagagaggcatacaagaacaagaagcttttgcctcttgatcttcgtcccaagaagactagagccatcaggaggagactcactaagcatcaggcatcgttgaagacagagagggagaagaagaaagaaatgtactttccaataaggaagtatgctattaaggtgtaagcttttatcttgatcacatcaatttttgtgtttgaatttgagctcgtgtgagtttttgctttgttttccttccttgttaaagatattaaaagctcatcttaatgaaagattgattcagaaaaacagtattgttatattattggggcagagcatcattaatgttataaaaaaaaaaaaaaaaaaaaagaagggc

SEQ ID NO: 98381 - DNA, 511 bp, Arabidopsis thaliana columbia
tgacactatagcagagctatgacgtcgcatgcacgcgtacgtaagctcggaattcggctcgaggtttccatactgatagtctgattggttctggtgggtttggagatgtttacaaagcgactttgaaagatggaagcgcggtggctatcaagatactgattcatgttagcggtcaaggtgatagagagttcatggcggagatggaaaccattgggaagatcaaacatcggaatcttgtgcctcttcttggttattgcaaagttggagacgagcggcttcttgtgtatgagtttatgaagtatggaagtttagaagatgttttgcacgaccccaagaaagctggggtgagactaaactggtccacacggcggaagattgcgataggatcagctagagggcttgctttccttcaccacaactgcagtccgcatatcatccacagagacatgaaatccagtaatgtgttgcttgatgagaatttggaagctcgggtttcagattctggcatggc

SEQ ID NO: 98382 - DNA, 395 bp, Arabidopsis thaliana columbia
aaaaaacaccatgtcttctctgatctcttttatcttccttttccttttctcattcctcactagcttcaaagcttccgctcaagatcctttttacttaaatcattattgtccaaatacgacaacttactcaagattcagcacttactccaccaatctcagaacccttttgtcctcttttgcttcccgcaacgcctcttactccaccggattccagaacgtcacggtgggacaaacccccgacctggtcaccggacttttcctctgccgcggagacctctcgccggaagtttgcagtaactgcgttgccttctccgttgacgaagcgttaactaggtgtccaagtcagagagaagctgtgttctattacgaggagtgtatactcagatactctgaca

SEQ ID NO: 98383 - DNA, 915 bp, Arabidopsis thaliana columbia
acccacgcatccacggacgcgtgggctttttgatcaatctctcattcaaaatctcattctctctagtaaacaagaacaaaaaaatggcggatacagctagaggaacccatcacgatatcatcggcagagaccagtacccgatgatgggccgagaccgagaccagtaccagatgtccggacgaggatctgactactccaagtctaggcagattgctaaagctgcaactgctgtcacagctggtggttccctccttgttctctccagccttacccttgttggaactgtcatagctttgactgttgcaacacctctgctcgttatcttcagcccaatccttgtcccggctctcatcacagttgcactcctcatcaccggttttctttcctctggagggtttggcattgccgctataaccgttttctcttggatttacaagtacgcaacgggagagcacccacagggatcagacaagttggacagtgcaaggatgaagttgggaagcaaagctcaggatctgaaagacagagctcagtactacggacagcaacatactggtggggaacatgaccgtgaccgtactcgtggtggccagcacactacttaagttaccccactgatgtcatcgtcatagtccaataactccaatgtcggggagttagtttatgaggaataaagtgtttagaatttgatcagggggagataataaaagccgagtttgaatctttttgttataagtaatgtttatgtgtgtttctatatgttgtcaaatggtaccatgttttttttcctctcttattgtaatttgcaagtgttatgtatgttgtactttatttggcttctttgtcacttagaaacggtggtctacatatggaaaaggtcttgttttgttaaaaaaaaaaaaacccacgcgtccg

SEQ ID NO: 98384 - DNA, 478 bp, Arabidopsis thaliana columbia
tctgcagttaagtggtactgagataaatgatatagtttctcttcaagaacagtttctcattacccaccttctcctttttgctgatctatcgtaatcttgagaactcaggatcaatggaggaaggtgggagtagtcacgacgcagagagtagcaagaaactagggagagggaaaatagagataaagaggatagagaacacaacaaatcgtcaagttactttctgcaaacgacgcaatggtcttctcaagaaagcttatgaactctctgtcttgtgtgatgccgaagttgccctcgtcatcttctccactcgtggccgtctctatgagtacgccaacaacagtgtgaggggtacaattgaaaggtacaagaaagcttgttccgatgccgtcaaccctccttccgtcaccgaagctaatactcagtactatcagcaagaagcctctaagcttcggaggcagattcgagatattcagaattc

SEQ ID NO: 98385 - DNA, 1300 bp, Arabidopsis thaliana columbia
  unsure (1)..(1300): unsure at all n locations
nnnnnnnnnnnnnnnnnnnnnnnnnnnnnnnnnnnnnnnnnnnnnnnnnnnnnnnnnnnnnnnnnnnnnnnnnnnnnnnnnnnccacgcgtccgaaagtagattaataactcttaaacacacaaagtttctttattttttagttacatccctaattctagaccagaacatggatttgatctatttcttggttatgtattcttgatcaggaaaagggatttgatcatcaagattagccttctctctctctctctagatatctttcttgaatttagaaatctttatttaattatttggtgatgtcatatataggatcaatggaggaaggtgggagtagtcacgacgcagagagtagcaagaaactagggagagggaaaatagagataaagaggatagagaacacaacaaatcgtcaagttactttctgcaaacgacgcaatggtcttctcaagaaagcttatgaactctctgtcttgtgtgatgccgaagttgccctcgtcatcttctccactcgtggccgtctctatgagtacgccaacaacagtgtgaggggtacaattgaaaggtacaagatagcttgttccgatgccgtcaaccctccttccgtcaccgaagctaatactcagtactatcagcaagaagcctctaagcttcggaggcagattcgagatattcagaattcatataggcatattgttggggaatcacttggttccttgaacttcaaggaactcaaaaacctagaaggacgtcttgataatggatcagccgtgtccgctccaaaagaatgagctgttagtggcagagatagagtatatgcagaagatggaaatggagttgcacacaataacatgtacctgcgagcaagatagccgaaggcgccagattgaatccggaccagcaggaatcgagtgtgatacaagggacgacagtttacgaatccggtgtatcttctcatgaccagtcgcagcattataatcggaactatattccggtgaaccttcttgaaccgaatcagcaattctccggccaagaccaacctcctcttcaacttgtgtaactcaaaacatgataacttgtttcttctcctcataacgattaagagagagacgagagagttcattttatatttataacgcgactgtgtattcatagtttaggttctaataatgataataacaaaactgttgtttctttgcttaattaaaaaaaaaaaaaaaaaaaagnnnnnnnnnnnnnnnnnnnnnnnnnnnnnnnnnnnnnnnnnnnnnnnnnnnnnnnnnnnnnnnnnnnnnnnnnnn

SEQ ID NO: 98386 - DNA, 970 bp, Arabidopsis thaliana columbia
accacgggaattcatcttcccatcctcacttctctttctttctgatcataattaatcttgctaagccagctagggcttatagaaatggagggtggtgcgagtaatgaagtagcagagagcagcaagaagatagggagagggaagatagagataaagaggatagagaacactacgaatcgtcaagtcactttctgcaaacgacgcaatggtttactcaagaaagcttatgagctctctgtcttgtgtgacgctgaggttgctcttgtcatcttctccactcgaggccgtctctacgagtacgccaacaacagtgtgagaggaacaatagaaaggtacaagaaagcttgctccgacgccgttaaccctccgaccatcaccgaagctaatactcagtactatcagcaagaggcgtctaaactccggagacagattcgggacattcagaatttgaacagacacattcttggtgaatctcttggttccttgaactttaaggaactcaagaaccttgaaagtaggcttgagaaaggaatcagtcgtgtccgatccaagaagcacgagatgttagttgcagagattgaatacatgcaaaaaagggaaatcgagctgcaaaacgataacatgtatctccgctccaagattactgaaagaacaggtctacagcaacaagaatcgagtgtgatacatcaagggacagtttacgagtcgggtgttacttcttctcaccagtcggggcagtataaccggaattatattgcggttaaccttcttgaaccgaatcagaattcctccaaccaagaccaaccacctctgcaacttgtttgattcagtctaacataagcttctttcctcagcctgagatcgatctatagtgtcacctaaatgcggccgcgtccctcaacatctagtcgcaagctgaggggaaccactagtgtcatacgaacctccaagagacggttacacaaacggg

SEQ ID NO: 98387 - DNA, 536 bp, Arabidopsis thaliana columbia
cttcttcatcgcaatctctctgatagagaaaccaacgcacaataagaaacgagatttactgtgaccatggatccaggagatccgacttcgatacttttcacaaagatcagaactttagaaccagatttcgcttccaaaatcattggctacttgcttttacaggacgtgggtaagacagatttgatgcgtttggctcttggaccagagactctcttgcagtccgtttgtctcaaagctaaatctgctttaggtctttcgtctaatggatcttcttctgcttcttcgccattgaaccctatctccagacccattaacatccaccgtcattctctctctcactctgcaccgggaaatgggttttcgaggaaccctttgtctccttcttttgctactcctggttcactcggaagtaaccctaacatgatttcgagtccgtttcaagcaagttcgtctctttttgcttctgacggtgctgctgctggtgattccactggaaacggcgatttcctcgatgagcagcaactagggaactactt

SEQ ID NO: 98388 - DNA, 750 bp, Arabidopsis thaliana columbia
  unsure (1)..(750): unsure at all n locations
cagtcattgctcctcttatcttcatattcggcatcaccaatttgggtttagcctgggtagtctccagaaatcaggcgttcacagtgtcgtctccatcatcgagaagctatgaagaaatgtggccgcaaattcaccagggcatcgtagcaccgttggtccaattccaaggggaaatgtttggccaccttaggacccaagacattcttctacacggcccctgtgacccctctcattatcacctctctcatccttcggatatgtgtgccgccagaaattcctacggagggttcgaacacacagctctcgaggtagcttgcccgtgagctgaagcagagtccagacctagaggagattttcagagcatacattccgcatagcttgagctctcacaaaccagaagaacacgagttcaaaggcgcaatgtctcgttatcaagatttcaacgcaatagcaggcgtttaaaatttgaatccaatccccaaattatctcatagatttgttttgctggttttttagaagcttttattgttatgtgtgtgaattttagggtttgtttaggattcttctttgtatgtgttccatggttgttgtaacttgtaactttgtaagctacttttaaacatcaacttgatttttcatcattnnnnnnnnnnnnnnnnnnnnnnnnnnnnnnnnnnnnnnnnnnnnnnnnnnnnnnnnnnnnnnnnnnnnnnnnnnnnnnnnnnnnnnnnnnnnnnnnnnnnnnnnnnn

SEQ ID NO: 98389 - DNA, 472 bp, Arabidopsis thaliana columbia
  unsure (1)..(472): unsure at all n locations
cacaagtcatctttgcattataactccatttgccctcctggttcatcttgttctctaccatggctgattcaaaatctggtgacacggaagtagcgcatcgctctagcgatccaagcgaaaagcgtggtggctggatcactttaccgttcatgctagttacattattaggcatgtccataacttctttcggatggggaatgaacttgatcgtcttcttgatcgaggaattccacatcaagaacatcgctgctgctcagatttcaaatgttgtcaatggagttgtcaacatgttacctgttgttgcagccatcctagctgattccttttttgggaacattcccgtcatctccacctccactttcatttctctggctggaacctctctcttgaccttaatcacatctttgaactacttgatgcctagaccgtgtgaaacggngtcaattctatgccagtcgccatcaaaactaca

SEQ ID NO: 98390 - DNA, 1251 bp, Arabidopsis thaliana columbia
atcatttcttcttcttcttcctctgctttcttcctaaagcctactccttttcaatggcgacgttaggctttaacacaaggcgaatccagacaccatcacttccgagaatccctaaaccctcttcttttactaaacccatcaaaacccatcatctcttctcctccgaaactctgttgaaacgctgccgtttcgtctctagatcgttacctgagagctcactgtcgattacaaaagaacaagaggtagctaatgaagtagaagaagatgatccaacttcagagctgagctatctggatcctgaatccgatgcggatagcatcaaagagtgggaattggatttctgctcgaggcctattcttgattccagagggaaaaagatttgggagcttgtggtttgtgatgcttcactctcccttcaagtcactaaatacttccccaataacgtcattaatagtattactctcaaagacgccattgttaccatcactcaagacttgggtgttcctcttcctgagaagattcgcttcttcaggtcacagatgcaaaccattatcacaaaagcttgcaaagagcttgccataaaggcagtgcctagtaaacggtgtctgtctctgtttctgtggttgcaagaacgttatgacactgtgtacatgcgtcatcccggtttccaaaagggatcattgcctcttctgtctctcgacaatccctttccaatgaatcttccggagaacttgtttggggagaaatgggcatttgttcaattaccttactcagctgttagagaggagatctcagattttgatgagaagtttgtgtttggtgctagcttagacttggatttacttggcattgaagtggatgagaatactctgattcctggtctctctgttgctacttcacgtgccaaacctctagcagcttggatgaatgggcttgaagtatgttcgattgaagcagacagttccaaaggatgtttgattctatcagttgggatcgctacaaggtatgtctacgcgacctataagaagacccctgtcactactgatgaagctgaagcttgggaatctgcaaagaaaacaagtggaggtttgcattttcttgcaattcaagatgacttagattctgatgactgtgttggcttttggcttcttattgatttgccaccaccccctgtttgattttccttttgataaatgtttataccatattttgccatttagtaacagatttctgaaatgcttgaatttgaac

SEQ ID NO: 98391 - DNA, 702 bp, Arabidopsis thaliana columbia
attccccagaatctctcttccctttttgtctccaaccaaaacaaaaccttaatcacctttcttcttcttcaaacagagcacaacagagacgttcgttcccactctgtcttaatctcccctgtttcaattcctaaatcgatggaaaacggtggaacaattccgggtcaagaaatcggatcagggcttcaaaaacccgttaacccagatgggtttgtgacgatcgatgttgaaagtttctctaatgtcatccacaaagacttctcttcttctagtccaagaattactttgcagaggaatgtatcgaggaaagggtctccaagaagcaacaacgagagaaaactccattttgacgcaaatggtaatgacaaggagatctcatttcctcagtccccacttagagggtcaagcacgccggaaaaggctagcaccgtgggccccacagaacatgcaggcacggccacaaccgctgccacagctgtttcagcctcgccgcttcatcagatcaccgttactacggctgccacggccgcaggaaatatgattaccgaccaacatacagaaagaaggttcggtttttcgaggaaatcgagttttaaacgctctcacacttcttggatgcttgatccgtagaaaatcgtcctcttctttgcaactttgtcaagcatgggatcaatcttgttaatcatattcacactctcgatc

SEQ ID NO: 98392 - DNA, 694 bp, Arabidopsis thaliana columbia
gccagcccgccttccgtagcttggaattcaggttcagaatggaattattttggtaggtggagggccagcccctccgaaaagggttaccacgggggccccaacaaacaatgcaggcccggcccaaccgttgccacagtggtttaagcctcgccgtttaatcaaatcaccgttactacggctgccacggccgcaggaatatgtttaccgaccaaaatagagaaagagggttcggtttttcgaggaaatcgagttttaaacgctctcacacttcttggatgcttgatccgaagaaaatcgtcctcttctttgcaactttgtcaagcatgggatcaatcttgttaatcatattcacactctcgatcagcaagtccaatcccggagatatgcctctagactaatagtaaacacacgaggagcattatatataacgcatatatatcatcgaccgacctaagtttgtggccatagaacaaaacacagtctcaccgacctacattttaaggagatgtatcagacagaagaacattacaaaaaatgaagagggtaaggttgtgataatagttttatttcgtatgattttttttaaatgaaaaaaaaaaaaaaagggcggccgccgactagtgagctcgtcgacccgggaatttatccggaccggtacctgcaggcgggccagctcttcccaaaagtgagttgg

SEQ ID NO: 98393 - DNA, 541 bp, Arabidopsis thaliana columbia
aggtgcactatagaagatctatgacgtcgcacgcacgcgtacgtaagctcggaattcggctcgggtttatgtatgggaagccggatgtgcctaaaccttctccagaagttatcgctgaggcccatgatatgctagttggttttcaaaccgaatataactagggacgcagcttgtggagttggtggtcaatgctggtgatccaaaagcttcttctttacctcgtaatgattggtacagactacgccgtagcctcgagatactcaagtcaactggatcgcctccgtcttcctttcgcattccttatgattcctttcgagtaaatttagttgctcctgatgctgatgacttccttgaggacggttcatcttgccgatatctctatccaaaacatagagacagatttggaccatgaccttcctttgcgttttcttaggccagcccacgggtgtgctctctacagatctattggtttcaagatgtgaagacctgcctttagggccgaatgggagttttgccaaaagctagatgggtttttggacct

SEQ ID NO: 98394 - DNA, 574 bp, Arabidopsis thaliana columbia
  unsure (1)..(574): unsure at all n locations
nnnnnnnnnnnnnnnnnnnnnnnnnnnnnnnnnnnnnnnnnnnnnnnnnnnnnnnnnnnnnnnnccacgcgtccgccccaactctcttttctctgtctttctctccctgcagttaccggattcctccactccggctagatctccccgttcaccgccgatgacagaacgaatcagagcaagaggacccagatcatcctctgttaactctgttcctctgattcttgacattgaagacttcaagggtgatttttcatttgatgcattatttgggaacctggtaaacgacctcttgccgtctttcctagacgaagaagcagattctggggatggccatggcaacattgctggagttgatggtttgacaaatgggcatttacgtggacagtctgctcctttgtcctctgctcctttttttcctgaagtagatggtcttttgtctctgttcaaagatgcttgcaaggagttagttgatcttcggaagcaggttgatggaaggctcaatacactaaagaaggaaagtttcaacccaagattctaaacaccggaagacactgactgagatagagaagggtgt

SEQ ID NO: 98395 - DNA, 404 bp, Arabidopsis thaliana columbia
gaaaatctctgaaaaactctcctgattcaaaagagtaagaaatctacaaaagaaaaccacagagaaaatctctactgatcagtttctctccattggtgatcgctcgtcagaaaaattgagctcgattttgtataaattgaagaaaaagaagaagatcatcaaatgcgtgatttttacttttccgttcaagtgattgatcaagggaacataagcagctagagaccacaccactcagttatttctatctcatagtgcttgtggatgttcaagctataagaatgtgctcggtggttctatgaatatataggaatgattggtgttttgaatgggatgggacaccaaattgcctaaggtttatgggtgttaatcaattactagtacgtgttatcttccgaacaaccacc

SEQ ID NO: 98396 - DNA, 552 bp, Arabidopsis thaliana columbia
ctttcttcttcttcttctagttccttgataccaacgcgtaatcctaacccttaatctacttcctccttaattaatcagaggtttctacttattatttccacttctcatctctttcaatcgcaatctgagttctggctaaagattttgtcttgaaggtgagattcattgttccgaatagagtgagaaaaagacttataagattgaaaaagcaagatgcggattttgtgcgatgcttgcgagaacgcagccgcaatcatcttttgcgccgccgatgaagctgccctttgtcgcccctgcgatgaaaaagttcatatgtgcaacaagctagctagtcggcatgtacgtgttggtttagctgaaccaagcaatgccccatgctgtgatatatgcgaaaatgcacctgccttcttttacctgcgagatagccggtagttctctttgtcttgcaatgtgccatggcagtacatgttggtggcaagagaacacacggtcggtttcttttgctgagacagagaatcgagtttccaggggataagcctaaagaaaacaata

SEQ ID NO: 98397 - DNA, 457 bp, Arabidopsis thaliana columbia
gtttccagatgccaaaaacattcaagttcatgggtcacattcaggagctgtgaagatggctgttatggaccagcaagctgcagttgcagaaggtcgcttgcttaaactcccattctcaaccatatatgaatatctccagatgttgcggttgattgctacgatattgaaagatgtcggtccatgttcgattttttatcttgctgctgctgtatctgacttctatgtgccatggttaagcatgacagagcacaaaatagaatcaggatctggtcctttggacataagactagctcaagtccctaaaatgctttcaatcttgagatcaaattgggctccaaaggctttctgcatatcattcaagcttgagacagactcaaagattttgctagagaaagctacaaaggctttacaaaaatacaaagtgcacgcagttgtagcaaatgaactattaacgcgt

SEQ ID NO: 98398 - DNA, 1357 bp, Arabidopsis thaliana columbia
  unsure (1)..(1357): unsure at all n locations
gggccgacggtatcgataagcttgatatcgaattcgcggccgcaatcttcttcgtgtggtttcacaggattgaaatgagttcgatctctggattggtggaagatgaaatcagttcgtttttcgaatcgtctccacctctgaagaacaaggaagagatcgtagccaatcttaatcagttcattgagctgaattcttcgtgtcaaggagggatgaggaggattgtatgtgtgacttcaggtggaactacagttccattggagcaacgatgtgtaagatacattgataatttcagctctggaaatagaggtgctgcttctactgagaatttcgtcaaggctggatatgctgtgatatttctctataggaggggaacttgtcaaccgtattgccggtatcttcctgatgatccattccttgaatgttttgagtttccagatgccaaaaacattcaagttcatgggtcacattcaggagctgtgaagatggctgttatggaccagcaagctgcagttgcagaaggtcgcttgcttaaactcccattctcaaccatatatgaatatctccagatgttgcggttgattgctacgatattgaaagatgtccggccatgttcgatgttttatcttgctgctgctggatctgacttctatgtgccatggttaagcatggcaagagtctcatcatatccctgtgattatggctacacaattcttgcgtctgaaaattgacttcttatatatttgtgaaaccagacagagcacaaaatagaatcaggatctggtcctttggacataagactagctcaagtccctaaaatgctttcaatcttgagatcaaattgggctccaaaggctttctgcatatcattcaagcttgagacagactcaaagattttgctagagaaagctacaaaggctttacaaaaatacaaagtgcacgcagttgtagcaaatgaactattaacgcgtaaggaggaagttgtggttgtttcaagtagcggtaatgttgtggtgagacgtgatagcaataagccggaatctatcgtagaagataatctcattcgtctcctcgtagatcgacattcaacatacatcaaagaatctctcacttgatccccaaattcttctacgtcaagaaaagttccaagtgttcgatgtgggatacgtgtaattgtgtatgagtgatgacttggaccataaattactcaaataattttcacactttcttatgtttttgacatgttgggaatatatgaatcctagaaatccgaaaaaaaaaaaaaaaaaaaaaagggcggccnnnnnnnnnnnnnnnnnnnnnnnnnnnnnnnnnnnnnnnnnnnnnnnnnnnnnnnnnn

SEQ ID NO: 98399 - DNA, 740 bp, Arabidopsis thaliana columbia
aatacgactcactttagggaaagccggtacgcctgcaggtaccggtccggaattcccggttcgacccacgcgtccggaatccattgtttccatttgaagaaaactctaactttctcgttgaagctttgagctctctacctctttatctccggagatgtataataacatgggacctcaaccggggatgccaagacctccaggaaaccctgagcctggtccatttggtaatcctttcactggagctggctcgggttttatccgtggtggtttgggagcgtatggggagagaattttaggatcgagctctgagtatgttcagagcaatataagccggtacttctctgatccgcaatactatttccaagtgaatgatcaatatgtgaggaataaactgaaggttgttctgtttcctttcctacaccggggacactggaccagaatatctgaaccagttggtggtaggctctcatacaagcctccaatatatgatatcaatgctccagacttgtacattccctttatggcatttggtacctacgttgttcttgctggtctttcattgggacttaatggaaagtttacaccggaagctctgaattggctgtttgtgaaaggattggttggctggttttgcaagaatgctcctggaagtacacttctatcacttggtagtggagaggcaccattactagatattgtggcatacggaggggatgcttttgctggtctgggtcttgcgg

SEQ ID NO: 98400 - DNA, 466 bp, Arabidopsis thaliana columbia
cacaaagccacgggttttctctcatgtcgttttccacatacattcgtcttttcataggatcaatctaaaatcacgatttatactttctctgtttacattcacgtttccgaggagaaaagtctcgatcttctggatccggggtttggtttggtttggggttgactcggttttgactcgggacaagtcgtctcgtgagatggatgtctctcgtttagtagtatcgctttgagagtctgtctttctgggttcaatagattcgtatagtttcgcttagaaacacgcacaaaaagatgtcgttgaagcatcatcacagaggattagagctctctgcttcgaagagttttgtctcaaagaaatggactttatttctctgtatcggtttcttctgcgcaggaattctcttctccgacagaatgtggccagagcctgaatccaatgttgtatcaagggacacagtagcatcaga

SEQ ID NO: 98401 - DNA, 522 bp, Arabidopsis thaliana columbia
ggtacactctagaagcgctatgacgtcgcacgcacgcctgcgtaagctcggaattcggctcgaggcttaagaggaattaggagttggccggcgaattggagaagtacgacggcgtcaatgacgacgacggagagcgttagaaaggtaccgcaagttttaacagtggcgggatcagattccggcgccggagctggaattcaagccgaccttaaagtctgcgcagctcgtggtgtgtattgcgcttccgtcataaccgcagtcactgctcagaacactcgaggagttcaatctgttcatcttcttcctccggaatttatctctgaacagctcaaatccgtcctctctgacttcgaattcgacgtcgtgaagactgggatgcttccttctactgagatcgttggagggttcttcttcaaaatctatcaattttcccagtcgggcgcttttggttggtgatccctgggaggggttctaccaaggggcacggttttggggtggtcttctattttctcttatctttaa

SEQ ID NO: 98402 - DNA, 982 bp, Arabidopsis thaliana columbia
  unsure (1)..(982): unsure at all n locations
ccagctctatactactcacttagggaaagctggcacgcctgcaggtaccggtccggaattcccgggtcgacccacgcgtccgggctcatttctcagaaacaactcaaacatgggttccttcgacttgcctcacagttcatcgttcaagggagaaagtgaaatatttcttcggaatgtgttcgagaatatattgaaaacgtacctaaggaagaacccgacggcgaagacaatatgggaactggttcagtcgttggacaacgaaaagatctgctacgaccacttcactttcaggacactaaaggtcgatggttatggaatagactccttgtcgagttttttcatggcttatggatataaaattggtggtggacttgattttcccaagaagaaactacgagttctttggttttctccacctgatgttcacgttcctaatgatggtcacggtctaggcaacggccctttgccgcgacttgttatagctgaggttcttgtggacgaactaagccctgaatcacaggggataataaggaagtatttgaaacaagaaggtggcaagcaagcggttctttctagtactttggggtctttaatatgggagaagcctacatggaccgacttcaagcagcttgccaaagaaagcgaatttgcggcatggacgcttatccacggctacacaatgaatcatcttgcttttgcggttcatcgattcaaacatcgtttcagtgacatcaaattcgtcaaacagcggntttnaggnaaagggnttcaaactcaaccagtnacggngaaatcctcaaagtggggcaagnttggcttctatttcaagtttcatcgtnctcgaaaagngttccgggaacattttcaggtggggacctnnacaatcccaggttaancattnattccctagggnaggtttcngngtaaaggtgnccnttatggccaagttnttgcggaggtttactgatccncccggatntna

SEQ ID NO: 98403 - DNA, 987 bp, Arabidopsis thaliana columbia
  unsure (1)..(987): unsure at all n locations
nnnnnnnnnnnnnnnnnnnnnnnnnnnnnnnnnnnnnnnnnnnnnnnnnnnnnnnnnnnnnnnnnnnnnnnnnnnnnnnnnnnccacgcgtccgattaggggataataaggaagtatttgaaacaagaaggtggcaagcaagcggttctttctagtactttggggtctttaatatgggagaagcctacatggaccgacttcaagcagcttgccaaagaaagcgaatttgcggcatggacgcttatccacggctacacaatgaatcatcttgcttttgcggttcatcgattcaaacatcgtttcagtgacatcaaattcgtcaaacagcgtcttgaggaaaagggattcaaactcaacagtgacggagaaatcctcaaagtgagtcaagatggtctactatttcaagtttcatcgatctcggaaaggcttccggtaacatttgcagatggagtaactgaaacaatcccagcttcatacattgaattcactcagcgtcaagttcttccagagttcaaagatgtgccgcttgatgagatcaaagaatttcatagacgtgaagcttttgaactcgataacgccaaccacgtaatggaaagcacccgtttcacaactaaattctagaaccagacttgtcttgctcgacttagtatatgccaaatttgtgcaactatatatgtgagtgtgtgtttgtgtgcaatctttccatatatatgcatgtgtgtatttgcgatatctttatgttgttattttactgtgaagggacaatgtaagcatatgttatctctcatgatggtaattgttgattagagtgaccaacttgtaaaatggatcacatgattgacgaatcatgggaaataaatgtattttgtgattgaatatgtatatttgtgaaaaaaaaaaaaaaaaaaaaaagnnnnnnnnnnnnnnnnnnnnnnnnnnnnnnnnnnnnnnnnnnnnnnnnnnnnnnnnnnnnnnnnntgtcctaaa

SEQ ID NO: 98404 - DNA, 563 bp, Arabidopsis thaliana columbia
aatacgactcacttagggaaagctcgtacgcctgcaggtaccggtccggaattcccgggtcgacccacgcgtccgcttctctttctcttagcatactctgctcttcctctctctgttgttctctgttccaaaggctttgagaaaaaatggagttcgagaaccggtacggacttgcaacgtcgcagaagtacgactgtctcttgttcgatttggacgatactctttatcctcttagctccggaatcgcaagagaatgtgggaacaacatcaaagattacatgaccgagaaactcggtatacctaaggacaaaatcgtcgaattgtctgatcttctatacaagaactatggaacaacaatggctggtcttagggcgatcggatatgaatttgactacgatgagtaccacagcttcgtccacggtcgtttaccctatgacaacataaaacccgaccttgttcttcgcagcctcttgcttagcctccctctccgcaaagtcatctttaccaacgcggacagagttcacgcggccaaggcgttgaagaagttgggattagaggattgt

SEQ ID NO: 98405 - DNA, 407 bp, Arabidopsis thaliana columbia
atctctgtctctctctctctctttctctctgccagcgaacatccattggagctcctcactatacggcccaagagatagagggagagagaagacatcataattcccaaacaaaagactttgggtataaaattgggtttattgactttgtgaaacctacccagaaaatctaccaactgtctcgaagtctcgctcctctttcttgagacgggagagagggagggaagaacactaagaagatgaagaagattctagaaagatcaatggaaggttcagggacatggcaaggcttggtgctcgttggtattgtcacatggatctgtgcttcttcttatcttaaatttactcataaatttagatctcgcttacaaccatgggtcgctcgtcaagtcgttggtggtgtccctctc

SEQ ID NO: 98406 - DNA, 422 bp, Arabidopsis thaliana columbia
tagtttcaatagcaaagatagaaaaaagaaactttatttctcttagtaatacaataatccttatagaacgggtcaagcaagatatcttttttgtttgtttcccttgttaatcgttataaacttgtttctcaataaaacttgagtttttaaaaatccagtcttgcaaattcatcgacgatgttagatccttcttctgctaaatccttcaatacccatttgtgttttccgagtattcccaatgatgatcactcagattccggtgtctgttcgcctactttgtggagaaccagtcccccgaagagtcctcctccttttcaccggccggaagattactggagtctttcgccggattctaaagcacaggctattgctcgtggtcaacgggagcttatggaaatggttagtaagatgcctgagtcgtg

SEQ ID NO: 98407 - DNA, 510 bp, Arabidopsis thaliana columbia
ctatgacgacccatgcacgcgtacgtaagctcggaatcggttcgaggctggcacacacggtttacagatgatggacacgcacggacgactgcttgtagtgctgggttatggactatggccatcgatggttataatctcagaaatagtccaaacattcatattggcagatttctgctactactacgtttttagtgttggcgggggccaccttgttctaaggctcccatctggggttgtgtaagttctaaaggaaaaaagatatgacccattgtgacgaaatttgttacacgaagatagaatctagcttggggaaacctgagaaaccctcgggtacctctcaagtacccccctaggccaaggcccaaattttattaaccggggtgattattttgggggagggcataatcaaaaacagtccctgggatattaagaacagattgtttcccacgcattggggccaaataaaaaaaaaaaaaagggcggccccccacttaagacccctggacccgg

SEQ ID NO: 98408 - DNA, 535 bp, Arabidopsis thaliana columbia
  unsure (1)..(535): unsure at all n locations
atgatctnnnnnnnnnnnnnnnnnnnnnnnnnnnnnnnnnnnnnnnnnnnnnnnnnnnnnnnnnnnnnnnnnnnnnnnnnnnnccacgcgtccggaaaatccattattttgtttgaccaaaaaaaaaaaaaatcatttttgtgtgcaataatggcgatgatcataggcttacttgaaatcttcatcgcattcattttcttctttgtctaccagtgtttctcgctccacaagaaaactccaaagcatatggtcatgaactggccggtccttgggatgcttccgggtgtgctcttccaaatccctcgtatctacgactttgttacggaggctcttgaggcagaaaatatgacgggttgtttcatagggccatggcttagtggaacagacatattgctcactgttgacccggtgaatatccagtatattctaagttcaaacttcgtgaattaccccaaagggaagaagtttaacaagatctttgaattcttgggagatgggattttcaacgttgactcgggcttgtgggaggatatga

SEQ ID NO: 98409 - DNA, 492 bp, Arabidopsis thaliana columbia
tgacgtcgcatgcacgcctacctaagctcggaattcggctcgagtggtgactctgatttcgaaattgatgatgtgtctgattctgagccggaagatggggaagatgatgagtatgaccagctgccaccatttaagcctcttcgaaaaacccaacttgcaaagctctcaaatgaaccgagaaaggcatatttcgaggagtatgattaccggggtaagctcctgccgaagaagccatggggagagggatttaagagggtggaagaaatggagaaaaaccggaagaagctgggtgaaagtgagtttgggttttccgggagaagaagatgatccagaaaaccggggttcaactgtggtggcctgttcatttcccgattttggtttggccacctcatttgatagggaatacctaacttaaccattccggatttctgaaaccaacttcacacttcttaacaagccaatggtggattccccagggtgggaaccttgact

SEQ ID NO: 98410 - DNA, 922 bp, Arabidopsis thaliana columbia
  unsure (1)..(922): unsure at all n locations
tgagaaatcgcataaacattcgattaaagcaactnataatcatcacaagctaatatttntcccttccaagaaagtgtcagatgagtctgactcactagagaagagtggtttgacagatgagcttgaggaacctcaaaaacaccttggatatttgtttgatggaagtcagaatagtaagaagaggattagagatgattctcctccggctgttgaaagtctcatcaaagctgcacctgtagcaggtaaacctctacggattagaatggtcttcaaaaaaccaaaggaggaagttcctactctgcctagagaggctgttgtttgctccactacagttgcaaagtcgctcagtcaccaagatgtcataacaagttctatctcaagttcaaaaacatccgagcttgaaaagaatctgccgtcaacatcaatagcggcaatagatgaaacagagaagagaaagaaacccagatctagcaaagaagatcaatacaatgcattgtttgatggttggactcctccttccatgtgtattgctgatgcatcttcaaatgacaatggtgattattggctatttgggaacaagacgcaagaggtgcttaagcccaaagcagcagtcaaggttgatgatgacacgatgatgagaccgggagattcatcttggcctagagctcaatttttgtctgaagttgggatttattctttaccttatactgtcccgttctaatgctcgattctttttgttctagctttagacttagcttgtacagtgtttgactgtttgtaacaacaattctaatctaacccgattttgatacatcaaaaaaaaaaaaaaaaaaaaaaaaaagggcggccgctctagaggatccaagcgtacgtacgcgtgcatgcgacgtcatagtcatctatagttcgcctcaatcagtcg

SEQ ID NO: 98411 - DNA, 1607 bp, Arabidopsis thaliana columbia
  unsure (1)..(1607): unsure at all n locations
tgatcctgccagcgtcnnnnnnnnnnnnnnnnnnnnnnnnnnnnnnnnnnnnnnnnnnnnnnnnnnnnnnnnnnnnnnnnnccacgcgtccgattcaaaattttacagagaggaagaagaagttcccgacacttgtgagagactataaaagtatacgatctcctcctctcgctctcttcagatcacaaagttttcgtttttagggttctctcatcgatctcggtttgtgatcttcttcttcatcaatggcgtctagtgataaacaaacaagcccaaagcctcctccttcaccgtctcctctccgtaattccaagttttgtcagtcaaatatgaggattttgatctcaggaggagctggattcattggttctcaccttgttgataagctgatggaaaacgaaaagaatgaggtgattgttgctgataactatttcactggttcaaaggacaaccttaagaagtggattggtcatccaagatttgagcttatccgtcacgatgtcacggagccacttttgatcgaggttgatcagatttaccatcttgcatgtcctgcttctcctatcttctacaagtacaaccctgtgaagacaatcaagaccaatgtgattggcacactgaacatgctaggtctcgccaagcgtgttggagcaaggattttgcttacctcaacctcggaggtatatggagatcctctcattcatccccagcctgagagctattggggaaatgtcaacccaattggtgttaggagctgttatgatgaaggcaagcgtgttgctgagaccttgatgtttgactaccacaggcaacatggaattgaaatccgcattgctagaatcttcaacacttatggtccacgcatgaacatcgatgatggccgtgttgtaagcaacttcattgcacaagcactccggggtgaggcattgactgttcagaaaccggggacacagacccgcagtttctgttatgtctccgacatggtggatggacttatccgtcttatggaaggcaatgatactggccctatcaacatcggtaacccaggtgagttcacaatggtggaactggctgagacggttaaagagcttattaacccaagcatagagataaagatggtggagaacacaccagatgatccaagacagaggaaaccagacattagtaaagccaaagaagtgttgggttgggagccaaaggtgaagctcagagaaggacttcctctcatggaagaagatttccgactaaggcttaacgtcccaagaaactaaaaccacaagaaaacacagacggttttgagttcacgagagttgtcagctgttgagttatatgatgatgctattatactacaaagtggtgggtttttgtttggtctcatgtgttattcatattgcttttgttcgtagaaaaataagttgggaatgggtctccttgtgaggaatggctcttctttgtttttcagtatattgtggtatggttcctatttgtgtggttttaatgaaatttgttcacttaatttgctcatggaattacagttttaaaatcgttttacagtaactaaaataaaaacaattttttttaaaaaaaaaaaaaaaagggcggccgct

SEQ ID NO: 98412 - DNA, 520 bp, Arabidopsis thaliana columbia
atgcacgcgtacgtaagctcggaattcggttcgagagcggttgtaagctgacagtaatagtgggattgagattggtcgcactataaaaaagtttcccttgttgactccaagggagtatgtattagcgtggaaattgtgggaggggaaggataagttctactgtttcatcaaggaatgtgatcaccatatggtgcgcgcaacagaggaagtatgtacgtgtaagttatttcacatctgggtggcgatttaggaaagttcctgggaggaacgcttgtgagatacacatggttcaccaggaggatgctggattaaatgtgaaatggcaaagttgctttctaagaaggctatggaggtacttttggtaaatggaaaatgcacttcccaaggacattggcacccatcattggacccagggcccaccatatcttgtggaagcctaatggaaaaaattcattggaattaaaaggcaaccaaccactttccaacttcttgggaactacaacagtgggtgccccccggg

SEQ ID NO: 98413 - DNA, 521 bp, Arabidopsis thaliana columbia
ggaaagctggtacgcctgcaggtaccggtccggaattcccgggtcaggccacgcgtgcgaagaaaagagtctcagcagcatcagctcgtccttaaatctgatccatcatcgtcactttctcccggcgaattccgttttatcgatttaagtaacgagatttgtgcaaagatgactcaggacgtggagatgaaagataacaacaccccttctcaatcgattatctcttcttctacctctactatgcagaatttgaaggagattgcagcactcatcgatactgggtcttacacgaaggaggttcgtcgtattgctcgtgctgtgcgtctcactatagggcttaggcagaaactcaccggctctgtgctctcttccttcctggattttgctttggttccaggatccgaagctcactctcgcctctcttcctttgttcctaagggtgatgaacatgacatggaagttgatactgcctcatcggccacacaagctgctccatctaagcatttacctgcagagctcga

SEQ ID NO: 98414 - DNA, 519 bp, Arabidopsis thaliana columbia
ggtgcactctacaagactatgacgtggtacgcacgcgtacgtaagctcggaattcggctcgagttccgttgctggggagatcccggaatctgatcaagaacctggcagtaataataatcacaatgatttaccagaaataatacggggggaaagagaaagatctggaaatactaacccgtgaattggacgacaaagtcaggttcaggcagaaaccagttgagaggcccgggtctggggcgggtagaacccggacatattcagaaagaacacattcccgggctggctcaattgatgaaaccaggagtgttgtatctacagagagacccagatcacgtggggccctcgatgcctgggtttagaccaccccatgagcagcgaagaacctttcagggaaccaaggagcgcggtttcttcagcaacaggtcttcctcttaggaaggtgtggttagaagaaaccaacaacacccaagtgggggtattttttaactactcctcccagttccaaattttgaaaaaaat

SEQ ID NO: 98415 - DNA, 528 bp, Arabidopsis thaliana columbia
taggtgcactatagaagagctttgacgtcgcatgcacgcgtacgtaagctcggaattcggctcgagttgtaacggtaaccaagccgacatcaagatacagtttcagcttgacttgagtaagattatgaggggtgaagatccacggacaaccttgatgataaaaaacatcccaaataagtatacccggaatatgctcttagctgccatcgacgagaaaaacagtggaacttatgattttctttatttgcctattgatttcaagaataaatgtaatgtggggtatgcatttatcaatatggtgtctcctaaattcaccattgcattgtacgaggcctttaatggaaagaaatgggataagttcaacagcgagaaagttgcttcattggcttatgcacgaatccaaggtaaagctgcgcttattgctcactttcagaactcaagtttgatgaatgaagataggagatgccaacctattgtctttgatggatcagaatctaaatatccgatcatccgggagaattcgcagct

SEQ ID NO: 98416 - DNA, 488 bp, Arabidopsis thaliana columbia
gacgtggtacgccgcgtgcgtaagctcggaattcggctcgagctcgagccgaatcggctcgaggaacggttacttgaacaattgagtcagatcgaagcgtcaggtaacggaatcggtagatctgggaatccaccggcgtcgaaatcagcgattgaatctttacctagagtcgaaatctcagattgtcatacgaaagcagaagctaattgcgccgtgtgtacggaggttttcgaagccggaatcgaaggtcgtgagatgccgtgtaaacacatatttcacggtgattggattgttccatggctttcgattcggaattcgtgtcctgtgtgtagatttgagttaccttcagatccaatcccacggagtaatgaagaagaacaccccgttgggataacgatttggagaatacctggaggggggttccctgtcggtaggttaaaccccggaagaggaaaaagagaaaagattttcccggggggtttgaccga

SEQ ID NO: 98417 - DNA, 565 bp, Arabidopsis thaliana columbia
  unsure (1)..(565): unsure at all n locations
actatgacaccgcatgcacgcctacgtaagctcggaattcttctcgagctcgtaataatttcggaaccaaaagaacccaaaactagaaaacagagaagaagaagaagaagaagaagagagcaaaaattggtgatgtcagcttcccgatggacgttgatggatctaccatcgtacctgtcgtcatcgtgggcattccggtggccggaggtgaatctttcatccctgagctctggttggaacatgagattggtgtccttgtcgggtgatctctccatagttgatgatcttttgtggagttttgtctcaatcattgaatctttagctatcactgctacggtctgttgcttcttcttgttttgggggtggaccctctaattcccttttttcattatttaattttccgaattttattgccaactgaaatgtgggtaaaaaaaaataatcaattaaattcgagacctttttaggcgnaaaaaagaaaaaacgacaataccctcactcttaataaggaggggccgggccaccttcttgggccccccgcggccctcaaataatttccaggcgg

SEQ ID NO: 98418 - DNA, 1638 bp, Arabidopsis thaliana columbia
ggaatttcggatcgtgtctctctctgtttctttgtttcaatccgatttcgaatcaagccctttacttgtgcaccttcaagatttcgttttttccagcgcccagaatgctccgggtgaccaacatttgttcctgattcatttcctattggttcgtattgtctgtgcacacaagagaaatttcaagaagttgttactaaaagagaggccacaagtggatattgtctttgttatcaagtgttagtacagaaaagtggtgagaaagtaatatggctgataccagtccgagaactgatgtctcaacagatgacgacacagatcatcctgatcttgggtcggagggagcactagtgaatactgctgcttctgattcgagtgaccgatcgaagggaaagatggatcaaaagactcttcgtaggcttgctcaaaaccgtgaggcagcaaggaaaagcagattgaggaagaaggcttatgttcagcagctagagaacagccgcttgaaactaacccagcttgagcaggagctgcaaagagcaagacagcagggcgtcttcatttcaggcacaggagaccaggcccattctactggtggaaatggtgctttggcgtttgatgctgaacattcacggtggttggaagaaaagaacaagcaaatgaacgagctgaggtctgctctgaatgcgcatgcaggtgattctgagcttcgaataatagtcgatggtgtgatggctcactatgaggagcttttcaggataaagagcaatgcagctaagaatgatgtctttcacttgctatctggcatgtggaaaacaccagctgagagatgtttcttgtggctcggtggatttcgttcatccgaacttctaaagcttctggcgaatcagttggagccaatgacagagagacagttgatgggcataaataacctgcaacagacatcgcagcaggctgaagatgctttgtctcaagggatggagagcttacaacagtcactagctgatactttatcgagcgggactcttggttcaagttcatcagggaatgtcgcaagctacatgggtcagatggccatggcaatgggaaagttaggtacactcgaaggatttatccgccaggctgataatttgagactacaaacattgcaacagatgataagagtattaacaacgagacagtcagcacgtgctctacttgcaatacacgattacttctcacggctacgagctctaagctccttatggcttgctcgacccagagagtgaaactgtattttggtcacatgtcagctgtacaaaatccatatggacacaaaaccaggagagactattaatcaacacttgtcagattcttcttaccaaatccatcaacaaataagcaaatttctgggaaacaaaagactctttgtatgtaggtttcttctacatggttgtggtaattcatgttgttttagttgtagtcatcagtttttaatttagcatttgaaaagttcaatgttgtttatatagcatcttcgattatcttagaaaggttattgaattttgtttttttttgttacttttgtgtgtggtaaaggtgttttaaccttgcaacttctgtactgtaatcatttaacaatattaagatgttctatttgagttttgt

SEQ ID NO: 98419 - DNA, 501 bp, Arabidopsis thaliana columbia
cggacgcgtgggaagaaaaccaacatgaatccaactcaaaatcgaagaccgtgaagagcttgaacaatcccgcaaatctcaaccatccaccaccacaaccaccgcaccatcttcctcctccgccgcctcctctctccaccacctcatagacccaaaacacaaaaacccttcctccaaatccgaccgaatcggtctctcttaaaacactccatggaagtcgaagtcaagctccgtctcctaaccgccgctgctcatctccgtctcaccactctcctcactccataccacctcaaaacccttcaccaacgcaacaccttcttcgacacacccaaaaacgacctctctctccgccgcgccgtcctccgtctccgcttccttcaaaacgccgccgtttccgcggcttctccttctccgccgcgttgtatcgtctctcttaaagcgaagccaactctagctaatgggattagtcgtgtggaggaagatgaagaggagattgagtat

SEQ ID NO: 98420 - DNA, 526 bp, Arabidopsis thaliana columbia
  unsure (1)..(526): unsure at all n locations
aggtgcactatagaagattatgacgtcgcatgcacgcgtacgtaagctcggaattcggctcgagcagaaagttgaaaacttgggagatgggtttctcttcggttgctggtcaaattgcgagatacattgtgacgatgacaagtactggagctattctttttgattggggttcaattatcagggtggagaatagttcgatgaactcatttggtttcggtattagttgggcttggtggaatttatcatttggaacccatgacctggtgctaacattgggtttgggaagatcattatccgagcccggcccacgggattggttgttattaaccggaaagcactacggggactagggaaaagctcttgctagagaagttccttctctctggagacagagtcattgtcacatctcgcagntcctgattctgttgatatgactgtcaaagagctagagcaaaatcttcaagagattttgagtaacgctagcgagtcagctagaaagaaactgaatgatgctaaggtagtggga

SEQ ID NO: 98421 - DNA, 405 bp, Arabidopsis thaliana columbia
gttctagatcgcgagcggccgcccttttttttttttttttttttttccgttctgttggatttggttttaatttttggtaggtgtaagaaatattaaaactcaactttggtttatggactaaattttttttgttcgatagttggtatataatgaactcagcatacagcattcctagttctttgtacattttttatcttataaaccatagtctttttggtggtaacacatgtatagagtaaggaaattgtctagggcgacggagaaattgagcaagacaatgttgaatggtgtgggagtggtgagtggctcggtgatgggtccagttgtaaagtcgaagccagggaaagcttttttctcaatggttccaggggaggttctattggcttcacttgatgctcttaataa

SEQ ID NO: 98422 - DNA, 798 bp, Arabidopsis thaliana columbia
  unsure (1)..(798): unsure at all n locations
tcaggaggtacagggcatatcattagacggatgttttaaatgcagtaatgcttaccctaatcaggttcataaaggaggggaatttatgattcgcaaggctaacaaaaagaatggtgcctcgtcaaaaagaaatgctgccacaaacaagaatcaaatcaacaagaactttcaacgagtaaggaaattgtctagggccccggagaaattggccaacccaatgttgaatggcgtgggagtggtgagtggccccggtgatgggtccagttgttaaaagtcgaaagccacgggaaagccttttttcctcaattggttccaggggaggttctatttggcttcacttgatgctccttaatgaattacctaggccgcggctgaagcccgcaggagagaccaaactctttgctgcgacgtccaaagctacttacaaggaatgggttagtgagaggttaggtgagagcgcgggagaagctacgaaagatgtactaggcacggttgggcacgcagccggccctgcgtggaacgtcttcaatatccgcaaagctttctctccttcctcttcagtcacattggggatcctcaaaaacgcttcacgaaagtgatatttggtgtttgtatttatttgtgggcagagaccatatgttaaattaagtcagaatatgcaaatgtgtaatcttgaatctcaaacaaaggaaacctctcttctttnnnnnnnnnnnnnnnnnnnnnnnnnnnnnnnnnnnnnnnnnnnnnnnnnnnnnnnnnnnnnnnnnnnnnnnnnnnnnnnnnnnnnnnnnnnnn

SEQ ID NO: 98423 - DNA, 375 bp, Arabidopsis thaliana columbia
aagacataattttctctgttttcctagctctctcctctcaaattcttccattgctctctgttttggcaaatcgtgaactgccacgtctttaaggcatcagtgaagcaaagatggactttgacgaggagctaaatctttgtattacgaaaggtaaaaatgttgatcattcttttggaggagaagcttcttccacgtccccaagatctatgaagaaaatgaagagtcctagtcgtcctaaaccctatttccaatcctcttcttctccttattcgttacaggctttccctttttctctcgatccaacacttcagaatcagcaacaacaactcggatcatacgttccggtacttgagcaacgacaagacccgacaatgc

SEQ ID NO: 98424 - DNA, 582 bp, Arabidopsis thaliana columbia
  unsure (1)..(582): unsure at all n locations
gaacatagcaagaaaagctgaactcgaaagcgctgcggttgatggaacaatggtcactctcgacttaacatctggttcttcagtcgagataccggtaggggcaagatttatcgggataccgggaacagaaactgcagagaatccacgaggagtcatggtggaggtgtattggcaacaagacgagtcaggntcattgtgcatctcaggacactccacagagatgccaattcctgaaaacattcccgtgacagatccggtggcaccaggacatggcggagtaaacttgttgggacggagaggacgaagacaagttcagggaattgtgattgatcctgagtttgctacttttactacaagcggttccacttcttcgcgacgtttttctagaagcggttcttcccgacgtttttcatcgtgaattgaactataatccgcccgcatacacatacactcacagttcttaacttaacggcttgcactctacacgtttttctggttcgttgttgtaggtttatacgaagaaaatcataggcgtgtttatttgacattgtgttttacgtaattatgatgtaaattagactg

SEQ ID NO: 98425 - DNA, 486 bp, Arabidopsis thaliana columbia
gtgattgtgaacatgaaaggccgagaaaacgagttcagaaatattgctattgagctcctcagacgttttcagactgaaataggagagcttggtactgaggagagcaaggactttcgggacagaaatttgtttattgtcttggtgccaaacaaggaagttattcggaaagtgcaagaaccacccccaaaaaagaagaaaaagccagcggatgataaagtttcagcagcaaatataactgcaaccccccatatatgatgcggaattgtctgatgtaaaatgttctgtgactttgataaatttctggatagtttcttttttaatatgcttcttgcatttccatgtaattgtaaccatagaaatagattatttgaatgaaaaaaagaaaaaaaaaaaaaaaaaaaaaacccaaaaagcggccgctctagaggatccaagcttacgtacgcgtgcatgcgacgtcatagactctctagtagttgcacctaa

SEQ ID NO: 98426 - DNA, 419 bp, Arabidopsis thaliana columbia
cgaagagccaatatcatcccaaccttgtaaatgaagatgaaactgtgacaagatcagatcgtgagattttcaattccttgctctgtaaagtctcttcttcgaaccttcaagatcaaaaatcagctgccaaggagctaagacttctgaccaggaaaggcactgagttccgagctctttttggcgaatctccggatgagatcaccaggttggtgaatcccttgttacacgggtcaaacccagatgagaagcttcaagaagatgtggttacaacattgttgaacatatcaatacatgatgacagcaacaagaagctcgtctgcgaaaatcctaatgtgattcctctccttatcgatgcattgaggcgtggaacagtcgccacgagaagcaatgcagctgcagcgatcttcacttctgtcagc

SEQ ID NO: 98427 - DNA, 422 bp, Arabidopsis thaliana columbia
aaaaaagattcttcaaaagagcaaaacaatcaatggagagagcaaagtcgaggaagcctcatatcatgatgataccatacccacttcaaggtcacgttatcccttttgtccacttagccatcaaacttgcttctcatggcttcaccatcactttcgtcaacaccgactccatccaccaccacatctccaccgctcaccaagatgacgccggtgacatcttctccgccgctcgcagctccggccagcacgacatacgttacaccaccgtgagcgacggcttccctttagactttgaccggtcactgaaccatgaccagtttttcgaaggcattctccacgtcttctctgcccacgtggatgatctcatcgccaaactctcccgccgtgatgatcctcccgtgacttgcttgatcgccgacacg

SEQ ID NO: 98428 - DNA, 514 bp, Arabidopsis thaliana columbia
taggtgacactatagaagtatctatgacgtcgcatgcacgcgtacgtaagctcggaattcggctcgaggaagctcgatgctatgttgatcgatatgcttgacgccttctccgatactgagttctggtacactgatcgcggcatagttcttggtgattgtgacaaggggtcttacggttctccagcttccgttaggcaggaggacaagtggtggctgccttgccctaaggttccgcctaacggtttgtcagaagaggccaggaagaaactgcagcagtgtcgggactttgctaaccagattctcaaggctgcattggcaattaacagtggcgtgcttgccgaaatggagattcccgacccttacttggagactttgcccaagagcgggaaggaatgtcttggagagatcatctaccagtacttaactgcaaacaagttctctcccgaatgcctcctggactgtcttgatctctcatcggaacatcagactcttgaaatcgccaaccggattgagg

SEQ ID NO: 98429 - DNA, 503 bp, Arabidopsis thaliana columbia
aatacgactcacttagggaaagccggtacgcctgcaggtaccggtccggaattcccgggtcgacccacgcgtccggtcgtacatacaaacaaagagtggtgcacctcgtcaactcgacttcggacgagtctttgttatgtcaaggtctggctttgaatgatgacttgcagcgtgtcttaaccaattatgaagcaattgcttctggattacctggaacttcttctcagatcgagaagcccaagtccgagacaggaaaatcccttgttgatgttgatggtccacttattgatacaggggacagcagtaatcaggcgaacggagctacatcgagctctggtaacggggttctaaatcagttggccctccctgcaccacctgtaactaatggttcagccaattccaaaatagacctcctcagtggcgatgatcttgcccttgttcctgttggacctcctcagcccagcaagtccggttgcatcagatcaaaatgcactcgcccttat

SEQ ID NO: 98430 - DNA, 425 bp, Arabidopsis thaliana columbia
  unsure (1)..(425): unsure at all n locations
cctctagactactatgacgtaccatgcacgcctacgtaagctcggaattctgctcgagcgaaggctagagacttgcattggagcagctcgcggattacagtatcttcatactggagccaagtacacgatcatacatagagacatcaaaaccacaaacatacttctcgatgagaacttcgtcgctaaagtatctgactttggtttatcaaagaggtggtcctactagtgcttctcaaacgcatgtctccaccgtcgttaaaggaacgtttggttacttggatcccgagtactatcgccgtcaaatcttgaccgaaaaatccgacgtgtactcttttggagttgttctgttggaggttttgtgctgtanaccgattagaatgcaaagtgttccaccggaacaagcagatttgatccgatgggtgaag

SEQ ID NO: 98431 - DNA, 585 bp, Arabidopsis thaliana columbia
ctatgacgacacatgcacgcctacgtaagctcggaattcggttcgagttgcgttcaagctcatggatcagcaatggctttcaatgcgtgcctcatacatggagtttaacacggtgatgaaatcaacaaggagacagctggagagagagctgatgctggaagacataatgcatcttgaggacttaccctcctacgctcttctcaggcaatagcccttatgatgatattaaatagtaagaagagtttcttacctcaggataacacaagggggccctactctctctctctcttcacttttcatcttcaacgctgttcggtcctacctcttcggtgaccttttcttggggtgggggggtctaagaaacaactccaacacccgggtggtactttgtttttttaaaaacagaaaaagaaggggagaaaacccggggagaggggggggaaaatcctcaatttggtgccagggggggggagctaaaagggaattggttcttacaaccgggaaggtttttagttccgggggggggatgaacctttgggggggggaaaaaaaattgggggaggcccaaattaaaagccgttttgt

SEQ ID NO: 98432 - DNA, 764 bp, Arabidopsis thaliana columbia
tatgttggaaggactttcattgagccgtcttttattttcagagattttggagtgaagctgaagctatcgccagtccgaggagttttagaagggaaaagagttgttgttgttgatgattcgattgttagaggaacaacttcgtccaagattgtgcgtttattgagagaagcgggtgcgaaagaggttcacatgaggatcgcgagtcctcctattattgcatcttgttactacggagtggacacgcctagctcaaatgagttgatatcgaataggatgagtgttgatgaaatcagggattacatcggatgtgattcccttgcgtttttgtcgtttgagacgttaaagaaacatttgggggaagattctagaagcttctgctatgcatgcttcacgggggactatccggtgaagcctacagaggataaggtgaagcgaggaggagattttatcgatgatggtctcgttggaggaatccacaacattgaaggaggttgggtacggtagatagcagatattcaagttctgcattatgatgatcaattttgggtactaatggagtaagatgatgacgatatcttgttgaattttgtgttccatttgaccttaattgctggcacatttttactattttattgagtctgggatggattaagatttaagggttgttcttgtctgaatctttgaaaggttccgtttacttttgtctcgttaagaattcaaaacttctctctaaaaaaaaaaaaaaaaaaaaaagggcggccgct

SEQ ID NO: 98433 - DNA, 2043 bp, Arabidopsis thaliana columbia
caaaaactgttttaagtcccaaaaatcagaccagaacaacaaaaaacctacgaaccctttttgtcttccatggcggccacaacaagcttctcctcttccctctctttaatcactaaaccaaacaattcttcttacaccaataaacctctccctctcttccccaaacccttccttgaacctccacatctctctctccttccttcttccatctccactcctcctccttcactcatccatggagtctcctcctacttctcctctccttcaccatccgaagaacaattctcatgccccttttgattaccacaacgacgaagacgacgaaaagcctcgagaagagtgcggtgtcgtcggaatctatggagatccagaagcttcacgactcttttacttagctctccacgcacttcagcatcgtggtcaagaaggtgcaggtattgtaacagtaagtcccgagaaagttcttcaaaccattacaggtgttggtttagtctctgaggttttcaacgaatcaaaacttgatcaattacctggtgaatttgctattgcccatgttcgttactcaacagctggagcttctatgctcaaaaatgttcagcctttcgtcgccggttatcgattcggttccatcggtgttgcccacaatggtaatttagtaaattacaaaactttgagagctatgcttgaagagaacggttctatcttcaatactagctctgatactgaggttgtgcttcatttgattgctatttctaaagctagacctttttttatgaggattattgatgcttgtgagaaacttcaaggtgcttattcaatggtgtttgttactgaggataagcttgttgctgttcgtgatccttatgggtttagacccttagttatgggtaggagaagtaatggagctgttgttttcgcttcggagacttgtgctcttgatttgattgaagctacttatgagagagaggtttatcctggtgaggttttggttgtggataaggatggtgtcaagtctcagtgtttgatgcccaagtttgagcctaagcaatgtattttcgaacatatctacttctcgttgcctaactcgattgtgtttggtcggtccgtgtatgaatctaggcatgtgtttggtgagattttggcaactgagtcgcctgttgagtgcgatgttgtcatcgctgtgcctgactctggtgttgtggctgctctcgggtacgctgcgaaatccggtgtgccgtttcaacaggggttgattaggtctcattatgtagggaggacgttcattgagccgtcacagaagattagagactttggtgtgaagcttaagttgtctcctgttcgtggtgttttagaagggaagagagttgttgtggtggatgattcgattgttagaggcacaacttcgtctaagattgtgcgtttattgagagaagctggtgcgaaagaggttcatatgaggattgctagtcctcctatagtagcttcttgttactatggtgttgatacgcctagctcagaggagttgatatccaacagattgagtgttgaggagattaacgagttcatcgggagtgactctcttgcgtttctgtcgtttgataccttaaagaaacacttggggaaagactctaagagcttctgctatgcgtgcttcacgggtgactatcccgtgaagccaacagaagttaaggtgaaacgaggaggaggggatttcattgatgacggtctcgttggtagcttcgaaaacatcgaagcaggttgggttcgataatgagagagagactaatggtggtgaaaacatctttacttgcattccaacgtttatgctttgttttctatttgacattattgtcatatttatatctttgttttgtttaaatcttgaaattttttgattaaaatctcacatgtcattttatgaatcctatcttatttgtagacgtctctcattctcttgttcttctctaaaaaaaggttattttgtgaattgaatattgtatttgtagacatcactatgtcatttaatgaggatcgtttttagtc

SEQ ID NO: 98434 - DNA, 562 bp, Arabidopsis thaliana columbia
  unsure (1)..(562): unsure at all n locations
accacgcgtccgcaatttttatagctttcttcctctccaaaaccacaccaaaaaaaaaaaaaaaaaatttgattttcagatccaatcaaccagagatgagagataacaacaataacaacacaagagaagaagagagaagcagttcttcaaagcagcaacaaccacaagctcctatgtctttgaagatcatagattcatgtctcagactaagtgtggttcctctcagtgttgcaaccatctggttaactgtcactaaccacgaatccaacccggactacggcaatttagagtacaactccatcatgggtctcaagtatatggttggtgtgagtgccatatctgctatttatgctctgctctctactgtttcttcatgggtcacatgtttagtctccaaagcttggctcttctttattcctgaccaggttttagcttatgtgatgacaacatcagtagcaggagcaacagagatagtgtatctacttaacaaaggagacaaaatagtgacatggagtgaaatgtgttcttcttatccacattattgttcanaactcacaattgc

SEQ ID NO: 98435 - DNA, 1229 bp, Arabidopsis thaliana columbia
  unsure (1)..(1229): unsure at all n locations
nnnnnnnnnnnnnnnnnnnnnnnnnnnnnnnnnnnnnnnnnnnnnnnnnnnnnnnnnnnnnnnnnnnnnccacgcgtccgcggacgcgtgggcggacgcgtgggcggacgcgtgggtttgcttccttagacttctccgtcgattaacccttgccgagggtcatttttttttttcttgaattttttcaccaagtgttcgttcacggcattgcttgtcctccagtatgagtatctccggtgctgcagttggttcaggcagaaatttaagaagagcggtagagtttgggaaaactcatgtggttaggcctaaagggaaacatcaagcaactattgtctggttacatgggcttggggacaatggctcgagctggtcccagcttttggagacccttccccttccaaatatcaaatggatttgcccgactgctccttctcaaccaataagtttatttggtggttttccctccacagcttggtttgatgttgtggacatcaatgaagatggacctgatgatatggaaggattggatgtggctgctgcacatgttgcaaatctgttgtcgaatgagcctgctgacattaaattaggtgttggaggattcagcatgggtgcggcgacatctctatattctgcaacttgttttgctctcggtaaatatggaaatggcaatccataccctatcaatttaagcgcaatcataggcttaagcggctggcttccttgtgcaaagacattggctggcaaactagaagaggaacagatcaagaaccgagctgcatcgttgcccattgttgtctgtcatggaaaagctgatgatgtggtaccgttcaagtttggggagaaatcttcccaggctttgctttcaaatgggtttaagaaggtgaccttcaaaccttacagtgcacttggtcaccacacaatcccacaggagttggatgagttgtgcgcatggttgacatccacgctcagcctcgaaggttgatacttcctatgatgtagctttctgatgaaaacccttcaactcttgagagtttgattgaattggatgtttcaggatttcacaatgttttcattggaatatttgtgtaagacacattcgtctagtagcaaatcttctcctttggcacgtccnnnnnnnnnnnnnnnnnnnnnnnnnnnnnnnnnnnnnnnnnnnnnnnnnnnnnnnnnnnnnnnnnnnnnnnnnnnnnnnnnnnnnnnnnnnnnnnnnn

SEQ ID NO: 98436 - DNA, 1452 bp, Arabidopsis thaliana columbia
  unsure (1)..(1452): unsure at all n locations
atgatttnnnnnnnnnnnnnnnnnnnnnnnnnnnnnnnnnnnnnnnnnnnnnnnnnnnnnnnnnnnnnnnnnnnnnnnnnnccacgcgtccgcaaccagttactgtcaaaaaaaataaatgaaaacgtaatcgaagaaaaggtcgtgttttctagtgttgcagaaaatggcaactactagtactactacaaagctctccgttctctgctgctctttcatttcatctcctctcgttgactctcctccttctctcgccttcttctctccgattccacgattcctcactgtccgaatcgcgactagctttagatcgagctctaggtttccggccaccaaaatccgcaagtcttcactcgccgccgtgatgtttccggaaaattctgttttatcagatgtctgcgcgtttggagtcactagcatcgttgcgttctcgtgcctcggtttctggggagagattggcaaacgtggcatcttcgaccagaaactcatccggaagcttgtgcatataaatattgggctagtttttatgctttgctggcccgctgttcagttctggaatccaaggagcacttttcgcatctcttgtacctggactcaatatagtaaggatgctattgctggggcttggagtgaccacgacgaaggaacaatcaagtcaatgagcagacatggagatcgcagggaactacttaaggggccggtttactatgtactgtcaatcacatcagcctgcatctactattggatatcatccccaatcgcgattgcggtgatatgcaacctttgcgcaggagatggtatggctgacattgtgggccggcgggttgaacagagaggttcttacacaaaacaaatattttgctggtagcattgaatggccaccgccgggtttctagcatctgttgcgtatatgtactactttgcttcatttggttacatcgaggaaagcgggggaatgattcttcgtttcctcgtcatctctatagcatcagctcttgtggaatcactcccaataagcaccgacactgacgacaatctcaccatttccttaacctctgccttgcgcggattcttactcttctaataataccctctcgttgttatgtatcatcaaataaagggtcgagcttgattgctgatatggaggtaaaactgcattcattgttcccatcttcttctgtatgtacgtattagtgaaacatctcatattgttgttgtccacaaatcttatttttcagctgcaattgcagttgggtacaatgttgtaatgttctatccattagtgagacatatgatgacgaacagtgacgcttctacaatttgtaacagatactcttttgtaacagatattcaatacatgtttgtttgttaaaaaaaaaaaaaaagggcggccgctctagaggatccaagcttacgtacgcgtgcaggcgacgtcataagctcttctatagt

SEQ ID NO: 98437 - DNA, 1221 bp, Arabidopsis thaliana columbia
  unsure (1)..(1221): unsure at all n locations
atgacctactcctagaaggacttaaaagatgcaaatccctcggtgccttggccatggttcatgctgaaaatggagatgcagtattcgaaggacagaaaagaatgattgaactgggcattacaggtccagagggtcatgctctttcaaggcctcctgtgctcgagggagaggccactgctagagcaattcgtttggctcgttttattaacacgcctctctatgttgttcatgtgatgagtgttgatgcaatggacgagattgctaaagctcggaaatcaggacagaaggttattggagagcctgttgtgtctgggttaatccttgatgatcattggcttttgggttcctgaccttcacaaattgcggccaaggatgtcatggggccacctttcagaccagtagggcattgggaaagccctccaagttgcccttcccacaggaatccttcagcttgtaggggctgttcactgcactttcaattctacacaaaaagctctaggacttgatggtttccgcggaatccctaatggtgttaatggccttgaggaacggatgcacttgatatgggacacgatggtggagtctggccaactctcagctactgattatgttcgaataaccagcactgagtgtgctagaattttcaacatatatccacggaaaggagctatccttgctggctcggatgcagatattatcatattgaatccaaactcaagctacgagattagctcaaagtctcatcattcaagatcagacacaaacgtctacgagggcagaagaggaaagggaaaagttgaagtgacaatagcaggaggacgaattgtgtgggaaaacgaggaacttaaagttgttccaagaagtggcaagtatatagagatgcctcctttcagttaccttttcgatggtattgagaaatcagatgctaattatctatcttctcttcgagctccagttaagcgtgtcagaactgaagctacgtaaagagcaggtatctatctgcatatcgtgattctgtaagaacaattgtacataatttgtattaaaagtattgaaagagcgattatgaataatgtgcatgtagtctggttttgagaaaaaataaaagattgtaaaatttatccgtgagttaaaaaaaaaaaaaaagnnnnnnnnnnnnnnnnnnnnnnnnnnnnnnnnnnnnnnnnnnnnnnnnnnnnnnnnnnnnnnnnnnnnnnnnnn

SEQ ID NO: 98438 - DNA, 406 bp, Arabidopsis thaliana columbia
ctctacagtcacagcttcctcgattttggacaggatgcagcacaagaaaagttatcggaatcactatacaactcagctgcaaactctacaggggaaggaatagttcctgacccttgtattcctaaagggtatatccttgaaacaaatttacaaaaggacttacctggattcttggctgataaaggcaaatttacagccacccttcaagctgctggtaatttctcagagtgtcgatctgctgcatttgccatgttgcaggaagaaaaagggaaatgtacttataagcgttgttctattggatcaatattcacacctaatcttcaaggaagttttttggctacagagaatttcttccacacatccaagttctttgggttgggagaaaaagagtggctgtctgaaatga

SEQ ID NO: 98439 - DNA, 415 bp, Arabidopsis thaliana columbia
atgacgtcgcatgcacgcgtacgtaagctcggaattcggctcgagatgaagtgatagagccactgccttcgtacggaagagggcgagacacagatggtggaaggttcatcagtctactttttggttcaaacttaaccgatgttgttatccaccggtgagaatgggacatttgatggacaaggagaaccatggtgggggaaattcaagagaggagaactaaaatacacaggaccttatttgattgagattatgcattctgagggtatccaaatccccaatctcactttcttgaattctccttcttggcatattcacccggtctacagcaccattatatatatccaaggtttgacgattttacccccggtcacggtaccaaacactgacggtatcaacccagattcttgtaccaaca

SEQ ID NO: 98440 - DNA, 696 bp, Arabidopsis thaliana columbia
  unsure (1)..(696): unsure at all n locations
gcnnaaaggntaaccccncnaacangggnaaccaccacncccacaggtaaanaccgcggncaaccacntcgaaaaccccaacgnaccggttaaccaccaacaaaaccccaccggntaacccccnaccacncgccaccggnccaaccacctacgtacaatcccccaactacaccggtaaaccacctacagcgccgcctgtcaaacctccaacaccccctcccgtaagaactcggatagattgcgtgcctttatgtgggaccaggtgtgggcaacactcgaggaagaacgtatgtatgagagcgtgcgtcacgtgctgctaccgctgcaagtgtgttcccccaggcacctacggtaataaggagaagtgtggatcttgttacgccaacatgaagacacgtggtggaaaatccaaatgtccttgaacctttatatgacgatggttgttaaacgaaataatttaaatcaatggagtttttataagtttgtaatgcgtttgtttttgttatagtaatattgagttggatctttgtttccgggacgtagaatactaaataatgaaaaaaaccttctcgatgaaaaaaaaaaaaaaaaaaaanaaagnnnnnnnnnnnnnnnnnnnnnnnnnnnnnnnnnnnnnnnnnnnnnnnnnnnnnnnnnnnnnnnnnnnnnnnnnnnnnnnnnnnnnnnnnngtagct

SEQ ID NO: 98441 - DNA, 699 bp, Arabidopsis thaliana columbia
cacgcgtccgggacctaagctatacgtgaataccactccggttgttgttggtaagaggccaatcactggcatgcggctctacctagagggtagaagaagcaaccgtttggcaattcatttgcaacacctttcctctcttcccaagatatatcagctcgaagacgatctaaatagaagtatccggcaagagtctcatgaccgtcgatgctatgagaaagtaaactggaagaactactctcacgtctgcacagagcctgtcgaatcagatgatgatctttctgtagtaacaggtgcgcagcttcatgtagagagccacggattcaagaacgtgctcttcttgcgcctttgtttctctagagttgtgggagcaacactggtaaagaattctgaatgggatgaagcggtaggctttgctccaaaatcaggactcatctcaacgctaataagccatcacttcactgcagcacaaaaaccaccaccacgacctgcagacgtgaatataaattcggctatatatccctgggggaccaccagtacccacgcaagctccaaaacttttgaaatttgtggatacaagtgagatgacaagagggccgcaagaatcaccccggtattgcgttgtatcgggtgcaagatttttggtggagaaaggcataatctcattgaaggtgaagtattctctatttactccaatattgg

SEQ ID NO: 98442 - DNA, 674 bp, Arabidopsis thaliana columbia
  unsure (1)..(674): unsure at all n locations
cccctnccccnttttcctgggttnggccccctgtaanatcgatggtaccggtcnttcccaatcggcnntncacctatacctccttcntcgcncaaacccccccncgccntcagcgngatttaatccgctatatancctgtgcccnccatncccncgcagctccaaacttttgaaatttgtggatccaagtggatgacaagaggcccgcaaggatccacccgggtattgggttgtatccgggtgcaagattattggtggagaaaggcaaaatctcattgaaggtgaagtattctctatttactccaatattgggagatgaagtgatcgaggaagcctatgaaggttaagagaaaatggtggtggtgtggctcagagccaatgagagaaaataggatgagtggtatgtttatgtctgtacgtgtacattcttaaggttttgtcgtttgtaatgttaatggtgtggatgtctaatatgccactgtaaaacttatatacacgagaagttgggatcgtggatatcaaatttatgggtttgaatagtgacattgcccaaaaaaaagggcggccgctctagaggatcctagcttacgtacgcgtgcatgcgacgtcatagctcttnnnnnnnnnnnnnnnnnnnnnnnnnnnnnnnnnnnnnnnnnnnnnnnnnnnnnnnn

SEQ ID NO: 98443 - DNA, 750 bp, Arabidopsis thaliana columbia
  unsure (1)..(750): unsure at all n locations
ttgacgtcgccatgcaccgccgtacgtaaagctcggaattcaggctcgagatgggttttctgaggcatgtaagggagtcccacagccaatgaatcctccagggtttatgaaaacatctcaagcatcatcaacaacaaccaatgttcctgcactaagtgatgatgctttgactcgtgtcgccatgtcacttccttctccaaaaactgcgaataaagaagatggactgtgtgtgatttgtgtggatgcaccatctgaagcagtgtgtgtgccgtgtggacatgtcgccggatgcatttcttgcttgaaagagattgaaaacaagaaaatgggatgtcctgtttgtcgcgccaacattgatcaggtcattaagctatatcatgtttgaagcatatctcctctatggctggaagatattgaaactatctcctattttttactttgtctttaaaagataactacaaatttttttattgtgtgtatgttatgtggtgaagtcaaagaagtcgaaatatagaatcacgacaagtttagtttgtctttttatctttgttacatgatcaatgttaatttttccttcaatcttacaaactctatatgtaacaacctgttccctggnnnnnnnnnnnnnnnnnnnnnnnnnnnnnnnagnnnnnnnnnnnnnnnnnnnnnnnnnnnnnnnnnnnnnnnnnnnnnnnnnnnnnnnnnnnnnnnnnnnnnnnnnnnnnnnnnnnnnnnnnnnnnnnnnnnnnn

SEQ ID NO: 98444 - DNA, 559 bp, Arabidopsis thaliana columbia
  unsure (1)..(559): unsure at all n locations
tctagatcgcgagcggccgccctttttttttttttttcggcgttctataaactgaactgttattgctctgctattcacttctctacattacaggctttttctttttatctccacacaaattacaaacaagcaagaccgtccttttcgccatgaaaatccgcggtaaacaacgcataaagaaagaaagaaataagaaaaagaagaaactgcggatgtatttatcgacgcgttctatttggcttcgcttcgtttgttttaggctttagcttctgcacgagcagtggctttgttggcaatgagctgctcatagagatctctgatcttcaatccaacaatggtttggaaaagaccagtaccgttgttgctacccgggaaatcagcatgtttgagcatttgttgagtgacttccccgtagaatttggtcgagagggtgcccaagtgactttccccgtaaaccaagcccgcccaaggggnccgtgggggcnanccggggaattccggacggganctncagggggaccagnttncccaaaagggnggccganaaaggctgggggaa

SEQ ID NO: 98445 - DNA, 904 bp, Arabidopsis thaliana columbia
  unsure (1)..(904): unsure at all n locations
cacgcgtccgaatttgtaatccattacctgtcatcgttgtcttgtcaagaagaaacaaatcaactctaaaaagaaaaatgttgttcatcgaaatcgaagcttgacagtattcaaaatcagattcgagatgagctgcgacggaggcaaaccggcgccggcgaaactaggcgacgaacaactagcggagctccgggagatattccgatcatttgaccagaacaaggatggaagtttgacggagctcgagttaggctcacttctaagatctctcggtctaaagccgagtcaagaccaactcgacacattgatcccagaaagcagatcggaataacaacggactggtcgagttctccgagttcgtcgccctcgtcgagccagatctggtcaagtgtccttacacggatgatcagcttaaagccatctttagaatgtttgaccccgatggaaacggttacataacggcggcggagttagcccattcgatggcgaagataggtcacgcgttgacggcggaggagttaacgggaatgatcaaagaagctgatcgagacggcgatggttgtattgatttcccaagagtttgttcaagcgattacttcagcttgcgtctgataatgcttggggttgaagaaagaaagggtatatatatacatagtttgaaatacttgtgttttgtttttttggcttcatcctcaaatcaaagacatttggaagtatatgtgtgtaggtgcgatcccatggaaaatgtgtgttatttattgtttcatattattctttgatgaaattttgataaaaaaaaaaaaaaaaggnnnnnnnnnnnnnnnnnnnnnnnnnnnnnnnnnnnnnnnnnnnnnnnnnnnnnnnnnnnnnnnnnnnnnnnnnnnnnnnnnnnnnnnnnnnnnnn

SEQ ID NO: 98446 - DNA, 686 bp, Arabidopsis thaliana columbia
tacttaccttcggttatccgatactgtctttcaagaaaacaactttgagctgtttaagaagttggtgaggaaaatgcacgctgatcaagattattgtggagacgcagcgaagtacgggcatgagattgtgccgttgaaaacgtcgaattcgcagctgacgctggaggatatcgccgacgcggctcagccaagtggagcatttaagtgggactctgaaaccgatttgaaggtcgacggttagttatattttatatgatcgatcgtctaatcacaaagaaagtaagggaaagaatcaaggaagtaagaataagaagataataaataaagagaataagaagaggcatttgcaactttaagaggttaaaatttcttaaatgagtctgagtttcgttgtgtgttttgggtgtaccataagaaataaaacgtacggggttgctatgtattttgtgaagtgtgtatttctggttgaatattagtctgcgtaataaaaaaaagtatgtgtagtaaaaataaataactgttgcccagtaaaataatgcatcattgtcactgtattgccagaatatatatattacttttttaggttgtaaagaattttagattatataaaaaaaaaaaaaaggaagcgcgctctagaggatccaagcttacgtacgcgtgcatgcgacgtcaagctcttctatagt

SEQ ID NO: 98447 - DNA, 2475 bp, Arabidopsis thaliana columbia
ctactactcatattgcttatattttcctacaacactctctcaacaaaaaaacaaaaaaaaaagacgttctttctttgtttgtatttagaagaaaaatggctaccaattacaacgagaagcttcttcttaattatgttcccgtttacgttatgcttccgttgggagttgtgaatgtggaaaatgtatttgcggacccagaaacgcttgaaacgcagcttaaacgtctcaaagaagaagctggcgttgatggcgttatggtcgatgtttggtggggaatcatagaatccaaaggtcccaaacaatatgattggacggcctacaaaacgctgttccagctgatcgcacgtttgggactcaaaatccaagcaatcatgtcttttcaccaatgtggtggaaacgttggcgacatcgttactatcccgatcccacaatgggttcgcgatgtcggtgacaatgatcccgatatctactacactaaccgtaaaggaactagagacatcgagtatctctcaatcggtgttgataatcttcccctatttgccggaagaaccgctgttcagttgtacagtgattacatgagtagcttcaaagaaaacatggcggatttgatagaagctggggtgattgttgacatcgaagtcggacttggcccggccggtgaactacgttatccttcttacccccaaagccaaggttgggtgtttcccggcatcggagaattccagtgttatgacaagtacttgaagaaagatttcaaggaagcggcggcgaaagcagggcaccctgagtgggacttgccagaggacgccggagaatacaatgacaagccggaggagactggatttttcaagaaggatgggacttatgtctcggagaaggggaagtttttcatgacatggtactcgaacaaactaatttttcatggagatcagatcttaggagaagccaacaagatctttgctggacttaaagttaacttggctgccaaggtttctgggattcactggttgtacaaccaccacagccacgctgcggagttgactgctggatattacaaccttttcaagagagatggttaccgtccgatcgcccggatgctctcaaaacactacggcattctcaacttcacttgccttgagatgaaagataccgacaatacagctgaagccctaagtgctcctcaagaacttgttcaagaggtactgagcaaggcatggaaagaaggtatagaagttgcgggtgagaacgcattagagacctatggagccaaaggttacaatcagattcttcttaacgcgaggcctaacggggttaacccaaacggtaagccgaagcttagaatgtacggatttacttaccttcggttatccgatactgtctttcaagaaaacaactttgagctgtttaagaagttggtgaggaaaatgcacgctgatcaagattattgtggagacgcagcgaagtacgggcatgagattgtgccgttgaaaacgtcgaattcgcagctgacgctggaggatatcgccgacgcggctcagccaagtggagcatttaagtgggactctgaaaccgatttgaaggtcgacggttagttatattttatatgatcgatcgtctaatcacaaagaaagtaagggaaagaatcaagtattcgttgatgttgttgttttgaacaggcaaactaaggcggtcttggccttcaattagttttgcagatttgatgatatctccagtcttgatctgcccgagaatatcttttcctgctattgtgtatccgaagaccgagaactgtccttcgtcaaaggataatcctcctaagccagagtttcttttatcgtataggtagaagaagaattggtaaggagaagagtattcttctgagttttcgctgtgcgccattgctacagctccataaaccgataaaggaagcactggtaactccccatcctggacactcaatggcgttctgtagagaggttcgaattgtccagaaggcattacttccaatggaacactaacactctccaccttaccactcccatcctctgtgataacagcctggtttacagtattgagtttggctccatcatatgcaccgctagttaccagttttgcaaaattccctgcggttagaggtgctgaatatccatctataacgatctgtactgtagcactctttctttgatcacctccagcttcagctgaaaaagtcgaaccatcagctttctcaatggtgatttccacagttcctcttcctgctaacctgggatagtttaagtactgctgaggaagtagaaatgacaacccagatgcctgtaataactccagatccgcaacagtatctagtgatgctgccagccaaagggacactttatcaggatcttgtttcttaatagacgttataagtgcttgtagtccaccctttccatcaatcagagttgtatacagttctgagcccttgtcttttaagtctac

SEQ ID NO: 98448 - DNA, 531 bp, Arabidopsis thaliana columbia
atggctcagtatgtcaatataaacagtggattgttgaagacatatgcgtttgatgataccaccattggatcatggatgattggcgtccaggcaacatatatagacgacaatcgcctttgctgcagcagcacaagacaagaaaaagtgtgttccatggcatgatcactgcatagatgatcctcttgtcccagagcaaagacggcggtttctcatcgcattcatggcgctccgatactcttttggggcagattcttggaccggatactgaacttatcattagttttgttagaatgggagtatgattaggccattcattacagtttatgattagaggcatgcgtatcccttgagctttggagtaagaaaatggggaaatggtatagatgtgaatgaagtataatttttcctttggtatcatatcaccatcatttgtccgtccattctagcccaatctctggcaggcgtttaatgttcgaaccttaagtttgcatttttggttgctggtttttaaaaatgtgttagttaagactt

SEQ ID NO: 98449 - DNA, 455 bp, Arabidopsis thaliana columbia
  unsure (1)..(455): unsure at all n locations
tgaagttccaacaagatcgatcaaagagaagatggatctcgaggattgggaattagtactccccaagaacagcttcaaggatcttgatcttgatcatgacgaggatcatcatggagccatggtgatggactacttcctctgcccatctactaaagatcctctccccaagacagagtctcctccaagatccaaagtggtccctaaaaagattcttcaagttcccatagcttgggaagccgtgttggatcaagacaacacgaaggtaccccaataaccctgatcttgaaccgggatcccgcatccgggttccggatttaaaaaccggcccctttcggacgggacttctgggtttcggttcaccaaaggaggtttccttttaaaagttcaaggangggccacnngnaattttncccggccaattgaaatttngnccccaccnaggggnggtttcaang

SEQ ID NO: 98450 - DNA, 511 bp, Arabidopsis thaliana columbia
  unsure (1)..(511): unsure at all n locations
gcgagagatgttactccatgagaataccaaacccacttcgctctaataattcaaaagatttcactttctcaaacaaaaaaacttctctctttcttttctaatttctaaaaccctaattgaagttccaacaagatcgatcaaagagaagatggatctcgaggattgggaattagtactccccaagaacagcttcaaggatcttgatcttgatcatgacgaggatcatcatggagccatggtgatggactacttcctctgcccatctactaaagatcctctccccaagacagagtctcctccaagatccaaagtgggtccctaaaaaagattcttcaagttcccatagcttgggaagccgtgttgggtcaaggcaacaggggggtccccattacccggttctttacccggtccgatcgggtcgggtttaaaaccgncctttggggcgttttttggcacaagggtttcctaaggtatggggnatnttttcngaannaaatttcccccggggtta

SEQ ID NO: 98451 - DNA, 575 bp, Arabidopsis thaliana columbia
aacaagcgtcgagagatgttactccatgagaataccaaacccacttcgctctaataattcaaaagatttcactttctcaaacaaaaaaacttctctctttcttttctaatttctaaaaccctaattgaagttccaacaagatcgatcaaggagaagatggatctcgaggattgggaattagtactccccaagaacagcttcaaggatcttgatcttgatcatgacgaggatcatcatggagccatggtgatggactacttcctctgcccatctactaaagatcctctccccaagacagagtctcctccaagatccaaagtggtccctaaaaagattcttcaagttcccatagcttgggaagccgtgttggatcaagacaacacgaagatacccaataaccctgatcttgaaccggatccgcatccggatccggattcaaaaccgaccctttcgacggactctgtttcgtcaccaagagtttccttcaagatcatgaaggacactgaatttgccgacatgaaaattgacccaccagcgaggatcacgagtcctctgcctcagatcgatgctgctgc

SEQ ID NO: 98452 - DNA, 487 bp, Arabidopsis thaliana columbia
  unsure (1)..(487): unsure at all n locations
cattcatcgtcttcttcttcttcttcttcttctgcttatcatcgttcttcgcttcaatcgtcatggctgatgaatataccggagaagcaacgggatcgtcggaagcaaaggttcacatcatctacaccgagaaacctaccgatgaagaacctaaaacctatcatctccgtaccctttcctctgctctcggcagtgaggaagctgcaaaagatgctttgatttacagttacaaggaagctgcttctggtttttcagctaagctcactcctgagcaagtcgctgagatatcaaaacaaccaggtgtgattcaagttgtgccaagccagacttatcagctgcacaaacctggtggtggtggtggtttcaagttgacctaacttgacttggggtattctctacttctcaactaaacctgtggcttacagaaactaggctgttgtggattgtggncttnaccagnttttacaaanangttgaggtnttgtnt

SEQ ID NO: 98453 - DNA, 492 bp, Arabidopsis thaliana columbia
  unsure (1)..(492): unsure at all n locations
cactatagctgnactgtgacacagcatgcacgcgtacgtaagctcggaattctgctcgaggttgggatataccggggaaggaacatatgtcgaagccgccggtggtgaaaattttggcggaggtggtggtggttctagtggatcgtcctccactagagactactatgcaatgttttcaccaagggcaacattattagagtcaaattcaatgaccggggtatcatcagcccaaccttttcaaggaggcttccttttagagaaagtaatgggcccattatcaacgggtcatttagagctcaagacccgaaacccaaaagataacccgattgtgactttcaactatttccaacatcctgacgacctaaaacgttgtgttcgaggaatccaaaccatagagagagtcgggcaatctaaagctttttcgaggataagtacgcagatgtgtcatttgagtatttacttaacctcacggcgagtactcctgtcaatcta

SEQ ID NO: 98454 - DNA, 520 bp, Arabidopsis thaliana columbia
acgtggcatcgccgcgtacgtaagctcggaattcggctcgaggtataattcgtggttacgaacaccagtgtggacacaaagcagagcaaagaagacttttgtaagaaaataaacacacaactaaagagatgtcgtcaaccttgagcaacgaagagtcaggactcggtgattcaaatcgttcgacggaagtagatggcggcgacggaggaaacttcacggcttacgagtctcgattccagtcgcagcggtttgactcttccttctctaattttgactcccaaccggagaaagagtcagacttaccatgcggcgattcatctcctcgacccgaaactcaatctccgccgtcgataaatagtttcgatgatacaaacgattcgatcttgccgccaccctcggccatggagaaagaggaaggtttcgctcttagagaggggcgaaggctaaatgctctggggttgggatgagaaagaaaggggagaaaaaagaattggcttcaacaaatttctaaaagcccgcg

SEQ ID NO: 98455 - DNA, 791 bp, Arabidopsis thaliana columbia
  unsure (1)..(791): unsure at all n locations
gccggcannnnnnnnnnnnnnnnnnnnnnnnnnnnnnnnnnnnnnnnnnnnnnnnnnnnnnnnnnnnnnnnnnnnccacgcgtccgctggatcgttgcctctttaatcattggagactataagctttattgctaagttagagaatctgaagaacctaagcttagattgctgcccgaaaatcaaaacgattttcccggagatgcctgccagcctaccagtcctgaatttaaagcattgtgagaacctggagaaagttgttgtaggagttgaagtgtcaactcacactaatctggatttgaaagtggagaattgtccaaaattcggggactacgtaatggttgaccacagtgatgtacctccaccacatgaatgctgatcataaaagaggctggagcaagatctacttacacagtactaaacatctggatcgttgcctctttaatcattttcatacttttttcctacgtgtgcctgaagctttgcgtgttgaataacgaccggcattgaaacattatcttgcgggttttatttttactgtttcatgtttctgtttctgttttaagatattttctgctgtaaaatcccaggcatagtgttctgttcttgtctgggtgaataagaccattgttttgattgtttttcttttctcaaatattatttgaaatttctctgtttgaaagatcttataagacagtttaaggctttacgataaaaaaaaaaaaaaaagggcgaccgctctagaggatccaagcttacgtacgcgtgcgtgcgacgtcataatcttctatagt

SEQ ID NO: 98456 - DNA, 465 bp, Arabidopsis thaliana columbia
  unsure (1)..(465): unsure at all n locations
gcnnnnnnnnnnnnnnnnnnnnnnnnnnnnnnnnnnnnnnnnnnnnnnnnnnnnnnnnnnnnnnnnnnnnnnnnnnggctcgaggtggcttcaaactgctgtcagaaggtgggaagcatagatgcaagagcgacaggagagtcagggggctcatcgtggaatgactgcgtgtccacttgtttacaaagcaacccaacatgtcaaaattccgtcgaggtcacctgagatgctcacagcagaacagagtcctgatctatgtgtttggtgatcacaaaaagagaggggttcccagacactacaacatgcaatgcggttccgaaggtttgtgcgatttctgtaaggaagtccacgctgctccaaaaaaaaaaaaaaaaagggcggcccccgactagttagcttgtcgacccgggaattaaatccggaccgggtcctgccggcggcccagcttttccctaaaataaattc

SEQ ID NO: 98457 - DNA, 467 bp, Arabidopsis thaliana columbia
cttgacgtcgcctgcacgccgtccgaagcttggaattcaggttggggggaagaagaaccaatcgcggcgggatccaccgccggccccagaatctttcaggctttccgacgtgttggcgtctccttacaccttcctccgtcgctatcaccatccatgcgaagccaggttccaaagccgcctccatcaccgatgtgaccgacgaagcggtaggcgttcaaatcgacgcgccggctagagatggtgaagctagcgcagctcttctcgagtacatgagctctgtattgggggtgaaaagaagacaagtctctctcggttcgggatcgaagcctcgagataaagttgtgattgttgaggatatgacccaacagagtgtttctcaagctgtgtcccatgcatcagagcctacctaaagatctccaagcctgtaactaactatatggggaaactaactcatcaaaagctaaatg

SEQ ID NO: 98458 - DNA, 458 bp, Arabidopsis thaliana columbia
aaatacaaatatttctgagaacctcaagtttaattttgcggcttagatttaaattcgtctctcaaactcaaatatctgaaaaaacctttctggggtatagaaataagttacacgagactttcaatttctctgtatattttccttttgattcccagaaaatgtcactagattccactttctagcttgcgttttctcgggaatctgaagtttccttttgtgttgaatcgctgggaaaaatctgatggaagcagcttcaagttttttgtgtagaagtattcggattccgtccactactacggcgaccgcggcgttcacgttcactcgaccgccgttaaactacgtttgtgttgtcggagttcgtgttttcccgacgcggaaggtcttttgcagcggcgttaatggcggctccagtgttactaagaagaagccacgaaggaaaagtaacgtttccgataaac

SEQ ID NO: 98459 - DNA, 474 bp, Arabidopsis thaliana columbia
cttagcttggaattcaggttgagaagagagggaagaccaagtaccgttatggtggattcttgagtttaccgctaacctcggagatttgggtttacctcgggggttagaccacaggattgaggaaccagagctggatccgagttacgaactctgtttcttccttccgtaaccaccagttccgagtcgcggattcgactcggatcggtgggactatcggctacttaccaccggagggtttccggaaaaaaaccgttgccaccgctaaaacagatgttttcagctttggtgttgtggttttagaggttgcctccggtagacgagccgttgatctttcgttctcggaagataaaatcattttacttgattgggttcggagattatccgataaccggaatttactcgacgccggggattctcggttagcaaaaggatcttatgatctctctgatatgaagagaatgatccatcttgctt

SEQ ID NO: 98460 - DNA, 1197 bp, Arabidopsis thaliana columbia
  unsure (1)..(1197): unsure at all n locations
cccacgcgtccgcccacgcgtccgtgatcttcttcctcggctacatctctccgacgcctctctctcgttccgattttggtttaatatttgatgggaacatcatctggttcgaatcatcctcaccaaatgttaccaccacgtcaacaacaacgaagtggaggaggacttgaaacagctctttcactagtctcttcagatcaagagccgcgtcgcgagtctccagcggagagtgcgagttctcaagaaacatggccactaggagacactgttgctgggaagaagtcaatgagtcaaaagacagagcctgattctatggaacaaactgtgaatgtgatgcaccatgtttcgaatgcggacaaggtatcggtacgggatatcgctagggaaagagttgagttagttgcagagagaatgcatcgattaccggatgagtttcttgacgagttaaagaacggtcttaagtctatccttgaagggaatgtagcgcagagtgttgatgagttcatgttcttgcagaaggttgttcagagtagaactgatttgagctctgtaacacttgttagagctcatcgggtgcagcttgagatacttgtagcgataaataccgggattcaggcgtttttgcatccgaatattagtctgtctcagccgtctcttatcgagatttttgtatacaagagatgtagaaacatagcttgccaaaatcaactacctgctgatgattgctactgtgatatatgtactaataggaaagggttttgtaacctttgtatgtgtacgatctgtaacaagtttgatttttcggttaatacttgccgctggatcggatgtgacttgtgttcccactggactcatacggattgtgctattcgggatggacagatcaccactggatcctctgctaagaataatacttcaggtccaggagagatagtgtttaagtgtcgggcttgtaaccgcacgtctgacctgttgggatgggttaaagatgtgtttcagcactgtgcaccgaactgggatcgagaatctttgatgaaggaacttgattttgttagtaggattttccgcggaagcgaagatcaacgaggtaggaaactgtttttggaagtgtgaggagcttattgacaagattaaaggtggttttgctgaagcaacttctgccaattgntattaangtttttccaagggatcgnatca

SEQ ID NO: 98461 - DNA, 1435 bp, Arabidopsis thaliana columbia
aaaaccacaattctggcaaaaaagaaaaattcccaaaatctagggttttcttctcgcccaatttcacttttcttctacgaaattctccattcctgccggctgtcgggttttctgaatcgattctccttcaccaacttcttctctggttctgttcgattctgattttttttcaaggtcaattttttcttctctttaaactctgcaaaatcgtgatcgattaaattcacctcagggttttttgatttctgaaagaagttaatcttcttcgaaggcgattgcaaaagagtgctctgctgtgaatttccactgagatgcaatcaaaaccgggaagagaaaacgaagaggaagtcaataatcaccatgctgttcagcagccgatgatgtatgcagagccctggtggaaaaacaactcctttggtgttgtacctcaagcgagaccttctggaattccatcaaattcctcttctttggattgccccaatggttccgagtcaaacgatgttcattcagcatctgaagacggtgcgttgaatggtgaaaacgatggcacttggaaggattcacaagctgcaacttcctctcgttcagataatcacggaatggaaggaaatgacccagcgctctctatccgtaacatgcatgatcagccacttgtacaaccaccagagcttgttggacactatatcgcttgtgtcccaaacccatatcaggatccatattatgggggattgatgggagcatatggtcatcagcaattgggttttcgtccatatcttggaatgcctcgtgaaagaacagctctgccacttgacatggcacaagagcccgtttatgtgaatgcaaagcagtacgagggaattctaaggcgaagaaaagcacgtgccaaggcagagctagagaggaaagtcatccgggacagaaagccatatcttcacgagtcaagacacaagcatgcaatgagaagggcacgagcgagtggaggccggtttgcgaagaaaagtgaggtagaagcgggagaggatgcaggagggagagacagagaaaggggttcagcaaccaactcatcaggctctgaacaagttgagacagactctaatgagaccctgaattcttctggtgcaccataataaaaaaagccaaagctctgagaggagagagagacacacactttggctaatataatccattgcctcaaaccggcaaatcattcttggctttttcgtttttgtgtttgctagttgttcttgtcagagtctcatattgtgtgggtttaacagttatgatgaatgtacaaagagcgagttatgttaggtgttagattttggagacaagagacaaaggaatagcaagtaggtcttgtttttattctttgaccttttttttctcttttgcaaaattgaaaaatacgtttgcttaaaaatttgcctttctgacc

SEQ ID NO: 98462 - DNA, 508 bp, Arabidopsis thaliana columbia
  unsure (1)..(508): unsure at all n locations
gtttctcattgttttgcttcaaattacgcattcgaatctgatcttcgttgatctctgtggaagaaacagataagagaaaatcgcatgaatttttttagaaaactaggttttaatccttcgattgcaagctacttcactaatacgagtcttctgatctcaattcttagtttttctcctcaattgccgatttctctctttcttttcgagcagaaatcgttagatcctttatcgctgtgtaatagtagtactaattttaataatcttgagagtaattactccgttcattgttgaatcatggagtccggaggcaaaactaatcgtcagctgcgtaaagctatttgcgtctcaacagacgagaagatgaagaagaagagatcaccttcagtgatagtgattggaggtggtatggctggaatttcagctgctcgcactcttcaagatgcttnctttcacgttgttgtattggagtctcgtgacagaattggtggacgagttcacactgattact

SEQ ID NO: 98463 - DNA, 1505 bp, Arabidopsis thaliana columbia
aaaaaatccgacctttttttgttttctctctctagaagtctctctgttttcatctttctctctctctctctagctcttcttcctcgtttctggcttttctgggaattttgatcctttggcccccattgctcgcttgaattacgaatcagatatcgccgatcgtcgtagatctgcgttgatactgtccggctgagtaaacagggtgaacaaaaaccaaaaacagagagggggtttaaaaatcctgaagaaaatcgcatgaatttgtttggaagcctgattttttcatcttcgatttcgagccacttcacgacttgtcttctcatctttattcttcatttctctccccagcttaatagtaataataataataataatagtaatcgtaattccaataatctcgagagtaatcgtttgatcaattgaaaaaaaaatcatggagtccaggaaaaactctgatcgtcaaatgcgtagagctggtgagaggatgaagacaaggtcgccctccgtgattgtgatcggaggtggtttcggtgggatttcagctgctcgcactcttcaagatgcttcctttcaggttatggtactggagtcccgtgacagaattggtggacgagttcacactgattactcatttggttttcctgttgatcttggtgcatcatggctgcatggagtatgcaaggagaatcctctcgcaccagttattggaagacttggactgcccttgtatcgtactagcgggtgacaattccgtcctgtatgaccatgatcctcgagagctatgctctgtttgatatggatggcaaccaagttcctcaagaattggtaactccaagattggcgtaacgtttgagcgtattttggaagagatcaataaagtcagggatgagcaggagttcctgcatttcaatttctcaggctttctcaattgtcttttctaggaaacccgagctgaggttagaggggcttgcacacaacgtacttcaatggtatgtatgccgcatggaaggatggtttgccgcagatgctgaaaccatctctgcaaagtgttgggaccaggaggaattgttgcctggtggacacggtcttatggttagagggtatcgtcctgtcatcaatactctggcgaaaggtcttgatatccgagtaggccacagggttactaagattgtcaggcggtacaatggagtgaaggtaacgacagaaaacgggcaaacttttgttgcggatgctgcagtcattgctgtccctcttggagttttaaaatcgggaaccataaagttcgaacctaagctacctgagtggaaacaagaagcaatcaacgacctaggagtaggtattgagaacaagatcatactacattttgagaaagtcgggggggcgaaagtagagtttctaggagtggtagctgaaacctcctacggttgcagttatgtgttgaacctgcacagggccacgggtcatccggttctgggttacatgccggctggtcagcttgccaaaga

SEQ ID NO: 98464 - DNA, 295 bp, Arabidopsis thaliana columbia
cggctcgagcgatatttctccttcttcttcttagctctcttcctccattatcgtattatcgtagcttctccattcgaaggatttgatgctgaagaagacgacgttaccgacgattcctctcaccttcttcaccactcactccctccgcctcttctcactcagtctcactcatcactctccgatcccgatccggagccggaaccttcttccgccgaatgtaaatccgatctcatcactgaatcagatctcgagcatcaatccgattcgaaaactctctcgtctacaccatttgagt

SEQ ID NO: 98465 - DNA, 634 bp, Arabidopsis thaliana columbia
  unsure (1)..(634): unsure at all n locations
tgccccccttccttagcttggaattcagctttagggttgggccaatggttttatctcatccacctgaatccattttccagatttgggccaattctgggttggctggcctccttccacccgttatacctagaaacgtgtccggcgtttttgacggcttcaatcacctcatttgaggtccgtcttgccattccaggaagtcaagatatcaatttccgaagtctattcttattagcaagtgatgacaagagatcagaagcttcacctcgtggttgattgtttgctgacaacttctttcatgcttttgttctcggaaaagatccagtgatgagacgagaaagattttgaagattaaattgaatcttttatctttattcggtttaatagcttggttgtttttataacccggagatgtctccggttgttcactaaaaggaaattgtgccggcttctgtctgcatattttgctgaaggggttgtgggtaccggtttactaggttatccggttcacccggtttgtaagattggtttaatgaataaaaatcccttgttctagatcgcnnnnnnnnnnnnnnnnnnnnnnnnnnnnnnnnnnnnnnnnnnnnnnnnnnnnnnnnnnnnnnnnnnnnnnnnnnnn

SEQ ID NO: 98466 - DNA, 471 bp, Arabidopsis thaliana columbia
aggtgacctatagaagatcttgacgtcgcatgcacgcgtacgtaagctcggaattcggctcgagaaatggcgaacaggagttgacattatacacgttccatgtagaagtgcggataatttcaatatgtcgatggtcgtgcgtgatcgagcattctatcaagctaagaaacgaggtgtaagaatccgcggcattataatctcgaatccttcaaatcccatgggaagcctactgagcagagagaatctctatgcgcttttggactttgcccgtgagaggaacattcatattatatcaaacgaaatctttgctgggtcagtccacggagaagaaggagagtttgttagcatggctgaaatagttgacacggaagagaatatcgacagggaaagagttcatatcgtgtatgacctttcgaaagacttgtctttccgggggcttagattcgctgctatctactcgttcaacgagag

SEQ ID NO: 98467 - DNA, 614 bp, Arabidopsis thaliana columbia
atgatttgccagcactatacgactcacttagggaaagctggtacgcctgcaggtaccggtccggaattcccgggtcgacccacgcgtccgcccacgcgtccgaagagaatgaacttctttcagccgcaccgaaagcacccagtttcacctctgatccaaagagaatcctgactgacgttgaacaaacacaagcccttgtgcgtaagctagactctgagaaaaaaattgaggaaaatgttttacaaggttcagaaactgaaaaatcaggtagagaaaagttacacagtggttctactggtccagttgtaatcataagggggttgacatctgtgaaaggccttgagggtgttgaattacttgacacgcttgttacatatctatggcgtgttcatggtctggactattacggaaaggttgaaacaaatgaagctaagggtttgcggcatgtgagagctgaaggaaaagtttctgatgcaaaaggagatgagaatgaaagtaaattcgactctcattggcaagagaggttgaaaggtcaagatcccttggaagtgatggctgccaaagagaagatagatgctgccgctactgaagctttagatccacatgtccgaaag

SEQ ID NO: 98468 - DNA, 514 bp, Arabidopsis thaliana columbia
  unsure (1)..(514): unsure at all n locations
gttgtgcccttgtaaacggtttctttgcacttgggccgagcttctctcgtggactcggcaatctactgcagcggctccttcgctccttaggaaagtggtcgcgcagctcgtggtgtacaacctgtggaggcagaggaatcttgttcttcacagctctcttcgggtctcttgctcggtggtctttcgtttagttgatcgcgagctccgcaatgtcattttgtctaggaggcataagaggcgttggcgggagcttttgttgctttggatccgttagctttccccaaatcttctcaagcttattgtaaccttgtttttatttctttttgccttggttgctctactttggtaaactttttgtattaccttaactcattttatatgatatttacaagtttagcaaaaaaaaaaaaaaaaaaaaaaaaaaaaaaaaagggcggccgctctagaggatccaagcttacgtacgcgtgcagtcgacgtcataatctnnctatagtagtacctaaatcaatcg

SEQ ID NO: 98469 - DNA, 618 bp, Arabidopsis thaliana columbia
  unsure (1)..(618): unsure at all n locations
nnnnnnnnnnnnnnnnnnnnnnnnnnnnnnnnnnnnnnnnnnnnnnnnnnnnnnnnnnnnnnnnnnnnnnnnnnnnnnnnnnccacgcgtccgcttgttcgcagactcggttttctggtatggcttgtgaagcttatatatattttgtcaaagctcaaatcgagatggctttaggaaggtttgaaaatgcagttatggctgctgagaaagctagccaaatcgatccaagatgcaacgaagttgctatgttacataatactgttacattggttgctagggctcgtgctcgtggcaatgatctttataaatcagaaagatacactgaagcaagttcagcttatgctgaaggccttaggcttgatccttgcaacgctattctatattgtaatcgagcagcttgttggtttaaacttggaatgtgggaacgctcgattgaagattgtaaccaagcgctgcgttatcaaccaagttacacaaagccacttcttcggagggctgcctcaaatagcaagatggaaagatggggagctgcagtgagtgattatgaggccttgataagagaacttcctcatgacaaggaagttgctgaatctttattccatgctcaagttgcattga

SEQ ID NO: 98470 - DNA, 504 bp, Arabidopsis thaliana columbia
catgcacgcctacgtaagcctcggaattccgcttcgagcagggattcaacgccaaagaggttcaaacctggactaaattcttcgccctttcatgcttgttagctatttttatagatcccctcttcttcttcctcataaaagtccaagagcaaaacaaatgtattatgattgattggcctgtgactaaagctgtgggagctgtaagaagtgtaacagatgttatattcactatgaacattctacttcagttccgattggcctatgtagctcgtgagtctacggtagttggagctggccagttagttagtcatcccaaaaaaattgcccttcattacctcaaaggaaagtgtttccttgacttgttcatagtgatgccacttccacagatattgataccgtggataatcccagcccatgtggggggctcccgggcgaaactatgccaaaaaccttctacgggctggaggtcttttccatacattccaaaggtaattagacttctac

SEQ ID NO: 98471 - DNA, 762 bp, Arabidopsis thaliana columbia
  unsure (1)..(762): unsure at all n locations
tggtgaaggcagtccgaatgttccttgaagggaatcatttggctcagcccctaaagccatagaaaatcttcttgttgatgatatcgagatcaaagatgatgctcctgagagcaaacccagtttagaagaactcgatgcccttgaggaagtccgtctagcaatcgaatatattgtaatcccgggaggtgaaccagtggagcttcttcctagacgatcagatataatagttcggcagctagagctggtggagagttaccaactcgcagttgagaacctcggcactcaccttaatccgcgccttcagattcttcctcgccgatcaaccaagaagacgttgacatcttcatccccccaaaaatcagcagatggtagcatggggactacgggtactcgtcttcctttccttaaggattgacatgtctgacttcagcatatggactacagtacatactacataagttggggacactcttgaacattgtacattttactgtaagtcttggtaaataaactgtttatatcgttgatcatttctcatttgcaatttatgtgttaccaatgcaatgctctttcttatttacccgagggggtaactctgtaacattgagggtgagagtgtgcaatctgtagatatttccttacctcttaataaatagaaatttctcgatttacccccacaaggcaaggccgctctagaggatcccagcttncgtacgnnnnnnnnnnnnnnnnnnnnnnnnnnnnnnnnnnnnnaacggaatt

SEQ ID NO: 98472 - DNA, 373 bp, Arabidopsis thaliana columbia
  unsure (1)..(373): unsure at all n locations
tccctgcagaaaaagcacaaaaatcataaaaccctagcaatggcgacccaaccggcgaaagagtctgttcaatgtttcggaaggaagaagacggcaacagcagtcacctactgcaaacggggctcgggcatgattaagctcaacggttcgccgatcgagctttatcagccagagatcctccgattcaagatcttcgagccagtccttctcctcgggaaacaccgtttcgccggagttgacatgaggatccgtgccacgggcggtggtaacacatctcgggtctacgcaatccgtcagagtatcgctaaggccctcgttgcttactaccagaagtacgttgatnagcagtcgaagaaggagatcaaggacatct

SEQ ID NO: 98473 - DNA, 538 bp, Arabidopsis thaliana columbia
taggtgcaacttagaagagctatgacgtcgcatgcacgcgtacgtaagctcggaattcggctcgagcgccgccgttcatcaatctctccgtcgtgtttctgccactagctctccaccaaactttctctctcgcattagttgtttagggataaacatggcaggagaaggtgaagaagatgtacctagagatgctaagattgtgaaatctctgcttaagtcgatgggtgtagaagactacgagcctcgtgtgatacatcagtttctggagttatggtaccggtatgtggtcgaagtgttgacagatgctcaggtttactcagagcatgctagcaaacccaacattgactgtgatgatgtgaagctcgctattcaatccaaagttaatttcagcttctcacagcctcctccaagagaggttctgcttgagcttgctgcaagtaggaacaagatacctctgccaaaatcgatagcaggacccggtgttccactcccacctgaacaggacacattgctgagcccaaattatcagctcgtgata

SEQ ID NO: 98474 - DNA, 1644 bp, Arabidopsis thaliana columbia
  unsure (1)..(1644): unsure at all n locations
nnnnnnnnnnnnnnnnnnnnnnnnnnnnnnnnnnnnnnnnnnnnnnnnnnnnnnnnnnnnnnnnnnnnnnnnnnnnnnnnnnccacgcgtccgcccacgcgtccgcccacgcgtccggaatgaatctctgtttcttgttttggaaccgagatggcttcctaacaattgggcttttctctgcctcttcctaggaatctgaagctcttctctactctctactctatcactccatctgtgaacatatctttcttattcttctaggcactatctatttttcactttttgtaattggaatttggagatggctatgcaaactgtgagagaaggtctcttctctgctccacagacttcttggtggactgcttttggatctcagccgttggctccggagagtctcgccggcgattctgactcattcgccggagttaaggtcggatctgtcggagagacaagacaacgtgtggataaacagagcaactctgcaacgcacttagctttctcacttggtgatgtaaagagtccaagacttgtgccaaagcctcatggagctactttctcaatgcaatcaccttgcttggaacttggattttctcagccaccgatctatacaaagtatccctatggagaacaacaatactatggagttgtttcagcctatggatctcagagcagggtaatgcttcctctaaacatggaaacggaagatagtaccatctatgtgaactcaaagcaataccatggaatcataaggagacgccaatcccgcgcaaaggctgctgctgttcttgatcagaagaaattgagtagtagatgccgcaagccatatatgcatcattcgcgccatctccatgcattgcggcgtcctagaggatccggtgggagattcttgaacactaaaagtcagaacttggaaaatagcggaaccaatgcaaagaaaggtgatggaagtatgcagattcagtctcagcctaagcctcagcaaagtaactctcagaattctgaagttgttcatccggaaaacgggaccatgaacttatcgaacggattaaatgtgtcgggatcagaagttactagcatgaactacttcctaagttctcccgttcattctcttggtggcatggtaatgcctagcaagtggatagcagcagcagcagcaatggataatggctgctgcaatttcaaaacctgatcctttaccgtttcacagtcaaacggagagagataaagaactcttgccttggtataaaggattttcctttttgccaatccgctttggctgtgaacaggcaaatcatctttggctcattctctattaaggtaacttcgccgtgaggtgaaaaaagctttgatatatttatcttcagtgtaaaagtagttaaaactggtgaagaacaatgatgtgtttggtcactaaacccacttgttccaactagtagtgtgtgttttaagaaaactctgttatctgattttgtagctctctctggctttgtgtgtttctcaaacaactgtaacaacttttaagttatgtggtttatgtaacatatttaagacctgtgtttttgtataaaaaaaaaannnnnnnnnnnnnnnnnnnnnnnnnnnnnnnnnnnnnnnnnnnnnnnnnnnnnnnnnnnnnnnnnnncg

SEQ ID NO: 98475 - DNA, 572 bp, Arabidopsis thaliana columbia
  unsure (1)..(572): unsure at all n locations
tgattgtggttcagattttcagccggaaactggagtacaaaggtcttcgtctcctctctatcgccattcttgacatgctaaacgcaacactagtatctgcggctgcaaacgcggcggtgttcgtggcagagctagggaagaacggaaacaagcacgccaagtggaacaaagtctgcgacaggttcaccacttactgtgatcacggcgcaggagcaatcatcgcagcattcgccggagtcattctaatgctcctcgtgtccgccgtctctatttcccgcctcttaatcaattctaaaaccttctccgcctccgccaccacaacctccgtcgtctaaaacatcgtggccaaaaattcagcaacatgtgtgtgaccattttatagatgttgtggcctactttgtgtgtttgtctctcaagtcactagcaaattgtgtaatgcactcctttgttctatcactttcacatttgtgaaaaaaaaaaaaaaaaaaaagnnnnnnnnnnnnnnnnnnnnnnnnnnnnnnnnnnnnnnnnnnnnnnnnnnnnnnnnnnnnnnnnnnnnnnnnnntagtatc

SEQ ID NO: 98476 - DNA, 649 bp, Arabidopsis thaliana columbia
  unsure (1)..(649): unsure at all n locations
nnnnnnnnnnnnnnnnnnnnnnnnnnnnnnnnnnnnnnnnnnnnnnnnnnnnnnnnnnnnnnnnnnnnnnnnnnnnnnnnnnnccacgcgtccgctcactgcatcaacaatggccagagagaagattgtggtggctggtggtaccacaaagagctggaaactactcttggggctgagaatatttgcattcatggctactttagctgcagccattgtaatgtcactaaacaaagagacaaagaccttggttgtggccaccattggtactgttcctattaaagccactttaaccgctaagtttcagcacacaccggcttttgtgttctttgttatagctaatgtaatggtgagcttccacaacttgttgatgattgtggttcagattttcagccggaaactggagtacaaaggtcttcgtctcctctctatcgccattcttgacatgctaaacgcaacactagtatctgcggctgcaaacgcggcggtgttcgtggcagagctagggaagaacggaaacaagcacgccaagtggaacaaagtctgcgacaggttcaccacttactgtggtcagggggnggngaattatcgagatttgcgggggnatttaatgnnccngggncgcgtttttttcggcttnnanaatttaagc

SEQ ID NO: 98477 - DNA, 790 bp, Arabidopsis thaliana columbia
  unsure (1)..(790): unsure at all n locations
ttaggtgcactatagaagagctatgacgtcgcacgcacgcgtacgtaagctcggaattcggctcgaggaggaaaagagtttctattgcaaacgagatcatcattaatccttctctattacttcttgatgaaccaacctctggtttagattccaccactgctcttagaaccattctgatgctccatgacatcgccgaggcggggaaaaccgtgatcacaacgatacatcagccctcgagtaggctcttccataggtttgacaagctgattctactaggaagaggaagtcttctctactttggaaaatcatcagaagctttagattacttctcttccattggatgctctcctcttatcgccatgaatcctgcagagttcttgctcgatcttgccaacggtaacatcaacgatatctctgtaccttctgagttagatgatagagttcaagttggcaattcaggtagagaaactcaaactggcaagccatctcctgctgctgttcatgagtatctagtggaggcctacgagactagggttgcagaacaggagaagaagaaactattggatcctgtgccactcgatgaagaagctaaggccaaaagtacgcgtctaaagcgccaatggggaacgtgctggtgggagcaatattgcatactattctgcagaggactcaaagaacggcgacacgaatacttcagttggttgcgtgttacgcaagttctttccacagctgtcattttaggtcttctctggtggcagtcggacattangactccaatgggactacaaga

SEQ ID NO: 98478 - DNA, 754 bp, Arabidopsis thaliana columbia
  unsure (1)..(754): unsure at all n locations
nnnnnnnnnnnnnnnnnnnnnnnnnnnnnnnnnnnnnnnnnnnnnnnnnnnnnnnnnnnnnnnnnnnnnnnnnnnnnnnnnnnnnnnnnnnnnnnnnnnnnnnnnnnnnnnnnnttttttttggataataacttaacgcttagattaaagaaatcaaaatgggggagaagaatatacatttgtgtttcttttttatcttgtctcctttttatgattctctgatattacagcaacccaacaacacagctgagatgtaatctattctccaaacctcttaaatgatgtcccaatagcatgcaccagaaaaggagctttgcaaggtaatccctggatgtgtccacctttctaccagttccatcaccaccttctgtagtccttatgccaggattttgcatgaaatttgaagtagtctggtcttcgaagagcctctctaatacgttttggacaagctgggttcacaatctcttccacttccggggaaaacagttgagataactcagccaccatctcggggtctaaagaccggcaaataatcccaacaaatcattcctggtttccctttctcaaaattctatccccaaagntttcctnccttttgggaancnaaggcccccccttcaagggnagnaaggccaggcnggnaaaaggnggaaaanancaacggttaggggggaaaggtcccaaaaccgggggggcangcccnnaatccccaaaaaatcccnaacccancatnccntnncggcaaanaaanggc

SEQ ID NO: 98479 - DNA, 637 bp, Arabidopsis thaliana columbia
aagaactaccttcagttcatgaagacgagcaagtgctgcatatgcgccaaaggctttgaagtgaatagtccgagagtggtagaggccattttctatgattgtgttccggtcatcatatctgataactttgtcccgccatttttcgaggttttgaattgggaatcatttgcgatttttataccggagaaagatatcccgaatttgaagaagattctgatgtcgataccggaaagccggtaccggtcaatgcagatgagagtgaagaaagttcaaaagcattttctgtggcatgctaagccagagaagtatgatatgtttcacatgattcttcattcaatttggtataaccgagttttccaaatttctgtttaaaaattttgttcaacaattcaatgtacattttttacagataaaatttctgagtaaactcaatttacaaaaaaaaaaaaaaaaggggcggccgctctagaggatccaggctttcgtacccgtgcatgcgacgtcattgttttgtataggtgcacctaaatcaatttcctgccccgtgttttacaaccttgtaactggaaaaccccgatgttacccaactaatcgccttgtagaaaatccccctttcgccagctggcgttattaacaa

SEQ ID NO: 98480 - DNA, 535 bp, Arabidopsis thaliana columbia
taggtacaactactagaagatttatgacgtcgcatgcacgcgtacgtaagctcggaattcggctcgagggaaaggaagattaaacatgatatcttagcatttgcagaaagattttactctgctgatgaagtcaagtttttgtcaactttaccggaccctgaagttcagagaaaggaatttattaagttatggaccctaaaggaggcatatgtgaaagcattaggaaaaggcttttctgctgcgccttttaataccttcacaatccagtccaaggttggaacaaaaggagaatacaatctttgcaagatgactgaaatgactgcaagttcgctggaggagacaaacaaatgcgatggagaatggaagttttcccttttggaggtggatgattctcattatgctgcaatctgtattgaagatgatgaagctagtggaggagctcctatgagggggattgtccgaaaaaccatcccgtttgtagaagatgaacttatatctgaaagcaaacttctttagttaggggagccttaaacct

SEQ ID NO: 98481 - DNA, 695 bp, Arabidopsis thaliana columbia
  unsure (1)..(695): unsure at all n locations
atgttctccnnnnnnnnnnnnnnnnnnnnnnnnnnnnnnnnnnnnnnnnnnnnnnnnnnnnnnnnnnnnnnnnnnnnnnccacgcccgtccgaccactttcttcccctaaaagatttcatctaaattcagtaaactcatctacgagttcttgtttttctttaaattttctaagagagagcctaagctgtttaatatagtcatctaatatttagagagatggtgggagagagaatgtggtggtggtcatcatcgtcgacgaaactccgatcaaaccttgaaagatttctcagaggaatcactccaaaacctccttctttctctttatcacagagctgcaagagtgatttgaacagtttgtggatccatgagaacaaagatgagattgaatatttcaggcttagtgatctttgggactgttttgatgagccaagcgcgtatggacttggatcaaaggtcgacttaaacaatggtgaatccgttatgcagtactatgtcccgtatctatccgccattcaaatctatactaacaaatctacagccatttctaggattcatagtgatgtggttgattgtgagagtgaatgttggagtgatgatagtgagattgagaagttgtctaggtcaatgagcagtggttctagcanaatatgggattctgcttctgatgattcgggttatgagatcgatggtactt

SEQ ID NO: 98482 - DNA, 294 bp, Arabidopsis thaliana columbia
gatggattatgttaacactgcgtttgagagactcgagaagaacgatgtgcgttataggttcgtcgttgatgtcgaaggaagcaatctcgacgcttgatatcatgaaactcgaggctttttatacatactcgaatactcgattttaacacatatatcatatgattcatgattagaaatccaatatcattatatcttttaccactttctcatgaaaaatagtgacacacgaatgaaaaagtggtaaaagatataatgatattggatttctaatcatgaatcatatgatatatgtgt

SEQ ID NO: 98483 - DNA, 652 bp, Arabidopsis thaliana columbia
  unsure (1)..(652): unsure at all n locations
cnnnnnnnnnnnnnnnnnnnnnnnnnnnnnnnnnnnnnnnnnnnnnnnnnnnnnnnnnnnnnnnnnnnngactagtgagctcgtcgaccacgccgtccgggtaaactcattctcatgggagttatcaacaatccattacagtttctcactcctctgcttatgcttgggaggaaagtgataacggggagcttcatagggagcatgaaggagacagaggagatgcttgagttctgtaaagaaaagggtttgagttcgattatcgaagttgtgaagatggattatgttaacactgcgtttgagagactcgagaagaacgatgtgcgttataggttcgtcgttgatgtcgaaggaagcaatctcgacgcttgatatcatgaaactcgaggctttttatacatactcgaatactcgatttaaacactcttatgtttgtttgtgagctttttcattcgtgtgtcactatttttcatgagaaagtggtaaaagatataatgatattggatttctaatcatggatcaaataaaaaaaagggggggcccctgggnncccccgggattccgggccgggacctgnngggggaccatttccccaaagggggcnataagctggggaaacgggnaaaggtcccgggnaatttcccncccaanccca

SEQ ID NO: 98484 - DNA, 304 bp, Arabidopsis thaliana columbia
ctcgaactcactactcttcagccgtcgacgccgcatccgttccatttccgagaagccggagtacttcctccgccttctcttcctctgcctcgtctcggagaagatcttcggatttcactttcgacgatgattatagcgagctgcttagagctgcttccgttaggagtttaggtcataagaatgagattgacatgatcatacaacaacagcaacagcagcagcagcaacggcaggagaatcgcgttgcgatgggagcggttacggttaaaggcggtttgcctaagagctcgagtgttgggatgac

SEQ ID NO: 98485 - DNA, 328 bp, Arabidopsis thaliana columbia
gaagtctctggttcctgatcccatgaaacaagagcctttagtaattgaaaacactccagatcctttagcaggggaacagacatggccaacagaggaagaaatggctgaggctgacaaaaatcagaagcagggcaggctaaagaagaagactttgccgcgagggacttcagaatatcaggctgcttggattgtggatgaaacagatgaagaggattccgataatggtgattctgatgataatggtatggtattggatagaggagaggattccaatcaagaaggaatgtatgaccaagaatttgaggatgacggaaaatcattgaacctg

SEQ ID NO: 98486 - DNA, 556 bp, Arabidopsis thaliana columbia
atgttttaggtgcactatagaagagctatgacgtcgcacgcacgcgtacgtaagctcggaattcggctcgagctttagaagatgtctttgaagaacttttgcaagaagagattgtggatgaaactgatgaatatgttgacgtacataaaaggattcgagtagcagcagcagcggctgcttcatcaatagcgagagctccttcaagccggaagttgcttgcgcaaaagggaactggaggacaaaataagcaagggcagacgaataaagttcctggtcaggaacaagataaaatgcttggaactattaccgagccgattcgaagaaacaactgatgttgtgttcttgcttaaggaggcaaaaactctgttgcggtataaagaaagaaaacaaagaataaattataagatccaggttcttctgtatactttgatccatcacataaattatatatatataaaaatataaaaagtcagcagaagcaatggttcaacccgatttttgaagatgctgtgcttccttggattatacaaaatacctaccatttggaattactccg

SEQ ID NO: 98487 - DNA, 837 bp, Arabidopsis thaliana columbia
  unsure (1)..(837): unsure at all n locations
taggtgacacttagaagagctatgacgtcgcatcgcacgcgtacgtaagctcggaattcggctcgagttcagatgctgagatttgggaggttcttggcaagtgtcaactaaaagaagtggttcaagaaaaagagaacggcttagattcattagttgtggaggatggatcaaattggagcatgggacagagacagttgttctgtttaggcagagcagttttgagaagaagcagagtattagtcctggacgaagccacggcatcgatagataatgcaacagatttgatacttcagaaaacaatcaggcgagaatttgcagattgcactgtcattacagttgctcaccgtatccctaccgttatggattgtacaatggttctctccatcagcgacggacggattgtggagtatgatgagccaatgaagttgatgaaggatgagaactctttgttcggaaagcttgtgaaagagtattggtctcattacaactcggctgactcacgttgatgatgatgataacaaactataatgtggaaaatgtagtactagtaattttattgtcattgccactagtaattttcattttggaaaatgaaaatgtaatactagtaatttagaacatgtaattgtttgatatactctcgagtaaaacaaaacatgagatcataatgatttgcggtgcaactaataataatcatcttgtaaaaaaaaaaaaaaaaaaaaaaaggnnnnnnnnnnnnnnnnnnnnnnnnnnnnnnnnnnnnnnnnnnnnnnnnnnnnnnnnnnnnnnnnnnnnnnnnnnnnnnnnnnnnnnnnnnnnnnnnnnnnnnnnnnnnnn

SEQ ID NO: 98488 - DNA, 523 bp, Arabidopsis thaliana columbia
  unsure (1)..(523): unsure at all n locations
ggnnnnnnnnnnnnnnnnnnnnnnnnnnnnnnnnnnnnnnnnnnnnnnnnnnnnnnnnnnnnnnnnnnnnggctcgagcaagggctatcatcaacttgaagacacgacctctgcttctggtggtatgatgcttgttataacgttggcgatctgcaccttcatcgagcttctgtcaatgtggaatttgacgagacgagaagttcagctatgcaatatgttatcccctgaggctccccgtctctctcttgcaacttacaactggggacttgtttttgtagcaatgcttgtagacaacttcctatatccgatatcagctttccggtctcatttttctcaatccataaactggtctggaatcagataccacttgaaagatggaaagatattcacgatggagagacgaaaggatatgggaccaacaaagactgatttaggaggcaaacatttgtttggtaagaaaggagctcctcagaaagcttcattcttaagctcattgggaagaaatttggctcactggcgacaa

SEQ ID NO: 98489 - DNA, 371 bp, Arabidopsis thaliana columbia
agaagacagtgaagaattggtttaatcggcggaatgagcttcgctaaagacgccggaaaaatcaattggtttcccgggcatatggctgcagctactcgcgccattcgtaaccgcctcaagctctccgatctcgttatcgaagttcgcgatgctcgtattcctctgtcatccgcgaacgaagatctacaatcccaaatgtcagctaagagacgtatcattgctctgaataagaaagatttagcaaaccctaatgttctcaataaatggactcgtcatttcgaatccagcaagcaagattgtattgccattaatgctcatagcagaagctctgtcatgaagctgcttgatctcgtggagttgaagctcaaaga

SEQ ID NO: 98490 - DNA, 1668 bp, Arabidopsis thaliana columbia
  unsure (1)..(1668): unsure at all n locations
cnnnnnnnnnnnnnnnnnnnnnnnnnnnnnnnnnnnnnnnnnnnnnnnnnnnnnnnnnnnctcatggcgatgttggtttcccaggaaaggtaaaagagacggagacgaaccaaaacaaggaagaaagaagaagatcttacatacgaagatcactctctgattcactctgagagacaaactggtttactttggttctgtttgacaaaaggagacatgcaaaaataaatctctatcccttgtttttcttcttcgcttcatcgattactcaaagaggttgttggttgtgagaataattagcttgttaaggaagacgttatgatgcatcagatgttgaataagaaagattcagctactcattccactttgccataccttaatactagcatctcttggggagtggttccaactgattccgttgctaatcgtcgcggtcctgctgaatcactaagcttgaaggttgattcaagacctgggcatatacaaactacaaagcaaatcagttttcaggaccaagattcatcttcaacacagtccactggtcaatcttatactgaagttgctagtagtggtgatgataatccttccagacaaatctccttttcggctaaatcaggatctgaaataactcaacggaaggggtttgcaagtaatcctaaacaaggctcgatgactggatttccgaatattcactttgctcctgcacaggctaatttctcatttcactatgctgatccacattatggtggtttattagctgcaacttacctaccacaggcaccaacatgcaatcctcaaatggtgagtatgattcctggtcgtgttcctttaccagcagagctcacagaaactgatccagtctttgtcaatgcgaagcaataccacgcaattatgaggaggagacagcaacgtgctaagcttgaggctcaaaacaaactaatcagagcccgtaagccctatcttcatgagtctcgacatgttcatgctcttaaaaggccaagaggatctggtggaagattcctaaacaccaaaaaacttcttcaagaatccgaacaggctgctgctagagaacaagaacaggacaagttaggccaacaggtaaacagaaagaccaacatgtctagattcgaagctcatatgctgcagaacaacaaagaccgcagctcaaccacttctggctcagacatcacctctgtttccgacggtgctgatatctttggacacactgaattccagttttcaggtttcccaactccgataaaccgagccatgcttgttcatggtcagtctaatgacatgcatggaggtggagacatgcaccatttctctgtccatatctgagacagtggatcttggtgctgtgttcatgttcccaccaagaaggggaagtcatccttggctactactagttctttcgcttgttgtaacttcagtgtttttatttcatattatgtctgtgttagacatcacaagaacgaccaagatcttcactttgaaacactctattaccttttcatcttctgttaccatggatctcttgtctaaactagtgatatgattcttctgataaaaaaaaaaatcctcttgtgttgtcttcgggttttttcgttttccgccgcntaggaaggccgctctagaggatcccagcttacgtacgcgtgtatgccccgt

SEQ ID NO: 98491 - DNA, 508 bp, Arabidopsis thaliana columbia
atacgactcactttagggaaagctcgtacgcctgcaggtaccggtccggaattcccgggtcgacccacgcgtccgataaaaaagaggaaactgttgatgctttgattacgaacgtgcaagtgcaagatcagcccaaggaagattttgaggctgctgcaatagagaaagagatatcagaacaagaacacaagttgaatgatctcaccgatgtccaagaagatattggtacatatgttaaagtgcaagttcctgatgatgaaataaaaggtgatggccatgattcagttgcagcacaaaaggaagaaactagctcaatagaggagaagagagaggttgaacatgtcaaggcagagatggaagatgcaatcaaacatgaagtttccgtagaagagaagaacaacacatctgaaaatattgatcacgaagctgcaaaagagatagagcaagaggagggtaagcaaacaaatattgtcaaggaagagatcagagaagaagagaaggaaataaa

SEQ ID NO: 98492 - DNA, 416 bp, Arabidopsis thaliana columbia
caccaataatgtcgacggagagaaatccgaacactttagtgaaaccttatagagaggattactttaaggagccgagttctgcagcggaaccaagcgagagttctcagaaagcgagtcagtttcaggagcaagagttagctcagggtcgtgggacggctaatgtggtgcctcaacctatgtgggcggttgcgccagggactacgaatggaggtagtgcgttctggatgcttccgatgagcggttcgggtgggcgggagcagatgcagcagcagcctggtcaccaaatgtgggcgtttaatccagggaattatccagttgggacaggacgagtagtaactgcaccaatggggtcaatgatgttgggaggtcaacagctaggattaggagtggcagagggcaacatggcggctgcaatg

SEQ ID NO: 98493 - DNA, 564 bp, Arabidopsis thaliana columbia
actgtgactaccgcatgcacgcgtacgtaagctcggaattctgctcgagctgggtgaccgaaccgtcgtagcgagccgttccttgcggctaggtgccaatgattctcctccccaccgtatgaggaggctgctgatccggcggcggagttaaactcgccggaagatgtatctcggagaataactaggaccggtgccgtgggccgtgcaaaccgttggtactattccattactacacagcctacaggagctactcatataaagcattaaactttggcaaaaaagaggctcaaaaacaaagcaagcaggagaccagtcgttggtccaaaaaacaaaaatacccatttgctgattttgagttcccctccctttgctttttcagcattctcgagatctttgatgtggtcggagggatccaaaagaagtttaaagcaaagtaaaacaaagcaaacttgaggttattattggattatagctgatggtgatattccctcggtggataaaggtccaatacacaatcattaaaacaactggctgatgagtgatgagcgatgacaatagcaaatg

SEQ ID NO: 98494 - DNA, 1405 bp, Arabidopsis thaliana columbia
tgcagatactttgagggtcagctagcttcaatatcagaaggtgatgatgaactggaagtggagccttcaccagtcagagttaccgaggctgctgcaaaggtttctttgcttgaggaacagataaagcctcgtgccaatcttccacctttcctggttcctcttcgtgatcgacgacctgagagactccactacattggtgtctcttttgggcttactttggacctcttccgtttctggagaaaacataaatttgctccattctacatcagtcaaataccaagtgctgtgactggtgagcacacatgtatgcttctgaaaccattaaccttaagcaacgatgaattcgaagttgatgagtcggatgaactgggcttctttgctcccttctataaagatttcaggataaggttctctaaactgttgagtgataaattcaagaagatggattataaacttgcaatgagtgttttgaaccctaagatcaacttcccagaggttgatttgactggaaattcaccagatggatttttgaagaaactcgacggagttctttcaccttatgatatggagagattcagagcatacactgccaatctcgttgacttcaatctggtttatgacatctgcaaaactctagctcatcattattttcaagagaagctcccagtctcgctgtcgtatgttcaagcttctgtactcctgcgtttgggcttgcaggagtcagatttctcgagcatcgagagacaaatgcagttggagaggggccaaatatactctcttctattgaaggttggaaagaagttatacaaatatttgaatggaatcgcaacaaaagagctcgaatccaccttacctcggttgaaagatagagtgcttgaacctcacaaagtatcagtagacgaagatctcagggagggagcaaaagaagttgaggaacaaatgagggcaaggatagaagaattgttggaccctgagctacttgaccaatttgctattggggacaaagaagctgaggctttgcaaaagtcgaagatctcttcaagtggtcttatcagtatagagtccaccaaaactgataacaagaaagagaagccaagtggttttgataaatcagccaaaaagagaggcaatgataagcattcctccacatccaacaaaaagagaagagcctgagatggaggttgatgtcaacaattgtttttttgtaacagtgaccagaaaattttgatctttggtctttttacgaatttttgtaaccaggttgaataatttattaaaattatggtttgatcatacaatttttttaaaaaaacttacagaaaaaaaaaacaaaagggcggccgctctagaggatccaagcttacgtacgcgtgcgtgcgacgtcataactcttctaagtgtcaca

SEQ ID NO: 98495 - DNA, 559 bp, Arabidopsis thaliana columbia
ctgcacgcctacgtaagctcggaattcttctctagacaggtcaagcccaaattctttctatatattaaaaaaaaatcaacacaaaggaaaaaaaaatgggttacgttttgggtagttttgccacttgcattggttctcatagcttacaaattcttattctcatccaaaacgcagggcttctatctcccgccaggaccaactcccgtttcctatcggcgagccatctcccacctagtgaaaccaccgggcccaccgtctcttccggccgcttcgctggaaaaatacggcgacatcttctcccctccgttaccggctctcgcccagtcggagttgatctctttatttgcctctctgaaaaaaaatccttccccggcaaaaacgacttattttaaacaaacaaaccgatttttttaccccgaaatacgttgcttaccattaccccactttagggaacccgcccttacggggaccatttggcttatctccgccgtttttggctcttaaaaaaccctttcctttataccggctaaccgaattctttttcggaacttaaaaaaaa

SEQ ID NO: 98496 - DNA, 444 bp, Arabidopsis thaliana columbia
acgactactttagggaaagcacgtacgcctgcaggtaccggtccggaattcccgggtcgacccacgcgtccggcgccagctacacaagtaatatcgttactaatgcttcaggtgacaatgaagtatcaagtgctgtgacttcatctccattggaggaatctagttccggggaaaagggagagactgaaggggacagtacttgtttaaaaccagagcaacacttggcttcttcgccgcactcatatcctgagtcaactgaagttcacagcaatagtggctcccctggggtaactagtagagaacacaaaccagttcaaagtgctaatggaggacatgatgttcagagtcctcaaccaaataaggagcttgagaagcagcaaagcagcagagtacatgtagatccagagattacagaaaattcacatgcggaaacagaacctgagg

SEQ ID NO: 98497 - DNA, 819 bp, Arabidopsis thaliana columbia
  unsure (1)..(819): unsure at all n locations
aaacggtaccatcatccaattgtaactcctcctccgccgccgccgtcgccgccgtctcttccagctcttccgttattcgatcatgaatttagaaatcgtagtctctcagagattgataaacttgatctgtctatgaatcacttgatgtttggtattgctggatcttcacagctttgggaacgtcgtaaggaacttgtgagattatggtggaaaccttctcagatgcgtggacatgtctggcttgaagagcaagtttctcctgaggaaggtgatgattctcttcctcctataattgtctctgaagacagctctcgttttcgttacactaatcctactggtcatccttctggacttcgaatctctcgtattgctatggagtcttttcgtctctctctccctaatgttcggtggtttgtncttggtgatgatgatactatcttcaatgttcataatcttcttgctgtgttaagcaagtatgatccttcggagatggtttatattggaaacccctcggagagccactctgctaactcttactttagtcataacatggcttttggaggcggtggcattgccattagctacccctttaagcggaagtctntnccggattcacggcggttgtctcgatagntacccgaagctatacggtagtgatgatcggctcaaggctgaacactgaacncggngtcctttnncagaagcctnggtttaccagtggggtttaagggaatnncatggcttttgcccccaaccattgaccattgctaataaanggtgagntgaaccnttnncggttncatagagtaacttaagggt

SEQ ID NO: 98498 - DNA, 531 bp, Arabidopsis thaliana columbia
  unsure (1)..(531): unsure at all n locations
ccagaaccctaactactacaatctccaaggtgtttgccacaggcatttgtctgatcacctatcagagctggttgagaacaccttgtctgatcttgaagccagtaaatgcattgaggtagaggatgagatggaactctctcctctcaaccttggtatgattgcatcctattattacatcagttataccaccattgagcgcttcagttcactgttgtcttctaaaaccaagatgaagggacttcttgaaatcttaacatcggcttcagagtatgacatgattcctatacggcctggcgaagaggacaccgttcgaagattaatcaatcaccagaggttctcttttgaaaacccaaaatgcacagaccctcatgtgaaggcaaacgcgcttcttcaggcgcatttctcaaggcaaaacatttggcgggaacttggcaatggatcagcggtgcatgtccttctatctgcaaccagacttcttcaagcggatgggcgattgtgatttcagcaaatggcttggtgaanttnnccttc

SEQ ID NO: 98499 - DNA, 739 bp, Arabidopsis thaliana columbia
  unsure (1)..(739): unsure at all n locations
ggttttatcgacaatctgggatatccgaaaccggggaactaggaaggcaaaggccctgaaccagtgtgcaacacatgttcatcaactccatgtctgtttaccttgttctaaccacaagacaagacttctatacggaatgtcactagactttgctcctatattaaagaatcttccattcatggaacatctgtggagacatttcgctgaacaggtcttaaacgaagatctccggctagttttaggacaacaagaacggatgttaaacggagcaaacatatggaatttaccagttgcttatgacaagctcggagttcggtatagactatggaggaacgcagtagatcgtggcgatgataaactacctttctccggctaactgttattaaagaaatctaatggaagtttttgcagctccttattcaccagcaacctcagacaagtgtaggttattaatctggtttattctcaccgaagaaagagctttgccgagtaaaagatctggagtttgtggattcatctaaaaaaccgatgaaacaaagaacttttgcgtagataaaaggacaacatccactgtaaatccaaaggagatatattgttattcatttttccctgtgtacagttcactctctatgagaaattgaatatcagttttccacactaaaaaaaaaaaaaaagnnnnnnnnnnnnnnnnnnnnnnnnnnnnnnnnnnnnnnnnnnnnnnnnnnnnnnnnnnnnnnnn

SEQ ID NO: 98500 - DNA, 419 bp, Arabidopsis thaliana columbia
  unsure (1)..(419): unsure at all n locations
tntnatcgngaaatcatcacgtgaagaacacgtgggtgaaagancgttacgagagcnatgaagaagatggagaggtgaacaaactcatcctaaaggaagatgaagaaactaaagatatggtgacatcaccgantggtgagaggatgatgttaacaagtaaggtgaggtatctcacctatggagctctcaaacatgacacggcggcttcggcagcttccggtggtggaggaagagccttgcctcatccgtcgaacaagtacaaccgtggccaccccaagtactacagatgcagaggttgaagtgaaaactctctgctgataaaataatttcgaattaattaattgtaataaccctatattgtataataaagtttgttgagtatgtatactccatgcaacgtgtgttatctatgtgcttgc

SEQ ID NO: 98501 - DNA, 674 bp, Arabidopsis thaliana columbia
catgtaaacctgggaatgggtaaatcttaaagagatatctccgggagatatcatatgggaaggtgaagatcctgggatttctcgtaaaggaggacatcctgggcaaggccgtggaacaaaaaccatggctcgtggtggtcctgcaagcaatgcgggtggtagaggtaggggaagcatgaggatgcagcaacctaagacacagaatggcatcggaaagaaagctttaggcgaaatcgaaattctccacactgagacattgttaaaagaggtgggaaaagtttttgggtcagttaaccccaacccagcagaggtagagaaggcaaagagagtgctgagagatcatgaactagctcttatggatgccatcgcaaagcttgaagaaatatcagatggagaaagcggtaatatttgataggggctttctaaatctcctcagatgatggagccggagcattagagttgcaaaaaggtgttgtacatggtggtggcaaaatgtgaattgatgagggagatttggaaacttgtatggatggcaaaatgtagtttgtttaggacggggatttgatgacatttgtgtaccacataactccaaaaactggatttggaaattagggttcttaagcattgtaaaatccataagacttgatataaatgtagaatgtttcagagacgac

SEQ ID NO: 98502 - DNA, 841 bp, Arabidopsis thaliana columbia
  unsure (1)..(841): unsure at all n locations
atgatactgccnnnnnnnnnnnnnnnnnnnnnnnnnnnnnnnnnnnnnnnnnnnnnnnnnnnnnnnnnnnnnnnnnnnnnnnnccacgcgtgcgaaggattatcgttcacttaccagctcttatatctgctggacgctactggattttattctcttgggctcaagctcttgggattcaagtttgtagagctacagggcaagaactgatggatacatcctcaaggattcaaagattcggatcatgagcgtgagagacttcgtggtcctccatggttaaaaacggtgcaaggggcacttcttagctgctcatatgctgtgcttgactatgcccaaaccggtctaattgcagcagtttttatcttcaaaatgatggaatggtggtatcaatccgctgaagagagattatcagctccaacagtgtaccctccacctccaccttctccagccccaaagatggccaaagaaggaatccctctacctcagacagatccctctgtgctttttgcagcatnnagccananggactgtctgaagtagaggatcctctgtgcttatgctagacatcgtcaaatactaggtgcactggcttggataggttttgcttggttggattatattggtcaaaggcgagcgaaggccgtgactcgtggcaccggagtgataatnnnnnnnnnnnnnnnnnnnnnnnnnnnnnnnnnnnnnnnnnnnnnnnnnnnnnnnnnnnnnnnnnnnnnnnnnnnnnnnnnnnnnnnnnnnnnnnnnnnnnnnnnnnnnnnnnnnnnnnnnnnnnnnnnnnnnnnnnnnnnnnnnnnnnnnnnnnnnnnnnnnnnnnnnnnnnnnn

SEQ ID NO: 98503 - DNA, 905 bp, Arabidopsis thaliana columbia
  unsure (1)..(905): unsure at all n locations
gagcgtttcgtagaaaaattcgatttctctaaagccctaaaactaaaacgactatccccaattccaagttctagggtttccatcttccccaatctagtataaatggcggatacgccttcgagcccagctggagatggcggagaaagcggcggttccgttagggagcaggatcgataccttcctatagctaatatcagcaggatcatgaagaaagcgttgcctcctaatggtaagattggaaaagatgctaaggatacagttcaggaatgcgtctctgagttcatcagcttcatcactagcgaggccagtgataagtgtcaaaaagagaaaaggaaaactgtgaatggtgatgatttgttgtgggcaatggcaacattaggatttgaggattacctggaacctctaaagatatacctagcgaggtacagggagttggagggtgataataagggatcaggaaagagtggagatggatcaaatagagatgctggtggcggtgtttctggtgaagaaatgccgagctggtaaaagaagttgcaagtagtgattaagaacaatcgccaaatgatcaagggaaattagagatcagtgagttgtttatagttgagctgatcgacaactatttcgggtttactctcaatttcggttatgttagtttgaacgtttggtttattgtttccggtttagttggttgtatttaaagatttctctgttagatgttgagaacacttgaatgaaggaaaaatttgtccacatcctgttgttattttcgattcactttcggaatttcatagctaatttattctcatttaataccaaatccttaaattaaaaaaaaaaaaaaaaaaaaggaaaagggcggccgctctagaggatccaagcttacgtacgcgtgcatgcnacgt

SEQ ID NO: 98504 - DNA, 725 bp, Arabidopsis thaliana columbia
  unsure (1)..(725): unsure at all n locations
tcgttnnnnnnnnnnnnnnnnnnnnnnnnnnnnnnnnnnnnnnnnnnnnnnnnnnnnnnnnnnnnnnnnnnncttttttttttttttttgatcaaactccgcgtttttctttttacctcaaaaatcactctttcaactacaaagtcaaaccaaaaataaaaatgacatttatatccaacaatttgttctctgtaaatcaaaagacaagatcctttgtatgtttcttacagcattctatcctgaagatcactgaatatactagaggcaaatgttcccagcttattctttgtttcctcagctaagttagcaatagatgacatatcttgctgcgcctggaaagaaattcggttgatgagatcgcttgcagtgatatcgatgttggaatcatctggtccgtggccaaaaagatcagaacttgaaatagctgctgaacccgagaacttctgaagggtagcttttgagtcaagatcggcatctctgttctgatttccgaaaaattgggcagaggaaatcgatttggcgtttgaaaacttctttcttgcttcatctgtttcttcaacctgagctttggatgagcttgagcttgacttcttggggaaagcactgtccattccaaattcattaaagaaatttgatgactttggtggagcaacatggctaagcacccgtgtgccactttgcccaccagattgctcatcatcaaagtactcaaatcgagaggcaaa

SEQ ID NO: 98505 - DNA, 481 bp, Arabidopsis thaliana columbia
gcacgcgtacgtaagcttggatcctctagagcgtccgccctttgggtttttttttttttttttttttttttttttggagacaaaaaagaatttattaaaaatctaagtttaattgtaaaaaataacagcccaacacagatacaatataatctgggagaagataaaagtaccaaaaggtaaaatctatgaataactctaatttgtggcctaacaacatataacaatgaaccaagaagttccaagtctttggcctggagtctccctagacccaaataagacctcatttattggtaactatagcatgtcgaactagtggtagagttctaaacctcctcaggaacaaatagctcacataggagataattcataattggaatttttacaaaggttggccattaatccaccttcgaaacatgataaaactctcttgtggtttattctccggtgtgtgcccacttcctttgacagtaacaaatgtcat

SEQ ID NO: 98506 - DNA, 590 bp, Arabidopsis thaliana columbia
gtgacactatagaagagctttgacgtcgcatcaacgcgtacgtaagcttggatcctctagagcggctgccctttgggttttaatctctttttttttttttttactttttttttttttccctaatcacgtacgtgacttcaacgaaattttatagcatagattcactaaatcactgaattacagatattttctttcatacagaattaaagaaaaaagggttcaatcacactatcacacgtcgcttacgttaactaacggcggtggtgagctccggcggcgatcggagctggaggtggtttgcattggtagcatttggcaaagaggccaaaagtatcaatttgcctgatgaagttggtcatactggcccatccgccaaacccgaacccgagaactaggacccaaaccactatgaaagcgtttatcacgtaaactccagcccagctagggataaaaaacgggggtttctccgccgcgttccggcgggccgaggccgggccgtacgttaacattggtggcttaagccggggttattttgacggggaagggaccaaggaagggtccactgcccagtttattgggccccaaaaggg

SEQ ID NO: 98507 - DNA, 376 bp, Arabidopsis thaliana columbia
  unsure (1)..(376): unsure at all n locations
nnnnnnnnnnnnnnnnnnnnnnnnnnnngaacaaacataatttttcctattgggtattcaagattctggttatttttcttacacattaatagatacatccatttgaatatctccatctcctctgtatcaatctcaaatctctggccactttattggctaaactctgtagatatacaatatgatgctgataagacccgatttggcttttctgctttctcattccttagagggatcaatggttgtagtagaactcgaagaggtctcaatgacagattccgagattctagcttctgatttctcgttcgagtaagtcgaaagtatagtgacccaaataagctccacgcaatctatccagagaagtcgttgttctactggg

SEQ ID NO: 98508 - DNA, 516 bp, Arabidopsis thaliana columbia
atgatcccgacgagtcctctgttactcatttttacattgtaaaaaaaaacttcttatcttctctacgtgaataagaatctgaagagtcattttctcaagaatgacgtggctaaaacaaatgtggtcaagcattttagtgctagccgtggtggtgatcggagccagagctgtgcccatcacgtatcttgaatctgcagtggctaaaggagctgtgtgtttggatggtagcgcgccagcataccatttcgataagggatcgggctcaggagtgaacaattggatcgttcatatggaaggaggaggatggtgcactgatatagctacatgcgttcaacgtaaaagtacaatgaagggttcttctaagcttatgaacaaagactttggtttctccggtatcttgggtggcaagcaaagcaccaatccagacttttacaattggaatagaatcaaagttcggtattgcgatggttcatctttcaccggtgatatagaagctgttgatccgacgcacaagct

SEQ ID NO: 98509 - DNA, 608 bp, Arabidopsis thaliana columbia
gatacgtccagctctaatacgacttactttaagggaaggtgggacccctggcaggacccggcccgaatttccgggtcgaaccaagccgtccgcccagccgtccgctcatctttcttgcgacgggccctgctacccggtgcgtgacaggttgaatcattctcctccgattcacggtgattccggcgactacagactcaacatttaataagccgatctcttacatggtacgagctcggacaaattgaagaatacaaaggtccgagaaataatttggaataatggcgtcttcatcggattcatggatgagagcatacaacgaggctttaaaactctctgaggagattaatggaatgatatcagaaagaagttcatcggctgtcacagggcctgatgctcagcgtcgtgcttcagctatacgaaggaagatcaccattttcggtaacaaattagatagtctgcagtctcttcttgctgaaattcatggaaaacctatttcagagaaagagatgaatcggcggaaaggatatggtagggaatctgaggtcaaaagcaaaccagattgcgaatgcttttaacatgtcaaactttgccaatagggacagcttgct

SEQ ID NO: 98510 - DNA, 977 bp, Arabidopsis thaliana columbia
  unsure (1)..(977): unsure at all n locations
gtgcactatagaagactttgacgtggcataccacgcgtacgtaagctcggaattcggctcgagcatcctccttcggctccggccccggcatcgtcgtcgtcccaactcccgccacaacagttcccaccaccgacttccccggtaccaccatcacttccaactccaccttcattatcatcggacctccaccaccgttcccagctcctccccggagcatcgaccttactcctctcaaactaatcttcgtcgtcatcgccttcgtcgccgttcccgctttagtttacgctctcttcttcaacggcccatgttcttcctcccgccgcaactcctcttcttcccgcaccagctcttcctccgacgatacacctcacgccaccgtcgacaccccgccgatcaccgagaccaccgtaacttcggaatccggagggaaattccacaaagatacacattctaaagagattggaaacgagtgctccgtgtgtctcatggtgttcaccgacagcgatgaactccgccaactaagcgagggtaaacacgcgttccacgtgttatgtattgagacgtggcttaaggatcatcctaattgtcccatttgtcgaactgacgtctccgttaaacaccaaaccgaagctcccaacgttcccgttaccgttaacggaaacgtgaatcgcagcggcggaaaccgtcgcgtttcggccactagtagagatgacgattggcgtcaaggtttacctgatgcttctagtttagtttgaattttttatttaataaaatttatttctctgtttttttccacagatttttaaagatatttttgtaaacaaattacgtcaatttcgaaaaaattatgtccgttnnnnnnnnnnnnnnnnnnnnnnnnnnnnnnnnnnnnnnnnnnnnnnnnnnnnnnnnnnnnnnnnnnnnnnnnnnnnnnnnnnnnnnnnnnnnnnnnnnnnnnnnnnnnnnnnnnnnnnnnn

SEQ ID NO: 98511 - DNA, 381 bp, Arabidopsis thaliana columbia
ctgggaaaaatcaaaatctgctattacggatctttaatcggaaaatgggtttgacgaatttcatattgacggtggccggagtaggcgccgtggtgatgctactgaggagcgacgtgaagcaatctgtgaccgtcctcaggcgtaacgtcaagcacatccgccactggctcgaagaagaatcctccgccgcctcttccaaggcagctgagtccataaaaccaaaggaaattgaggtaaaggttccgaagaaggacattccaaaagggaaggattagtgtgtttctatgtatacacgaagaagggtctttgtaagagtcggatttatgactttggtttcaacacttaacatttaagcattcttgcgagtgaaaacataataat

SEQ ID NO: 98512 - DNA, 409 bp, Arabidopsis thaliana columbia
cccacgcgtccgctgtatgggaagttgctgttcagatcggagattctggagatattcagtggcatgcatttgagttcgtggttgtgtgtaccgggaaatacggcgacgttccaagaataccagcttttccggcaaagaaagggccggagatgtttcaaggaaaagtaatgcattcgatggattactgcaagttagagaaagaagaagcttctactctcctcagtggcaaaaaagtagccgtcatcggcttcaagaaatccgccattgatttggctttagagtctgctttagctaatcaaggggaaggaggaaaagcttgcacaatggtggtgagaacaactcattgggggatcccacattattgggtgtggggcttaccattcttcttgttctactcttcgagagcttc

SEQ ID NO: 98513 - DNA, 1403 bp, Arabidopsis thaliana columbia
  unsure (1)..(1403): unsure at all n locations
ctnnnnnnnnnnnnnnnnnnnnnnnnnnnnnnnnnnnnnnnnnnnnnnnnnnnnnnnnnnnnnnnnccacgcgtccggacacttaacaattcacacctgctctttttactctttctaaaaccctaaattttctcgcttcagtcttcccactcaagtcaaccaccaattgaattcgatttcgaatcattgatggaaatgatttgaaaaaagagtaaagtttatttttttattccttgtaattttcagaaatgggggattccgacagggattccggtggagggcaaaacgggaacaaccagaacggacagtcctccttgtctccaagagagcaagacaggttcttgccgatcgctaacgtcagccggatcatgaagaaggccttgcccgccaacgccaagatctctaaagatgccaaagagacgatgcaggagtgtgtctccgagttcatcagcttcgtcaccggagaagcatctgataagtgtcagaaggagaagaggaagacgatcaacggagacgatttgctctgggctatgactactctaggttttgaggattatgttgagccattgaaagtttacttgcagaggtttagggagatcgaaggggagaggactggactagggaggccacagactggtggtgaggtcggagagcatcagagagatgctgtcggagatggcggtgggttctacggtggtggtggtgggatgcagtatcaccaacatcatcagtttcttcaccagcagaaccatatgtatggagccacaggtggcggtagcgacagtggaggtggagctgcctccggtaggacaaggacttaacaaagattggtgaagtggatctctctctgtatatagatacataaatacatgtatacacatgcctatttttacgacccatataaggtatctatcatgtgatagaacgaacattggtgttggtgatgtaaaatcagatgtgcattaagggtttagattttgaggctgtgtaaagaagatcaagtgtgcttgttgaacaataggattcactaacgaatctgcttcattgaatcttgtatgtaactaaagccattgtattgaatgcaaatgttttcatttgggatgcttttatgttttggtgagagttatgtagtgattcaagtgtcaaaatgcttacatagagaggcagcaaagaaaccagcttcgttagaatctgtgaggaaagctctgtttgttgagaaagaaggtcaattgcgcgaatgtaagtcgcgggtgttgtagtacaagttgccttgttgatcaggtgcagagacgcggagaggagtgaagccttcgtagtctccgttggttttagcagagcaaatgtctgtcatatacctcaatagctcataattttgtacaaatggttgatttatgtattcctcc

SEQ ID NO: 98514 - DNA, 544 bp, Arabidopsis thaliana columbia
  unsure (1)..(544): unsure at all n locations
gttaccaaatctctttttgtaaaattggagaaaatttgcaaatattttacaaatacaaaggggaaaactctaataatgacaacgtaagaatgtctagtttttggtgtgcaaaggaaggaagaaagatactacttgtctccgccaccgaacattcccatcatgtccttgccggaacccatctgcttcattagactctgcagaccgcccatgccgccaatctgcttgagcatctgaggtgggaggaccttgctcatgtgctgtgcgttcatgtttctcgagagtgcactcatatctccattctttgggatcttgagtcctttcatcttgctccatatcttcgctagcctcttgtactcttccaacatctccatcacttctcttacttgcctccctgaccctcttgctatccgcatcatccgggactcgttaaacaccttggggtttgagcggcccggctcatctggcatagatccacatagcangaccggttanttcggcngggttnttcaangcctcggaaattaagncaatcaggggatggaac

SEQ ID NO: 98515 - DNA, 497 bp, Arabidopsis thaliana columbia
  unsure (1)..(497): unsure at all n locations
cannnnnnnnnnnnnnnnnnnnnnnnnnnnnnnnnnnnnnnnnnnnnnnnnnnnnnnnnnnnnnnnnnnccacgcgtccgccaaaggcattggcgtgtagacatgatcactgctgttcttcacccttgttcttcggcgtctctctctcttcccaaccgtcctcctcttagagtttcttcttgttcctccaggtacgccatccttggtgcaggttttgctggaatctctgttgcctggcacctgcttaaggagagtccaaaagagctgagattaagtgttgacgtatatgatgaagttggcataggaggtggtgcttctggtgtttctggaggactcctccatccttattctcctaaaggaaagctactttggcatggtgctgagtgttggagagaatgtttagagctcttaaatgtggctgaaacagctgcttcttctagttaccaatctacggagaacagagactttagcgagagtttcggaaattntatggttcg

SEQ ID NO: 98516 - DNA, 662 bp, Arabidopsis thaliana columbia
  unsure (1)..(662): unsure at all n locations
atattgtattggtcaatttatcataaaggattatcttattcaagagagattcagagttgatatacaatggataacaaagttacagaagcttccttattatgaaaccttaatatgttcttagaaaagcaaagattgttttcagagattgaacataactttgatggcattgctcccacgagcactggtttcaaaggcatcttccacttccttttgagagaaaccgaatctgtgggttatgagtggctttacatcaatcttaccacttgtcaggaactcaagacacaatggccatgtgttcttgtacctgaacacacccaccacatctacctcccttgcagctgcaggagtgagagggacagtcattataccgtgacccattccgacaagacagactttaccgccacaacgagtggctgctaatgctgtcgacatgggttttgttaaaanccgnacagtcgnatgttaacatccgatggttgancccatagctttctgnaatctggttcaacctcagaancaacatccncnaaggttggtggcacttgganaattcatntggggcgggctggtttgcangggtaaagggtntcataacatcncaaaacaatntnggggcctgaagccgggagcacattgacaggganggncagcccntttccaaa

SEQ ID NO: 98517 - DNA, 525 bp, Arabidopsis thaliana columbia
  unsure (1)..(525): unsure at all n locations
agagaactttttcttaacattaatctcggatgcatatgttttgaaatggtttgaaaataaaagtgattcagttcctgaaacatttaaaagcggtatagtgccatactaaaaaaattaaccgcagaaaccgatccagagaccgaaaagacacgtccttctaggcggtgttttctgcagatgggttttcatgaacaaacgtgccaactgatttgaaccatcgcagtaggttacggtgatcctttacatagagccatgcctgaagaaaggggaagagactctcgttcacacctcgttcctctaggaatccatggaatacatctctcatcttctcatcgagctcttcaaaagaagggcctgtgtattgagtaggntcatcagacatctccaaagcctcaagttttggcctcatgggaacagaatgaataccaatgcatcaggggaaggccccaaaggaatgcaagaatcaggtgatttngctttgtnnagcacatgaggncaactggtgatccccatcggcttttnntc

SEQ ID NO: 98518 - DNA, 727 bp, Arabidopsis thaliana columbia
  unsure (1)..(727): unsure at all n locations
nnnnnnnnnnnnnnnnnnnnnnnnnnnnnnnnnnnnnnnnnnnnnnnnnnnnnnnnnnnnnnnnnnnnnnnnnnnnnnnnnnnnnnnnnnnnnnnnnnnnnnnnnnnnnnnnnnngaaaaaaaaaaaatctctatattatttacattatcgcctaaattcaaacctcacttttcacatacagaatatgtacatatctaacaaaagggtaaaaatagtaacaaaagtgaaaaggtagaaaatagtaaaaaagagttaaagaactttttcatcatcatcatcttcttccaccgtcgttattgccaccgccggctccagggaaatttacagaaacccgacccggattcaattcgggtttggacccgtttgaaatctgagtaaggacaagggatagtgattccaccttcttgagaaaacccaaattcttcttcagcctctctaagaagctcaccaaacagagggtggttaaagtaaacgataggccccaaaactctctgaaagtcgccgtcttttttaccgatgtaaaccgccgggtgacctttcggaaccgggtcgggcttttctcgaaggggttcttgaccaattggtatgtaccctgaattggagcatttagacccaataaacctggcgctgggggatgggagacttccaccccaacttatgagttttgggatggcttttggcttggaaaccgggcgggttgggcttaaccgggtgttttttggacga

SEQ ID NO: 98519 - DNA, 555 bp, Arabidopsis thaliana columbia
  unsure (1)..(555): unsure at all n locations
aaagaaagaaaaggtgtctctatcggattaaaccatctcaaatgttcataaacttctcattggatcataattgtaccactacaacaacctcggtgtctgacactgtgagctccaacaacagtcttaaaacatagacatatccggaggagctccatacatactcttccatgaatacggtatctgccatttcccaccttcttccccatggaacttgtcaggagtcagacccataagcttagatgaagcctcagctagaagaaatgcttcaggaatgttgtctccttcagaacagtaacatagcaggcatgtcatcttcaagcctcttgccttaaaagctgagaaaagagctgcaaatgggcaagcttgggatagtagncangncttcaagttcatcttctgaaggaacgcagctcttctanaatggtcttttccaaagcagggtaagggacttccaanatnttccttcggancaacncgggatntccaacccagccttcaagggcanctccncagtcangagnaganacnggggncgaaccagagnccttgngcaat

SEQ ID NO: 98520 - DNA, 665 bp, Arabidopsis thaliana columbia
tctgttggaccctcaggtcctataggagtcatcctaaaccgtccatctctgatgtctattaaggagaccaagtcaacgatattagacatggcaggaacgttttcagacaaaagactcttctttggtggacctttggaagaagggttgttcttggtgagtccaaggagtggtggagacaacgaggttggtaagagcggagtattcagacaagtgatgaaaggattgtactatggaacgagagagagtgtaggattggctgcagagatggtgaagaggaatttggttggaagaagtgagcttagattctttgatgggtattgtggttgggaaaaagagcagttaaaagcagagatcttgggagggtattggactgttgctgcttgtagctccactgttgttgagcttggttcagctgtccaaagtcatggtctttgggatgaggttcttgggcttattgggcctcaaacgggctctgttatctaaaccttgtttttgtactgcatttcactaatggtttatggtatgactatgtgtatggtttatcaatgtactgtatgtattaaacatccatcactaatttatatttgtttgtttctcgtttaaaaaaaaaaaaaaaagggcggccgctctagaggatccaagcttacgtacgcgtacatgcgacg

SEQ ID NO: 98521 - DNA, 588 bp, Arabidopsis thaliana columbia
aaaaaagagagagagagagagagagagagagagagagagagagaccccacaaagagcactaatcttcacaaccctaactccgatttttctcacacctcccaatctctctttctttctctctgatgaaaagctaacggaaaatggggaaatacataagaaagagcaaaatcgacggagctggagctggagctggtggtggaggtggaggcggaggtggaggtgaatcctctattgctttaatggatgttgtttcaccttcttcctcttcttcacttggtgttttaactcgagctaaatctctagctcttcaacaacaacaacaacgctgtcttcttcaaaaaccctcttctccttcttcgttaccaccgacttctgcttctcctaatccaccgtcaaagcagaagatgaagaagaagcagcagcagatgaacgattgtggttcgtatcttcagctacggagtcgtcggcttcagaagaaaccaccaattgttgtgattcgttctactaaacggaggaaacagcaacggaggaatgagacatgcggaaaaaaccctaaccctaagagtaatttcgattcgattcgtggag

SEQ ID NO: 98522 - DNA, 1094 bp, Arabidopsis thaliana columbia
ccgtttgcagtaccggtccggaattcccgggtcgacccacgcgtccgatcatcatggtgtgatgcaaatccgtgggaaccgccttatattcttgtacgctcaagtttaaggagcaatccattcttgagagaaatccccaccaggtaaacggttttgtagaagacgtagcagggcaaaaagcagcaacaatatttggtaaatgggatgatagcctttactatgttgctggtgatggaatcaacaagtcgaaagtcagtgatcctgcatcaaatgcctcgttactgtggaaaaggaccaagccaccgcctaatgtaactagatacaacttaacctcatttgccattactctgaacgagctaacacctgggttacaggagatacttcctcccacagactctaggctcagaccagatcaacggcatcttgagaatggtgaatatgagaaggcgaacttagagaaacaccggttagaaagaaggcaaagaatgtcgcggcaacttcaagaaagcggttggagaccgagatggtttgagagacaaggtgaaagcgacaccttcaagtacacgggtggttattgcgaagcacgagggcataggaactgggatgattgccccgacatcttcggggagttcacagaagagctagcggacgccgcttagaaagcttcttgacttcattccagaagatcttcattcggaccatattggagttgtttacacggcagcacccatctttcgaccatggtttcagttttctgcttgaaagagggcatagaacaaatatcagaaggaggctttggttctatctcctaaaagacgtcctccttttgagtcttagagtgtcactgtaaagtcttatatccttctcttcaattctctatctccctcgtcaaatagttgagattaatgtagtaggttggtcttacattggacaagttccttgtaatccatttgtatttaattattaaaaaaatatatgtcagcaataaaaataaatcccgacaaagactctttcacaataaaaaaaaaaaaaaaaaaaaagggcggccgctctagaggatccaagcttacgtacgcgtgcatgcgaagtaatag

SEQ ID NO: 98523 - DNA, 835 bp, Arabidopsis thaliana columbia
acgaccgactatggggttaagctggtacgcccgcaggtaccggtccggaattcccgggtcgacccacgcgtacgttcatcatggtgtgatgcaaatccgtgggaaccgccaatattcttgtacgctcaagtttaaggagcaatccattcttgagagaaatccccaccaggtaaacggttttgtagaagacgtagcagggcaaaaagcagcaacaatatttggtaaatgggatgatagcctttactatgttgctggtgatggaatcaacaagtcgaaagtcagtgatcctgcatcaaatgcctcgttactgtggaaaaggaccaagccaccgcctaatgtaactagatacaacttaacctcatttgccattactctgaacgagctaacacctgggttacaggagatacttcctcccacagactctaggctcagaccagatcaacggcatcttgagaatggtgaatatgagaaggcgaacttagagaaacaacggttagaaagaaggcaaagaatgtcgcggcaacttcaagaaagcggttggagaccgagatggtttgagagacaaggtgaaagcgacaccttcaagtacacgggtggttattggggagcacgagggcattggaactgggatgattgccccgacatcttcggggagttcacagaagagctagcggacgccgcttagagaagctccttgacttctttccagaaagatcttcatttcggaccctatttggaggttgttttacaccagcaggcaccccacatttttctgacccatgggggtttaagtttttttgcgtttgaaaaggaggggcattaagaaccaaaattt

SEQ ID NO: 98524 - DNA, 520 bp, Arabidopsis thaliana columbia
  unsure (1)..(520): unsure at all n locations
nnnnnnnnnnnnnnnnnnnnnnnnnnnnnnnnnnnnnnnnnnnnnnnnnnnnnnnnnnnnctcgtgcggctcgagagtttcactttgagattaggtcatttacccttttaagggtttctctcctactttcttgattctcttcattcccaagactcaaaacctagcaaacttggacatttggattgagtgtctctagtccgggtctcatttgggtggattctttctggtgaaatctttcttgtgagagttttgtattgggagaaagagataatcaaatgccggaggaagatttggtagaactgaaattccggttatatgacggttcagatgttggcccgtttcagtactctccaaccgccacagtgtcaatgcttaaggagagaattgtctctgaatggcctaaagacaagaagattgttccaaaatcagctagtgacatcaagttgataaatgctggtaagattttggagaatggtaaaactgttgcacagtgtaaagctccatttgatgatctccctaa

SEQ ID NO: 98525 - DNA, 953 bp, Arabidopsis thaliana columbia
  unsure (1)..(953): unsure at all n locations
tatacgactcatatagggaaagctggtacgcctgcaggtaccggtccggaattcccgtgtcgacccacgcgtccgcttctgttcatcaaagaaaacgaaacccatttctcaaaatccaaaattttcaaaaactcaaaactcatcatgggtttcatttcttcttcatcaccagtagaagagtctcattaccatacacacaagatcttccttttctccaactacatccttctcggcgctgcttcaagttgtatcttcctcacactctctctccgtctaatcccttccatctgcggattcctcctcatcctcctccacgccaccacaatcgccgccgcagtctcaggctgcgctgctgcatcttgcggaagaaaccgttggtacgccgctcacatggttgcaactgtgctcactgctatattccaaggctctgtctctgttctcatcttcaccaacacgtctaaattcctcgggagtcttaagtcgtatgtgcgtgaggaagatgctgctgtgattttgaaactcggtggtggtctttgtattgtgatcttttgtcttgattggatcgttcttgtgtgtgctttcttcttgaagtactatgcttatgtcgatggtggtgatggcgttgcgatgaagagaactggtaaggttcagagtgaggagaatccgaaggactggccatggccgttccaagtttaaagtttgtgtccttttgttttgtggtgagaactgttgagttagatcaatatcaaatgttggttttatggttctgtttcggtgggtattattgtgatttgttcatttgttttttgagtgtttgatgtaattcgtcaatgatctgttacatatataaagtcttttcttataattaaaaaaaaaaaaaaagnnnnnnnnnnnnnnnnnnnnnnnnnnnnnnnnnnnnnnnnnnnnnnnnnnnnnnnnnnnnnnnnnncgcc

SEQ ID NO: 98526 - DNA, 596 bp, Arabidopsis thaliana columbia
aattggtgattcaatacaaacgaaaacaagagtttcctatggtgaaagaaggaatggtcatgaccgagaagccaaagaggaatctcataagctctaatgagaagcgatacaaaggaataaggatgaggaagtggggcaagtgggtggctgagataagagagcctaataaacgatcacggatctggcttggttcatacaaaaccgccgttgccgcggcacgggcctacgataccgctgtgttttacttacgtggtccttcggcgagactcaatttccctgaagaggtctttaaggatggaaacggcggtgaaggcttaggaggagatatgtctccgacgttgatacggaagaaggcggctgaggtgggagctagagtcgacgcagagttgcggttagagaataggatggttgagaacttagacatgaataagttgccggaggcatatggattgtaatttatagtttggtagtttataggttggagattgcccggagacagagtcaaacagaggttctctgactcatatgaggcataatatagttaatatagtaatttttgttttgagcatagtaattatgtcataacatggatcctg

SEQ ID NO: 98527 - DNA, 541 bp, Arabidopsis thaliana columbia
taggtccactatagaagagctatgacgtcgcatgcacgcgtacgtaagctcggaattcggctcgagcgaagacgaagatacaagcgtcgatcgatggggagaaaacgcagagttaaatcggagtcgtctccgttcgattcatttccggaagattgcatctcctacataatctcttttacaaatccacgcgatgcgtgcgtcgctgctacggtttcgaaaacgtttgaatcgacggtgaagtcagatattatatgggagaagtttcttccggcggattatgaatctctgattcctccatcgcgagttttctcatcgaagaaggagctctatttctctctctgtaacgatcctgttctattcgacgatgacaaaaagagcgtatggttagagaaagcgagtgggaagaggtgtctgatgttatctgcgatgaacctctcaatcatatggggagataatcctcagtattggcaatggattccaattcctgaatctaggtttgaaaaagtagcgaaacttcgcgatgtatgttggttcgagattc

SEQ ID NO: 98528 - DNA, 498 bp, Arabidopsis thaliana columbia
acagagtttgcttttaaacaaagagagaaagaaaaaaaagctcaaagaactcagaagaagaagaaagatgtatcatcaagaacaacatcctgtcggtgctcctcctccccaagggtatccacctaaggacggttatcctccggccggttatcctccagccggttatccaccgccaggatatgctcagggataccctgcacaaggttatcctccgccgcagtactctcaagctccgcagcagaagcaaaacgccggtatgcttgaaggatgtttggctgcgctctgttgttgctgtctcttggatgcatgtttctgatcggaggataattatatacgttgcctcagtcaacttttatttcctcatatatgttatgtaatgttcaacaatctttcttctgttgttatcttctttcaattcgaattttggtatcttatgttttattgactccgaccataattatctctctctttcataatccaatcacacgaattcgaaaa

SEQ ID NO: 98529 - DNA, 837 bp, Arabidopsis thaliana columbia
  unsure (1)..(837): unsure at all n locations
ccgnnnnnnnnnnnnnnnnnnnnnnnnnnnnnnnnnnnnnnnnnnnnnnnnnnnnnnnnnnnnnnnnnnnnnnnccacgcgtccgcggacgcgtgggatccaaagatctgaagcttcagatccttctcggctaaggctaagtcacaaccttggtctgagtaaatggtggacgctgttgtaacagtgtttttagagaaaaccttgaacatcctcgaagaaaaaggccgaaccgtatcggactaccgaaaacagttggaagatttgcaaagcgaattgaaatatatgcagtcttttctcaaggatgcagagaggcagaagagaactaatgaaacgttgcgtactcttgttgcggatttacgagaactggtttacgaagctgaggatatacttgtggattgtcagctcgcggatggtgatgatgggaacgagcaaaggtcatcaaatgcgtggctttcgcggcttcatcctgcccgggttccgttgcagtacaagaaaagcaaacgtttgcaagagatcaatgagaggataaagaaaataaagagtcaagtagagccttatttcaaattcagnancgccgagtaatgttggaagagataatggaactgatcgttggagctctncgntgtatgatcatactcaggtggtttgttttngnaggagataaaaggaaaattcaagggagtggctcttttcggtncaaacggagagccagctttttggttaatgggccttttctttngatgggaggggctnaggtaaactacanttgntnaagnaagtgttcaaatncaaaggngntcggncatcgnttngaagganggttatgggttcctgttt

SEQ ID NO: 98530 - DNA, 541 bp, Arabidopsis thaliana columbia
ctctcttcggaatctgaaaagccataaatcagcagaaaaaaatcttaaggatcggaaattttataatcggatgaatagagtgattagtcagttttccggtaagttgatgaaggagaagagtgttaccggtgtaagcggcggagatacgactttaagatctgccgtcaaagaatcggtctcgtctccacagagtgcgtcgtcgtcgtcgtcggtgaggaggcttaaaggagatctggaatcgagtcgatttggtgcggcggcgagtgagaggctgaggcaagcggaggaatctttgaggacggtgatgtttctgagctgttggggatcttgttagatctggttgagaaaataatagatgagaaaacgaaaccaaaacggtttctgtttgtgtttttgagttttggatttttgttttctctgtgaatagttttttttttttttcgttttctttgtactttgtgttttatgtaaatcatgtataaaatgaaaagtaaatcaatgaagataatggtttccttcccccaaaaaaaaaccttttttt

SEQ ID NO: 98531 - DNA, 2611 bp, Arabidopsis thaliana columbia
  unsure (1)..(2611): unsure at all n locations
nnnnnnnnnnnnnnnnnnnnnnnnnnnccttacctaacaacaacactaacattgtccttcttatttaaacgtctcttctctcccccgcctccccacaagtccaaaaaccaccaacaattcaaactctctctttctcctttcaccaaacaatacaagagatctgatctcattcacctaaacacaacttcttgaaaaccaatggatcaaatcgaagcaatgttgtgcggcggaggagagaagacaaaagtggcggttactacgaagactttggcagatccattgaattggggtttagcagcggatcaaatgaaaggaagtcatttagatgaagtgaagaagatggtcgaagagtatcgtagaccagtcgtgaatcttggcggagaaacactgacgatcggacaagttgctgccatctccaccgtaggaggcagcgttaaggttgagttagcggagacttcaagagccggtgtgaaagctagcagtgattgggttatggagagcatgaacaaaggtactgacagttacggagtcaccaccggctttggtgctacttctcaccggagaaccaaaaacggcaccgcattacaaacagaactcattagatttttgaacgccggaatattcggaaacacgaaggagacatgtcacacactgccgcaatccgccacaagagccgccatgctcgtcagagtcaacactcttctccaaggatactccgggatccgattcgagatcctcgaagcgattacaagtctcctcaaccacaacatctctccgtcactacctctccgtggaaccattaccgcctccgggcatctcgttcctctctcttacatcgccggacttctcaccggccgtcctaattccaaagccaccggtcccgacggtgaatcgctaaccgagaaagaagcttttgagaaagccggaatcagtactggattcttcgatttacaacctaaggaaggtttagctctcgttaatggcacggcggttggatctggaatggcgtcgatggttctattcgaagcgaatgtccaagcggtgttagcggaggttttatcagcgatcttcgcggaggttatgagcgggaaacctgagtttaccgatcatctgactcatcgtttaaaacatcatcccggacaaatcgaagcggcggcgataatggagcacatactcgacggaagctcatacatgaaattagctcaaaaggttcacgagatggatccattgcagaaaccaaaacaagatcgttacgctcttcgtacatctcctcaatggctaggtcctcaaattgaagtaatccgtcaagctacgaaatcgatagagcgtgaaatcaactccgttaacgataatccgttgatcgatgtttcgaggaacaaggcgattcacggtggtaacttccaaggaacaccaatcggagtttctatggataacacgagattggcgattgctgcgattgggaagctaatgtttgctcaattctctgagcttgttaatgatttctacaacaatggacttccttcgaatctaactgcttcgagtaatccaagtttggattatggattcaaaggagcagagattgctatggcttcttattgttctgagcttcaatacttggctaatccagtcacaagccatgttcaatcagctgagcaacataatcaagatgtgaactctcttggtttgatctcgtctcgtaaaacatctgaagctgtggatattcttaagctaatgtcaacaacgttccttgtggggatatgtcaagctgttgatttgagacatttggaggagaatctgagacaaactgtgaagaacacagtttctcaagttgctaagaaagtgttaaccactggaatcaacggtgagttacatccgtcaaggttttgcgagaaggacttgcttaaggttgttgatcgtgagcaagtgttcacgtatgtggatgatccttgtagcgctacgtacccgttgatgcagagactaagacaagttattgttgatcacgctttgtccaacggtgagactgagaagaatgcagtgacttcgatctttcaaaagattggagcttttgaagaggagcttaaggctgtgcttccaaaggaagttgaagcggctagagcggcttatgggaatggaactgcgccgattcctaaccggattaaggaatgtaggtcgtatccgttgtataggttcgtgagggaagagcttggaacgaagttgttgactggagaaaaggttgtgtctccgggagaggagtttgataaggtcttcactgctatgtgtgaaggtaaacttattgatccgttgatggattgtctcaaggaatggaacggagctccgattccgatttgctaagacagcattcctctgtttctgttctgtgtttttgtgttttgtttcaattttaatttcctgtgttaatgtttgaattgagtttttgattgtaatgtgaatggtgtcaccccttgtatgatatatatgatataaaaacttacgtgtnnnnnnnnnnnnnnnnnnnnnnnnnnnnnnnnnnnnnnnnnnnnnnnnnnnnnnnnnnnnnnnnnnnnnnnnnnnnnnnnnnnnnnnnnnnnnnnnnnnnnnnnnnnnnnnnnnn

SEQ ID NO: 98532 - DNA, 2455 bp, Arabidopsis thaliana columbia
  unsure (1)..(2455): unsure at all n locations
cccacgcgtccgcccacgcgtccgcccacgcgtccgcaattccttaaccaacaatattacaaataagctcctatcttctttctttcttttagagatcttgtaatctcctcttagttaatcttctattgtaaaactaagatcaaaagtctaaatggagattaacggggcacacaagagcaacggaggaggagtggacgctatgttatgcggcggagacatcaagacaaagaacatggtgatcaacgcggaggatcctctcaactggggagctgcagcggagcaaatgaaaggtagccatttggatgaagtgaagagaatggttgctgagtttaggaagccagttgtgaatcttggtggtgagactctgaccattggacaagtggctgcgatctcaactattggtaacagtgtgaaggtggagctatcggagacagctagagccggtgtgaatgctagtagtgattgggttatggagagtatgaacaaaggcactgatagttatggtgttactactggttttggtgctacttctcatcggagaaccaaaaacggtgtcgcacttcagaaggaacttattagattccttaacgccggaatattcggaagcacgaaagaaacaagccacacattgccacactccgccacaagagccgccatgcttgtacgaatcaacactctcctccaaggattttccggtatccgatttgagattctcgaagcaattaccagtttcctcaacaacaacatcactccatctctccccctccgtggtacaatcaccgcctccggagatctcgttcctctctcctacatcgccggacttctcaccggtcgtcccaattccaaagctactggtcccaacggtgaagctttaacagcagaggaagctttcaaattagcaggaatcagctccggattctttgatctccagcctaaggaaggtctcgcgctagtcaatggcacggcggttggatctggaatggcgtcaatggtgttattcgaaacgaatgttctctctgttttggctgagattttgtcggcggttttcgcagaggtgatgagtggtaagcctgagttcaccgatcatctcactcacagacttaaacatcatcccggtcaaatcgaagcggcggcaataatggagcatatcctcgacggaagctcgtacatgaaattagctcagaagcttcacgagatggatccgttacagaaacctaaacaagatcgttacgctcttcgtacttctcctcaatggttaggtcctcaaatcgaagtgatccgttacgcaacgaaatcgatcgagcgtgagattaactccgtcaacgataatccgttgatcgatgtttcgaggaacaaggcgattcacggtggtaacttccaaggaacaccaatcggagtttcaatggataacacgagattggcgatagcagcgattggtaaactcatgtttgctcaattctcagagcttgtgaatgatttctacaacaatggtttaccctcgaatctaaccgcttcgaggaatccaagtttggattatggattcaagggagctgagattgcaatggcttcttattgttcagagcttcaatacttagctaatcctgtgactagccatgttcaatcagcagagcaacataaccaagatgtcaactctttgggactaatctcgtctcgcaaaacttctgaagctgttgatattctcaagcttatgtcaacaacgttcctcgttgcgatttgtcaagctgtggatttgagacatttggaggagaatttgagacagactgtgaagaacactgtctctcaagtggcgaagaaagttcttactactggagtcaatggtgagcttcatccttctcgcttctgcgaaaaggatttactcaaagttgtagaccgtgaacaagtctacacatacgcggatgatccttgtagcgcaacgtacccgttgattcagaagctgagacaagttattgttgaccatgctttagtcaatggtgagagtgagaagaatgcagtgacttcaatcttccataagattggagctttcgaggaggagcttaaggcagtgctaccgaaagaagtggaagcagcaagagcagcctacgataacggaacatcggctatcccgaacaggatcaaggaatgtaggtcgtatccattgtatagattcgtgagggaagagcttggaacagagcttttgaccggagagaaagtgacgtcgcctggagaagagttcgacaaggttttcacggcgatttgtgaaggtaaaatcattgatccgatgatggaatgtctcaacgagtggaacggagctcccattccaatatgttaaggggtttagtccccctgtttttttcttcccataaagtctttttttttttacatgcctgaataattttaccaaatgattctctgtggagtggttctattattaatttgggtaactatnaagnttttc

SEQ ID NO: 98533 - DNA, 1149 bp, Arabidopsis thaliana columbia
  unsure (1)..(1149): unsure at all n locations
ggatcttttgatccaatcacaaggcaaagatccaatggacaataacaacaacaacaacaaccagcaaccaccaccaacctccgtctatccacctggctccgccgtcacaaccgtaatccctcctccaccatctggatctgcatcaatagtcaccggaggaggagcgacataccaccacctcctccagcaacaacagcaacagcttcaaatgttctggacataccagagacaagagatcgaacaggtttacgatttcaaaaaccatcagctccctctagctcgtatcaaaaaaatcatgaaagctgatgaggatgtgcgtatgatctccgccgaagcaccgattctcttcgcgaaagcttgtgagcttttcattctcgaacttacgattagatcttggcttcacgctgaagagaacaaacgtcgtacgcttcagaaaaacgatatcgctgctgcgattactagaaccgatatcttcgatttccttgttgatattgttcctagggaagagatcaaggaagaggaagatgcagcatcggctcttggtggaggaggtatggttgctcccgccgcgagcggtgttccttattattatccaccgatgggacaaccggcggttcctggagggatgatgattggaagaccggcgatggatcctagcggtgtttatgctcagcctccttctcaggcatggcaaagcgtttggcagaattcagctggtggtggtgatgatgtgtcttatggaagtggaggaagtagcggccatggtaatctcgatagccaaggttgagctatggaaccagaagcttagagatttaatcatcatttcgaccctgcaagtgtctgattcttatatgtctatgattcgaatgacttactcgagagagagagagagatcaaacaaaacaaaacaaaaaagctctttttcatttttcctgttaacttataagttattgcagcaaaactgcagacttgcttaactatatattaatctaaatgtgcagattctaatcaaaaaaaaaaaaaaaaaactagttctagatcgcgaacggccgccgactagtgagcttgtcgaccccggaattaaatccggaccgggacctgcagggggaccaaccttccctaaaattaattggaataannnnggcagta

SEQ ID NO: 98534 - DNA, 974 bp, Arabidopsis thaliana columbia
  unsure (1)..(974): unsure at all n locations
aaanccaaaaccgaccaatggataccaactatctagcaaccacctccctccgccgccggggtggcttcttcaccacctggggccaccatctacgccgcaggaggaggagcttcttaccaccaccttctccaacaacaacaacaacagctccaactattctggacctaccaacgccaagagatcgaacaagttaacgatttcaaaaaccatcagcttccactagctaggataaaaaagatcatgaaagccgatgaagatgttcgtatgatctccgcagaagcaccgattctcttcgcgaaagcttgtgagcttttcattctcgagctcacgatcagatcttggcttcacgctgaggagaataaacgtcgtacgcttcagaaaaacgatatcgctgctgcgattactaggactgatatcttcgatttccttgttgatattgttcctagagatgagattaaggacgaagccgcagtcctcggtggtggaatggtggtggctcctaccgcgagcggcgtgccttactattatccgccgatgggacaaccagctggtcctggagggatgatgatttgggagaccagcttatggatccgaatcggtgtttatgtccagcctccgtctcaaggcgtggcagagtgtttggcagacttcgacggggacgggagatgatgtctcttatggtagtggtggaagttccggtcaagggaatctcgacggccaaggttaagctcagagtattccagatgatgcttgacctgcttgaagatagcagatattagtcgacctcgccttgaattttggatgtgtttgatagattatgcctaaattcaatgaaaaggcttcgttaaagaagagtaaaaaaaactcttgtttctctctgttaacgtatatgttattgtagcaaaaccatcattgctgcgacttagcctaactatatataatctaatgtgcagtttctattggaaaaaaaaaaa

SEQ ID NO: 98535 - DNA, 776 bp, Arabidopsis thaliana columbia
  unsure (1)..(776): unsure at all n locations
tgggatatcgtttannnnnnnnnnnnnnnnnnnnnnnnnnnnnnnnnnnnnnnnnnnnnnnnnnnnnnnnnnnnnnnnnnnnnnnctttttttttttttttgattcatagaaaagtgttactgatgaaaacttacacattacaaggtttttttaaatagtctctaacagatctgaagaatccaatagagacttataagttgtttgttgtagaagtctgcaaaaatggtgaagtgctaggatcaaaaacgcagaactgtgataacaaatgtttaagaaaagaaaagagaaaatcttttgcaaacaaaaatataaaattcttgtgtaaacattcgccctatgatgttgaggcaaaatcttctgttgtcttttggcgtttgagctctggctcaccctcgatgatatcttcttcgggctcttcttcttcttcttcttcttcttcgtctcctgcttctttatgattgttattgagatgaccgtttactgcttcatgaccaagaagccgatacatgtttgcttgtgattgtacgacctgcccttatcttgggncccccaatgcttccctggggttgggagaaaccggggnacttccttccgcctgtgcttnacnaagcgaaccgnacgtggcgcggaaaaggccagncctgnatgagatggggcctttaangnagnannccaacttccaaggatggncaagggnattccgggttaatgggngggggttttccncccaganccnggtnangncccaagaaacccccantngggngccagggtt

SEQ ID NO: 98536 - DNA, 274 bp, Arabidopsis thaliana columbia
ctgtaccacaaacttatttttaagcaatatattggatatacaaactatttttaatcgagcccaccacatgttcaagcaaatcacatggagtgattccagcataacacaaggaatattatatgaaacatataagcacgaaactctcaaaactagaagatgaaaacactctgggttctttttttgttgtactcaaattacaaataataccaacataaagattcttttattactaagaactaacaagcataaattgcgatgattatttggtaggact

SEQ ID NO: 98537 - DNA, 588 bp, Arabidopsis thaliana columbia
  unsure (1)..(588): unsure at all n locations
cccccgacttactatagggaacgctggtacgcctgcaggtaccggtccggaattcccgggtcgacccacgcgttcgcccacgcgtccggctcaccgtcgcacctccttcattttttctctctctctcaaactcgtctctaaaactcgtccgtcgattaattcctcgttagtctcaggtttgatagaatcattgcctgaggcatctaataatgggaacaccagagacatctcgggagccttgccctgatcgtatactcgatgatatcggtggtgcttttggtatgggagctgttggaggatctgcctttcatttcattaaagggacttacaattctcctaaaggtagtcgctttgttggaggaacacaatcggtgagcatgaacgcacctcgtactggaggcagttttgctgtttggggaggtttattctcgacatttgactgtaccatggtgtacctaaggcaaaaggaggatccttggaactctatcattgctggtgctgcaactggaggggtttctgtctttgcggcaaggggcttggtctgcttcgagatcaagctatttttggaggggttttcnttcctttntg

SEQ ID NO: 98538 - DNA, 402 bp, Arabidopsis thaliana columbia
  unsure (1)..(402): unsure at all n locations
agttcgcggtaacaaaactcttatctttataaaggatgctccaaacaagagtttttccatcacagctcaagagaaacaactctaatagactagctttataacgccatagatgaaggttcctttgaacttgtgaagaaaatgccgaatatgaagcggtagtttatgtttatatggtcttttagcaaataccacagagaatcaaaacttaactctttcagattttttgacttgggacttgttgttgttctcacattatggtacatgagcaaaagcttctctgtggggcttcttccttttcganttttttctctggtcttgcttttgttggananagttgcacnacnacatgcattgtaatgacggatttagggagatcattaaatggagctttacactgtgcaa

SEQ ID NO: 98539 - DNA, 384 bp, Arabidopsis thaliana columbia
cgccactctctcctatatctctctctcgctctcctccccctttccgccgatcgtcctttccccaccgtcgagtttttccctatccatctccgggctttacgttgcacaccagatgtctgttgatctctgcaagaagaatccatcttttctttggtgtgactgtggttatatgagcagggggaggttgtggtgttttcagattatcctcttcaggcactggacttgacttgtcgtcaattcctcgacttctctctctttcttcttctcctctcttctttctcgtttctctgtttttttttatctgcttgatttgatcaaagggtattcgtttctgcggctcctcgttactgtgaacttgaagacttagttttctttgctaaactc

SEQ ID NO: 98540 - DNA, 748 bp, Arabidopsis thaliana columbia
tccacggtctggatgacggtgttaataaacttgatgtcgaattcgcggccgctaaagatcaactcttaaactgtaatatcaagcatatgacaaatagtttgctggaaatcaaaacagtatagttaaacaacatgcatcatcctgctaaatagaagaagcattttaaatccacagtttggttttgttctgtttgttttttcacctccaagaggaaccaccaagctttatcacttcttctgaacttgaatctttccttgttccaaatccttcatcccttttctgactacttgcgtctccatacaaatcttttagctttgcgagattgctgttcactgtcaccgccgatttctctttgctggctactatctctttttagggagtcgggttcacgcttcaatcttgcacacttcctgctccctacttctggcttctgctcctgcttctccggtcatggctacttatggcggccccataatcattgcgcctgcttctactatcatagtcacgccttgatctcctatcattaccataatccctttccctttctctgtatctatccctccccctctctctttcgcccgggctttacgttgcacaccagatgtctgttgatctctgcaagaagaatccatcttttttttggtgtgactgtggttatatgagcagggggaggttgtggtgattttcagattatcttcttcaggcactggacttgacttgtcttcaattcctcgacttatctctcttg

SEQ ID NO: 98541 - DNA, 540 bp, Arabidopsis thaliana columbia
  unsure (1)..(540): unsure at all n locations
atgatcctgccagctannnnnnnnnnnnnnnnnnnnnnnnnnnnnnnnnnnnnnnnnnnnnnnnnnnnnnnnnnnnnnnnnnnccacagggtgcgctctctcctatatctctctctcgctctcctccccctttccgccgatcgtcctttccccaccgtcgagtttttccctatccatctccgggtacgactttttctctctgtttctaatcctacgccgcgatgttgtggatggtgattttctgtgttccgatctagtcttaggttttccttttgtaattcctgaaatgggttttgatctgatttgaaccttatcgattttccgattcatttttagggttcttcactttatctattgtagtttggtttcaagttggtcgtcgggtagttcaatttttcttcttttggtttgtttcaatgtctcattagcaggctttacgttgcacaccagatgtctgttgatctctgcaagaagaatccatcttttctttggtgtgactgtggttatatgagcagggggagggttggggggtttcagatt

SEQ ID NO: 98542 - DNA, 546 bp, Arabidopsis thaliana columbia
  unsure (1)..(546): unsure at all n locations
nnnnnnnnnnnnnnnnacgaccttttttttttttttttgttatgtgtaattcgggaaactcttaagcattgcctgtgtagttcttttcatgtatccatatagatatggttatttcttatccaactagtaatgtacaagaaattattttcatatgacaaatttcccactgtacgaaatcaaatatagcaaacaagaatcatcatttcttaaaagaaaaatctcttaagcttttgctagtccttataggaggaagttccacagatgcaagaacaggttctgagctttcatgcgcaagagaatgatgtgtggaagtttcagcttcttggtgttgagactcaggatcccaaaattggtgttcatgatgaccatgaccagagtatctaggagaaggagaacttgggtaattttcaacgctccggttattgaaattgtgaaggagatggattggagatgagccatgtgttggtgtggttggacggctagagaaaggtgtgttggatcccgagtgtcttccgtgtttcgtctcgttctttgcagtgtgatgcc

SEQ ID NO: 98543 - DNA, 762 bp, Arabidopsis thaliana columbia
  unsure (1)..(762): unsure at all n locations
tgattgacgttnnnnnnnnnnnnnncttgacgtcgcatgcacgcgtacgtaagcttggatcctctagagcggccgcccttttttttttttttttttggttatttcttatccaactagtaatgtacaagaaattattttcatatgacaaatttcccactgtacgaaatcaaatatagcaaacaagaatcatcatttcttaaaagaaaaatctcttaagcttttgctagtccttataggaggaagttccacagatgcaagaacaggttctgagctttcatgcgcaagagaatgatgtgtggaagtttcagcttcttggtgttgagactcaggatcccaaaattggtgttcatgatgaccatgaccagagtatctaggagaaggagaacttgggtaattttcaacgctccggttattgaaattgtgaaggagatggattggagatgagccatgtgttggtgtggttggacggctagagaaaggtgtgttggatcccgagtgtcttccgtgtttcgtctcgttctttgcagtgtgatgccacttctttaatgccgtggctactctatcgttgaatactggtggcttcattttactacccatctgagtaacaagtgcatagagtggaagagtcacatagctgcaaagtatctgcacaacagctccaactacaaggtctaatgaccacatctgccgtgctttcatggaaaacaattattgagattgaattcatacgtactccaagcaaagaatgcaagttgaaatgca

SEQ ID NO: 98544 - DNA, 532 bp, Arabidopsis thaliana columbia
  unsure (1)..(532): unsure at all n locations
ttggttttttttttttttacatacaaaagcagaatcttcatataaagatattaaaaggtaacaaaaggttgtggtctttaaatgtaggacaagttatatttgaatctgaacaactcaggggcaacacagagtgaatcaaaagttacattactacactcactaggaaaagcagcagtttcatgttaagacgagcagttatgaaacattggacacacagagttcacaagaaacttcatctgcgtggaacagagagatgaggaggcaaaagaatttttaacgttcgaggtttttcaagccagacaatttttgaatctcctcgatgatgagctccttttcctcttcgaattgatcatcttcggaacctttaccaggggacaaatcgtggaggagtccgagtaatttcncatgggttcctggccaatatgatcctcactcctgcggctaataaggtcgcacaaagtcttaatatnnggaggcgnnccngaatgtctgccgggcctcaaagggcatatgcttccanacgactncnntt

SEQ ID NO: 98545 - DNA, 357 bp, Arabidopsis thaliana columbia
acgacctttttttttttttttaatcaatctccacaaagatgagaccaaactcaagaatcctgaatactgatgtataatactaatacaaccctcccagcaatttgttaaagtttaacacagaaatggattgaaccaagctaagcttataaatatatatccactggcttgtgatcttgtagctttttcttggactttcttatgaagaagaacccactatgggcaagtttggtgcagttgcccattcagtccaagacccatcatagattgccacattagtttttcccagacgataaagtcccaatgccaaaatacaagctgttacaccggttccacatgaggccgcaatcggactgtcca

SEQ ID NO: 98546 - DNA, 540 bp, Arabidopsis thaliana columbia
cagctccctacaactcatttagggaaagctggtccgcctgcaggtcccggtccggaattcccgggtcgacccacgcgtccgcggacgcgtgggcctcaattcaaccagctccaagctcctcctcctccgccacctccctcagctcctcctccgctcgttcccgatcctcctcgacaccagggtcccaatgaccacgagaaaggggcctccaagcaggttggaaggcgggagcgtgctaaaccggatccatcgaagcaccaccacaggtctcatcttcctcattctaagaaaatcgagaccgaagaagagaggaggcttaggaagaagagggagttagagaaacaaaggcaagacgaaaaacatagacagcagatgaaaaattctcacaagtctcagatgcccaagggacacaccgaggagaagaagccgacgcccctactcaccaccgacagggtcgagaataggttaaagaaaccaaccaccttcatctgcaagctcaagttccggaatgagctccctgaccctagtgcacagcttaag

SEQ ID NO: 98547 - DNA, 980 bp, Arabidopsis thaliana columbia
taatacgactcacttagggaaagccggtacgcctgcaggtaccggtccggaattcccgggtcgacccacgcgtccgctcagctcctcctccgctcgttcccgatcctcctcgacaccagggtcccaatgaccacgagaaaggggcctccaagcaggttggaaggcgggagcgtgctaaaccggatccatcgaagcaccaccacaggtctcatcttcctcattctaagaaaatcgagaccgaagaagagaggaggcttaggaagaagagggagttagagaaacaaaggcaagacgaaaaacatagacagcagatgaaaaattctcacaagtctcagatgcccaagggacacaccgaggagaagatgccgacgcccctactcaccaccgacagggtcgagaataggttaaagataccaaccaccttcatctgcaagctcaagttccggaatgagctccctgaccctagtgcactgcttaagcttatgaccattaaacgggataaagatcaatttacaaagtataccatcacatccctggagaaatattggataccaaaaatctttgtcgggcctgatcttggatacccttggatctgcttgaacttagtgtgacaacccctccaaagtcaggcacctcttgccctgaagataaaactcctgcggatgatacgctgtacacctataagaagatgcatccggaggaagaagacctactgttaaggcttggtgggtcgtaaacaatacatttttcttaataacatcggagaaatggtacggaaacagcaaggactgcagagtaaggaggtcacatttgacatctacataaaagaaaataagtttggacatcttaggtgcaggtggacctatgcacataaaactgggcggtaagtgtacctgtgcttttatgggcatgcactgtgggcaatttgggctcttgcgattgatctggaggggcctgatgggaacatagcgggctggaag

SEQ ID NO: 98548 - DNA, 554 bp, Arabidopsis thaliana columbia
ggtctctacgactcacatattgggaaagctggcacgcctgcaggtaccggtccggaattcccgggtcgacccacgcgtgcgcccaaattgtcttcccagaggcgaggacacacaacctcaatctgttcgtcgctgtcgcagatcggagagatgggtgtcgatttggaatcggtgtcggaagcaacctcgggagctattgggtcgcttctgagtacaacgatcttgtatcctcttgatacatgtaaatcaaagttccaagccgaggttcgagctcgtggtcagcaaaaatacagatatctttccgatgttatgtgggaggcaatttctaaaggacaagtcttttcactgtatcaaggccttggaactaagaattttcagtctttcatttctcagctcatctacttttatagctatagctatttcaagagagttcatagtgaaaggactggttctaaatcaattggaactaaggctaatttgctcattgctgctgctgctggggcttgcacttgtgtcttaattcagcctctagatacagcttcatcaaggatgca

SEQ ID NO: 98549 - DNA, 494 bp, Arabidopsis thaliana columbia
atcaatgtttggtctatccagagagacccaaatgtgtgggagtatccgactgagtttcgtcccgagaggtttcttgataagaagtcttgtgatttcactggaactgattatagctatcttccgtttggatctggcaggagaatttgcgcaggtatagcactcgccgagaggatgattttgtacactctcgcgacgctattgcattcgtttgattggaagataccggaaggccacattttggatttgaaagagaagtttgggattgtcttgaagctcaagtcccctcttgttgccttgcccgttccgaggttgtccaattcgaatctttatttataaacgctatactcgttacttttccttaaaaaaaggaaaaagatttttatattgaacatttttatgatagacaaaaataacgcctggttttatttagttttttcttttctgaagtttttaatcatcatataagttagtaatgagaatcatacatcggtttc

SEQ ID NO: 98550 - DNA, 1119 bp, Arabidopsis thaliana columbia
ttccattttctgtttctattggaaacttctctctccaatttcgttttcttcacttctttgatcctttagctttgacaaaaccgtagtaaaggatcaaaagttatcatctttggtccatgttgtgaatcgtgctctgcttgggtcgtgactcccaaatccggatttgaaaccagcatatctgagcttaattcgagcatgcatgcgcttctttttttctgattttttttagactttggttctaaatcccttaactttggattaactgtcaatctacaattttatattaacagagatagcttagcaatggagcagtcagaagagggtcaacagcaacagcaacagggagtgatggattatgtacctcctcatgcttatcagagtgggccagtaaatgcagcttcccatatggcattccaacaagctcaccacttccaccaccaccatcagcagcaacaacagcagcagcttcagatgttctgggctaaccaaatgcaagagatcgagcataccactgatttcaagaaccacacccttcccctagcccgcatcaagaagatcatgaaagctgatgaagatgtgaggatgatctctgcggaggctcctgtgatttttgccaaggcctgtgagatgttcattttggagctcactctacgtgcttggatccacaccgaggagaacaagaggaggaccttgcagaagaacgacatcgccgctgccatttccaggaccgacgtgtttgatttccttgtggacataatcccgagggacgagctgaaagaagaaggtttaggcgtgaccaaagggaccataccatcggtggtgggttccccgccatactattacttgcaacaacaggggatgatgcaacactggccccaggagtaacaccctgatgagtcttaaaacttttcccctttcgtttgtttggttgtatcgtagtaaggtagctctgctctgctgggaaccatttctattgtgttctgtaatgacatgttagtatatccccagtctatatctatggcaatgcagtttctgttaaaaaaaaaaaaaaaaaaaaaaaagggcggccgctctagaggatccaagcttacggacgcgtgcatgcgaagtcagggttgt

SEQ ID NO: 98551 - DNA, 360 bp, Arabidopsis thaliana columbia
  unsure (1)..(360): unsure at all n locations
aaagcatctacagagaaatctgaccgcaataatggcgaataacgaagattcaaactccaatggactagactcgtttgatgctgttaaacaacgtttcaaagatcgatcaaagaaagttgttcagacgagagagttgttgtctaaacaagcggtacaaacgcgtgagatcttatcgaaacaagccgttaagatcgctaaacaagccgaagaacatgagagattcatcaataaggtgacacatctcgttggtgtgcttggatttggaggtttttgtttcctacttggtgcaagacctcaggncattcctttagtttactgtttcttctatgtgatctttgttcctcttcgatggntatatta

SEQ ID NO: 98552 - DNA, 476 bp, Arabidopsis thaliana columbia
gtaagctcggaattcggctcgattttctagatcgctaaccccgcctttttttttttttttcactgtctcctctctcttctttgacaaccactttgtcgtcatctaatttgcggtttgtagtgtcgactgatttagattcaccgatgtcttgatgatcttccatgttatctttctcggtcgaggttatttacattttccatcgagaaatttatgttctcttggcaatcaccgtctagtaaccgtgaatcttgtttcaattgcggtgttgatggcgctggatctttctcctcgagtggcatggcgggctcaagatgaagcatcgagacaacggattctttcactggcttaagtgatatcgaaacattacttccaccatcattgaatgccttatgaacaacatgctgccaaaagttctttaatttctccggggagagccggtttttgaggaacttaacttgaccaagcgctatgctttt

SEQ ID NO: 98553 - DNA, 506 bp, Arabidopsis thaliana columbia
cttcgccttcctgtctccaccagctccctccttctcaatcattagcttcttctcttctcttctctcacagagagagtaatcacaagccaagtgagaaaaagaaaacactaaacccagatcgaaaaccatgtctattaacaacaacaacaacaacaacaacaataacaacgatggtcttatgatctcatcaaacggagctttaatcgaacaacaaccatcagtcgttgtgaagaaaccaccggcgaaagatcgacatagcaaagtcgatggaagagggagaagaatccgtatgccgattatatgtgctgctcgtgtttttcagctaacgagagagcttggtcataagtcagatggccaaacaattgaatggttacttcgtcaagcagagccttctattatagctgcaacaggaactggtacaactccagcgagtttctcaactgcttctgtctctatccgtggagccaccaattctacttctttagatcataaacccacttctttac

SEQ ID NO: 98554 - DNA, 596 bp, Arabidopsis thaliana columbia
  unsure (1)..(596): unsure at all n locations
acctgaagttatgcctcaaaatcaacattttaaaggcagaagcattattagatagatatcatccataaccataagacccacattcactgttaacttatcgatattagacagaaaactttcaacagcgaaatacaaaacaagagagagaaaactaaaagacactcatctacaactcaaaatgcgcaaaagaagcagttaaaaaaggcgttgtcacgccgcaagggttaagatttggtatttcatcctaggcctcgaacccttacatctccgactaacgccggtataagacggtttgctactactcccgagcccgtttagaaccagcttttctggttctggacgtaggaggcaacactttgtgtgggacatataagggaataggcaaatgangtttactcccagaagccaaagcaggggaacccaacagcagggattccaacaagagcacagcagactcctgcttcgacatcatggtagtattattgccattaccctttgcaaacagtaacgagagcctgggtttcagaacgagcnctcaaggatacgcctagcncaagattccttcgggactaccctctcccaancctggaantcct

SEQ ID NO: 98555 - DNA, 797 bp, Arabidopsis thaliana columbia
cctttagaagagctaccacgtggcatgcacgcgtacgtaagcttggatcctgtagagcggccgcccttcgttttttttttttgcactggtattttatcgatattagacagaaaactttcaacagcgaaatacaaaacaagagagagaaaactaaaagacactcatctacaactcaaaatgcgcaaaagaagcagttaaaaaaggcgttgtcaccccgcaagggttaagatttggtatttcatcctaggcctcgaacccttacatctccgactaacgccggtataagacggtttgctactactcccgagccccgtttagaaccagcttttctggttctggacgtaggaggcaacactttgtgtgggacatataagggaataggcaaatgaagtttactcccagaagccaaagcagggaacccaacagcagggattccaacaagagcacagcagactcctgcttcgacatcatggtagtattattgccattacccttttgcaaacagtaacgtagagactggttttcagcaacgaagcactcaagcatacgtcctagtctcaagcattctctttcgagatacttactcttcttctctaaatcttgtacatattccttcttcctctctctcgatctaaccgccgcatctctatttcttactctccttcttcgttgttgagccacagcatcatcggctccttcttcggcatcatcaatcatgaatctcgctaccagaatcattagactttttctcaacaaccaaatccgaattcttcttcccggaatcataagcgggggcg

SEQ ID NO: 98556 - DNA, 642 bp, Arabidopsis thaliana columbia
  unsure (1)..(642): unsure at all n locations
aaagaaaatatccatttagagataactacaacataacatatgaccaaagcataggattgaaacaaataaaagaaaaggaaactagtctacgcctatttcttgcttcatttaagagaattgtaatagagatacaaggagactacaactgcagcttcattttattcataatactctgatttatatatcaatacttgttattttaataatgcttggtgactgtagatgattatggccgtctctacctttcaattcaaggcttctcttcatctgaattagaacgaggtccaggcaccgaatccacgaaaaactcctctatgtcctcttgttcaggagaatccaggaaaatctctgaatcagatgggaagaaatggagagcctgggatagtttcctaaggctcctaaaatctgcaacatacatatctcccagatttgacnaatctgcggngggatccagaaaggctaaagtcccaggggtctgatccaatgaccgnggggatccctgggatnccgggcccntcnccancnggccaacggcagntgngatgccgnaccaggacggaggggccattaccaacccgantgctgagggcaatggaagggcccttgcgcaanagngggnggacatcagggnncnctgtgggt

SEQ ID NO: 98557 - DNA, 381 bp, Arabidopsis thaliana columbia
tttgtcataataattcttgtgattcagaccaataaataaaacaaaaaccagtagctaatcacctccacaaagacggagcatgtgggaagttatacataatcaatctctcaaggtcaagcttgagattagtacataatatatacaaacacattctttgaacaacatgcacaaaaagcttcaccaatggtcaaatctcaaagaaaaattataagaagaagactcccacagtccaaagctttacatttcatagtttagttgcaaagcaatgtgtcccgcgttgcattcccagtagtcgcgttaactccatccgcaactttgcaagggtatactcgctgatcatctcttagagggacatcagtgaagtctgcgcctgtaatgttt

SEQ ID NO: 98558 - DNA, 468 bp, Arabidopsis thaliana columbia
aaatctgattgatatagaaatcgaaactcaaattggagaacattcgagaagctttggatttttgaatcacgaagacatggaaaaaacagaatctgtatcaggaaaggggaagagagtgattgttatcggcggcggaatcgccggctctctcgcttcgaaatttcttcaattcgattccgatctcaccctcattgatccgaaggagtattttgagattatttgggcaagtttaaggtcaatggtagagccagcttttgctgaaagatcggtgataaaccacaagaagtatttacaaaatggtcgtgttgtgacttctccagcggttaatatcacagacaccgatgttttgaccgcggatggtcttgtctttgggtatgattatcttgttattgctactggtcacaatgatgtgcttcctaaaactaggcaagagaagttttctcaataccaaacagaacatgagaagat

SEQ ID NO: 98559 - DNA, 482 bp, Arabidopsis thaliana columbia
  unsure (1)..(482): unsure at all n locations
cttgacaaacacatcttttataagggataacaagagtagaactattacatgaatatgtatgtaccataaattcatcaccatctttgtgttggatagccaaatttgttctaaactctcaacctcttcacactaaagtttctctcttcctcctcaaagagataactacaacatttctttgatgaaatcaaggctaagtgtgtccttaacgatgagaaacaatccaaggaatatcacaagcatgatccctgaagacattatcccttgttctacctctacaggaagcttcttccctcctctaacagcttccaacaatatcaatgccaatgttccaccgtcaagagccggtaacggaaagagattgatcaccgcaagnttgatattcagcacgcgcgaattggtaaagcccgccgtattgactggcactctgnnccactgnataattgcaaggctgnacttactgcggctgggagtaagatgtgttt

SEQ ID NO: 98560 - DNA, 532 bp, Arabidopsis thaliana columbia
aggtgacttatagaagagctttgacgtcgcatgcacgcgtacgtaagcttggatcctctagagcggcctcccttttttttttttttttaacataaggagattatatatatatcatttgattggttaacatcacaatcaaacatattaaaacgtgatctaacccaaattgaaaagctacaaaaagaaaattaaaccgtgaaaatatcctcctttttcgtcttaacatttccaagctgagacagtaacaagttctttcctctgccaacacaagacaagtgaaggcgacgaagactgtctcttctccaagtgaaaccctctcattggattcctctgcaacaaatactccgcttgtgtctccgccgtctgactcagcgtcacaggagtaaacccacattgcccaaataagcttctccacggcggtgatctctccatccaacggtaacgattcgtcaacagtttctgtatcgacggttgcacacaaaacctctcaatactcgtagcagcttccgcattattcagattcccagagtcg

SEQ ID NO: 98561 - DNA, 343 bp, Arabidopsis thaliana columbia
aagagaaaaaataataaattgctgcatattatacttacaacttaacaagtgtgtatgttcgagaaacagatacatagtttactatcaaaacactgtcaaatcaaacagcactcgatgatcttcgctttgaagatcagcctctattgaacaatacagcaataataatctatatactcactcttgtcactgagatgagacaatctgatatagcttatgagtctaaatcccttgtttggactggcttcttgtcagaagtcaccttagcataaaaatcagacagttacatgattgggacgcccaatcgctcaagttcttgttcggctgacctcacaaaaactgatgg

SEQ ID NO: 98562 - DNA, 346 bp, Arabidopsis thaliana columbia
gaaaaagctcaaggtatatgtctacagggaaggcaaaagacctgtactgcataagccggtgctgaaaggaatatatgcttctgaaggatggtttatgaaacaactcaagtccagcagaacatttgtcacaaaagaccctcgtaaagctcacctattttatcttcctttcagctccaaaatgttggaagaaactctgtatgtcccaggttctcacagcgataagaatctcattcagtttttgaagaactacctgcacacgatttcttccaaatatagtttctggaacataactggaggatcagatcattttctggttgcttgccacgactgggctccttccgagacg

SEQ ID NO: 98563 - DNA, 516 bp, Arabidopsis thaliana columbia
ggttagaatctgcaaaagcggcagtgatcgcagctgcggttgggaccattgcggaactcccatttgctctttctcaagtcgcaagcatggagcagcttgttctgcccctgggaatagcgtttgcaagctgtgcattgtttggagtcacattcaggtatgcagtcagaagagacttggatgataatcatctcaaatccggagccgttgcagcttttgggtttgttaaaggacttggtatgttgagcagaggaccgccattggagctgagctgggaaagcttgttttcacatgggatagacggcgccgttttggtgtctcagagcgtcttgatatttgcgtttgcgtccataggtttggacttctgtttcaagatgaagctcttaagaccatttcctagctctgactagattgaagagcaaattaaaaatgtagaaatgaacaaaatcttcttttgaagactttatttgtttttttttatattattaattttggtctaaaatgtaaatgtttcatcct

SEQ ID NO: 98564 - DNA, 414 bp, Arabidopsis thaliana columbia
  unsure (1)..(414): unsure at all n locations
cccgaagccatgtggtaattctaattttgtgtatttattattttctgttaagacgaatcggacagagagaactccggcggcggattgcacttccggcaagatctcgtggggataaataagatggcggatgagaggtataatcggaagaatccggcggtgaagaggattttccaggaggttaaggagatgcaagctaatccgtctgatgattttatgtctctccctcttgaggagaatatctttgagtggcaattcgccatccgaggtcctggtgatactgaattcgagggcgggatttatcatgggagaattcagttgcctgcagattatccattcaaacctccttcattcatgtaattgncccctaacgggcgcttttgaaactaacaccaaggtttgcttgagcatttcaaa

SEQ ID NO: 98565 - DNA, 1067 bp, Arabidopsis thaliana columbia
cacaaaattacccactacgttgctcttcaacaaaaagattaaacaaagagagaagaatatggcgagagggaagatccagatcaagaggatagagaaccagacaaacagacaagtgacgtattcaaagagaagaaatggtttattcaagaaagcacatgagctcacggttttgtgtgatgctagggtttcgattatcatgttctctagctccaacaagcttcatgagtatatcagccctaacaccacaacgaaggagatcgtagatctgtaccaaactatttctgatgtcgatgtttgggccactcaatatgagcgaatgcaagaaaccaagaggaaactgttggagacaaatagaaatctccggactcagatcaagcagaggctaggtgagtgtttggacgagcttgacattcaggagctgcgtcgtcttgaggatgaaatggaaaacactttcaaactcgttcgcgagcgcaagttcaaatctcttgggaatcagatcgagaccaccaagaaaaagaacaaaagtcaacaagacatacaaaagaatctcatacatgagctggaactaagagctgaagatcctcactatggactagtagacaatggaggagattacgactcagttcttggataccaaatcgaagggtcacgtgcttacgctcttcgtttccaccagaaccatcaccactattaccccaaccatggccttcatgcaccctctgcctctgacatcattaccttccatcttcttgaataattaaaggctaaaaggtttgctggtgccatcattgtctatctaattatttagtaactacttaaaacataaggcatggtgttgctaaaaccttaaactgtcatgtttcttagttatgtattttaaagcctaaagaaatatggattgtgtgatcagtagtgcttaggcttattgtgtgtggaatgttttcaagacttttatcatgtatcgtattattatattgaccactctacttaattatgctacaaatttactcccgctctagaggatccaagcttacgtacgcgtgcatgcgacgtcaagctcttctata

SEQ ID NO: 98566 - DNA, 492 bp, Arabidopsis thaliana columbia
cgcctgcaggtaccggtccggaattcccggttcgacccacgcgtccgggcggctacaacgagctccggcgacgaaccaccggaaacaaaatcaccggcgcaattgattccgttgttatcagaagacgttgctctcagttgccttgctcgcgtccctagatgtcactatccaatcctctcactcgtctccaagactttccgatctctcccaacatcacctcttctctacgccacgagagctctcgtcggagccactgaaaacatcctctacgtagcaatccgtatacctcctgaatctggtgcgtgttggttcactctcctccatcgaaccttatcgaactcaacgaattcgaaaatgcttgttccaatcccatcttgtccttcaccgtctctagtcggatccgcttacgttgtggtagattcagagatttacgtgatcggtggatctattagagacgtgccttcttcgagcgtgggggttctcgattgcaga

SEQ ID NO: 98567 - DNA, 438 bp, Arabidopsis thaliana columbia
ctcgctacgtatgatcacgtcaaagaaatcttggtagctggtggccgtggaacgccgggagggatacgaacgcatgtagcggcgagttttgcggcggggatcgtcgccgcggtggcgtcgaatcccatcgacgttgtgaagacgaggatgatgaatgcggataaggagatttacggtggaccgttggattgtgcggtgaagatggtggcagaggaaggaccaatggctttgtacaaagggcttgttccgacggcgacgaggcaaggaccgttcacgatgatcttgttccttaccttggaacaagttcgtggtctgttaaaagacgttaaattttgattaatttttttcaagtagttaggttaataaatgtttgagattcccatatttcttcatacatttcatatacgtttaaaatattttgaaaataattatatagcg

SEQ ID NO: 98568 - DNA, 521 bp, Arabidopsis thaliana columbia
  unsure (1)..(521): unsure at all n locations
nnnnatgaatcgccnnnnnnnnnnnnnnnnnnnnnnnnnnnaaaataccagagagcgagaaaagctcttatcttcttcatcttccccgcggccgagaggaccaggtcgtttaatacagaacgtgacacagttcgctgatgctcaattcaaacaattctctactcgttatggacaacaagttatagacattctcgattttccaatcaagctcgtcttgtctcctttcactctcgcctttgatatcgctggctctgcacctcgtggttttggcatccctgagttcatctccaaaatttcgtatctctctgtttttgcggttgctacgcttggaacttatgacattgcattggatttgggaaagaaagtcatatgccaaagggattgcaaaacttgtaatgggtggcaggcattacggtgcactatgtgcaaaggaacagggagtgttcattaccaaatcaaagattacaacttgagaagtggagagaaaccaacagcagattgtgtcgcagatgctatagttg

SEQ ID NO: 98569 - DNA, 621 bp, Arabidopsis thaliana columbia
  unsure (1)..(621): unsure at all n locations
cacatgtgacaaatatttctcttgccctgagagcaacacttgttgttgtctctacaagtatggtaagtactgcttcggatggggatgttgcccgctcgaagctgctacttgctgcgatgataactcaagttgctgtcctcatgagtacccggtttgtgacgttaaccgcggaacctgtttgatgagcaagaacagtccgtttagcgtgaaggctttaaagcgtacacccgcaataccgttctgggcaaagagcagaaagcacattgcgtaagaagaggaagacaaaaacattgagaattcatcaaaagcattttatgttgttgttgttcagatttaaaaattgctgattctgctgctgaggttttctgtacatataaaacctctccctaagtttcattcagtttcatcattgttaaagtaactaactcagaacaaatgggtttggttattaatctctttcaacttatctatttatcgctctattattgataaattttcattttcctttctcnnnnnnnnnnnnnnnnnnnnnnnnnnnnnnnnnnnnnnnnnnnnnnnnnnnnnnnnnnnnnnnnnnnnnnnnnnnnnnnnnnnnnnnnnnnnnnnnnnnnnnnnnnnnnn

SEQ ID NO: 98570 - DNA, 664 bp, Arabidopsis thaliana columbia
  unsure (1)..(664): unsure at all n locations
nnnnnnnnnnnnnnnnnnnnnnnnnnnnnnnnnnnnnnnnnnnnnnnnnnnnnnnnnnnnnnnnnnnnnnnnnnctttttttttttttttttgtaactcaaaaattctttagctttttatcggttggtaatcactacaatacgttggagatgtttcttattttgtttcagagcacatgagaagaaagtaaacaaactaaaatataacctcttcctacctttttactcaaaaaagaatcccaaaacaaaaaattgaagtgaagttacaagtctctgtaattatcttcgtgtagagagattttatacaggttcctctgggggttctcttctgatatctcaaagcatctatacattcggaagctcccattcattgcctttgcctaccttgagaccaaatgtggcttcatgttgcgtgttatgctgtgaacataccatcaacacttcaagagtcgtgaagagaaccttggatcatcagtgatatacgctttgcactctctgagtgatacaactctcctttgaaaccaatctcggttgagctgtcgggagagaaccaccgtaagagcactcctaaatgtaccaactgctggtatcaacttgaatagcaatgggtgttgttaccaggcttaaagcagttggtcccagaacaggaggtacaatttgctcta

SEQ ID NO: 98571 - DNA, 688 bp, Arabidopsis thaliana columbia
  unsure (1)..(688): unsure at all n locations
nnnnnnnnnnnnnnnnnnnnnnnnnnnnnnnnnnnnnnnnnnnnnnnnnnnnnnnnnnnnnnnnnnnnnnnnnnnnnnnnnnnnnnnnnnnnnncctttttttttttttttagttttcaggaaattttttatttaattttttgctagatagcaacctgaccattttcaacacctaatccatacaaaacaccagaatatttgtgcaacggaccaacgaagaaattctccttgagctttctgaaagtacaagacgtgagtaaactatccgaaccagcttggtgacagatcccaactctctccacttccagcaactccgcaagcttgttgagaccaccgtgaaggctgttgcagaacttcatcaggtgtttaatgtcgtacacggtcggaaaataaacgttgatgagcttgaagaagtctgtttgcgaatccggcaggttttggcaagtcaagagcctttaccaaggatccgaaatcgtacccactggggaatgtaacccaatgcacgttttcgttcaagacgatnccggngacatnaagagcnctgcgaatctcttggaatcgatccggtcnagcgtgtttttggnaaggtcgagcctgattgcctganaacncgatgggatcgaagcgagannccggaccggatcgatcccggaatgatgcngnnaaacttccaggcaaggagggggtc

SEQ ID NO: 98572 - DNA, 754 bp, Arabidopsis thaliana columbia
tccgcaattcccgggtcgacccccgcgcccgctcttctcttccgcaccgcttttgaaaaacggcgacgcattgtctccattcaatcgccggaaaattagaagagaagatggcggcgccggaagctccggttaagtacgtcggaatatgtaaggattccgccgctttcaagcttatgaaatcgatgggttgggaagaaggagaaggacttggtaaagataagcaaggtatcaaaggttatgtgagagttacgaacaaacaagatacatctggtgttggtcttgataagccaaatccatgggcatttgatacaactcagttcgataacattctcaagaaattgaaagtgcaagctgctcctaccaagactagcaagaatgatgatgattcagataaggaagatgaaagtgaagatgatgctgtcaaatctgagcctgccaagttgaagaccgttgctaaagtcactcgtccacaaggaaggtataaacgtagagagaaagggaagcttgtcaattcatactcgtctaaagatcttgaaggaatactggttaagcgaactgaggatccttctcctgcagtttgtgacatagccgattctatggatattgaaattatatctgggggcccaagatgcttgtattaaagccccaaaattggaggccccttcttccggaactgggcgggggatttaaatcccgggtttgctcgggtggtcttctgggggcccagtcgggccaaaagaaatttgaagctagc

SEQ ID NO: 98573 - DNA, 487 bp, Arabidopsis thaliana columbia
aaagtaataataaaagaatcttcttatttaactgggatcttgtatcaacaaattttatattccaacaggagttgtatgaaacaatacattggcacactctatgtatatatcaagagatacagagagagagcattctgctctcagatgaaattttcgtcttcctggttccagtggctaacacctatgcagaggaagctaaaggtggcgattctcatgatctccagtggctttggattccctcattcgtaatgggcagcaagcaaggaagaataaccagcagtgattctctgttttatcataggacgaccacgttcatgaatttcctcttggcgaatgcaagccaccatttatttggtgtcccgttggctctatatgctacactcagtaacctgccacttgtctcctctcgaacctgcttaagatagttcctgaaaagctctgcttcgtcctgggactgcggaagcgaaaagagacctgggaaaggaaa

SEQ ID NO: 98574 - DNA, 668 bp, Arabidopsis thaliana columbia
agaggtcattagcttccttctttcaactgaaattattcctctgtgcctccgtaccatggaaatggggagtgagctgtcaaaaacagtggcaacatttattgttcaaaagatactgttggatgatgtggggatggattacatctgcacaacagcagagcggttttttgcagttggccgagtgttgggaaatatggttcagtcacttggggagcagccttccccgcgccttttgaagcatatcattcgttgctatctccgtttatcagacaacccaagggcttgtgctgcactcgcaagctgtctccctgactcgctacgagatggatcctttagcaattgtcttcgcgaggatccaactgcaagaaggtggctgcaacagttggtgcacaatgttggagttggtcgcgtcccaacacatcaaggtggaggatttgagcacatgctttgagctgaatccatctcaaacccatccatggagtgtgtttcttctgtttttgtttctaattatacatgtgctttttaatgccttaacttagatgatgggttataggctttttagtctgtttgaaattcttattgtaattatttttaagctctagaaccaatcccccagaatgcataagtcttgggataataaaagattggttacaaaagaaaaaaaagaaaaa

SEQ ID NO: 98575 - DNA, 489 bp, Arabidopsis thaliana columbia
  unsure (1)..(489): unsure at all n locations
nnnnnnnnnnnnnnnnnnnnnnnnnnnnnnnnnnnnnnnnnnnnnnnnnnnnnnnnnnnnnnnnnnnnnnnnnnnnnnnnnnnnnnnnnnnnnnccttttttttttttttttttttgctaagaacattaatttactttccaaaacatgagttcattggcaaagaatatcaatttggtacaacaatacttccaatcacacttttcatttctttgcttagttttatttctaatcgctaaaacaaagtttaccctagcaaataacctgtacacagcgtatccaaaaacactaaagacgatgatgccctgagaacatccacccaaaatagaaactaaacttgtggttgtgcagaaaccttcctcaagatctaccattacgaccagaagtagccatagcttatttctcggacctgaggctggaacttgcttctgaagtgttctcatcagagggtgcctcctcctcctccttgggggctcccatttccttcttgg

SEQ ID NO: 98576 - DNA, 511 bp, Arabidopsis thaliana columbia
tatacgactcatatagggaaagctggtacgcctgcaggtaccggtccggaattcccgggtcgacccacgcgtgcgcccacgcgtccgcccacgcgtccgcccacgcgtccgcggacgcgtgggatcctcttaatcggcttatcggatccgaatccggacccgaaagcctgaaaacccgacgattaattgcacgatgtccgatgctccgtcgtcttccccggatgccacggcgtcgcactggtgctatcactgcaacaaacgcgtcgtcgttgaaaccttagatgactttgtcgtgtgctgcgaatgtaacaaaggtttcgtcgagtcaattcaaccgactcccgccgcttattcatcgccggcgccaccgcagccactttccccagatctgaatgtagaagactccagtattggctcgcatttcctccagatgctccgcttgttagcccacgcgccttctcagcgttcaccaccacgacaccttgatgttttatcttacgaagatgatttc

SEQ ID NO: 98577 - DNA, 562 bp, Arabidopsis thaliana columbia
  unsure (1)..(562): unsure at all n locations
ttttctctcatctgcctacggttgcagattttattttattaacacagaaaaacaaaaaaaagtataaacagagtccacgaatttgggaaagtttaagatcaagacatgaagaaaactggaatcatcgcagcctccatctctgtcgcggcttctgccacggcgatctccgccggctctaccaacacctccgtgtcattctcttcgccggaatctaatctctctcgtcaggaggcaaaggaaaaacagaggaagaagaagggttcgtcggaagatgggggagatgagaagttttgctccaaggttttgatgggttacgattcatcgagacgctttgtttacttgctcacccgataacattttgcaattggttctgattttgtaagggggtcttattggtttacccccattttggattaaccctcaaaggggtttnccttggttttaaagggtccggttttttttccttccttcaaaatcaacttttgtaacttcggcttaaagtggccccccnggcaaaggnggnattgtttnttggggtcanggntctncantttgggttccc

SEQ ID NO: 98578 - DNA, 1569 bp, Arabidopsis thaliana columbia
  unsure (1)..(1569): unsure at all n locations
cactctcgtcagttctctaacagtagcgccaaaatgaatccccaagactaaagctttcttcaatggaagaagaaacccacgacggatctctcgatctccaagagattcgcaggcgcgtgaaagagctcgatttctttccccggaattgcagagaagagcctgtagaatcgtgtagttccgattacgagactctggtggttcaagattttgttcttcagtttgaaccaaaggtgaaagagattgttgaagaatacggcgatgttgatttattggatgttgaagattcagatgcttacttggagtacttgagaaatgagcttcagtctgtggaggctgaaagtgccaaagtttctgaagaaattgaacgtctttctcagtctcatgcccaagattctagtaggttgcaaagggatcttgaaggtcttttactgtcactggattctatgtcatctcaggatgtggagaagtcaaaagagaatcaaccatctagcagctcaatggaagtatgtgaagtgattgatgatgacaagtttaagatgtttgaactcgaaaatcagatggaggagaaaaggatgattcttaagtcattggaagatctggattcgttacgtaaaaggtttgatgctgcagaacaagttgaggacgcattgacaggcttgaaggtgctcgagtttgacggaaactttattaggctccaactgcgaacatatattcaaaaactagacggttttcttggacagcacaaatttgaccacattactgagccatctgaattgatccatgaattgctaatataccttaaggataaaactacagagataacaaaatttgagatgtttccaaatgatatatacataggagacatcatcgaggcagctgattctttcaggcaggtaaggttacactctgcagtgctagacacaagatcttcagtccagtgggttgtcgccaaagtgcaagataaaattatttcaacaactttgagaaaatatattgtgatgagttcgaaaacaattaggtacacgtttgaatactacgacaaagatgaaacaattgtggctcatatagctggaggtattgatgcatttttaaaggtctctgatggttggccactgctgaataccccattgaagcttgcatctctcaagaactctgacaatcagtcaaagggaatttctctgagccttatctgcaaagttgaggaactagcgaattccttggatttagagacccggcaaaacttatcaggcttcatggatgcaattgagaaaatactcgtggagcaaacccgtgaagaactccagtccaataaatcctcccaaaagtgagtaccaagaaccacctcaagagtttgtgcagtttctatctccttattgtttttgtcttgggttgttatctgcaactctttgttgtaatactttggaattgtgtaccaataactgacacaagtctagtttatgtccttaagtttcctttataaaaaaaaaaaaaaaaaggannnnnnnnnnnnnnnnnnnnnnnnnnnnnnnnnnnnnnnnnnnnnnnnnnnnnnnnnnnnnnntgttccta

SEQ ID NO: 98579 - DNA, 517 bp, Arabidopsis thaliana columbia
  unsure (1)..(517): unsure at all n locations
nnnnnnnnnnnnnnnnnnnnnnnnnnnnnnnnnnnnnnnnnnnnnnnnnnnnnnnnnnnnnnnnnnnnnnnnnnnccacgcgtccgtggagttctctacctcaaaacgtccggcgacgacagcgacggcggcggagtctgtacatttccgtcttctctgtccggcaacaagaactggtgcaataatcggaaaaggcggctcagtcattcgacacctccaatctgtaaccggttcaaaaatccgcgtcatcgatgatattcccgttccttcagaagagcgtgtagtgttgataatcgcacctagtggaaagaagaaggacgaatcgaatgtgtgtgattccgaaaaccctggctctgaagagcctaagcaagagaaagggagcgagtgtgcggggactagtggtggagatgacgaggaagcgccgtcgtcggcgcagatggctttacttagggttttcgaaagaatagtgtttggcgatgacgctgctacggttgatggtgatgaattggataaaggt

SEQ ID NO: 98580 - DNA, 666 bp, Arabidopsis thaliana columbia
  unsure (1)..(666): unsure at all n locations
cttttgatactccggaccaaaagggttttgttttctgagatttgagagggattggaggaagtggaaggcaaaacccttttgatactccggaccaaaaaaactaccgcgtgaggaagatcaagaaggctgcgtacgtttccatggccagagcagccggagggagtagccggctatggagcagagccctcttgcgtagagcagacaaagatgacaacaagatcgtaagattttcaaggaggaagtggaagatatcatcaaaacggaggaggagtaaccagagagctccggtggtggaggaggcggcggagaggctgaggaatcttgttccgggaagcggaggaatggagacgtcaaagctgatggaagagacggctcattacatcaagtgccttagtatgcaggtcaaggtcatgcagtgtctcgttgatggcttatctcccaaatgatcatcaattaatcatcaacatcatcatcaatgatcgatgtatatagagatacgacacatacatagtctattggattggggtaatcataacgaatatatatgtgtatatatatatatatatatatatatncngntatatatacatacggtgtaagataggatacatatatgaaatgtgtggatatgtattaggctcgnagtaacgnaagatttttttcttt

SEQ ID NO: 98581 - DNA, 577 bp, Arabidopsis thaliana columbia
  unsure (1)..(577): unsure at all n locations
gaaaaggacgtttttnccttccacttcctccaatccctctcaaatctcagaaaacaaaacccttttgatactccggaccaaaaaaactaccgcgtgaggaagatcaagaaggctgcgtacgtttccatggccagagcagccggagggagtagccggctatggagcagagccctcttgcgtagagcagacaaagatgacaacaagatcgtaagattttcaaggaggaagaggaaggtgacgtggaagatatcatcaaaacggaggaggagtaaccagagagctccggtggtggaggaggcggcggagaggcttaaggaatctttgttccgggaggcggaggaattgagacgtcaaaagcttnttggaagnagacggcttcattacatcaagtgccttagttattcaggtcaaaggtcatncagtgtcttcgttgattggcttnntccccaattgtcanccatttaatcancaccatcatcatcnattgcccntgtntttnggggttcggcntatncataggctntttgnnttggggaactatcccggttttttngggttnaanttnccgtgtntaccc

SEQ ID NO: 98582 - DNA, 612 bp, Arabidopsis thaliana columbia
  unsure (1)..(612): unsure at all n locations
tcncattganncctggggccagngatatttcancccntgnagncccattccgggttaaactaccgaattacggcccccctcaaccgcgggttaacccccaagccacaatccctcttgccagtaaatatggtggagcaactccccggtnttagaccgatgttagatccgctcaacccccgcttcaaaagtcccttgggggagaagctgagtgtttggggaggcccctaattgctgcttttgttctggcctgcctgaaagctccgaccgcaggagctgaatctaccattcatatgaaagcacaggccgggagatcaagctatgtatcagctgagatttttgcatcaattcctgatccaggagcaatggctgcagcggcatggtacagcgccgctgcaagagccgtgaaagagcagaggcagaggttttgaatctgatggactaggctctgtaagaggttataacgagctttactgatttgataactgcctctgggctttgttgtctatatgtatctagttctaatgtttctgagttctgactctgtttatatacaaatgacaatgggattcttgtgaaatgcttcccctgtttatatgcaaaaaaaaaaaaaag

SEQ ID NO: 98583 - DNA, 1185 bp, Arabidopsis thaliana columbia
  unsure (1)..(1185): unsure at all n locations
acctctttcntccaatactgcttggggacagaatgcnaatttggcgttcttnacgaaacatatgggtgctacctttaanaaacggtctcaaccttggcggtcaatgattaacccagaagatgtgcattctggtgatttcttggcggtgtcgaagattcgaggtagatggggtggttttaagacgttagagaaatgggtgactggggcttttcctggtcatactgctgtttgtttgaaggatgatttggggaatctttgggttggtgaatcaggacatgagaacggaaagggtgaagaaatcattgttgtgatcccttgggatgaatggtgggagctgactttgaaggataattcaaatcctcaagtagctttgcttcctctacatcctgatatccgggcaaagttcaacaatactgctgcgtgggaatatgcacggagtatgttgggcaaaccgtatggatatcacaacatgatattcagctggatcgacactctaggcgataactacccccctccccttgatgctcacttggttatttctgtcatgtctatgtggactcgtgtacaacctgcatatgctgctaatatgtggaacgaggcacttaataaacgactcggtactgaggatctggatttgtatgggatacttgaagaaacagcgaggcgtggaatgtcatttgatgagttactcaccatccctgaacaggatgagtgggtttatagcgacggtaaatcgacaacatgtgttgctttcatccttgcaatgtacaaagctgctggtatattcgaccctctcgctgatcacattcaagtcactgaattcactatccgagatgcgtacactctgaagttatttgagtctaaccagactcggttaccgagttggtgcaacaccgaggaagggaagcttgacttctgtcaaattctaggtgaatacagaatggagttacctggttataacaccatttacccatatccaaacatgaaccagaattgtccttctttacctcctaattatgagagaccttctaagtgttagcaaagttaattaacatgtatgtctatctctctccctctgtctgtttgtgtttgtatacttttggtttatatatttaagcttacccttttagttagagggaaagtaaaccacgtttttagtacnnnnnnnnnnnnnnnnnnnnnnnn

SEQ ID NO: 98584 - DNA, 627 bp, Arabidopsis thaliana columbia
  unsure (1)..(627): unsure at all n locations
nnnnnnnnnnnnnnnnnnnnnnnnnnnnnnnnnnnnnnnnnnnnnnnnnnnnnnnnnnnnnnnnnnnnnnnnnnnnnnnnnnnccacgcgtccgcaatgtcatcgccggtgaagaagatgaagaagaagacgacgacgtcgccgatactctcaccgacgccgcattcgacccagattttatcacttcctgttgatttgctaataagtatcctcgcccgcgtctcgagattggactacccaattctctctctcgtctccaagagctttcgatctctcattgcttcaccggagctttacgagactcggtcactcttaggccgcacagagagctgtctctatctgtgcttagggatcccttctgactttaaccctcgctggttcactctctgccgaaaacctaagccaagtgggcatgttatggcggcaatctcaatccccaattctcgtcctgtacattgctctggtctcgttgctgttggttctgatatatacaacattggcggatccatcatcaatgaacacttctctagtgtctcgttattggactgccggtatcacacgtggcgtgatgctccaaacatgttgtggggggattaaannagcaatntattntgggaggnntttttc

SEQ ID NO: 98585 - DNA, 1090 bp, Arabidopsis thaliana columbia
  unsure (1)..(1090): unsure at all n locations
nnnnnnnnnnnnnnnnnnnnnnnnnnnnnnnnnnnnnnnnnnnnnnnnnnnnnnnnnnnnnnnnnnnnnnnnnnccacgcgtccgatttgagtttggttaaatactatggatttgttgttcataacgacgagaagattctcgttgtggagtatgtagccaatggaactcttagagatcacttggattgtaaggaaggaaagactctcgacatggcgactcggttagatatcgcaaccgatgtagctcatgccataacctatcttcgcttgtggcctcagccacctatcatccacagagatatcaaatcttcaaacattctcctcactgagaattacagagccaaggttgctgatttcgggtttgcaaggttagctccagattctgattcaggacccacgcatgtgtcaacacaagtcaaaggacccgctgggtacttagacccagagtacttaccaccgtatcaactcacagagaaaagggacgtctactcttttggggtactgctcggcgagcttctcacaggtcggcgtcccatcgagcttagcagaggacaaaaagaacgcatcaccattagatgggcgatcaagaagttcacgagtggagatacgatatcggtattggacccgaagctagaacagaattcagcgaacaacttagcattagagaaggtattggagatggcgtttcaatgtctagctcctcatagacgttcgagaccaagcatgaaaaaatgcagtgagattttgtggggaattcgtaaagattacagagagttgctcaacacaagtctttgatgatattattctctacgcttatataatatggttttgaatacacaattatatattatttgtttgaatattaatttgtcatacacgatgcattcttgtacgagaattgttgatttgtaattgattttgaaatttgtagtattatattaacgtgtatttggtgttaataaattgagttattatccttccaaaaaaaaaaacaaaaaaagnnnnnnnnnnnnnnnnnnnnnnnnnnnnnnnnnnnnnnnnnnnnnnnngnnnnnnnnnnnnnnnnnnnnnnnnnnnnnnnnnnnnnnnn

SEQ ID NO: 98586 - DNA, 528 bp, Arabidopsis thaliana columbia
  unsure (1)..(528): unsure at all n locations
nnnnnnnnnnnnnnnnnnnnnnnnnnnnnnnnnnnnnnnnnnnnnnnnnnnnnnnnnnnnnnnnnnnnnnnnnnnnccacgcgtccgcccaatcttaaagacaaagccattagaaagagaaagtgagtgagagagagagagaaactagctccatgttcgaaacagagcatcatactctcttacctcttcttcttctcccatcgcttttgtctcttcttctcttcttgattctcttgaagagaagaaatagaaaaaccagattcaatctacctccgggtaaatccggttggccatttcttggtgaaaccatcggttatcttaaaccgtacaccgccacaacactcggtgacttcatgcaacaacatgtctccaagtatggtaagatatatagatcgaacttgtttggagaaccaacgatcgtatcagctgatgctggacttaatagattcatattacaaaacgaaggaaggctctttgaatgtagttatcctagaagtataggtgggattcttgggaaatggtcgatgc

SEQ ID NO: 98587 - DNA, 416 bp, Arabidopsis thaliana columbia
ataaaatcaaaactaacaaaaaggaaaagaagaaaagaaaaagtatctcaccggaaacgatttcttcgccgattccaagacttttcttcctaagctttttaacagatccggtgaaaatttcaaaatccgaagaattctctaaagctagggtttcttaattcacgagacggaggtgatataattcccccccgtcgtagctatgatgatttcgagaggtttgtttggttggtctccgccgcatatacaaccgttaactcctgtttctgaagtttccgagcctcctgagtctccatctccttaccttgatcctggtgctgagcacggtggtacaggaacagcggcgcaagcggatgatgaggaggaaatggaggagccggaggagatggagcctcctcctgctgctgttcctttctctc

SEQ ID NO: 98588 - DNA, 740 bp, Arabidopsis thaliana columbia
  unsure (1)..(740): unsure at all n locations
tacccagcttnttcgntcactatggganagcttgtacnctgcagtacgttccgnattccngttcgaccccgcgtccgattcttgatagatacaaaaaacatttttccagacacaaattcataaaatctttgccttgagtagatcaaagttctttacattaatcgttagaagatgagccagtacgatcacaaccagtctgcaggagctaacccaccgccaccgatgtctacctgtacatcaccaccaccgccgattggttacccgactaaccaaccgagtcatggttcggtagctcagggtaaagtggaaaccaagtctaagggtgacggattcttcaaaggctgtcttgcggccatgtgttgctgttgtgccctggacatttgcttctaagccatttgggaattgggatggtctatttatgacgagtttatgtgaatgtgatgtgaattattattattctctccagccttattgtataaattctctattttttgtttattattttcttgtaatactttgtgagacgaacatattatggtttgtatttggatctctactctctagtacttaaattaatttgtcttgctcttggattggtatagttaatagctttaatctcaaaaaaaaaaaaaaaaaaaaaaaggnnnnnnnnnnnnnnnnnnnnnnnnnnnnnnnnnnnnnnnnnnnnnnnnnnnnnnnnnnnnnnnnnnnnnnnnnnnnnnnnnnnnnnnnnnnnnnnn

SEQ ID NO: 98589 - DNA, 501 bp, Arabidopsis thaliana columbia
  unsure (1)..(501): unsure at all n locations
nnnnnnnnnnnnnnnnnnnnnnnnnnnnnnnnnnnnnnnnnnnnnnnnnnnnnnnnnnnnnnnnnnnnnnnnnnnnnnnnnnnnnnnnnnnnnngggnccaatttaaagaaaataatattattagaaatacttttttccacgtaaaaacagcataaagactacttttaccatcgagtaaaaacaaaaaagtgcagtggaactcatacgtccagatccagcatttacgcacacgacacagacgagttttgtcatccagtcatcaccaaatctagaacacaaactagaaaatacgtatcgtaaatgacctaaacgccattcagattcaggggtatttaccacgagagtacagattggaaagcgagggaaagacgattccgacaaagggtaaaagcgtaatcttcacttaatcgttcttgagcatctctctgtaccttagaaacgaatctagcctctgtagcttaagctgttgcttaaacttgttgatgaaatttgaagcttta

SEQ ID NO: 98590 - DNA, 511 bp, Arabidopsis thaliana columbia
cgtcgcatagcacgcgtacgtaagcttggatcctctagagcggccgcttttttttggttttttctttttttttttttccgacacaaactaattttgccatccagtcatcaccaaatctagaacacaaactagaaaatacgtatcgtaaatgacctaaacgccattcagattcaggggtatttaccacgaaagtacaaattggaaagcgtgggtaaagacgaggcgcgacaaagggtaaaagcgtaatcttcacttaatcgttcttgagcatctctctgtaccttagaaacgaatctagcctctgtagcttaagctgttgcttaaacttgttgatgaaatttgaagctttatcgtcgacaccttcttctcctccgtctcctatcggacgggggtctctaaactttaatgggctccggcctttttttttccacgggctaaactggttccttctattcccggccgatgggtctttcgctagcagaatttataatcttcttttggagctttgttc

SEQ ID NO: 98591 - DNA, 476 bp, Arabidopsis thaliana columbia
  unsure (1)..(476): unsure at all n locations
atgaagcaatcatccaaatatttcacatatccaaaagtaaaaaaattcacgtatacaaatcaaaattccaaacaaaaatataatagccagaaaatgtcaacacatatagcaacgtaagctagaccagaaactgttgaccttacattcaaaacaaaacttggacaacaaaagattaaaggtctactgagagaaacacaagagaagcaaataaaagatttgggatcaaactgaaaccttgttgagtatcggagaaacgaagttattcagcagccatgtcgtcctcgtcatcatcgtcttcgtcctcaaagcttaggtcaaggtcagcaagcaactcctcaattggnncagatggtgcaccttcnccatcctgtcattggaaggcaggtctcnagaagntttgataaatcctttgtcccctgtacaaaggagtgtggttggaanccttnagnnnnaggggttttccttncaagnttccc

SEQ ID NO: 98592 - DNA, 782 bp, Arabidopsis thaliana columbia
tgaacgcgcaccacgcctaggatcctctagagcggccgccccggcccaacccccccatttttattaattttttagaaaaagaaacaccgagcatttttttgtgttttgttttgagtagggttgatccttaaaaatactaaaaccatccgtacacaacaacaacatcaaagggaaagagaactaaggagaggagttaaaaaagagctgccacaagttaacaccaaaggggagtcacagtcacagtcacattttaccattcacctttttttatcactagtgaaagtaaggaggaggaggaggagcctggtactgatagcagttcgcgtagaagttcccatgtgcaggagcaggattgaacgtgtaagtctgaggaggaggaggtggtggaggttgtgctgccatgattggaccgctaaggaacggtctgttgtcatagacatactgcggatacctttcagggatgactctaccgtatcctgtcttgttgttgttgatgttgttgttgttgccactgactcggggttgagacaccaagtgggcgttatgcctggggcccaatgggttttggggctctctttttgccccctttggttttcccgaactggagaaacccttcggggaaggggcctaaatggggtactggttcttccaagcctatgctctttcgaatcacacttttattaccgggttttggagggcccaaataatcctctcccggttaatttgaaacttaaatcccctgtaccacggaaggaaaaaaccctccatgcgcccggggccct

SEQ ID NO: 98593 - DNA, 540 bp, Arabidopsis thaliana columbia
  unsure (1)..(540): unsure at all n locations
nnnnnnnnnnnnnnnnnnnnnnaatacaacattaaagatataataattaataagaaaatccctgagtatttctttgttttttttgttttgagtagggttgatccttaaaaatactaaaaccatccgtacacaacaacaacatcaaagggaaagagaactaaggagaggagttaaaaaagagctgccacaagttaacaccaaaggggagtcacagtcacagtcacattttaccattcacctttttttatcactagtgaaagtaaggaggaggaggaggagcctggtactgatagcagttcgcgtagaagttcccatgtgcaggagcaggattgaacgtgtaagtctgaggaggaggaggtggtctangtnattgcttctcgttcactgccttaaaatacagaacactaggcgtgaccttgatgctaagcttagatccgtgacctgcgactacctttgatttgtatgtagagtttggcgcgccgacgttggtcaacgttctgtggaaagtcacagagaaggtactatcgggtcctgacaatt

SEQ ID NO: 98594 - DNA, 675 bp, Arabidopsis thaliana columbia
  unsure (1)..(675): unsure at all n locations
nnnnnnnnnnnnnnnnnnnnnnnnnngtgcatggcccccttccttagcctggattcttttaaagcggccgccttttttttgtttttttgtgcaaaaagatactcgcaccttatttatatatagtaaaagaagctgaaacatcatagagcaatcaaataacgtaaacacaaaatgaagaaacgttacaacgacaataaagatttatttgtgatgactgacgacgatgatgaattgctcatgcctcatcaacaaccattatgtaaacaacaatgggacttctcacgttatgggtaccgtcagaccaaattagatttgcagacgaagggacttccgagtcaacgtcgctgcctgtaacagtgacactaaaagattgcttctcgttcactgtcttaaaatacagaacactaggcgtgaccttgatgctaagcttagatccgtgacctgcgactacctttgatttgtatgtagagtttggcgtgccgacgttggtcaacgttctgttgaaagtcacagagaaggtactatcggttcctgacaatttggccggcattggaggntagtaagggttctaggcaagatttttgttttcctngggcncttgacgggatcnccgagatgattttaggggctccgagngagtcatncgcanagaagggntgtggcacntgccatggc

SEQ ID NO: 98595 - DNA, 382 bp, Arabidopsis thaliana columbia
ctcagaccaaatcttcttcttcttccttctctgtgcgcgacgaccttctcaaattcgatctcaactcaaaacatttgtctgatccattaatcggattcagatacaatgacaagggttacacgcgattttcgggattcattacagagagatggtgttcctgcagtatcagcagatgtgaaatttgcttcaagtagatttcctaattatagaattggagctaatgatcaaatatttgatgttaaagacgatcctaaagtgatgtccatgaaagaggttgttgcgcgtgagacagcgcagcttatggaccagcagaaacgtttgtctgttcgtgacctcgctcataaatttgagaagggtttggctgcagctgctaagctatctg

SEQ ID NO: 98596 - DNA, 430 bp, Arabidopsis thaliana columbia
acccagcgcgtccgcgactctctcaaacttcactttttgccttctccttagatcaaatcttcttcttcttccttctctgttctcgacgaccttctcaaattcgatctcaactcaaaacatttgtctgatccattaatcggattcagatttttgtgaagattcaacaacagatctgtgagtccattggagtatattactattcatagtgatacaatgacaagggttacacgcgattttcgggattcattacagagagatggtgttcctgcagtatcagcagatgtgaaatttgcttcaagtagatttcctaattatagaattggagctaatgatcaaatatttgatgttaaagacgatcctaaagtgatgtccatgaaagaggttgttgcgcgtgagacagcgcagcttatggaccagcagaaacgtttgt

SEQ ID NO: 98597 - DNA, 467 bp, Arabidopsis thaliana columbia
  unsure (1)..(467): unsure at all n locations
tgcncnttggncaatggtgggatggctatggcggcccatttccatgggccgtcgcatccctcaggtttggccttacaactagatcaaaagaggaagcgtcgagggtttgaatccacttggatgttcatcttcgcgctagtagccaatgcaacatatgttggtagtattcttgtccgaacaactgaatgggacaacatcaaaccaaaccttccttggttgcttgatgctattgtctgcgtcgtactagatctatttataatactgcagtatatctactacaagtattgcaggataaagagcttggaaagcagagaagaagacgcctatggagactatgtggaagcaagcaaaacttttgtttcgtgaatcactatttatgttacaaggataatttgattttcttttgatcttaagtattattgatttcatagtgtatgcatataaaacttaattattatatgttcact

SEQ ID NO: 98598 - DNA, 908 bp, Arabidopsis thaliana columbia
cattaattcattatcatcaaataatacagcagcaagcaacacagtaaaacccaattccctaatcccaaaattcgatctctcatctgatggctggttacagagccgatgaagagtacgattacctcttcaagctcgtgttgatcggcgactctggtgtcggcaaatcgaatctgctctctcggttcaccaagaacgagttcaatctcgaatccaagtctactattggtgttgagttcgctaccaaaaccactaaagtcgaaggcaaagtcgtcaaagctcagatttgggatactgctggtcaagagagataccgagcaatcacaagcgcttattacagaggagctgttggtgctttgcttatttacgacgtgacaaggcacgcaacatttgagaatgcagcaagatggctaagggaactaagaggacacacagacccaaacatagtggtgatgcttatagggaacaagtgcgatctgcgtcacttggtggcagtcaaaacagaagaggctaaagcctttgctgagagagaatccctctatttcatggagacttcagctctagacgcaaccaatgttgaaaacgcattcacggaagtgctcactcagatccacaagatagtgagcaaaagaagtgttgatggaggaggagagtcggctgatttaccgggaaaaggagagacgataaacgttaaagaagacggatcggttcttaagagaatgggttgctgctctaactagagtggggggattgtagatttggcttgatttggttagggtgagacaacaaatgataatctctttgggtcttgcaatcaaaaaagaaataagaaacgattacttttaagatcatgtgtatgctttggtaactttggcctgtaaggtcctttaaaatttaagtacatgattggt

SEQ ID NO: 98599 - DNA, 382 bp, Arabidopsis thaliana columbia
cccacgcgtccgaaattttcagggttgttgttgttatacctctcctccccggtttccagggaggtattgacgacagtggtgcagcatctgttagagccataatgcattggcagtatcgaaccatatacagaggacataactcaatattgactaatctttacaatactattggcgtaaaggctcatgattatatttccttctatggccttagggcatatggtaaactttctgaggatggacctgtcgccactagtcaggtgtatgttcacagtaaaatcatgatagttgatgaccgtgctgcattgattggatctgccaatattaacgaccggagtttgcttggctcaagagattctgagattggagtactaatcgaagacac

SEQ ID NO: 98600 - DNA, 437 bp, Arabidopsis thaliana columbia
atgaatcagaaatgttattaaacaaagatgaaaactgaagtaattttaacaacaaaaataacgaatatgtgatgtacattgcaaatgcaaaaattataaagacacagcggataaagttttggaaatacagagaacaaactcactcacgtgactaaatctaaaagacaaggcaagagttcaatgaacctctgtatcattttgattttgacatttacaagagttacataagcaagggggaccatgacatgtaacttcaaactcacagtcattttcatgacaaaaccaaggcttcaaatcgaaatgatgcgactgagttgatttacaaaaacagtggtccgtttcagtagaccttagataaggccgccagattttaagatctgcatgatggttaaagtgattcctcccgcagaaaagatgccgattattatgtaccagca

SEQ ID NO: 98601 - DNA, 746 bp, Arabidopsis thaliana columbia
  unsure (1)..(746): unsure at all n locations
nnnnnnnnnnnnngggcaacactatagactagctatgacgtcgcatgcacgcgtacgtaagcttggatcctctatagcggccgcccttttttttttttttttatggaaaaacatcagattgaagtccaaagttcattaagaagagattagaaatagagagagtgataacaattgaactcagtaaagaatcataaaagcaaagagatccaagattgcaatttatgtcccagctggctaatagaaacgaacatctaggaagtgtttgagctatggattgactatagcttggatctgctccaatgtcttcccttttgtctcaggcacgatggcaatgacgaagacaatggccagcgcgttgatggcagcgtaaatgaggaaagttccgtaagagctccaggacatgaggaagttgaaagtgtaagaaacagcccaccctccaaaccagttcaccagcggcgccaggcctccggctactccttttatggttatgggaaaatttctcagacatgaccacccacggcttggctcccattcctgctgaaaacgatcctatgtccacctttttcccaacaacagccaggactgggactgcttcgtgcgccatgtcgtgaaccttgagatagaaagataccgctgctatcatacagcctatcactaaccctgttgcagataccagtagcaatggttttcttccggctctgtcaactatcggtgcattaagcgcagtgattaccacctgaagaaca

SEQ ID NO: 98602 - DNA, 772 bp, Arabidopsis thaliana columbia
  unsure (1)..(772): unsure at all n locations
nnnnnnnnnnnnnnnnnnnnnnnnnnnnnnnnnnnnnnnnnnnnnnnnnnnnnnnnnnnnnnnnnnnnnnnntcgcccgataaccacgcgtccgaacaggtctctcacgtgtaatttagtgtttttaagactttagggaataagattagaacggttcttccccaaacacaacgaagaagtcttttgtttccgatatagatcgaggaacttcgatttatcagacattaacaccaatttttaagatatcgtgaaggagagatttgattgatggcttggaggcgcatcatcaccaaggtttcgagtcatgaaagggaattgagcagtttaagaagcttacttgttagagcttactcctcttttcctagagtgggagttactggagctgtgggtggtggtggagcttctttaccgcgaacgaggtttcaatcgagttatgttggtagctttgctcgcagagtccgtgatagagaagaagttaatgaggttgcacatctgagagaacttattcgaagaaatgatcctgaggctgttatcagaatgtttgaaagccaaccttcctttgcattncgaattncccctgcgttatcggaattcaattaagggatttggtaaaaggntgataggggttcgntcaaagtaacctgggtnngnaccatttcaaaagnngnaattncttnggtgtttcaaaggggggaaggggctttttgngggcctttggggntttttggaacggngggaaccccccaaaaaannggngncctttgncctcatt

SEQ ID NO: 98603 - DNA, 699 bp, Arabidopsis thaliana columbia
aagtcaaaattttaatatagactaaagtattaattgcttctgtcccacttaattctcccacatcttcacacgtactaatatattatacatatatatcaactaaataaaaatatcacaaataaagaactaaaacaaataaaaacgaactttaataaaatcccatatcttgtttctctctctctctcaaagttagtatctcagtacctttacgctttgtttgtctctatcttcttcctgatattcagagaatggtttcatcagatgattggacgaagtgtgcgatgagagatggagaagtggtggcagagcttttggtgaagcttaaagaagccaaagtaatcaagaatccgattgtaacagcgctccggtggggaatccaacagccaaggtctcggtgtccaagaaaagaatctgaatctagatgtagtccaagtacaccactatcttggagtggtggttgtggtggttcttcttcttctccatctggttatgtcgatggttacgaagctactagtcgtcaaatcagtgccgttggatctagatccaaggtttgttcgtgtctctcttctctgttttggattcatcataatcttacctagacatgtgtctttactcgttgatctctgacctaattcttgatttgaatcttggaaaacaagacggacgcgtgggtcgacccgggaatttccggttccggta

SEQ ID NO: 98604 - DNA, 897 bp, Arabidopsis thaliana columbia
  unsure (1)..(897): unsure at all n locations
nnnnnnnnnnnnnnnnnnnnnnnnnnnnnnnnnnnnnnnnnnnnnnnnnnnnnnnnnnnnnnnnnnnnnnnnnnnnnnnnnnnccacgcgtccgcgcatccttgaaccgcataatttcgtctggagatcctgttcataggattgtcggtagtttgagcggtaccttgggatatgtaatgagtgagcttgaagatggcaagcctctaagccaagttgttcaagctgccaaaaagctggggtacactgaaccagatccacgtgacgacctcggtggcatggatgttgctagaaagggtttgattcttgctcgacttcttgggaagaggataattatggacagcattaagatagagagcttgtatccagaagagatgggacctggactcatgtctgtggatgatttcctccataatggaatagtaaaacttgatcagaatatagaggagagagttaaaaaagcttcatcaaaagggtgtgtgcttcgttatgtctgtgtgattgagggttcaagcgttcaagttggcattcgagaagtttcaaaagattcaccattgggacggctaagaggcagtggcaatatagtagagatatatagccgttgctacaaggagcagcctttggtgattcaaggtgccggagccgggaacgacacaactgcagccggtgttcttgcagacatcatcgacttgcaggatctttttcactgagaggaggctgtggtatttagtttttatcaaaataataataacacaattcataattgatctcttctctgatcttgtcaaggcagaaaattagccaacaaaaaaaaacaaaaagnnnnnnnnnnnnnnnnnnnnnnnnnnnnnnnnnnnnnnnnnnnnnnnnnnnnnnnnnnnnnnnnnngacctaatacaa

SEQ ID NO: 98605 - DNA, 644 bp, Arabidopsis thaliana columbia
  unsure (1)..(644): unsure at all n locations
ccttgggnnggnttttggcccctttaatggggcttttcccnaaggggggcccgggccnattctgggnggttccccccntaggggattntaaaccttttcccggattnggggggggggttaaaangcctcnccaaaagggtttggcctcgttatgcctgtgggattgggggttcaagcgttcaagttggcattcgagaagtttcaaaagattccccattgggacggctaagaggcagtgccaatatagtagagatatatagcccgttgctacaaggagcagcctttggtgattcaaggtgccggagccgggaacgacacaactgcagccggtgttcttgcagacatcatcgacttgcaggatctttttcactgagaggaggctgtggtatttagtttttatcaaaataataataacacaattcataattgatctcttctctgatcttgtcaaggcagaaaattagccaacaagaacgtggcctctccttaacattaccaaaaagagattttttttttttttgctggttgtttaaaagaaaaaaaaaaaaaaaaaaaaaaaaaaaaaaaaaaaaaaaaagggcggccgctctagaggatccaagcttacgtacgcgtgcatgcgacgtcaagactcttctatagtg

SEQ ID NO: 98606 - DNA, 1158 bp, Arabidopsis thaliana columbia
  unsure (1)..(1158): unsure at all n locations
acgcgtccgctcggaagcagctgccggaaaagcttatcccaattgcgacgccattccttgtgaccagttcgacgttgcttttcaagcggtggagctttggatcgctgatcgagctgtgcttccggtagagaactcactcggtggttcgattcatcggaactatgatctcctcctccgtcaccgtcttcatatcgttggagaagttcagattccggtccaccattgcctcctcgcacttccgggagttcgaactgactgtgttttcgcgggtgatctctcacccgcaagccctagcgcagacggggacacttcccttgacgtccttacaccacatgcagcgcgtgaggcattccatgacactgctgctgctgcggagtacatctcagctaacgacctacatgacacggcagctgtagcgagcgcacgcgccgctgagctttacaacctccagatattagcggatgggattcaagacgacccggggaacgtcactcgcttcctaatgtgggcgcgtgaaccgataatcccacgcacggaccggccgttcaagactagcatcgtctttgctgcccaagagcacaaaggaactagcgtcctctttaaagtcctctcggctttcgcttttagagacattagcctgaccaagatcgagtcccggcctcaccataaccgcccgcttagggttgttggtgacgggagctttgggacgtcgaagaacttcgagtacatgttttacgtggattttgaggcatcgatggctgagccgcgtgcacagaacgcgcttgcggaggttcaagagtacacgtcgttcctaagggtgctgggaagttaccccatggatatgacaccatggtccatgacatccacagaagacgcatgaccccatcgccaaaaacaaactcaccaataaatttattaaattattctgttctttctttttttgtgaaaattgtagtatacatcgaaattaaaccgtaaatgtagagctcattattcacgtggtgattaggagaaaacaaaattttatttgtctgtaactagctaccagatatatcttacattcttacttaaaaaaaaaaaaaaaaaagnnnnnnnnnnnnnnnnnnnnnnnnnnnnnnnnnnnnnnnnnnnnnnnnnnnnnnnnnnnnnnnnnnnaac

SEQ ID NO: 98607 - DNA, 485 bp, Arabidopsis thaliana columbia
  unsure (1)..(485): unsure at all n locations
nnnnnnnnnnnnnnnnnnnnnnnnnnnnnnnnnnnnnnnnnnnnnnnnnnnnnnnnnnnnnnnnnnnnnnnnnnnnnnnnnnnnnnnnnnnnnnnnnnnncctgtcttttttatatttttttgctttggatatctaagaaactttattaatcataccaaccaaacttacactcttattaacacaatgacacaacaacgaatgcataagcattacaagaagcaagacaagagtttaccagaaacacaaagagcttcttttagttctgatggattccacttggccatgtcagattctttacaggctcgagaatagcttcaacctcagacagagtttcttgatccatccccagactttcaagctctgtaactgctgcaacattttcttctacctgtgagacagagctcatcccaaccaaccccgacgaaatctcctggtttgctaaactgaatggcagagctaactttgtgatcttcttgccctttga

SEQ ID NO: 98608 - DNA, 469 bp, Arabidopsis thaliana columbia
tttaggcgcactatagaattacttgacgtcccatgcacgcgtacgtaagcttggatcctctagagcggccgccctttttttttttttttaattaacgcactttttttattcatgaatgctaaagttacaaaacaataaaactggtcaagagtccagtttggaacccaactaactttgtgttcaccatgtgatgtctctcgggaacattaagtatactttaataaagacaggggtaagtttttttttttaaaggatgaggatgatgaatgcaagacttttatagggtcaagctttccgatttgatggaaccacagaaacatggagtattcctttccattctttgccggggttcactgtgatcggtttcgcgacagccgcgcgctttccaccgttacaaaacgcttatagtcttcaactcccaaatcggataccttcttatcccatggattccacaccacggcatcaactt

SEQ ID NO: 98609 - DNA, 565 bp, Arabidopsis thaliana columbia
ggttgatgtggtggggggtactattaggtacaacttagaagagtcttgacgtcgcctgcacgcgtacgtaagcttggatcctctagagcggccgccctttggttttttttttaattaacgcactttttttattcatgaatgctaaagttacaaaacaataaaactggtcaagagtccagtttggaacccaactaactttgtgttcaccatgggaggtctctcgggaacattaagtatactttaataaagacagttttaagtttttttttttaaaggatgaggctgatgaatgcaagacttttataggggcaagctttccgatttggtggaaccacaaaaacatggggtattcctttccattctttgccggggtgaacggggatcggtttcgcgacagccgccctttccaccggttacaaaacgcttattggttttaaactgcgcaggggggttttttttttatgggaggggatcgcccacgacgggaaaagcttgtgccttggtggggaaaaagttgggggtttttttttgaggggggaggatagtttgtgaggcggggagtgct

SEQ ID NO: 98610 - DNA, 500 bp, Arabidopsis thaliana columbia
gcttgttccttactttcaatgatgtcaagaaacttagaaacatatcattgcaagacaaaactttgtttatgtttgatagtgagcgaaaacaagacagaactaagataacagtaagacaaagtgaagtgatacaattttcctgaactctgatcattcatcatctttccacatatctgcaaactcatcaggctccaacgggtttgagagctcatgcatctttttcctcgtcttcgccttgatcttcttagcaaatttcccagctttatttctcttctccaatgctcgaatctggtttggagatacgtataacgggttctcataaagagtaggacctccaaagctgcccgcgaatatcttgattggattcagacaaaaccttggaccaacctcgataagggtcattttatccaggccaccttttgcaattttatctgactcattgtgaggaaccgaaatctggtaatttcggaaccatattatgctcatcaacaattgaaaag

SEQ ID NO: 98611 - DNA, 544 bp, Arabidopsis thaliana columbia
  unsure (1)..(544): unsure at all n locations
nnnnnnnnnnnnnnnnnnnnnnnnnnnnnnnnnnnnnnnnnnnnnnnnnnnnnnnnnnnnnnnnnnnccgccctttttttttttttttttacctgaaagttcaattttatatttcttttttttgggtgtaaaactgggactatactatacatacattgggctaatttactgagacagagagatatctaaaccttatgttcaagtgatctctttctcaattgcacatcaaatgaggtaacaattacaacaaaaaactataaacctccccccaattgtaatctaagaaaaaatgaataactttaaacaagtcaaacttgatctcattgtagaaaatctgtaagagaagcttgtatatcttccaatgttcttcctttagtttcgggtaccatcgcataaataaagactatacccgcaccacatatagtaaagaagatcaagaacgttcctgatgcgttccactctagcatgaagttgtaggcgaaagcaacaatccaaccaaaggaccagttggctaaggtaaccagagtcccagcagaaactttaa

SEQ ID NO: 98612 - DNA, 827 bp, Arabidopsis thaliana columbia
  unsure (1)..(827): unsure at all n locations
nnnnnnnnnnnnnnnnnnnnnnnnnnnnnnnnnnnnnnnnnnnnnnnnnnnnnnnnnnnnnnnnnnnnnnnnnnnnnnnnnnnnnnnnnnnnnnnnnnnnnnnnnnnnnnnnnnnnnnnnngttgtgaaatgagaagtaacattaactaattacaagataggatattaaacctcgtgtgatatggaagaaaataaacttttgactaatttacatatgcaaaagttgttgtaacgctgggaaaaaaaaagaattctaaaaacaaaggtatacccttggaggaaatttcgtattatatagttagaataaagaatgtactaaatggaagaaaaaaatatatatatgaatctagccgagactatcaatggccaacaccgggactaggaacggatcggagataccgatcaacggtggagagatgtcgtgatcggagctttccggcgaagacggccgcgtgaccctttttgctcggtgtcgagttgggaattttcccctttggtagagcacttaacgtactagttttggtcacatgaggcatgtgactcttctcttcctctctcaccgtcaagttttcttgtttctctcacctccaacagttttcttgaagataccagcgaaggcaaggctgacacgatgacggcaaagactatgaagagccagatggtcggaattagacgaacggccatgaagagctttgatctttgggttgagaaataaagagagagagagcgagagagataaaccccatgaaatactctcgagccgaattccgagcttacgtacgcgtgtatgcgacgtcatngtcttgtagagtacacaaaattcattc

SEQ ID NO: 98613 - DNA, 688 bp, Arabidopsis thaliana columbia
  unsure (1)..(688): unsure at all n locations
agcttctcttctcctctctgcatcattttgatccgattcgatggctgctccacctgctagagctagagccgattatgattatctcattaagcttcttctcatcggtgatagcggtgttggtaaaagttgtctgcttctacggttctctgatggctctttcaccactagcttcatcaccaccattggcattgactttaagataagaacgattgagcttgacggcaaacgtatcaagcttcagatttgggacaccgctggtcaagagcggtttcggaccatcaccactgcttattaccgcggggcaatgggcattttgctggtgtatgatgtcacagacgagtcatccttcaacaacattaggaactggattcttaatatcgaacagcatgcttcggataatgttaacaagatcttggtagggaacaaggctgacatggatgaaagcaagagggcagtacctncagcaaagggtcaggctcttgctgatgagtacgggattnagttcttcgaacaagtgccaagcaaaccctaancgtggaagaggtttcttctcaatagggggggcattaagcagagggttttagcacccgcttgnggcagncctcaacgtnaangttgccaacggccagaanttggnngggagncnncanaattnatctttggcttaaagtttaaggagttgcganta

SEQ ID NO: 98614 - DNA, 1047 bp, Arabidopsis thaliana columbia
  unsure (1)..(1047): unsure at all n locations
atacgactcctatagggaaagccggtacgcctgcaggtaccggtccggaattcccgtgtcgacccacgcgtccgggcgcattttagtcgtccgccataaccttcgctctctgattcttccgattacatcggttttcttctctctccgattcaatggctgctccacctgctagagccagagctgattacgattatctcattaagcttcttttgattgtagatagcggtgttggtaaaagttgtcttcttctacgtttctctgatggatctttcaccactagcttcattaccaccattggcattgactttaagataagaacgattgagcttgacggtaaacgtatcaagcttcagatttgggataccgctggtcaagagcggtttcggactatcaccactgcttattaccgtggggcaatgggcattctgctggtgtatgatgtcacagacgagtcatccttcaacaacattaggaactggattcgtaatatcgaacagcatgcttcggataatgttaacaagatcttggtagggaacaaggctgacatggatgaaagcaagagggcagtacctacagcaaagggtcaggctcttgctgatgagtacggaattaagttcttcgaaacaagtgccaagacaaacctaaacgtggaagaagttttcttctcactagggagggacattaagcagaggctttcagacaccgactcgagggcagagcctgcaacgatcaagataagccaaacggaccaagcagctggagcaaggcaggccacacagaaatctgcatgctgtggaacctaaaaaagttcagtcccaaaaggctccaaagttgaagtgaagtgaaaaacagatttatcttggggtgcttttgtatttttttttcttttgattatttgttcttatttgacttcttctagtttgttcatgagggtaatagaatcttttaagaaaaaaaaaaaaaaaaaaaaagnnnnnnnnnnnnnnnnnnnnnnnnnnnnnnnnnnnnnnnnnnnnnnnnnnnnnnnnnnnnnnnnntcgcctcaat

SEQ ID NO: 98615 - DNA, 914 bp, Arabidopsis thaliana columbia
  unsure (1)..(914): unsure at all n locations
acgggaannnnnnnnnnnnnnnnnnnnnnnnnnnnnnnnnnnnnnnnnnnnnnnnnnnnnnnnnnnnnnnnnnnnnccacgcgtccgaggactggcgtattttagccgtccgccatttccatcgctctctctcgtttcttctctgctcatttactataaccaacaaggtctcttctcttctcttctcctctctgcatcattttgatccgattcgatggctgctccacctgctagagctagagccgattatgattatctcattaagcttcttctcatcggtgatagcggtgttggtaaaagttgtttgcttctaaggttctctgatggctctttcaccactagcttcatcactaccattggtattgattttaagataagaactattgagcttgatggcaaacgtatcaagcttcagatttgggacactgctggtcaagaacgttttcgaaccatcaccactgcttattaccgcggggcaatggggattttactggtgtatgatgtcacagacgagtcatccttcaacaacattagaaactggattcgtaatattgaacagcacgcttcagataatgtcaacaaaatcttggtaggaaacanagctgatatggacgagagcaagagggctgtgccaaaatcaaagggtcaagcacttgctgacgaatatggaatcaagttctttggaacaggtgccaaaactaatctgaatgtggaagaagtttcttctcctagcaaaagacataaagcagagactcgctgatactgactctaaaacagaacctgcacgatcaagatcagccaacaggccaggctgctggagcccgcaggcccacaaagtctgatgcgggggaagtatcagtccaaaggctccaagtgaaggaagaaaacagatatcttgggggcttggatttttt

SEQ ID NO: 98616 - DNA, 1104 bp, Arabidopsis thaliana columbia
  unsure (1)..(1104): unsure at all n locations
agaagaagtaaaatagaagaagccgggaaacaaaagctaaatcgggaactggcgcattttagtcgtccgccataaccttcgctctctgattcttccgattacatcggttttcttctctctccgattcaatggctgctccacctgctagagccagagctgattacgattatctcattaagcttcttttgattggagatagcggtgttggtaaaagttgtcttcttctacgtttctctgatggatctttcaccactagcttcattaccaccattggcattgactttaagataagaacgattgagcttgacggtaaacgtatcaagcttcagatttgggataccgctggtcaagagcggtttcggactatcaccactgcttattaccgtggggcaatgggcattttgctggtgtatgatgtcacagacgagtcatccttcaacaacattaggaactggattcgtaatatcgaacagcatgcttcggataatgttaacaagatcttggtagggaacaaggctgacatggatgaaagcaagagggcagtacctacagcaaagggtcaggctcttgctgatgagtacggaattaagttcttcgaaacaagtgccaagacaaacctaaacgtggaagaagttttcttctcaatagggagggacattaagcagaggctttcagacaccgactcgagggcagagcctgcaacgatcaagataagccaaacggaccaagcagctggagcagggcaggccacacagaaatctgcatgctgtggaacttaaaaaagttttaaaagtgaagtttaagtcgaaaaaagtttgggggtgaagtgaaaaactaagatatcgttgggtgcttatgtaattttttgttttatgccaacaattctgattcgttcttctaaattgtccttcctatttgtacgaaggtttaatcgaaacttgtatttttcttttctatcaccggttttttttgatggccggtgaccggaattggtttatngttgggcancaccttcccccccaaaaaacccccggnccttaaaaaaaaaaaaaaaaaaagggnngggccgccccaangggncccancttcngaccnggggattng

SEQ ID NO: 98617 - DNA, 573 bp, Arabidopsis thaliana columbia
  unsure (1)..(573): unsure at all n locations
cccacgcgaccaaaagttgtgtttctcataaagatctcaaagatattcctactacacatgggttctcttgacttgccttacgcttcatcgttcaagggaggaagtgaaacctttctccagaatgtatttgaaagtatactgaaaacgtatttgaggaagaacccgatggcgaagacgatatgggaactagttaagtcggtggacaacgaaaagatctcttacgaccacttctttttcaggacatttaaggtcgatggttatggaattgattccctggcgagttttttcatggattatggatataaagttggaggcagacttgattttccaaagaagaaagtacaagttctctggctttctcctccggatgttcacttccccgataatggttacggtattggcaatggccctttgccaagacttgttatagctgagcttcttgtgggggaactaagccctgagtcacagggggttataagggaggnttttaaaccggaagggggnagaaanttttctttaagactttggggnttaantttgggnggcannncccccgtttaataacttccaaaa

SEQ ID NO: 98618 - DNA, 487 bp, Arabidopsis thaliana columbia
  unsure (1)..(487): unsure at all n locations
nnnnnnnnnnnnnnnnnnnnnnnnnnnnnnnnnnnnnnnnnnnnnnnnnnnnnnnnnnncagaatcagtaaaacctttttttttttatatgaagaaagagatttcattagcagtgaagaaaaaatagacaagcaagaaccgacgaaactctctcttgctctcaagttttgactccaattaataaaatggcgacacagtgaaaagaaaataatagtgtttttttttgccattgctctacgcctaaactctctaaaaccaatagagctttttgtttcaaaagcacatttacgcagcaacagacacacggggagcatcatccacgggtttcgtagctctgttagcatcatttccgccaccacgtcttactcgtccattgttaccattggccctcgggaacccaccaccatcaccatttgctcggtttgcgtatccgcctctattgtttcccctgttattaccatatccgttgaaatcggtccggccatat

SEQ ID NO: 98619 - DNA, 619 bp, Arabidopsis thaliana columbia
  unsure (1)..(619): unsure at all n locations
aaagaagtgagaaactggatttctacaattgaacaaatatgtttcatacaattgtggaaatgacagtttcagactcatccgttacattttaacaagaatattgccttgtctttttcattagtactacaataaaagcgataaggatagtagtattgtgttttctctgtgtgatgagtaaacaagaagaaagaagagagaaagagaggagtgaaaaccggtaagaaccaaaccgcaacaaactttaaaccttgagaaaacgcagccagacgagtgcaagggcttttgtgtagtggaaacacttcatttctggctttgatcgacttcttcatcaaatactctgtgattgagaaagagtttcaatcttgtcgtgaagcgtcacgacaagatgatgggcatcatcaagaagcttccagacattaagctgaccagccatgctattacactcttccacaatctcatccatactactgnattccnggatgatcagtttccnacgangactnacgccgngattgcatagggcacaaatcacccgtngnggggcttnttccggntctgnccaggggnttccanccagccnatggggttgtcagcccatnntnccaggaaagggtgtaaa

SEQ ID NO: 98620 - DNA, 293 bp, Arabidopsis thaliana columbia
gagatactgggggtttttttttataaaagaaagcccagttcaattttcatattgggggtctcaaaatttcaatacaatctcaagttaaaaaaaacacttaatgtgaatccagaaactaaaataattccaaaaaaaacagctcttacaaatttcgatttaagctcctcatttttctatatgtaacccccaatttaaacatagatttaaaagaagtacccaaaagataattaatcttcgatacctctaattttaaaaatagtatttcgcaccctactcagatctcttcctttcaa

SEQ ID NO: 98621 - DNA, 531 bp, Arabidopsis thaliana columbia
ttaggacgcacactatagaaaagtctatgacgtcgcacgcacgcgtacgtaagcttggatcctctagagcggctcgccctttttttttttttttttttattcaaaaatcaaaattaagttgaattatgatcttctttttttcttgtatggtgtgtgtaactaagaaaagtacaaaaccacacatgacacaacagtactacactctcaattatgtgtacatgagctataaaactgcctctttgtttactaactagatatataacgagtactgtttaatttaatggtttgatataactaaaaattaggagaaagagaagaaggagcgtttggcaggaggacgtccaagggctctcatgagattagcaacttcaactacttttgcaacctctgtccctctctttgcctctgccgtcgctcttctctcctccgctttcctctgcgctttcgccacattgttatgcgttttctccatcgcttttgcttttctctcctctagcttcctctcaattttcttcatccaagagttggcct

SEQ ID NO: 98622 - DNA, 606 bp, Arabidopsis thaliana columbia
  unsure (1)..(606): unsure at all n locations
gttgaaagcttgattctttcttttttatggctgaatatttcacaatccaagcttgtcatatacaaaatagacaaagttgcagacaacaaagtgtttgtttagatttgatagtcgacctcataggggtttgtccctgccctatggtaacaagcttcacaattcaaacgaaggcccagatccagcatcagtgattgcaacctcatgtcgacgactactggtgattagtgccaatatggttttattgcagaatctgcacttgggaagcacaagccaacattcaagacacagaacatcatcattaccacacgctgcttcttgactctcagtatctgaaccaacaaggcacactgcgcactctgcacatctagggatacaaagccagcatccacgggacttgcgttgcttctggttacatgattctcttgagcaagacggaatcatccttacttcatcgcatttgggacagacctcgaggtcaatcgttccctcggaanaaaggtaagtatacagtgctgagagatgttgtttggtaaagccattgacgccattgatgtgaagtgtctctagtttatgattgttcttanacaagctttcaanacattccat

SEQ ID NO: 98623 - DNA, 423 bp, Arabidopsis thaliana columbia
  unsure (1)..(423): unsure at all n locations
gttcctcaaaacggaggaggtggaagaggaggccgcggagaaggaggtcgtggtggagctcgaggtggtggttcatcttgactttgcttttaacgctcctctacaagagagtagttttaatttttgttttgcgtctttctttttgcctactacttgagttgatgtggtattggcttttttgtcggtctagtttttcaatattcttgctttttttcctctcttttttgtttttcatctttcaatctttctttggggtaatgtactcttcataaacaaacattcaatttcataaggaatccattaaaaaaaaagcttgatgcatattctatagtgtcacctaaatctgcggccgcagctttaggttcggtancccataacttcgtatagcatacattatacggagctatggggatccnctagaac

SEQ ID NO: 98624 - DNA, 447 bp, Arabidopsis thaliana columbia
cggctcgagctcacgagcatcaattcttcatcgaactcatagttaccggcgttgttttgaggccactaccatcgtctctctccgtaatcctctccatcatcgtcatcttctcagtttcgaagcattttctcctttaatagtttcagagaattctgattgtttgttggacgatgtaatcgaaagtggaaacgctacaagatttggtcccttaaaagatggtttcatgttcgaaacctcaattggtttatcaagaatggttctgtttggccgcttgggtttctgatgagatcatgtgcgatgcttcgaaatagaatgcttgcagatccttcatttctcttcaaagttggaaccgaggtagccatagactcttgctgtgcaacttttgcagaagtacagaagagaggggaagatttctggtcagagtttgagttatatgctgctgatctt

SEQ ID NO: 98625 - DNA, 192 bp, Arabidopsis thaliana columbia
gttccagatcgcgagttctactaaacagagggtaacatgtatatagtccggtccgttgaatgttatgtatatgtttatgtagtcacttatagtgggtatggtcttgttataattatggtagtagtttgtgtcgcgttctagacttgtaattgaagaaacctcaactaaaagaccttggatgctgtttgaatg

SEQ ID NO: 98626 - DNA, 533 bp, Arabidopsis thaliana columbia
ccacagagcttgtaccctataagcttcagagattagtcaaggaattcaaatccttgacagagccaattgatcgactcaaatgggttctccattacgctagtctccttcctcaaatgcccgagtcgtccaagactgaatcaaacagagttatgggctgcacagctcgtgtttggctagatgctgagttaggtcaagatgggaagatgaggttttgtgcagatagtgattcagatgtgtcgaaagggatgtgttcttgtttgattcaagttcttgatgaggcttctcctgtagaagttatggagttgaagactgaggatttagctgagcttaatgttggtttgttgggtggagagagatcgagagttaacacttggtataatgttcttgtgagtatgcagaagaagactcgacgattagtagcggagagggaaggtaaagttccttcctttgagccatttccttcacttgtgttaacggctcatggcattgaagctaaaggaagctttgctcaagctcaagcgaaatatttgttt

SEQ ID NO: 98627 - DNA, 560 bp, Arabidopsis thaliana columbia
ttttgagcatcattattataggaagttaggaactatggcttatgaagagagaagatcatcgatcctggattcattctcgctatcgccactaccatacccagtttcttttgatcctagccgttgcttcagtgttcttgttgagttcatggtacttcagcttggaagaagcagccgaatcagcggaagagcagataaattttgcgcttctcttgattcctctgtttcttatagtcttggtccggtggttatcttccatggagaaccctgatgcgcttctcgggatgttttcaagcagtcgtcggacaacttacgtgagtcccggagccggaggtgacggtggaagctcgccgtggggagtggcggcgttgatagttttgttgcttgtattgcttcagtatcaatcaagtttcttggagatgtggtctggttaatgatattgataggtttttttgattttcacgtgttttgttttgtcgtctagtagcacgatgatgtaaaaatttggtcattacttacgaattacgaggtttaaaatctcgtgacggtactacatgttatcc

SEQ ID NO: 98628 - DNA, 555 bp, Arabidopsis thaliana columbia
caagatccttcacttctctcaaactacgaaaactatggcttcaaaatccgtcgtcgttttgctcttcctcgctctcatagcttcatcagccatagctcaagctccaggaccagctccaacaagatctcctcttccatctcctgctcaacctccaagaaccgccgcaccaactccttcaatcacaccaactccaactccaacaccatccgctactcccacggcggctccagtttctcctccggctggttcaccacttccctcctccgcttcaccacccgctcctccaacttctctcactcctgatggtgcacctgtcgctggtccgactggatccactcccgtcgataacaacaacgccgccactctcgctgctggatctttagccggatttgtattcgtcgcttctttgttactgtaatttggttatattagagaatcatctattgagatagtgtttttctatttaaggatttttttgctcgtgaaaattaaaatctgtggttttatgttgtattaagaattgagttagcgtttgggcgatagaattaaatcatt

SEQ ID NO: 98629 - DNA, 968 bp, Arabidopsis thaliana columbia
cttgaatggccttccgtttgcagtaccggtccggaattcccgggtcgacccacgcgtccggagaagaagaagaaggagaaatgtcagacgacgacgagagaggcgaagagtacctcttcaagattgttatcatcggtgattccgccgtcggcaaatccaatctcctcactcgctacgcccgtaacgagttcaatcccaattccaaagccactatcggcgtcgagtttcagactcagagcatgctcatcgacggcaaagaggtcaaagctcagatttgggataccgccggtcaggaacgcttccgcgccgttacatctgcttattaccgtggcgccgttggagccctcgtcgtctacgatatcactcgtagctccactttcgaaaacgtcggtcgctggctcgatgagctcaacactcattctgatacaacagtagcaaaaatgcttattgggaacaaatgtgatctcgagagcataagagcggtgagtgttgaggaaggcaagagtcttgctgagtctgaaggtttgtttttcatggagacctctgcgttggactcgaccaatgtaaagacggctttcgagatggttattcgggagatctatagcaacattagtcgaaagcaattgaactctgattcttacaaagaggagctgactgtgaatcgtgttagcttggttaagaacgagaacgaagggacaaagacattctcttgctgttcgaggtaacatctttgtaacggtttctctttgtcctgaggattggtttcgggttgaattgtgttcctggtaaacttatagaaaggcagagatatattcttatagttctcagttaaagtaaaagaagaagagagaaagatgttttgagtttctttgttacgcatacagaaaaagtttggttagtgtataagttatgttctcatttgtaacttttgtaaacttatgattgttaaatcaattttgatattttcc

SEQ ID NO: 98630 - DNA, 896 bp, Arabidopsis thaliana columbia
  unsure (1)..(896): unsure at all n locations
atgatctnnnnnnnnnnnnnnnnnnnnnnnnnnnnnnnnnnnnnnnnnnnnnnnnnnnnnnnnnnnnnnnnnnnnnnnnnnnccacgcgtccgttcaagaacgtgatcataaccatcgccgagcccacttcggtggaacagggggtgtgaagagctgcacaaattattctccagttgtaaaatcgttgatcgaagcaaagtcttcgggtttctctgatgtcttgttcctggatgcggctactggtaaaaacatcgaagaggtttctacttgtaacatcttcattctaaagggaaacattgtatccactcccccaacttcaggaaccattttaccaggaatcacaaggaagagcatatgtgagctagcccgtgacattggctatgaggttcaagatcgtgatctttctgtggatgagctattagaggcagaggaagttttttgcacggtgacggcagtggtcattaaagctgttgaaaccgtgacattccatgacaaaaggggtaaatatagaacaggagaagatgcattctctacgaagcttcacttgatattaactaatattcaaatgggagttgtcgaagataagatgggttggatgatggagatcgatcatttggttggacagattcgtttcctgatgaaacataagaagaaataaatttctaagcaaaaactaagaacaatgaaaagcgagataaagaagaataaaattgtatcctttaaacaaaaaaaaaaaattgtatcttttgttaagaacattactcatactatagttcttgtttcactttaagcaccataaatctacaccaataaatagtggttagaacgaaaaaaaaaaaaaaaagggcgaacgctctagaggatccaagcttacgtacgcgtgcaggcgacgtca

SEQ ID NO: 98631 - DNA, 415 bp, Arabidopsis thaliana columbia
ctgcatgtatatctcctttttcttcgttatataaactcaattataaagggattagtacagtagtagatgaatatattgatgacaactaaaacaaatttcagtatatgattaaaaagaattcaaaaacacagagatctttgatggcaacactctaaatatatttcgatacaatttgtctaattaccatattatcccccaaaggccactacatggctaaatgtaacatgtttgcgattctggctcgggtcaactctgtcgctctcttgtagtgaccacctagtcaacggaaatgttacctttgcaaagtgagtttacaagcattcattgcaattgcggttatataatccttttacaatttccaaagctttacaacgctattagctccacacaacagcaatcacaacccccttgcatc

SEQ ID NO: 98632 - DNA, 470 bp, Arabidopsis thaliana columbia
  unsure (1)..(470): unsure at all n locations
atataaaatctataataatagtaggctttatgataaagggggactacaaccactccgaagcaactattgcccgcaaacgcacctgtttccaactgaaatcagaaaaagtgccaacaagatatccataacaacacaaacaaaatcacatagaagactctgtttcaagttccaacaacacattattcaaaacccactctttacttactcacttactctcttctgctaagattagccaagctcatcaagaattaatcccctgacgataataatgatcctacagcctcctccatgctcttcccatttggattcttgttccattccaacatttttctaaaagtctccacgaatttctccgcgtgaaccactctccattcctcgaaatcccattctccatacattctaggatcatctttattaacccaaacataaggttcaactttcaccttcncgaattatccattctaaaattc

SEQ ID NO: 98633 - DNA, 512 bp, Arabidopsis thaliana columbia
gcggccgccctttttttttttttttttttttttggagaaatttaacttccaaaaccaaattgaaaatgttgtatcgagtagtattccggttagaagaatccggtccgtatcatgaaccagattctctttctgtagctctcggtaaataacctaatcacactaatgaaactcagataactaaacttccccatcagattagagatactctcatactcctgaggattgacatctaggctagtttactatccggtttgtaacaaaaccgaaccggttgattactgaacgccggacaatttagcccaatctacaaattgcataccgccatacacattgttagcaaaccggactcccaccgtgaatgccatagcgaccacagggatacgtttggccgctgtagaaccttccacgacgcgttcgaggccgttgatgatttggtaacgcgcattggaagataagccgaggaacacaccccagagagcagcgctttcgaaaagaggtggaatagggacgtc

SEQ ID NO: 98634 - DNA, 736 bp, Arabidopsis thaliana columbia
  unsure (1)..(736): unsure at all n locations
ggtgcaactactagaagagttatgacgtcgcctgcacgcgtacgtaagcttggatcctctagagcgttcgccctttgggtttggccttttttttttttttttgccactttcaatacacccccttattcatttacctttgggtaaacaaaaaggtaggacacgagtagcaaaatattttattctatacttatttaaaaacatgtatacacacatgtcattattggatttttgaagcaaagttagaaataacaagattcaagtttcttagctctctctcgggcactactctcagcctttgcattgccttccctggagtaacttttctccagcaaacgccacatgaaaggaatcccatctctggccttaatcctctctctgattacttctttggccgtggaggattggcctgtctttagcagcagctggcaccacatttcgttgaaaacatctatttgttcgtctgatgccccaacgatcttgtaaccaatggcgttgaactctgaacccagtagttctagagccttttcgtagttaccccttgcgtattcatacacagcttcccaagctgaatccctttctgcatcacctggtgcttctcctggttcttctttgataatcggaacttaaggcccccaaggaattcatgggcccttgaagctcccaccttgggncggngggnnccgggatccggncggaccgnngggacagttccaaagggcgatangtgggaaaggnt

SEQ ID NO: 98635 - DNA, 486 bp, Arabidopsis thaliana columbia
tttcggatacccttgctgttttttttataggtaaatttcactttctaaccaaaaacacaaatattttttagttacatatgcaagaaaagactcccgaagactagaacattgtgatataacaaataagagactgaacattggccacatcatacatataacgcagatgatgaattgttggtatttgggggaaagaaaaccatcatatatagaagaagacattttacattctgaggaatgctttctcgaattgtgtccacttctgctccaatgtacccacataccccaccgacattcgtacaagaccaggagagatgcctgcagcttccttctgtgaggggtcaagctcgctgctagtgctgctcccggagcaagacatgagtgtctcgtagtaacccaaactgacggccatgaagccaaactgagtggcgttctggagatatgccatgagcttgttggctttctcctctgtctccatgtctatcgaca

SEQ ID NO: 98636 - DNA, 537 bp, Arabidopsis thaliana columbia
  unsure (1)..(537): unsure at all n locations
catatgaaattgattcatcttagaaacatatattgaagatacaccaatcctgtttctaggcattcacaagcctacacatatgggtttgtttctgttcaaataaccctacaattgcagcattactagtaaccttttttaacatgttttccagactttacctcagttctgtgccggtgaatggttcactgattccccatttgatcagcggtaagatctccaacctgttaatcatgggatttcggaagacagttctgacattcaaatgagttgtgcctttttaaggtcagacacaactcctctgtcttgggctgcccctttcattgtaaaccaccttatcaatgatcccatattcaacagcctccagtgggactaaaatattcgggngttcatgtcagcttcnatctgctccnggggattaccanatgcttgganacagctgaccattcnggccttangggctgaattccttcctgnaattcaaacngtggttggcctgaacggnaggggggtacaaaagtgtggggacggacgntcctt

SEQ ID NO: 98637 - DNA, 525 bp, Arabidopsis thaliana columbia
cggagacttcactattgttgcaataatgaagagtaacacattgaaaagagactactgaccacctccgccagttacagttcatatatagagaccaaacaccaacacataagaagaaccaagccacaagaaaaagcaaagacaatgacaaaattacaagaatagataagaaaaagaaagaagaagattagagggagatttcacatggtgcgtgaaaggttcttccccgacaaatcgcttctagattttctccagcgtacgagcacaatggtgacacttccacaccagtcgcatataaaggaacggaatgtgttagaaatccaccagctgctatgacccaacgtgtatgcagtcgtagaaccaacagtcttgcgctttccggtgtgtcgtaattcgacccgtttgcgttcttcaccggtgcaaactcttcctccctcaacacctcaaaaagtgcagtcgaaggagcataaggaaagcaatcgaatatgaactgttctagttttagtcccactatgtcgccatttatag

SEQ ID NO: 98638 - DNA, 1103 bp, Arabidopsis thaliana columbia
aaacgttggtcacgaggcctcatcaatgcttttgataccttccttcaccgcaaattctaacgaaccaccaccgtcgaagctttctctttccgatctttcaatggcgattctcaaatctcacttcttcttactcttccctcttcttcttctccactttcacactgtctcctttgctcagacgctctttgtgttcggagatggtctttacgacgccggaaacaaacagtttctctctcagaaccgagttgacgcaagctttcctccttatggagtcactgtaggacaagccaccggacggtggtccgatggttctatcgttcctgattatcttgctaaattcatgggaattcctaaaatctctccgattctcctaaccacggcggatttttctcacggagctaatttcgccatcgccgacgctaccgttcttggctctcctccggagacgatgactttgtcacaacaagtgaagaaattctcggaaaacaagaataagtggacaaatcaaacacgttctgaagctatctacttgatctacattggttctgatgattacttgagctatgctaagagtaatccaagtccatcagatactcagaaacaagcttttgttgatcaagtcatcactaccataaaagcagaaataaaggtggtttacgggtctggcggaaggaaattcgcattccagaacttggcaccgttaggttgcttaccggccgtgaaacaagcaagcggaaatgttcaagaatgtgtgaaattgccttcggaaatggctgctttgcataacaagaaacttttgcagctcttgggttgaactatcaagagaactaaatggtttccagtactcgttttacgacttctttagctcgatccaaaacagaggtatcaaggtctaaggcttatacattcgagaccaggaaacgcttgcttgttgttcggacctggctctttccaacgggggtaaattccccagctaaaattgtttccgccaaccctgaagagtatatcttctttgatggtaagcatttgacgcaagaagccaaccttcaggtcgggcatttgatgtggggagcagatccggaagtgattggaccgaacaatat

SEQ ID NO: 98639 - DNA, 852 bp, Arabidopsis thaliana columbia
  unsure (1)..(852): unsure at all n locations
gatataaaacccaaacttgggagcctgtgttaaccctatcgcagatggatgtgacanacgtatacgcaagagcgcagtgattgaaaaggctatctgcttgtttgggtataagggtgtgggtgttgcttacaacccaagaatagataaatgggaagcgataggagaagtgaattatttggatttaggatgggtatggcttcttgttgcgtgatagataatgtgctgtattgttacagtaatatagacggaatcaaattgtatgactctaagataggatgctggatgaagctcaagggtttggaaggattgcctgagtttgctagttattcttatgttagattagcggattatggtgggaagatggcggttttgtgggacaagttacctactactggcaataataacatggtgatttggtgtgcggtaatcacacttgaaaagcgccacaatgaaaacatttgggggagggttgagtggtttgatgctgtgcttacagtccctgagccttatgaattcgtgtgtgctcgttccgctaatgtttgatgaattgttgactcggttggggtgttcacattcgtagcaaggacggtaaaaagatgtgtactctggaagagagtttggtcgtgtagttacgagaaattttttgttttatttcgcttcgtttgcaaaggctttgctttgcttgcttgcttattacaatcttataaaccaaatgattatggctaaaaaaaaaaaaaaaagggaatattatcaccccaaaagaagataaaaaaaaaaaaaaaagnnnnnnnnnnnnnnnnnnnnnnnntgctcaatnnnnnnnnnnnnnnnngagannnnnnnnnnnnnnna

SEQ ID NO: 98640 - DNA, 1988 bp, Arabidopsis thaliana columbia
  unsure (1)..(1988): unsure at all n locations
aggtcttattccactcacattttggggaaggcgggacccccggcaggaccgggcccggatttccggggcggccccagccgtccgcgaacccttcttcatcttcttcttctcctccacctaaccaatgggagcaattgatctctctttctcacagagtcttctcttctcttcgtcgcgttccaatctttcctcctccacacaccgttccgtctcttttttgccgccgggaagcaagtcacggtgtctgccgccgttgcgttcaatgagtcatgacgacgacacggcctcaaaggaggtgaagctatggggtggaaggttcgaagagagtgtcactgagaaagtggagaagttcactgagtcaatttcatttgataaggttctctacaagcaggacattatgggtagcaaagctcatgcttcaatgcttgctcaccaggggctaataactgatagcgataaagatagcattttgagaggtcttgatgatattgagagacaaattgaagcaaataagtttgaatggaggactgatcgagaagatgtgcatatgaacattgaagcagctcttactgatcttattggtgaacctgcaaagaaacttcatactgcaaggagcagaaatgaccaagttgctactgacttcaggctttggtgtcgtgatgctatcgatacaattattgtcaaaatcagaaatcttcagagagcacttgttgaactggctttgaagaatgaggctttgattgttcctggttatactcatcttcaaagagctcagcctgttttactcccacacgttctcttaacttttgtagagcagctcgaacgtgatgctggtcgttatgtggactgtcgagcaaggctaaatttctcccccctgggagcttgtgctttggctggaactggtctgcctattgataggtttatgactgcaaatgctcttggatttaccgaaccaatgagaaacagtatcgatgcagtctcagaccgagacttcgtgctggagttcttatatacaaatgccaacaccggtattcatttatcacggcttggagaagagtgggtactgtgggcttccgaggagtttgggttcatgactccaagtgattctgtgtcaaccggaagtagtataatgccacagaagaaaaatccagacccaatggaacttgtcagaggaaaatccgcaagagtcataggcgatctggtcactgtcttaacactgtgcaaaggacttccccttgcttacaacagagattttcaagaagacaaagagccgatgttcgatagtaccaagacaataatgggaatgatcgatgtatctgcagaatttgctcagaatgttacattcaacgaagacagaatcaagaaaagtcttcccgcaggacatcttgatgcgactactctcgctgattatcttgtgaagaaggggatgccttttaggtcatctcatgacatagttggaaaactagttggagtttgcgtctcaaaaggctgtgaacttcagaacttaagtcttgaagagatgaaaaagctgagccctgtgtttgaagaagatgtgtttggatttttgggggttgaaaattcagtcaataagttcagttcctatgggtcaacaggatcaaactgtgttgctgagcaacttggctactgggtcaacaagctcaacattacttccacctgatccggaccaaaccattagcaaaagatttgatgacgtttgtgtaattttcatatttattgaggatttttgtcgttaataccaggaagatttcaagcaacatgttgcagcggtttgagaagacccacaaacaaaataagttttgtaatatttgaaatcgagataatgtggaagagtttggtattcttctcatttcaaaaaaaaaaaaaaaannnnnnnnnnnnnnnnnnnnnnnnnnnnnnnnnnnnnnnnnnnnnnnnnnnnnnnnnnnnnnnnnnnnnnnnnnnnnnnnnnnnnnnnnnnnnnnnnnnnn

SEQ ID NO: 98641 - DNA, 528 bp, Arabidopsis thaliana columbia
  unsure (1)..(528): unsure at all n locations
nnnnnnnnnnnnnnnnnnnnnnnnnnnnnnnnnnnnnnnnnnnnnnnnnnnnnnnnnnnnnnnnnnnnnnnnnnnnnnnnnnccacgcgtccgcgcttttaaagcgagtatgtccggttacgcctccggtgtagccaaaggtgttgctccaaaagctcgtatcgccgcctacaaagtctgttggaaagattccggttgtctcgattccgatattctcgccgcctttgatgccgctgttagagacggtgtcgacgttatatcgatctcaatcggtggtggagacgggattacttcgccgtattacctcgatccaatcgctataggctcgtacggcgccgcgtcgaaaggaatcttcgtctcttcctctgccggaaacgaaggacctaacggtatgtcagttacgaacctcgcgccgtgggtaaccaccgttggtgctagtacaatcgatcggaatttcccagcggatgctattctcggcgacggacatcgtctcagaggagtgtctctttacgctggagtacctttaaa

SEQ ID NO: 98642 - DNA, 642 bp, Arabidopsis thaliana columbia
  unsure (1)..(642): unsure at all n locations
aatnttagggtcgtcaaaaagcgagggaccgttaccagaaacagtcctctcttctctcaaagctcactaggcagcttagcattcacgataacccgagcagctgctgcttcaagctggtctgacaatagtggcactgaaaccagcccgagaaccaatggagggtcatcaggagaggactggatgaatgcgtttaacgcagctgctagtggacctgactcattgaagagatatggatctggcggccatagccgtcgttacagtgatccagcacagaatggtgaggattcttctggatctggtggcagctcccgtcgcaccacaccaaaccggctcccaccagctccgccacagtctggatcatcttacaggtattagaaacctgtttggtttccaggattgttattgaacgaaccataaaacacattcttttctttctttttctgccctttcggattggtccctgtttctgggactatttttcttatgtctcactagtttaaaaaaaaaaaaaaaaccagaatgataatatgatgatgatgtacttgcgtgtggttgtagatagatatttgttagagagacacatatatatgagtttggtcttcatattggtcatatgctttagattaaagaaaatgttacttt

SEQ ID NO: 98643 - DNA, 730 bp, Arabidopsis thaliana columbia
  unsure (1)..(730): unsure at all n locations
tctgaatccagtgaaaacaaggctccttcagggcttccaattgatttgagagggaaaagagctttcattgctggtatagctgatgataatggctatggttgggccatagcaaaatctcttgctgctgctggagctgaaatattggttgggacttgggttcctgcacttaatatatttgagacaagcttgagacgtggaaaattcgaccagtcacgagtgttgcctgacgggtcattgatggagattaagaaggtttatgctttggatgctgtgtttgacaatcctgaagatgtgcctgaagatgtgaaaacgaataagcgatatgcaggatcgtcaaactggaccgtacaggaagctgctgaatgtgtgaaaaaagattttggaagcattgacattcttgtccattcccttgcaaatggcccagaggttagcaaacctcttctggagacatcaaggaaaggctatctcgctgctatctctgcttcgagttactnctttgtttccttgctgaggcattttccttgccaatttatgnacccaggggggtgctttcaataactngttnacttacattggcccccttgaaagaatcaattccntgggnattggtggnggttttaagtttttccaaaagtttnaactaggggggttccaaacggggggncttcatntanagnttggangggaattaannntttngggcaannccnatttttgggggccttnggga

SEQ ID NO: 98644 - DNA, 898 bp, Arabidopsis thaliana columbia
  unsure (1)..(898): unsure at all n locations
gcctgcaggtccgggtccggatttccgggtcgacccaagccttccggaaaatttcaacagttactaatgtttgcctgacgggtaattgatggagattaaaagggttattgttttggatgctgggttgacaatctggaattttgctggagattgtgagaccaattaaccgatttgcgggatcttaaaactggaccgtccaggatgctgctgatggtgtgaaaaaggatttgggaggcttggactttcttggccattcccttgcaaatggcccagaggttacctaccctcttctggagacatcaaggaagggctatctcgctgctatctctgcttcgagttactcctttgtttccttgctgaggcattttctgccaattatgaacccaggaggtgcttcaatatctcttacttacattgcctctgaaagaatcattcctgggtatggtggaggtatgagttctgccaaagctgcactagagagtgacacacgggtgcttgcatatgaagctggaaggaaatcaaacattagggtcaacaccatctctgcgggtcctttgggaagccgagcagcaaaagccattgggttcatagacaccatgattgagtattcctacaataatgggcctattcagaaaacactgaccgcagatgaagttgggaatgcagcagccttcttggcatctccattggcctctgccataaccggtgcaccatatatgtgnccaatggnttgaatgcaatgggcgttcactgacagccggtgtcaaaaccttacagcagattagagcttgatcacgatgncncggaatccgggttcggncttctgtccttatnggaaatacggaatgtccacggngctttttctccttaannaaaantgggcaggtggnattcgngc

SEQ ID NO: 98645 - DNA, 672 bp, Arabidopsis thaliana columbia
  unsure (1)..(672): unsure at all n locations
nnnnnnnnnnnnnnnnnnnnnnnnnnnnnnnnnnnnnngcgtccactcttacatatcatcacttcacatcaaccaaacctacttctgtctctctctctcgctctctatctctcacgctctcacagtagaagaaaaaattagaaaggttgtgagaatggcggctacagcagcttcaagcttacaaattgctacacgaaggccgagcatgtcttcgcctagcaaaattcttaaagcaggaacctacattgttggtgccaatcctggaaacgcttcatgggataaactttcatgcactcgccaattatcaaaccttggatgtttgagaaaccacagtgctgttccaacttgtaagagacccttttctttttccacaagggcaatgtctgaatccagtgaaaacaaggctccttcagggcttccaattgatttgagagggaaaagagctttcattgctggtatagctgatgataatggctatggttgggccatagcaaaatctcttgctgctgctggagctgaaatattggttgggacttgggttcctgcacttaatatatttgggacaagcttgagccgtggaaaatcggccaagacgggttttccttcgggcattnttgggtaagaggttntcttgntctgtgttanaaccnaagntnctaaggnttnaacgtc

SEQ ID NO: 98646 - DNA, 584 bp, Arabidopsis thaliana columbia
  unsure (1)..(584): unsure at all n locations
attgagctggaggatcaaccntggggcaccccattctgcgggcctttgggaaccccgcccccaaaacccttgggttcataccccccaggtggggtttccctacaataatggccctattcagaaaacactgaccgcagatgaagttgggaatgcagcagccttcttggcatctccattggcctctgccataaccggtgcaaccatatatgtggacaatggtttgaatgcaatgggcgttgcactggacagccccgtgttcaaagaccttaacagcaagaattagagtcttgatcgacgactggactcgagaaattccgtgttttcgtgagcttgcttgtttctttatgagttagtatgtacggcatatgttccccatcggctgtctttttttttctttctttaagagaataaattatggttctaggttgggtcatttagcaactatatatgtagtgatggattattattcctcttatgattgaaaatttgcaagtgagaaaaaaaaaaaaaaaaaaaagnnnnnnnnnnnnnnnnnnnnnnnnnnnnnnnnnnnnnnnnnnnnnnnnnnnnnnnnnnnnnnnnnn

SEQ ID NO: 98647 - DNA, 691 bp, Arabidopsis thaliana columbia
cactatagaagatctatgacgtcgcatgcacgcgtacgtaaccttggatcctctagagtcggcgccctttttttttttttttaagaaaaaaatccaataaacatgtaaaaaaaccttgcttttttgtaggcacaatgaaaatacaaccattgaagcaataattcgtaaataagagaaaaaaaaaggctaagctaattaagcgggtgcttacgagccacctcagcaatatgcagccacgtcagcacccaaaacagagagatgtggatgatggtttggatcagaactgaccaccttggtaggtttgtccgaactgccaattagaaggagccacgtcgttgctaacgagtgtgcgaccatcgctggtcgttacctggaaggaaaggctttggtcgttcttgtatgaattgctctgccagttttgtccccagtttctagacatcgcttgccacgactgtgtttttgagcctttgattgagacggcgtgtacgtctcctgctcctcctacgttggagatcagaacgaggttgaggtatgagtgtccgttgatcgtaaaccttattcctcctttcttcatacatgggactcttcggaaagagacaggaacattgcccgcacgatactgagcaatctgaaaaaagctggctcggcgaggtccaatgctgaagaggaggattgcccaacctcctttatc

SEQ ID NO: 98648 - DNA, 473 bp, Arabidopsis thaliana columbia
tcgcttttttttttttttttttcgctcacagaaatgtattttcgttggtaatatgctcacaatatatatatatcttgtgtttgagtttgagtttgatgtatcacacaagattagcataaattatttgtctccttctctggctctctgcacccattgtctcgtcggttttcttggatcttgcgaattcggcttcctttcattgacagtaggtccccggcctctgcttctgcctctgcctctccatctccctcgacctctcctgttggtggagctgctagagtttgtctctgattcagcttctttgggttcctcttctccttgttcttggctttcaccagcttcttcttcttcgtttcgtgacgttgatgcatgagctggtggaggaagatacataccgggcaccaccgatatgtttttcttcggttgaaccaaaccacccttttcttcctgcgtctttagaatagactcaaacc

SEQ ID NO: 98649 - DNA, 439 bp, Arabidopsis thaliana columbia
cacgcgtccgatcctctctctcataccaagttcaatcacaaggaaatggagatccaggcaaagctcatggaatacagattccatttcatggtgacaatcatggtgagcgtgattgtggcgtctctcgtgtatgcagcaccaaggattctgaacattttagcctatttctggcctctgtttgcgtcaacagccgccttcttagcgatggcaatcacctttggtggctttcaacagctttcagaagaagccaccggcgagagactgatggattacgtcgccggacggcctgaggattctcacaagtacgactgacaaagatttgcacacaaaaacaacttgagagacgatatagaagctaccacctaagatgagtagaatgagaatggcggagattgggttcttgaggagctcaaagatgggctcaaagacagcagagaga

SEQ ID NO: 98650 - DNA, 845 bp, Arabidopsis thaliana columbia
  unsure (1)..(845): unsure at all n locations
nnnnnnnnnnnnnnnnnnnnnnnnnnnnnnnnnnnnncacgcgtacgtaagcttggatcctctagagttgccgcccttttttttttgttttggtgtaacttatgtcaaataaaatgtcgaatgattgtgtaacaaaatttaaaatagataaaaaaaaacagagcataaaagcagagtattaatgaagaaaacaaaaacaaactatagttggtcaataactgtattgataagcgaattcgttgacaccaatcatggcagaaacaacttgagagacgatatagaagctaccacctaagatgagtagaatgagaatggcggagattgggttcttgaggagctcaaagatgggctcaaagacagcagagagagctccagtgctaaccgtgagagcgtaaagaccgtaccttctaacgttgtcccaaaactcttccattaaaggaccttctggtccaagcgccatagctttctctgcatccattcccaataccaaaaccatcatcaaccctacagagactccaccaaccacagcatatctccagtgccgttccaaacccagaggaggaggttgtgctctttcaagcttgctgtttctgctacttttcgtagtcaatcttcttctggctgagccacaccgaacaagacatgatgttctgttccttatgcttgagcttggaaaagctagagctgctgctattgatctgctactggtaaaatggaggtgtggttgcagacaagatagtctcattttggggagagacatcaccgcgcacgcgtgggtannnnnnnnnnnnnnnnnnnnnnnnnnnnnnnnnnnnnnnnnnnnnnnnnnnnnnnnnnnnnnnnnn

SEQ ID NO: 98651 - DNA, 476 bp, Arabidopsis thaliana columbia
  unsure (1)..(476): unsure at all n locations
nnnnnnnnnnnnnnnnnnnnnnnnnnnnnnnnnnnnnnnnnnnnnnnnnnnnnnnnnnnnnnnnnnnnnnnnnnnnnnnnnnnnnnnnnnnnnnnnncctttntttaatcctatttttgtttttactttgattggagggaaaaaaaatatgaattgactatgcgatattacacattttcttattatttatacatcgaattttttcattccttatgggaaaaagggaatcaggttactttgaccgaatcaataacccaatgttgaccatcggttttgacctttaaccggttaatctctgcgaacagattcacggctctcctcactcctctattatccgccgccgtgaaataatcgtgaccaaatataacaccgacgggtcggagtatccgaaccgcccggttatatccgcccatgccgaattaagatcgagacccgcgtgtatcttcaccaggttcgccgtcactccccctcacaca

SEQ ID NO: 98652 - DNA, 818 bp, Arabidopsis thaliana columbia
  unsure (1)..(818): unsure at all n locations
nnncnnnnnnnnnnnnnnnnnnnnnnnnnnnnnnnnnnnnnnnnnnnnnnnnnnnnnnnnnnnnnnnnnnnnnnnnnnnnnnnnnnnnnnnnnnnnnnnnncctttttttttttttttttattgaggacaatctaactgactcagaatcctgtagctcttacacatttcacaacaaatcatccgagaaacatgagtagccgcagtattattattccatccgtacagttttattattcgttctcgctagtagctacccaaaaaattcaacaaattggaaaataggaaataataaattcaataataaaatagtgtaagtaaatctctgagaggccgctttagttgtgcttgccatcgttaaactgtgcgtttttggacgacttgaaagtttcaagaaactctttagccttttgcaactcttgcttctgcctcgacttgtcccatttgtgttcacttgctagaatctccaccacacgctgcaacgcccgagccgctgcatcagtgtccaagaacgcgattctacatctccttgctatgaaatcaaccgctgattcgcagtactcgtgccttgcacagtaagcaacctcagcttccaaaaacggatgcccatgcgccaaccgtttccccaaaccctcctcctgagctatggtggcaactcggtcagccattgaaccataggcatgagacaaatgctttgcagcagctgtgtccattgctccaggaaccactttaccaccgcacgttccccggcccgaattccgagcttacgtacgcgtgcatgcgacgtcatagttatctatgagtgtcgcctatacaatcg

SEQ ID NO: 98653 - DNA, 1131 bp, Arabidopsis thaliana columbia
  unsure (1)..(1131): unsure at all n locations
ttaggtgcactatagaagagctatgacgtcgcatgcacgcgtacgtaagctcggaatctttgcttctcagacaatggcggcttctacattgtacaaatcctgtcttcttcaacccaagtctggctccaccactcgccgcctaaacccttctctcgttaaccctcttacgaatcccacaagagtttccgttttggggaagagtcgtagagatgtctttgcgaaagcttcgattgaaatggcggaatcgaattcgataccttccgttgttgtcaattcctctaagcagcatggtccaatcatcgtgattgataattacgacagcttcacatacaatctctgccagtatatgggagagctaggatgccattttgaagtttaccgcaatgatgaacttacagtagaagagctgaaaaaaaaaaatccaagaggggtgttgatttctccagggcctggtacccctcaagactctgggatttccttgcaaactgttttggaactcggaccacttgttcctttatttggagtatgtatgggtttgcagtgtataggagaagcatttggaggaaagattgtgcggccaccatttggtgttatgcatgggaaaagctcaatggttcactatgatgagaaaggagaagaaggcttgttctctggattatcaaaccctttcattgtaggtagatatcacagtctcgtgatcgaaaaagatacatttcctagtgatgaactcgaggttacagcatggacagaagatggtctggtaatggctgcccgtcacagaaagtacaagcatatatagggagtccaatttcatccggagagtattataacaactgagggcaagacaattgtccgcaatttcatcaaaatagtagagaaaaaggagtccgagaagctgacatagactagcctgaatgagaaaatcagctgtgttcgaatagtgcctccctgtaataatatttgccaatgcaaaatgttccttgccatcttcccattgtttctatcataaaaattcgacttgttcctccacttttacttaatttgtgaaaagtggaaagcagaaagctatggttatttaagcatgcctagcgacaaaaatggccgagggcctttcagttnnnnnnnnnnnnn

SEQ ID NO: 98654 - DNA, 523 bp, Arabidopsis thaliana columbia
  unsure (1)..(523): unsure at all n locations
taggtgcactatagaagagcttgacgtcgcatgcacgcgtacgtaagctcggaattcggctcgagaatatatctcttcttttataagcaatggctccaagacaggcgaacggtagaagcattgccgtgagtgaaggcggcggagggaagacgatgacgatgacgacgatgcggaaggaagtgcactttagaggtgtgaggaagcgtccatggggtacatacgcggcggagatccgtgacccgggaaagaaaacccgggtttggctcgggacattcgacacggcggaggaagctgcaagagcttacgacaccgccgctagagagtttcgtggctccaaagcaaagactaatttccctcttcccggagagtctactacggttaacgacggtggcgagaacgattcttacgtcaaccgtacgacggtgacgacggcgcgtgagatgacgcgtcanaaatttccgttgcatgtcaccgggagcgtaaagtccncggtgggtatgcttctgctggtttttttttgatc

SEQ ID NO: 98655 - DNA, 705 bp, Arabidopsis thaliana columbia
  unsure (1)..(705): unsure at all n locations
cagctacnnnnnnnnnnnnnnnnnnnnnnnnnnnnnnnnnnnnnnnnnnnnnnnnnnnnnnnnnnnnnnnnnccacgcgtccgcccacgcgtccgcggacgcgtgggaacgaaaggtcttttctagtctagtcacttcacttctacggctactgccatggcggcttctttctcttccactgctcccacgacaccggttcttcgattcagagccaactactccaagcctctcctctctctcccagattcgtgtttgaggataatctcttcggcgatatctccctctacacgcttaattgcgtgttcgttcaagacagacaagcttccgctcggtgccggcgtcaatctctccggtggccccgttgtcaagcgctctctacagaagagattggtgataaggtctgctactattgaagaaatagaagcagagaagtctgctattgagactgatgttaaatcaaagatggagaagactattgaaacgcttcggacgagtttcaactccataaggactgggagatccaatgcagcgatgcttgacaagatttaggtggaatactattgaagttcattaagtttgtaaagcataacccaaatcagtactccggatggaagttctcttttgctgtaaccatattacaaatccaacttgaattctatatatatagccattgttaatctttatctttttgttacctctaattac

SEQ ID NO: 98656 - DNA, 579 bp, Arabidopsis thaliana columbia
  unsure (1)..(579): unsure at all n locations
ttaggtgcaactatagaagagctatgacgtcgcatgcacgcgtacgtaagctcggaattcggctcgaggttaatatgtctaaagagaaatcatatgtaattgctcttcttctatctttgcttctctgtctttcttttcaagttggtgtctctgaggccaactacaacgcagttactacaaggtactcggattctcctcgatgcgccaatggatcttctgcaagtccaccaacaagacactgtccaagggggcgtccccgtcctcctacaccgagagtagcggtgcactctaactcaaccaaaggaaaaggcccataagtgatgaaattattttatgtctcaacactatgatttttgtatttagtttgatgtaaaatttacaggccaaagagatccaatctttgtaaatcagatgattacattaaagaaacaaatcaaaaacagattaaaacaaacaaaaaaaaaaaaaaaagggcggccgccgactagtgagctccgcgacccgggaattaattccggaccggtacctgcaggcgtnnnnnnnnnnnnnnnnnnnnnnnnnnnnnnnnnnggaaatcat

SEQ ID NO: 98657 - DNA, 422 bp, Arabidopsis thaliana columbia
cgtgttttttttagaataacaataaaaaatttgtacacacatggtttattattgtagataatattaatatatatcaaacgaaattttaaaagtagatgatttatgaaaataatttttgcttattttaattagttcttgagtaaaattatttatacattctagatattaaataatgttgaatttttaattgaataaacactttattatatataaaaattgaaaaacaaagcaagccgaggaatctctctctaatctatctccaagacggaccaaaccagttttagttctatctctcaatctctctgatcagctccatttccaattttgttggaaagtagatacctttgagaatctaaaggatctccctttatggcggataaggacgttccttttggggttgaagatattgttcagacgccttt

SEQ ID NO: 98658 - DNA, 581 bp, Arabidopsis thaliana columbia
  unsure (1)..(581): unsure at all n locations
ggtacagtcataaaccgaaccggctccatgttctcttcgtcgtcgttcaatcaaacagatccacaatgctcgtaagttcaagcaaaatcacaagagcgagagagatggtgacgaaaacagaggagaagcaattgaaccagctagagattcaagtcgataatggcggaggcggaacatgggagtatctttgcctcgttcgtaatctcaaagttcgccggtcggagaaagtgttaaaacacggttcctcgattttgaatgatcagaagaaacgatctgctcttggtccagatgaatggacactaaatgagcaggtggcaaattgcagctatggactgtcaatgtctcggtgtcgcacagagttgcattaaggctttgcagacaaaatttcctgggagcaaaagagttgggaggcttgagggcattgcttcttgaagcgaagggattattgggnagaggctttaggaagcatattcnngtcttttttggnggggtaatccacttcnacccaaggggttccacaaaccgnngagttggcttnttttcnaagggnnctttnggaaanccttccnntagnccntttt

SEQ ID NO: 98659 - DNA, 561 bp, Arabidopsis thaliana columbia
taggtgcactatagaagagcttgacgtcgcatgcacgcgtacgtaagctcggaattcggctcgagagcaaaatcacaagagcgagagagatggtgaccaaaacagaggagaagcaattgaaccagctagagattcaagtcgataatggcggaggcggaacatgggagtatctttgcctcgttcgtaatctcaaagttcgccggtccggagaaagcctgttaaaacacccggttcctctgatttgtgggtgatcagaagaaacgatctgctcttggtccagatgaatggacactaaatgagcaggtggcaattgcagctatggactgtcaatgtctcggtgtcgcacagagttgcattaaggctttgcagacaaaatttcctgggagcaaaagagttgggaggcttgaggcattgcttcttgaagcgaagggattatggggagaggctgaggaagcatatgcgagtcttttggaggataatccactcgaccaagcgatacacaaacgaagagtggctatatccaaggcactaggcaaaccttccatagccattgagcttctt

SEQ ID NO: 98660 - DNA, 913 bp, Arabidopsis thaliana columbia
  unsure (1)..(913): unsure at all n locations
nnnnnnnnnnnnnnnnnnnnnnnnnnnnnnnnnnnnnnnnnnnnnnnnnnnnnnnnnnnnnnnnnnccacgcgtccgcaaagattaaaatatttagcaaaaatttccaggaaaagaggagtatccgccctactttttcagctgagaagatctttggaggaaccttgttagctatgtgttcaagtgatttcatctgcttttatgattgggctgaatgtaggctgattcaacgtattgacgtcactgtaaagaatctatattgggctgacagtggtgatttagtagccattgctagtgacacatcattctacatcttgaaattcaaccgcgacttagttacctcacattttgatagcggaagacctactgaggaagaaggtgttgaggatgcttttgaggttctccatgaaaatgatgaacgtgttaggacaggtatatgggttggtgactgtttcatttacaacaactctttctggaagcttaactacntgtgtggaggcgaggtaaccacaatgtatcatttggaccgcccaatgtatttgttgggatatcttgcaatcaaagtcgggttttcttggtagacaaagaattcaatggtatagggtacaccttgttgctaagcctgattgagtacaagactcttgtgatgcggggtgatttagacaaagccagtgaaatcttacctacaattcctaaagatcagcataacagtgttgctcatttcttggagtcacggggaatgattgaagatgctctggaaaattgcacagatcctgactacagatttgagttggcctacaactgggtagacttgaaattgacaggaaatcgctgtggaagacagagcgatctagtggaaacattggagagtagtatgtcctccgaagctgcaatggctgagatgcatgagatca

SEQ ID NO: 98661 - DNA, 503 bp, Arabidopsis thaliana columbia
ttaggtcacactatagaagagtctatgacgtcgcatgcacgcgtacgtaagctcggaattcggctcgagctttttttctttctttcacacgaaatctcacgagacgccttatttcttcttctctgtctctttccgacggcgtaactctccggtggaatctcagctctcttatcagtagaagaagttttggtctttaaatgtaatttttttggttttgctttaaatttcaatcgttgttatcagaaaaagtaggtagcaaaaaaagagattttttacgaaaagcagattgactggcagctgaaacaacggaggagaattatagaaacgagtaaaaaacaaaaccctaaaggttgaaacttggttgacgaaaaaaatgagctgatttttttttcttcatttatttcattcttaactctttttcacatatttaagaatcagtaagaaacaaaaaaaaacagagtgagactaaaaaaaaagatgccggtagatttagataactcctc

SEQ ID NO: 98662 - DNA, 537 bp, Arabidopsis thaliana columbia
  unsure (1)..(537): unsure at all n locations
atgatcctgccagctannnnnnnnnnnnnnnnnnnnnnnnnnnnnnnnnnnnnnnnnnnnnnnnnnnnnnnnnnnnnnnnnnnccacgcgtccgctttgattctgttttcagggttttctttgctttgacaatggcggctgtagctatttctcagtcaagttcattgtctcctgattccagcaaagctagcaatgcggctgcatcgatcttcgcggttatagacagagaatcgaagattgatccaagtgatgagtctgggagagttcttgataatgttaaaggagatatcgaacttcgtcatattagtttcaaatatccttcaagaccagatgttcagatcttccaagatctctgtctgtctattcgcgctggcaagacaatagctttggttggagagagcgggagcgggaaatcgacagtgattgcgttgctacagaggttttacgaccctgattctggtcagatcactcttgatggagttgagataaagacattgcagctgaaatggttaaggcagcaaaccgggcttgtgagcc

SEQ ID NO: 98663 - DNA, 796 bp, Arabidopsis thaliana columbia
  unsure (1)..(796): unsure at all n locations
ttaggtgcactatangaagactatgacgtcgcatgcacgcgtacgtaagctcggaattcggctcgagggccggccttttttttttttttttcgtaatctctatattatgaattgacaatcacacattttgttgttaacatacaagggtcaaacatgcatatactactaatatttcgatggcatttcaatccatactcggccgtgtttagctactcttgttcaactgtttctccctgtccggtgttattcccgcttccgttgttaccgtgaacttttatctccaaaagcctttcaacaggttgcctgcaaatggggcatcgatttgtctgaaacctcaataccttagcacatccgctacacatacacatatgtcgacatggaagaacagtggtgtctcgtggttcagaccaaacatataacacattctttaccaggatcattagcatcatcagctgaatcatcatccccctcaactgtattcccaatcccataaatctcctgcaactcatatctcgttccattaacccatagtatctgcttcaccactctaatcttaatctctcctttatccttctcataaaccgcttgagtaatctgcgcattcttcgaccccgacctttcttcttcttcattctcaccacctgagggagctgcttctgccttaaccgctaatggatagatctctgtgtctgcggccaaaannnnnnnnnnnnnnnnnnnnnnnnnnnnnnnnnnnnnnnnnnnnnnnnnnnnnnnnnnnnnnnnnnnnnnnnnnnnnnnnnntgccggcgattca

SEQ ID NO: 98664 - DNA, 709 bp, Arabidopsis thaliana columbia
  unsure (1)..(709): unsure at all n locations
tgtttaggtcaactatagaagagctatgacgtcgcctgcacgcgtacgtaagctcggaattcggctcgagatggatacgaacaataccagaactgtgaaatttgcagctcttgcaatagttttagccgccttggtgttgatggaagaacctacgagcattaccgcatgtaacatcaacgcaaaccatctggaaaaatgtcgtccagccgtaattggagacaacccgccatctccaatcaaagagtgttgtgaactcctccaagccgctaatctgaaatgcatctgcagattcaagtctgttctccccgttttagcggtttacccatctaaagtccaggctcttctgagcaaatgtggcctgacaacaatccctcctgcttgccaagctttgaggaactgagatggagacagaccgttctagcagacttcactcgaacttgtcctgcaactgatctgaagtcttacaatatgtcttatgttccgatccaaataaattacaaactcgcagtaataatcgcagcttgtgtatatagaagaaccttgttgtatacatttaacaaaaactttaagaaactgttttagctaaaaaaaaaaaaaaaaggnnnnnnnnnnnnnnnnnnnnnnnnnnnnnnnnnnnnnnnnnnnnnnnnnnnnnnnnnnnnnnnnnnnnnnnnnnnnnnnnnnnnnnnnnnnnnnnnnnnnatatcat

SEQ ID NO: 98665 - DNA, 502 bp, Arabidopsis thaliana columbia
ttaggtcaactatagaagagttatgacgtcgcatgcacgcgtacgtaagctcggaattcggctcgaggggagagagagagatagacaagttccgcgatgaacgaaggctcgagcgaagaagtaacgaggacggtaatggaagagaaaccagaacagaaacaaaaaggatctctggagaaaggaagatcgtgcaaaggctatttatattactcttccactctcaaatccaagtctaagaaccctcgctgcgtcggaatccctcgtactctccgtcaagttcctgattatgttgttggacaatctgaagctgaagcttctaaagaaggaaggaccttagctgatttttactatggatgtttgggttattccgtctacatgactgataaagactcatctgccattaagcaacatacaaagactcaacttcccgtttgtgtcggtcttgagatattagcagatagaagagcagcttctggcaatacttcatctgttccagcccgtg

SEQ ID NO: 98666 - DNA, 516 bp, Arabidopsis thaliana columbia
  unsure (1)..(516): unsure at all n locations
atgannnnnnnnnnnnnnnnnnnnnnnnnnnnnnnnnnnnnnnnnnnnnnnnnnnnnnnnnnnnnnnnnnnnnnnnnnnnnnnnnnnnnnnnnnnnnnnnnnnnnnnnnccttcctttttttttttttttttgtttttttttgactttttttctttttcaactaattcgcatattttttaaatagtgaaccctttctttcaaagggaaggtttcaaattctcacactaacctattgaacaagaacatctaaaaccctctcaaacacattcatttactctacttatgattttcttctactaatggctttccctgaaaactctcctgatccaaatgttggtgccatatcgatgccggttcctcctccgactagagtagatagtccgttacttggaccatttccgttaccaaccgctctacctaaaccgaggaagtctaatgtcgtttgtttcggaccaaacaccgatgaattccccatcataagctcttttaaacccgagctgctttctccaccacag

SEQ ID NO: 98667 - DNA, 504 bp, Arabidopsis thaliana columbia
  unsure (1)..(504): unsure at all n locations
aggtacnnnnnnnnnnnnnnnnnnnnnnnnnnnnnnnnnnnnnnnnnnnnnnnnnnnnnnnnnnnnnnnnnnctttttttttttttttggtaaatatgttgagattttgataataatgtaaaagtatatcagacttgagatctcgcggttgcaacaagatacagagaacgattgaacaaagtgaggtcaccaagagaacattgatgaaaaatatccaacacacatgagccgatgagtgttccctgccacaaatgttcctccgctgctagaggataagggcttgaaatgccagacacaagcaagtcacaactagctgtcttcttccaagccttctaatctggtacctggatcataacttataaacagtcggaactcgtttccgagtttgctagagtgatgaggcttaaacacacaagggcgaacacccaatagctcagctgcatgttctctttgcacctctcctgtgagaagaagcaacaatgaatctactgggcttgcgaggaa

SEQ ID NO: 98668 - DNA, 529 bp, Arabidopsis thaliana columbia
  unsure (1)..(529): unsure at all n locations
atgatcctnnnnnnnnnnnnnnnnnnnnnnnnnnnnnnnnnnnnnnnnnnnnnnnnnnnnnnnnnnnnnnnnnnnnnnnnnnnnccacgcgtccgcatgatcaaagttgcctttcttttggtcatcgagcttggggtctttcctctgatgtgtggttggtggctagatgtttgcactgttaggatgttcggtaaaacaatgtcccacagggtacagtttttatcaatttctcctctggcaagctcacttgttcattgggttgttggaatcatgtacatgttgcaaataagcatcttcgtcagccttcttcgaggggttcttcgtcctggagttctgtatttccttcgtgatccagcagatcctaattacaatccattccgagatttgattgatgatccagtgcacaagcatgctcggagggtactgttatcagttgcagtgtatggaagtttgattgtgatgctggtatttttaccagtcaaacttgcgagccggatggctccttcaatctttccacttgacatatcta

SEQ ID NO: 98669 - DNA, 752 bp, Arabidopsis thaliana columbia
  unsure (1)..(752): unsure at all n locations
nnnnnnnnnnnnnnccccttggaggttnnnnnnnnnnnnnnnnnnnnnnnnnnnnnnnnnnnnnnnnnnnnnnnnnnnnnnnnctttttttttttttttttaaaccaaacagttctgaattaacatattgatcaaacagtaacgtttaatggtttgtaacaacaagatacaaacggcgtagtccatatgttaaagccgtttagtttttttcttcttctacaaaggagccaaattattttctactaagaaacaaaaacaattaacaacacagaggaggtgcaataacaaaacctgtcgaggaagaacaccactcggggaggctgtcttataacttagtctgtctctacaaatatctccatatctggaacaagttcgtaggtttttttctctcttgtgtccaaggccgggatcccagcgattttctggactcccagcttggaggcaataagattcaattggaaatcattggagccaaatgcttcaatcctgggtaacatcagagtctggagaccattaataccaaccgggttttccaattgtgtttcatcttgtgacagggagacctctaagggtgccacatgcctatcaaattggtttgtgagattaaaagatgccccaaagggtgtttttagtgtttacaactgggacctcttccactcgcatattaatatctttaccgcttactggagcgccccgaattttttttgtttgttagtgaccacgtttacccaaatttgtgcgccgtgtttttt

SEQ ID NO: 98670 - DNA, 727 bp, Arabidopsis thaliana columbia
atacgactcaccttagggaaagctcgtacgcctgcaggtaccggtccggaattcccgggtcgacccacagctgcgggggatgttgcccactagaagcaatacttgccatactcaaacagacaacatcaagcctccaacccaatgtgacagttactacacttgtcctgagagcaacacttgttgttgtctgtttgagtatggcaagtattgctttgcttggggatgttgcccactagaagcagccacttgctgtgatgacaactatagttgctgccctcacgagtacccggtttgtgaccttgatcaaggaacctgtttattgagcaagaacagtccatttagtgttaaggccttaaagcgtaaacccgcaacgccattctggtcacaaggcagaaagaacattgcctaaacattgcttcttcaagaggactctggctcatgagagaagagatctctctgaagggatttatcagatgctttttaatgttggtggctcccccctaactaaaaacataaaaaatcccgctgttgggtttcgtgtatataaaaaaaggaccctatgtttcattcagtttcatagttgggtttcattgatacagtacatttattgttaattcaagaaatttgtataaaaaaaaaaaaaaaaaaaaacaaaccccaagggcggccgctctagaggatccaagcttacgtacgcgtgcaggtgacgtcatagatcttctatagt

SEQ ID NO: 98671 - DNA, 549 bp, Arabidopsis thaliana columbia
  unsure (1)..(549): unsure at all n locations
accggaacccagggccgacccagtcgtacgcgtccgctcctatagttctccatgaatccactgcagagcaaagggggtcccgtaagccaaccatggcgattctttttctagcgatggtcgccgtttcatcagccgtggacatgtcaatcatctcctacgacgagaaacatggcgtctccaccaccggtggccgtagcgaagccgaggttatgagtatctacgaggcatggttggtgaaacacggcaaggctcagagccagaactctcttgttgagaaagatcgacggttcgagatctttaaagacaatcttcgtttcgtcgatgaacataacgagaagaatcttagttatagattgggtttgactcgttttgcggatcttactaacgatgagtatagatccaagtatcttggagctaagatggngaagaaaggtgagagaggactagcctacggtcgaggctcgtntcggtgatgantaccgagntattacttgnggagaaagagccntgcttaggcaaatcaggtgtcggattttggcgttaacctgc

SEQ ID NO: 98672 - DNA, 1901 bp, Arabidopsis thaliana columbia
  unsure (1)..(1901): unsure at all n locations
acttgtgcgcggctttcgcggggcggggggggngtagtattctccgggctactatacgactcatatagggaaagccggtacgcctgcaggtaccggtccggaattcccgggtcgacccacgcgtgcgcccacgcgtccgtcttcatcattttctcttcttcttctccaagaaaacactgaagaagaaatggggttccttaagccaaccatggcgattctttttctagcgatggtcgccgtttcatcagccgtggacatgtcaatcatctcctacgacgagaaacatggcgtctccaccaccggtggccgtagcgaagccgaggttatgagtatctacgaggcatggttggtgaaacacggcaaggctcagagccagaactctcttgttgagaaagatcgacggttcgagatctttaaagacaatcttcgtttcgtcgatgaacataacgagaagaatcttagttatagattgggtttgactcgttttgcggatcttactaacgatgagtatagatccaagtatcttggagctaagatggagaagaaaggtgagagaaggactagcctacggtacgaggctcgtgtcggtgatgagctaccggagtctattgactggaggaagaaaggagccgtggctgaggtcaaagatcagggtggttgcgggagttgttgggcgttttcaaccattggagcagtggagggaataaaccagatcgtaaccggagacctaataaccttgtctgaacaagagttggtcgattgtaacacttcatacaacgaaggttgtaacggaggtcttatggactatgcttttaagttcattatcaagaatggtggaatcgatacagacaaagattatccttacaagggtgttgatggaacttgtgaccagatcaggaaaaacgctaaagttgtcactatcgattcatatgaggatgttccaacttacagcgaggaatcgttgaagaaagcagttgctcatcaacccattagcattgccattgaggctggtggtcgtgcgttccagctctatgattcgggtatatttgatggaagttgtggaacacaactagaccacggagttgtggcggttggatacggaactgagaacggcaaagattactggattgtgagaaactcatggggtaaaagctggggagagagtggatacctaaggatggcgcgtaacattgcgtcttcatcaggaaaatgtggaatcgcgattgaaccttcatacccgataaagaatggcgaaaacccgccaaacccgggaccttcacctccatctcccatcaagcctccaacccaatgtgacagttactacacttgtcctgagagcaacacttgttgttgtctgtttgagtatggcaagtattgctttgcttggggatgttgcccactagaagcagccacttgctgtgatgacaactatagttgctgccctcacgagtacccggtttgtgaccttgatcaaggaacctgtttattgagcaagaacagtccatttagtgttaaggccttaaagcgtaaacccgcaacgccattctggtcacaaggcagaaagaacattgcctaaacattgcttcttcaagaggactctggctcatgagagaagagatctctctgaagggatttatcagatgctttttaatgttgttgtttatgccataactagatacataaaaaatgcagctgttgggtttcgtgtatataaaaaaaggaccctatgtttcattcagtttcatagttgggtttcattgatacagtacatttattgttaattcaagaaaattgaatatttatggctatgttatggtcctatggaagttttacacctttgcttctatgaggcctaacgaaatcatctttgctttaaannnnnnnnnnnnnnnnnnnnnnnn

SEQ ID NO: 98673 - DNA, 497 bp, Arabidopsis thaliana columbia
cctgtccgatcgaattctttcctttccttaatctaatctcctaccaagaggcgctctcttctcttcctctaatttccttctcccttactaaatttccttctctaatctctactttgtccaaaagcatttaactttaaccggaaaaatcttacatttttttcctcctggatctctctctctatatctgcagattcacactacagctgatttagatctatttcgtaagtgggtctttcaaagtcgtctcctttgatctactttgattcaggggtcgttgatttggtgataagtcagtagaaatggataaggagaaatctccagcacctccttgtggaggtcttcctcctccatctccatcaggtcgatgctctgcattctcagaagctggtcccattggtcatggttcagatgctaatcgaatgagtcatgatattagccgtatgcttgataacccacctaagaagattggacatcggcgagctcattctgaaatactt

SEQ ID NO: 98674 - DNA, 1779 bp, Arabidopsis thaliana columbia
  unsure (1)..(1779): unsure at all n locations
ccggaacgcccggggccgcccaaccgtcccgtcaaaaagactctttttacgatcattttacctactcatccatgacgagggtcggttattcacactacagctgctttacatctatttcgtaagtgggtctttcaaagtcatctcctttgatctactttcattcccgcgccgccgatttggtgataagtcagtagaaatggataaggagaaatctccagcacctccttgtggaggtcttcctcctccatctccatcaggccgatgctctgcattctcagaagctggtcccattggtcatggttcagatgctaatcgaatgagtcatgatattagccgtatgcttgataacccacctaagaagattggacatcggcgagctcattctgaaatacttactctccctgatgatttgagctttgatagtgatcttggtgtggttggtaatgctgctgatggagcttctttctctgatgagactgaagaagatttgctctctatgtatcttgatatggataagtttaattcttctgctacatcttctgcccaagttggtgagccatcaggaactgcttggaaaaatgagacaatgatgcagacaggcacaggctcaacttccaatcctcagaatacggttaatagtcttggcgaaaggccaagaatcaggcatcaacatagccaatctatggatggttcaatgaatatcaatgagatgcttatgtcgggaaatgaagatgattctgctattgatgctaagaagtctatgtctgctactaaacttgctgagcttgctctcattgatcctaaacgtgctaagaggatatgggcaaacaggcagtccgcagcacgatcaaaagaaaggaagacgagatacatatttgagcttgagagaaaagtacagactttgcaaacagaggctacaactctctcagcccagttgaccctcttacagagagacacaaatggcttgactgttgaaaacaatgagctgaagctgcggttacaaacaatggagcagcaggttcacttgcaggatgaactaaacgaagcactaaaggaggaaatccagcatctgaaggtgttgactggccaagttgctccatcagcgttgaactatgggtcgtttggatcaaaccagcagcaattctattccaacaatcagtcaatgcaaacaatcttagctgcaaaacagttccagcaacttcagattcattcacagaagcagcaacaacaacaacaacaacaacaacagcaacaccaacagcagcagcagcaacagcaacagtatcagtttcaacagcaacagatgcaacagcttatgcagcagcggcttcaacagcaagaacaacaaaatggagtaagactcaagccttcacaagcccagaaagagaactgaggaatatgaatatgtcccacggtattggcgttttggtacgtagaagaaaccttttggtaaggtcattgaagataaacatttgggtaagcccaaagaaacagagttccgtgcattgcaaatatgcaatgcactgcaattattagttgtttggatttgatatagagactgagtctcgaaaccatagtatgtaaaaatataatcacgttcaaaagctgttaatttgttataatcttataacaattgtgttttaagataccaacctactttgtgttatgatatttgttcactaaaaaaaaaaaaaaaaaagnnnnnnnnnnnnnnnnnnnnnnnnnnnnnnnnnnnnnnnnnnnnnnnnnnnnnnnnnnnnnnnnnnnnnnnnnnncatt

SEQ ID NO: 98675 - DNA, 949 bp, Arabidopsis thaliana columbia
  unsure (1)..(949): unsure at all n locations
cagctcnnnnnnnnnnnnnnnnnnnnnnnnnnnnnnnnnnnnnnnnnnnnnnnnnnnnnnnnnnnnnnnnnnnccacgcgtccgtccttattaaccaacaaggatgatgatttctctcttaaggccattgattttggtctctctgttttcttcaaaccaggccaaatattcaaggatgttgttggaagtccatactatgttgctcctgaggttcttctaacaacatccttgaatattggggctctctgttttcttcaaaccaggccaaatattcaaggatgttgttggaagtccatactatgttgctcctgaggttcttctaaaacattatggtccagaagctgatgtgtggactgctggtgttatactctatatcttactaaggggtgtcccgcctttctgggcagaaacacagcaaggaatatttgatgctgtgttgaagggatatattgactttgatacagacccgtggcctgtcatatccgacagtgctaaagatctgatccggaagatgttatgctctagtccttctgaacgtttgactgctcatgaagtcttgcgtcatccatggatctgtgagaatggagttgcaccggatagagcacttgacccggctgttttgtctcgtctaaaacagttttctgcaatgaataaattaaagaagatggctttaaaggtgatagctgagagcctctcagaagaagagattcgcgggtttaagagcaatgtttgagggcaatggatactggtaacagcggtgcaatcacttttgatggactcaaagctggcttgagaaggtatgggtcaacccttgaaaggcacccggatcccgcgatcttattggaagcggctgatttgggcaacagcgggccattgggttcagcgggtttttcaaggccggcccctcggataacccggggggaagggctttttttttcattcagncttt

SEQ ID NO: 98676 - DNA, 1010 bp, Arabidopsis thaliana columbia
atcgactatattgggaagctggtacgcctggaggaccgggcccgaatttccgggtcgacccaagccttccgggaccccttgggggaaaatggaattggccccggattgaacacttggccccggtggtttggcttggcttaaaccagttttttgcatggattaattaaagaagaatggttttaagggggatagttgaaagcttttaaaagaagaaaatggcggttttagaaccatggttggaggcattggttcctgttaccaggcggggcattcattttggatgacctcaaagctggttggagaggatatggatcacccttgaaggacaccgaaatccgagatcttatggaagcggttgatgtggacaccagcggtccattagattacagcgagtttatggcagcgacaatccatctgattaaactagagagagaagagcttcttgtctctgcatttcagtactttgacaaagatggaagtggttacatcaccattgatgagctgcaacaatcttgcattgaacatgggatgaccgatgtttttcttgaagacataatccaagaagtagatccagacccccgatggccgggttgatttcgaagaatttgttcccatgatgccaaagggaaatgctggtgtagggagaagaaccatgaaaaatagtctaaacctcagtatgagagatgtgtaggcacatacacacatctttaaatcgtctattcggtgaggatgcaaatgtttccatggaatcaacatttgcaatgtttcatcccagagcaggaagagaaaccagattcatagctgcagcgaaccagctaaatcgttgaaggtttgagttaaaaatgttaaaaactactgtatgattaaaaaatggtgaaagataaaaaaaaagtgttaagttctgttccaaaaaaaaaaaaaaaccccaccccccaaagcggccgctctagaggatccaagcttacgtacgcgtgcaggcgacgtcaagatcttctaagtgtgcgtcctaa

SEQ ID NO: 98677 - DNA, 2427 bp, Arabidopsis thaliana columbia
  unsure (1)..(2427): unsure at all n locations
atgatactttcnnnnnnnnnnnnnnnnnnnnnnnnnnnnnnnnnnnnnnnnnnnnnnnnnnnnnnnnnnnnnnnnnnnnnnnnnnnnnnnnnncttttctcttttgtctccggcaaatttagtttctccttttaagtcagattccttcctaatcccattctttcagtcttctctttcgcccttctgagttcaacaactgtgttatctctatgaacagttcctttgatgaagaacacaaagtgaaagttgctgtctttataaccaggatttggtaattcccattgtttcatgggcaattcttgccgtggatctttcaaggacaaactcgacgaaggcgataacaataagcctgaagattactctaaaacctctaccaccaacttgtcttctaattccgaccattcaccgaacgctgcagacatcattgctcaagaattctccaaagacaacaacagcaacaacaacagcaaagatccagctcttgttattcctttaagagaaccaatcatgaggcgtaacccagacaatcaagcttactatgttcttggtcataagacaccaaacattcgtgatatctatacccttagccgcaagctaggtcaaggtcaatttggaacgacttatctatgtacagagattgcctcaggcgttgactacgcttgtaagtcaatatccaagaggaagttgatctctaaagaagatgttgaggatgttagaagggagattcagataatgcatcatttagctggtcacggtagtatcgtgacgattaaaggagcttatgaggactctttgtatgttcacattgttatggagctttgtgctggaggtgaattgtttgataggattattcagagaggacattatagtgagaggaaagctgctgagctgactaagatcattgtcggtgttgttgaagcgtgtcattcgcttggtgtgatgcatagagacttgaagcctgagaatttcttattggttaataaggatgatgatttctctctcaaggctattgattttgggctatctgtctttttcaaaccaggtcaaatattcactgatgttgttggaagtccatattatgttgctcctgaggttttgctcaaacgttatgggcctgaagctgatgtgtggactgctggtgttatattgtatatattgctaagcggagtcccacctttctgggcagaaacacagcaagggatatttgatgctgtgttgaaaggatatatcgactttgagtcagacccgtggcctgtgatatccgacagtgctaaagacttgatccgcagaatgttatcctccaagcctgcagaacgtttgaccgctcatgaagtcttgcgtcatccatggatctgtgagaatggtgttgcaccagatagagcactagatccagctgttctttctcgtctcaagcaattctctgcaatgaataaactaaagaagatggctttgaaggttatagctgagagtctctcggaagaagagatagctggtttaagagaaatgtttcaagcaatggatactgataacagcggggcaatcacatttgatgaactcaaagctgggctgagaaaatatggatctaccttgaaagacacagagatccatgatcttatggatgcggctgatgtagacaacagtgggacaatagattacagtgagttcattgcagcgacgatccatctcaacaaactagagcgggaagagcatcttgttgcagcgtttcaatattttgacaaagatggaagcggtttcataacaattgatgagctacaacaagcgtgtgttgaacatggcatggctgatgttttccttgaagacatcatcaaagaagttgatcaaaacaatgatggaaagattgattatggtgagtttgtggagatgatgcaaaagggaaatgctggtgttggaagaaggacgatgagaaatagtctaaacattagcatgagagacgcgtagaggttgttttccccggtgtttaatatgttagtgcgatcgtgactgcgaaaatgttcttattcatggaatcaacaacctcaatgctcaccacctagaaggcgatgaaagaagaccaaaccggattcatacctgtggatggttcgagttttgtttaacgactgtgtgattaatcgtcaagtagttttggaggttttttctttacctctttgttgtttgttcattatggccattgttgaagttagtgagctttgttcatcatctgccattgttaaactttgttcacttgtatttgaaaaaaacaaaaatgtctttgtatgttgtgtgatttctaagcatttttactttgaaaatctatttcttcttttctagaaaaaaaaaaaaaaaagnnnnnnnnnnnnnnnnnnnnnnnnnnnnnnnnnnnnnnnnnnnnnnnnnnnnnnnnnnnnnnnnnnnnnnnnnntagaatcg

SEQ ID NO: 98678 - DNA, 2277 bp, Arabidopsis thaliana columbia
  unsure (1)..(2277): unsure at all n locations
ccccccctcggtacgacggtatagctaagcttgatatcgaattcgcggccgcatccttttttgagtttttcccatttcttcttcgtctccatttcatcgtcttctcgctgttctgctatattccgtttcgttggatgaggagaagaagaaagtgaaaaaagttgtgaaatagagagagtttgtttcatgggcaattcatgtcgtggttcttttaaggacaaaatctacgagggcaatcatagtaggcccgaggagaattccaaatccaccaccactactgtttcctctgttcattctcctactacagaccaagatttctccaaacagaacaccaatccagctcttgtgattcctgttaaagaacccattatgcggcgtaacgttgacaatcaatcttactatgttcttggtcacaagactcctaacattcgtgatctttacacgttgagtcgtaagttaggacaaggacaattcgggacaacgtatttgtgtactgatattgccacaggtgttgactatgcttgtaagtctatatccaagaggaaattgatatctaaagaagatgttgaggatgttaggagggagattcagattatgcatcatttagctggtcacaagaatattgttactattaaaggagcttatgaggatcctttgtatgttcacattgtgatggagctttgtgctggtggtgagttgtttgataggattattcatagaggtcattacagcgagaggaaagctgctgagttgaccaagatcattgtcggtgttgttgaggcgtgtcattctcttggtgttatgcatagagatttaaagcctgagaatttcttgttggttaataaggatgatgatttctctcttaaggccattgattttggtctctctgttttcttcaaaccaggccaaatattcaaggatgttgttggaagtccatactatgttgctcctgaggttcttctaaaacattatggtccagaagctgatgtgtggactgctggtgttatactctatatcttactaagtggtgtcccgcctttctgggcagaaacacagcaaggaatatttgatgctgtgttgaagggatatattgactttgatacagacccgtggcctgtcatatccgacagtgctaaagatctgatccggaagatgttatgctctagtccttctgaacgtttgactgctcatgaagtcttgcgtcatccatggatctgtgagaatggagttgcaccggatagagcacttgacccggctgttttgtctcgtctaaaacagttttctgcaatgaataaattaaagaagatggctttaaaggtgatagctgagagcctctcagaagaagagattgcgggtttaagagcaatgtttgaggcaatggatactgataacagcggtgcaatcacttttgatgaactcaaagctggcttgagaagatatggatctaccttgaaagacaccgagatccgagatcttatggaagcggctgatgtggacaacagcgggacaatagattacagcgagtttattgcagcgacgatccatctgaataaactagagagagaagagcatcttgtctctgcatttcagtactttgacaaagatggaagtggttacatcaccattgatgagctgcaacaatcttgcattgaacatgggatgaccgatgtttttcttgaagacataatcaaagaagtagatcaagacaacgatggacggattgattacgaagaatttgttgcgatgatgcaaaagggaaatgctggtgtagggagaagaacaatgaaaaatagtctaaacatcagcatgagagatgtgtaggcacatacacacatctttaaatcgtctattcggtgaggatgcaaatgtttccatggaatcaacatttgcaatgtttaatcacagaggaggaagagaaaccagattcatagctgcagcgaaccagctaaatcgttgaaggtttgagttaaaaatgttaaaaactactgtatgattaaaaaatggtgaaagataaaaaaaaagtgttaagttctgttcatcagtagctgtgaggactatttctattttctctctctctgttttgtttgtttgtaacaactgtttaagtttggtttttatttcatctccatcgtcgaaagctttgaccctttttgggtttttgaaagatcanatcatcttccaatatagtcgaatgtgatatctagtggtacaaaaaaaaaaaaaaggcggcgcttaagatcagctacgagcggcaggcgcaagtcttatagtgtcact

SEQ ID NO: 98679 - DNA, 877 bp, Arabidopsis thaliana columbia
  unsure (1)..(877): unsure at all n locations
atgatcctgccnnnnnnnnnnnnnnnnnnnnnnnnnnnnnnnnacccacgcgtccggtgcaacatcaaaagtgcctaatgtacctcgcgtccgattgaaaccaaggccgataaaaaaagttgcagttattggtggcggtctgatgggttcaggcatcgctacggctctacttctaagcaatataagagttgtgctcaaagaaataaactcagaattccttatgaagggaataaaatcagttgaagcaaatatgaaaagcttggtatctagggggaaactgacacaagataaagcaggaaaggccctctctttgttcaagggagtacttgattacacagaattcaatgatgtggacatggtcatagaggcagtgattgaaaacattcaattgaaacaaaacatattcaaagaaatcgaaaaggtttgttcaccccactgcattttggcgagtaatacatctactatcgacctcgatgtaattggtgaaaagactaactcaaaagatcgcattgttggcgcacatttcttcagtccggcccatctgatgccccttctcgagattgttcgttcaaagaatacttctgctcaggtgattctggatctcatggcggttggaaaggccataaagaaagttcccgtggtggttggaaactgcataggctttgcagtgaataggacattctttccttattcacaagctgcacatatgttggccaatctaggtgttgacttgttcagaattgacagcgttattacctctttcggcttgccattgggccctttccagcttggtgatttggctggacacgggattggattatcagttgggccgatatatgccaatgtctatggtgaccgcatgttcagatctccaatg

SEQ ID NO: 98680 - DNA, 649 bp, Arabidopsis thaliana columbia
  unsure (1)..(649): unsure at all n locations
gattgttttaggtgcactatagaagagctatgacgtcgcatgcacgcgtacgtaagctcggaattcggctcgagacaagttgcgatagagatgaggttttgcattctaaggagtggtggagtgcgtgtgtgatagatgatgtcttgtattactatgatgttcgtgagaattgtttgagagcttatgatccaaagcagagagcttggggagtcgttaaaggttttgaaggattgttgcctgtggcttgtaagtggtccaaaactgtgagttacaccggtgggaaattggttctgttcttgcagaaaacagagaaaacagagatttggtgtgcggaaatcgcagtggaaagacgcgagggtggagagatttggggtaaagtggagtggtgtaatgttgtgcttagtgggaattttcacataatggattgtgtagctgttgtgctctgatcttgtgttgtaatagacttgtgtcccctgcttgttcttgtgtgttttactagcttatgaatgttcttccctggaaaaaaaaaaaaaaaaaaggnnnnnnnnnnnnnnnnnnnnnnnnnnnnnnnnnnnnnnnnnnnnnnnnnnnnnnnnnnnnnnnnnnnnnnnnnnnnnnnnnnnnnnnnnnnnnnnnnnnnnagtatcat

SEQ ID NO: 98681 - DNA, 433 bp, Arabidopsis thaliana columbia
attcttatacccatagagagacgcacaacacagtgtagatacattgcttgagcttttaggaagttacaggaatctaacacttcaaatcctactatctctcttcttaacgttagtcctttcattcgtcaaaatctcaatcatcttcctccacggtctctgtacctatatccaacctgaaaatctcaaccaaaacaacaccggaaatggactccgacctgcgattagacgaccatctagtaccgacgatccaaaatctaatgttgaagtcagaagaagaaacagatccaaagataaatccgaattcgacgaaagcaatgctcagatctttcgaattaagctcgatgaagatcatctcagatctcgaatgtatttcactgagtacaattcgctattcgtgatatcgttcttagctgtttcttgctttcttctagat

SEQ ID NO: 98682 - DNA, 505 bp, Arabidopsis thaliana columbia
ttaggtccactatagaagagtctatgacgtcgcatgcacgcgtacgtaagctcggaattcggctcgagcatcagtcaactcaactccccgagcaatatcaaggacagtcgacttggtcgagtcgtcactttgtgtgagatcagaatggaagagtaacacggtgagtgttacgcaacgtttattgctacctaactccaactgatccttgttctgctgaagtctctagttggagtctttgtggccttggcttcttgtggggcacttcctacctgacggattcaggacacagctcatgttggtgaagagatatgtggtaacaagaatgaatggttctgtggaattgataggagtaaagtgcctttctcgtgctacttgaggtggagatgttaaaccttatgaataagaaaggaacatacgtagcatgtggctcactctcgatatctgaagcagttgtttgctgttttcttttcttcttgcgtatgactgtgtagctgtccgtcctctt

SEQ ID NO: 98683 - DNA, 707 bp, Arabidopsis thaliana columbia
  unsure (1)..(707): unsure at all n locations
caaccccggaacaccccnggaantcaggcacnnttggcnaccncntttggngaccaaatgnanntaaccccgngagntttcccaacgtttatgcncccnaccccaactgaccnntgtcnncngaangcccctagttggggctttgggcccttggcntctttgtgggccacttccttacctgacggattcaggacacagctcatgttggttgaagagatatgtggtaacaagaatgaatggttctgtggaattgataggagtaaagtgcctttctcgtgctacttgaggtggagatgttaaaccttatgaataagaaaggaacatacgtagcatgtggctcactctcgatatctgaagcagttgtttgctgttttcttttcttcttgcgtatgactgtgtagctgtccgtcctcttgcagctatctctctctctcttgggttgctttacttttatttcctctatattctatgcttgtctcaaacttgtctctgttttgctgtgtcgttttaagttgaaccatcataaggtgtgtgaaactttgcaatgaataaaaaagggactcatgtgataaaacatgatttggtgttgaaaaaaaaaaaaaaaaaggnnnnnnnnnnnnnnnnnnnnnnnnnnnnnnnnnnnnnnnnnnnnnnnnnnnnnnnnnnnnnnnnnnnnnnnnnnnnnnnnnnnnnnnnnnnnnnnnnnn

SEQ ID NO: 98684 - DNA, 370 bp, Arabidopsis thaliana columbia
gtcgtcagcacagcaacgtttgaactctgtcgccaaccagctcgcggctccgggctcggcccgccagaggagcctcgctaagaatgccgacgacattgtcatcacttaccttgcccgcacacccctgaccaaggcccgcaagggtgggctgaaggacacacccgtggatgagcttctgggctcccttctgaccagcgtgcgtgagaactccaagctcgaccccagcctcgtcgaggatgtctgcgtcggcaacgtcctctgcccgggcaatgcctacagtcgtccgctccgccgtgctggccgccggataccccgtcactgctgctgcttcggttgccaaccgcttctgctcctccggcctcctggccgt

SEQ ID NO: 98685 - DNA, 1082 bp, Arabidopsis thaliana columbia
  unsure (1)..(1082): unsure at all n locations
taggagcactatagaagagttatgacgtcgcctgcacgcgtacgtaagctcggaattcggctcgagtgcttggcaggtctaactcttagtactcctggagatctggcgatcagtcttggaaccagtgacacggtatttgggattaccaaagaacttcaacccagtcttgagggtcatgtgttacctaatcctgtggaccctgagagttatatggtgatgttggtttaccagaatgcttctctcacccgggaagaaattcgtgaccgttgtgctgagggatcttgggatgtttttaataagtatttgcagcaaacacagccactaaacaatgggaaactcggcttctactacactgaaaatgaaattctgcccccacttcccgttggctctcatcgttacattcttgagaacttctctggtgagtctcttgagggtgtgaaggaacaagaggtcggtgagttcgaccctccctcagaggttagggcattgattgaaggtcagtttctttcaaagcgggctcatactgagagatttggtatgccctcccctcccctccgaataatagcaaccggaggtggcatctgctaacgagaatatcttgagtctgatctcagcaatcttcggatgtgatgtatatactgtccaaaggcctgattcagcatcacttggggcttgcactaagagctgctcatggctggctctgcaacaaaaaaagggagctttgtttccaatctcaaatctctacgaagggaaattggaaacaacatctctgaactgcaagctcaaggtaaaagcaggagacgcgaacattgcttccacctatggtttgttgatgaagaagaggatggaaatagagaacaagcttgtggagaagttaggccacttctgagaagaaaaaaactcactactcaataattcaaataacttaaagagttgaaagaataacaacttctatctactaaaactaaaagacaagtttgcctgttgctcaaaataaaagccgactacgagcttacgatctctgagtaacaaatgattcgtaagacattgctcttnnnnnnnnnnnnnnnnnnnnnnnnnnn

SEQ ID NO: 98686 - DNA, 232 bp, Arabidopsis thaliana columbia
aaggtagggtatgaagttgtgacgcactttgagagagtttcaaaaagaaactcaaaactgttgatatggagggttgttgtcagattcaggtttaaaaacgagttgatttttatgtctgtaagttatagataaaacgaattttgtttggtcagataatgtatgtgaaccgtgggcttacctcgtgttgttgtatacctataccatgttgtcttgcaatagaaacttttggagt

SEQ ID NO: 98687 - DNA, 395 bp, Arabidopsis thaliana columbia
tccgatttttgactcgtcccgggactcagtgattctcctcttccaatcctttccggaagaactaaacaaaaacacgatctttctcagatttagagagagtaagagtgagagagtgtcagagacacgaatcaaagaaatgatttttaaaagcttctgttaattctaatttgcatagatttgtttactcgagcttgagcttgagcttcttctaatggagttaaggaaggacaagcttcttatgttttactcagaggggaaagaaagcaaagaagctaaatgggcagtgaatgatccaatgagcaaatcttataagctctctttaccttcagcactaagacctgataatctcttacctggaaatagacttagatacactgatgcttctaagtccaaat

SEQ ID NO: 98688 - DNA, 842 bp, Arabidopsis thaliana columbia
  unsure (1)..(842): unsure at all n locations
ttaggtgaacttatcagaanagctttgacgtcgcatgcacgcgtacgtaagacaatggcgactacgattccactcttcgcctctttcaaatacgccgatagcttaacggtcgtaggaatctccttctgcaccgcgttggtctgcgaagccatctcatggatcttaatctaccgtaccagctcatacaaatccttgaaatactccattgacaaggccacgaagaaactcgagacaatgaagacagagaatccatcgtcaaagctatccataaagaaatcaaagacgaagaagatcgatcgcgttgaaaccagcttaaaggaatcgagccgagatctgtcactcttcaagttcaaatccggcgccgttgtggcactggttctcttcgtcgtcttcggattgctcaattcactattcgaaggtaaagtcgtcgcgaagcttcctttccatccgatcacgatagtgaagaagatgagtcacaggggactgaaaggtgatgatccgacggattgttccatggcttttctctatctgctgtgttcaattagtatcagaaccaatctacagaaatttctagggttttctccgccgcgaggagctgctggtgctggtggtttgttccccatgcctgatcctaagaccaactgatcactcctttgaggttttttttttttgtttttgttgagatttttggaacaattttcatataaacacacagttacaagtttttgcaatcatctgatgattttggtaaaaaaaaaaaaaaaaaaaagggcggccgctnnnnnnnnnnnnnnnnnnnnnnnnnnnnnnnnnnnnnnnnnnnnnnnnnnnnnnnnnnnnnn

SEQ ID NO: 98689 - DNA, 525 bp, Arabidopsis thaliana columbia
  unsure (1)..(525): unsure at all n locations
nnnnnnnnnnnnnnnnnnnnnnnnnnnnnnnnnnnnnnnnnnnnnnnnnnnnnnnnnnnnnnnnnnnnnnnnnctttgggttttttttttttttttttttcttggaactcctgtatatattagtttgcagacaaggtttacattctaggaatctgtctgaaatttttgaaagttaatctttttatacatgaagctcattttaaaccctttgggctactacattggatatgtcaaaatacataatacaaaaaaattacagagcaaaacaccaaaaaaaaatctaatcttgatcccaaatatgactaaagaaatcagcaaaagttggtgaagctaccaaactagtaaagccaggacttcgaaacgggctcataaatcccgccggcgagaataatcccagtggtatagccggcgaaaacatcccaccttgatgatacatcggagagaatatcccggtagaagctgttggcaacaaggccggagatggcgagagtattcccggagcataaccaccaaattcagctgctt

SEQ ID NO: 98690 - DNA, 538 bp, Arabidopsis thaliana columbia
  unsure (1)..(538): unsure at all n locations
nnnnnnnnnnnnnnnnnnnnnnnnnnnnnnnnnnnnnnnnnnnnnnnnnnnnnnnnnnnnnnnnnnnnnnnnnnnnnnnnnnnnnnnnnnnnnnnnnnnnnnnnnnnnnnnnnnnnnnnnnnagcaaaggacatataattacatattcagcgtagtcctccacttgaaaatataggtattgcgagcatttagtgctcagaaacgaagataccggccatacccatgccagttccaacacacatagaggtcacggcgacccgcttgtcctggcggcgcagctcagagagagcagtgacgacctggcgcgcaccggtggcacccagagggtgaccgaaggcaatggcaccaccacgggggttgaccttggactcatccagagcaagcttgttgacacagtagacacccattgaggagaaggcctcgttaatctcgaaaatatcaatttgttgcttggtgaaggtaacctgggcagggtgtaggggtatgcctagtgtgtgtttactatttttttttctctgcgcccccccctccccccccc

SEQ ID NO: 98691 - DNA, 506 bp, Arabidopsis thaliana columbia
  unsure (1)..(506): unsure at all n locations
atgatttgcnnnnnnnnnnnnnnnnnnnnnnnnnnnnnnnnnnnnnnnnnnnnnnnnnnnnnnnnnnnnnnnnnnnnnnnnnnnnnnnnnnnnnnnnnnnnnnnnnnnncctttttttttttttttttttttttttcggacaattcataattttaattaatcataacagaacgttaatctctctacattagcctgcctgcgacggctcatctcccttactttaacgtttacactttaatatgtgtcactctaatcaagattagagctcacaaatcacagttttcaaatattaaatcctataggtaaaatcatagccattattactatttaatcaaagtgagagaaaacgcttatttaaccaaacattaatatacggttaaaaagactattcttttcttttctttttgacagcggctaaaaagactattcaagagacttaacattacgtataatccatacttagattttacgaaagtcggactaatgatgtttgaatctcttcgagt

SEQ ID NO: 98692 - DNA, 489 bp, Arabidopsis thaliana columbia
  unsure (1)..(489): unsure at all n locations
nnnnnnnnnnnnnnnnnnnnnnnnnnnnnnnnnnnnnnnnnnnnnnnnnnnnnnnnnnnnnnnnnnnnnnnnnnnnnnnnnnnnnnnnnnnnnnnnnnnnnnnnnatgataaaaaattgtttggaaacacgatcacgggagctaaaaaagaatcattggggtccatttcgtccaaagcgataagtttgatccatcgaccaatcacctgcttatgcttcgacgtcggtccaaacattacatattacaatatctaataagtgacatgtgaatgtgatcgttgacaaaaggttacaaagaagaagaatgttaatttcgtaaggccaagactcgaagagccaaagaatgaaaatattatgtaagtgagacaataatataccggaaaaaaaaatgaaatataatggtcgtgtggaaatcacttaacccaagtgactctcttttttcatctttgcttttgctgatgatgccgagaaccgctctcaccactttcac

SEQ ID NO: 98693 - DNA, 2573 bp, Arabidopsis thaliana columbia
cctgaccaatacaataatctttttggggcttcttattggctcggatttcagggattttcacacttgtagtagagttgcaacatagacaaatggacgacgatggagaattggggatgttctttcctagctggaccagcaagaatcctattgacacggttgaatctcgtggtttaatgttctcttgttttgttgctgcccttgttggtatattgaccatcgcctacactgcttttcaatggcgaagaaatattaatttaagttggacgaaagccatagccaggtcaaagaaaaatccaaaggcacgacataaggttcctgttgccccacatagctgggaactcgaccctatagctcgtgcgaaaaacttgaactgttgtgtttgcttgaagtccatgtcgccatctcaggcaattgtagcttcagaaagttttttccacaggtgcacaatctgtggagcagcagcacattttaactgttcttcaagtgcgccaaaagattgcaaatgtgtctccatggttggatttgagcatgtggtgcaccagtgggcagtgcggtggacagaaggggctgatcagactgatgactcctcgttttgtagctactgtgacgagtcatgtagtagctcctttcttgggggttctcctatatggtgctgcttgtggtgtcaacgtcttgtgcacgttgactgtcacagtaacatgtcaaatgaaactggtgacatttgtgatttaggcccgcttagaaggttaatattgtgcccactctacgttaaggaattgacgcggaatccctctggaggatttctgagctcaatcactcatggtgctaacgaacttgcatctaccgcccttgccagtatcaggattcaaagcaaaaaatacaagcaaactaatgaaacttcagctgacactggtaatagtggtagcaattgcgatgaatccacagaaagcacagctgatacaggtccaactgttaatggcgctcatgccgtactggaaaattctatcagcgttatgaatggggattcttctaacggggacagtgacagcaatggcaagctggaaaagaagccgagtgttaaaagaaccgggtcttttggtcagaaggaatatcatgcactaaggtcgaaacttaagtatgaactagctgatttgccttcagatgcaagaccgttgttggtttttattaacaaaaagagtggtgctcaacgaggtgattcccttcgtcaacgtcttcatcttcatctaaatcctgtgcaggtatttgaattgagttcagtgcagggaccagaagtgggactttttctcttcaggaaggttcctcactttagagttcttgtttgtggtggagatggcaccgctggttgggtattagatgccatagagaaacagaattttatttctcctcctgcagttgctatactgcctgctggaaccgggaatgatctatcccgagtattaaattggggtggtggtttgggttctgttgagagacaaggaggcttgtcgacagtattacagaacatagagcatgctgcagtcactgtccttgatcgttggaaagtatcgattctgaatcaacaaggaaagcaactccagccgccaaaatatatgaccaattatataggggttgggtgtgatgctaaggttgcccttgagattcacaatctacgggaggagaatccagagagattttatagccagtttatgaacaaagtcctctatgccagagaaggtgcaaggagtataatggacagaacattcgaagatttcccttggcaagttcgagttgaggtggatggtgttgacatcgaggttcctgaggatgcggaaggaatactggttgcaaacattggaagttacatgggaggggtggatttatggcagaatgaagatgaaacatatgaaaactttgatccgcaatcgatgcacgacaagatagttgaagttgtgagtatatctgggacatggcaccttgggaaacttcaggtcgggttgtctcgtgcgagaaggctagctcaagggtcagcagtcaagatacaactttgtgcgcctttaccagtgcaaattgatggagagccttggaatcagcaaccatgtaccttaaccatatcgcaccatggccaggctttcatgctaaagagagccgcggaagagccactgggtcacgcagcagctataatcacagatgttctagagaatgcagaaaccaatcaagtgataaacgcttctcagaaacgaacgctgcttcaagaaatggctctacggctaacttaaaacaggggaaaaaaaaagaaaagacagaagacaaaaccttccctcttcaacaaccaatcaatcatcactggttagttacaaatatttacaaatgcgtgtattttacatatcttgtacctctgcctaatgaagggaatgttaaaaagtcttgaagatcgaaatccgctgattgacaaagcgggttctgtgtggaagtaggaaaaaggaaccaaaaattggaatctggttcctagatttttggctgttctcatagtgaatgaaagcaaaacgtgtttaattaaaaaaaaaaaaaaaaaa

SEQ ID NO: 98694 - DNA, 606 bp, Arabidopsis thaliana columbia
  unsure (1)..(606): unsure at all n locations
cacaggttcccccgaaccatccgtatggtgtcntccncctggaggccccattttccaaggctncctnaggagaattgccgagattatgaggttaaggaccccaatgctatcttctgttccaagttccggactcactttggaggtggtaaatcttctggatatggtttgatctatgatactgtcgagaacgctaagaagtttgagccctaagtacagacttatcaggaatgggacttgaccaccaagattgagaaatccaaggcaacagatccaaggagaggaagaacagggcgaagaagatcccgtggtgttaagaagaccaaggctggtgatgccaagaagaagtaagacgtttgaagaggacagaagcagcaatatggtttttgttctgcatcactccttctttgaagccatgtttgctattagacatcttctaattatttctcgattttgtgcttctttttgtcacactcgctctattttggtttggatcttgttttagagaaacatgtggttaagattttgtttgaatacattaaaaaaaaaaaaaaagggcggccgctctagaggatccaagcttacgtacgcgtgcatgcggcgtcatag

SEQ ID NO: 98695 - DNA, 789 bp, Arabidopsis thaliana columbia
  unsure (1)..(789): unsure at all n locations
nnnnnnnnnnnnnnnnnnnnnnnnnnnnnnnnnnnnnnnnnnnnnnnnnnnnnnnnnnnnnntccaggccacgcgtccgcccacgcgtcggcgaaaacactcaagcttgcagagatctttcactttaatccttgagaagtagcaaaaatggctgaaaaggcggtcaccatccgaaccaggaaattcatgaccaacagacttctctccaggaagcagttcgttattgatgttcttcaccctggaagagccaatgtttcaaaggctgagctgaaggagaagctagcaaggatgtacgaggtcaaggatccaaatgcaatcttcgtattcaaattcagaacccactttggaggtggtaaatcatccgggtttggtttgatctatgatactgttgagagcgctaagaagtttgaacccaaatacagacttatcaggaatggacttgacactaagattgagaagtcaaggaaacaaattaaggaaaggaagaacagggcgaagaaaatccgtggtgttaagaagacaaaggctggtgatgccaagaagaagtgagatcctgaagagagaatctttatcttgtgggttcttgttctccataatcaatcaccttttatgttatttgtccgctgttagatcgtttctccaactagacatgtttactgaaatctgagattttcgtttatttttgttttggtcagtttatgttttgagtttagagaaacatatgatccaaggtttttgttcaatacaactatttaatctcaaaaaaaaaaaaaaaaaaaccggcacgag

SEQ ID NO: 98696 - DNA, 840 bp, Arabidopsis thaliana columbia
  unsure (1)..(840): unsure at all n locations
nnnnnnnnnnnnnnnnnnnnnnnnnnnnnnnnnnnnnnnnnnnnnnnnnnnnnnnnnnnnnnnnnngaccacgcgtccggcgaaactcgtcgattttcaaaaccggagctcagagactgatctcggaaagtaaatcgcagccatggcggaaaaagctgtcactatcaggaccagaaacttcatgaccaacaggcttctcgccagaaagcaattcgttattgatgttcttcatcctggaagagccaatgtttcaaaggctgagcttaaggagaaattggcgaggatgtatgaggttaaggacccaaatgctatcttctgtttcaagttcagaactcactttggaggtggtaaatcttctggatatggtttgatctatgatactgtcgagaacgctaagaagtttgagcctaagtacagacttatcaggaatggacttgacaccaagattgagaaatcaaggaaacagatcaaggagaggaagaacagggcgaagaagatccgtggtgttaagaagaccaaggctggtgataccaagaagaagtaagacgtttgaagaggacaaaagcagcaatatggtttttgttctgcatcactccttctttgaagccatgtttgctattagacatcttctaattatttctcgattttgtgcttctttttgtcacacttgctctattttggtttggatcttgttttagagaaacatgtggttaagattttgtttgaatacattgattttaaacttcataaaacaaaaaaaaaaaaaaaagnnnnnnnnnnnnnnnnnnnnnnnnnnnnnnnnnnnnnnnnnnnnnnnnnnnnnnnnnnnnnnnnnnnaac

SEQ ID NO: 98697 - DNA, 514 bp, Arabidopsis thaliana columbia
  unsure (1)..(514): unsure at all n locations
atgannnnnnnnnnnnnnnnnnnnnnnnnnnnnnnnnnnnnnnnnnnnnnnnnnnnnnnnnnnnnnnnnnnnnnnnnnnnnnnnnnnnnnnnnnnnnnnnnnaggacgcccttttttttttttttttaagattcaaggttttagagcttcacatacgaatgttctacacttgaaacaatgaatccaaaccaaactacataagctgcaaatatgttcaccctacccttgaaacaacactattctgcaggtcataaatcagttggggaatcttgtagctcttctcacccacgggaccatcgaacgctgctgctgatgagatccagctccattgttgcctacattgcttctattgtctgcaaaccttctcattctcattctctcttccttcatgtttgcaaaccgagaatccagtgtctgaggccattgcctttgccctcctcctcctccatttgcctgctgctgcactatcttctgcctctgctgctgctgctgctttccgacaaaccctgtttgt

SEQ ID NO: 98698 - DNA, 510 bp, Arabidopsis thaliana columbia
  unsure (1)..(510): unsure at all n locations
nnnnnnnnnnnnnnnnnnnnnnnnnnnnnnnnnnnnnnnnnnnnnnnnnnnnnnnnnnnnnnnnnnnnnnnnnnnnnnnnnnnnnnnnnnnnnnncctttttttttttttttttttggcacattaaaccagattctcattgatgcataatgaaatctcaacttacaatgcttttctgatctatgcatctaagataaaatagtgtttacaagtagcatcgtattgaaccaattgatccagccatgtggtgtatgtcagccattacttgtttgcgttccctattatcggttagtgtccctctttaggctcggtttgcctcccctagtatctgattggtccatcgaggctgcctgtagcaaactgttgaactattggattagttgaggttgtgaattcatgtgtcattccttgccaaacgatctttccttcatacagaaacaataacctgtctacagctctttgaatggtgctatgttgatgggtaacaacaagataagacgcaatttttcca

SEQ ID NO: 98699 - DNA, 669 bp, Arabidopsis thaliana columbia
  unsure (1)..(669): unsure at all n locations
nnnnnnnnnnnnnnnnnnnnnnnnnnnnnnnnnnnnnnnnnnnnnnnnnnnnnnnnnnnnnnnnnnnnnnnnnnnnnnnnnnnnnnnnnnnnnnnnnnnnnnnnnnnncctttttttttttttttaccaacgaaacttcttttgaatggttgtatcatctttgctacaagtttcatatccatatatcagtcttaccttttggttaacgttactttcttttttgggatatataggaattacaattacggacaggcgggtcgagcattgggtttcgacggtttacagaacccagaacttgtagccaacaactccgttttagctttcaagacagctctttggttttggatgaccgaacagactcctaaaccgtcctgccataacgttatggtcaaccgatacagaccgacgaaagcagatagagcagcaaaccggactgtcggttatggtttagtcaccaacatcataaacggcggtttagaatgtgggattccaggagatggacgggtcactgaccgggtcgggtatttccaaagatacgctcagttgtttaaagtcaccacaggacctaatttagactgcgagaaccaaagacccttctcctaaatataactataactcaaatctatgtatccaaatgaaattgaagtttgatatctccaaatatttaat

SEQ ID NO: 98700 - DNA, 579 bp, Arabidopsis thaliana columbia
atacgactcaccttagggaaagctggtacgcctgcaggtaccggtccggaattcccgggtcgacccacgcggtccgaaaaaaaaaaaaacacacacacacatcaagttcaccttggacatggtatatttacctttagatgcagcatctaagaagtgtagactcgttttgcatactcagacaaaagctgtcctaaagcgtctgtgtgaggtggcaccgcagctcctactccagccatccagccatccataattgctgtggaaagaagctctaattggccagtggttactcctgaaacatcatctgctgtaacagagagaaactcaaaactttctgcaagccatgacctaatctgtctttgcagttcaccagccggagtgtgaacaaataaagcagctaagggtttgtttccaatggcaaaacttttggcttcatcttgtatctccctcagctttcctccagtcacttgctgcctcccagtatcctaagaaaaattcagaaacaagagaagcacgtttgtttgtatctcggattctcagttattaggttaaagaaaagcatctctgggagtcatagctata

SEQ ID NO: 98701 - DNA, 679 bp, Arabidopsis thaliana columbia
  unsure (1)..(679): unsure at all n locations
nnnnnnnnnnnatagcagtgctatgcacgtcgcatgcacgcgtacgtaagcttggatcctctagagcggccgccctttatttttttttttcattttttttttttttttcacttcgaaaaaatcatcacaacttataatagaatttagaattcaactataataaaaaaaaagtatacatattgaaattcttaaaattcgttacaacatcacgaatctggaatatttgctattcgtataagcaaaatgtacaattcacatcactaagacagattacttaacgaagacgtttagttaccttatttttcttcgtcgccgtttcacacactaacactacaactaggggtaaacgtatacttaacggggttgtctccgacgataactccgttagctttgttaccgaagtttatatatgctggacacttcacatgaagatgatacttcccggggataaaagtcccaaccttccacctcactttaccatcagcacgaatgatcaacaaaacgacaccgttatctttatcggggtcaagactaacgccgttaaaaggagcgatgggaacggaggttccgtaaacaaacggcgaccagatgccgccatctttgggcccctgatacgtgggagggattgatgttgggaaagctgatttgttggctccggtaagcagcgcacacccccagc

SEQ ID NO: 98702 - DNA, 542 bp, Arabidopsis thaliana columbia
  unsure (1)..(542): unsure at all n locations
nnnnnnnnnnnnnnnnnnnnnnnnnnnnnnnnnnnnnnnnnnnnnnnnnnnnnnnnnnnnnnnnnnnnnnnntttttgggtttgttttttttttttttttttgaacaacaatccagtccatgtaatatttaacagtttcggacttaaagttatacatgcacatgagtatatatgatacaagagttcaaacatcatgatgatgttactaagacaagtttttacttattcatacaatatggttcacagacatttggaaaccataccaaacagactgatcaaatctcttttaagcaaaaagaatctgagaattcgatggagttatatctgcataacgctccggcgactcaacaacctcccacctcacagcaaacttattctccgactgccaaatattcccaaccgcgagatgaagattcctaccaaccacatatactctgttcccataacagttaaccgcaaacggtctacaaatctgctcaggcaattccggtccgttaatcgtctctaacgaatctgtaaccggatcataaaccttcatcttg

SEQ ID NO: 98703 - DNA, 505 bp, Arabidopsis thaliana columbia
gatcaccaaactacttgcttttatttccaagaagcagctacaatatagtttgttaggagtgccatgaactcatgaaagcagagacactacaatcgagctcttttgtttttcttttcacttcaattgagcaaattgaagatatgattttattactcaaactatcttttatgttttttagttgcaaaatcttagaacatgacagttagaccaagagcagttgataaatcaaacaaaaaggcaggcagatccgtggctgatgctgccgtcacaaccttcccatcagttacacatcccttttccatcacagcctcacctccagccaccttcaccatcaccttcatccctttcccactcgcgcatcgcttccccttaagaacaccagtggctgcaagaagcaatttcccctgtccaatagctgcaaacaccttatctttctctgcaaaactcttaaccaaagcaacagccttttcattcatcaccaatagctcaggtgatctccctccct

SEQ ID NO: 98704 - DNA, 574 bp, Arabidopsis thaliana columbia
  unsure (1)..(574): unsure at all n locations
ttaggtaccactatagaagagttatgacgtcgcctgcacgcgtacgtaagctcggaattcggctcgaggaaacataaaatttggttgataaataaattaattaaactgggaaaataataaaattaattcaaagttgattatataaacagaatgattaaataagaaaacgcgacagactccaaaaacgatgtaaaccaaaccagtcaaccattttgacagccttttccccgccgccagaaacgcaaacgcgtttctcacacgcgcccactaactttcaatgatctcattacgcggcgtcaacgcagacaacgacgtcggcgaaatcgccggagctttacctgagtaaaccgggacagaagcgaatcgggtcgagaagcttcgtaatccacctagtccgacgtattcatcctcctcgtcgtcgtcatcgaagttcaaagagtaactcaaaggatcgtattgaaacttctcgcttgcgtcccaatcgcggccgccgactagtgagcnnnnnnnnnnnnnnnnnnnnnnnnnnnnnnnnnnnnnnnnnnnnnnnnnnnnnnnnnnnnnnnnnnnnnnn

SEQ ID NO: 98705 - DNA, 393 bp, Arabidopsis thaliana columbia
cccacgcgtccgggtttcttcatcttcacaacaatggcgtcctcactcactaggaattgctctcgcttctcaaaagccatctctgtccgtttcatgagtaacctaccggaaaacaccgtctacggaggaccaaagccacaaaacccaaaccaaagagtgacgctaacgcatctcagacaaaaacaccggagaggagaaccgatcaccgtcgtaactgcctacgattacccatccgccgttcatttagacacagctggtatcgatgtttgtcttgtcggtgactcagcttccatggttgttcatggtcacgacacaacacttcctatctccttagacgagatgcttgttcattgtcgtgccgttgctcgaggcgctaaacgacctctcctagtt

SEQ ID NO: 98706 - DNA, 445 bp, Arabidopsis thaliana columbia
ctcgtgccgaaaaatctgaattccaattcgaagaagaagaagaagaagaaaggagatgactatggggaatttcttaaagagatttggaagtggaaaaagcagaagcagtagaaatatgactctgggaacgacgtcgtctcaatctcatgaaccatcaccgtcggatccttcactctcccttgccgataataccaacgccaccaagaagaagtacgctctcatccctgaccgcttctcttccctcgaccaggtatcaaaagctctaagagaagctggtcttgaatcatccaatctcattctcggagttgatttcacaaagagcaacgagtggactgggaaaacttctttcgatggaaaatgtctgcacgcgctcggcgaaacttcgaatccatatgaaaaggcgatttttgtaatcggccaaacgttggctccttttgatgaagac

SEQ ID NO: 98707 - DNA, 656 bp, Arabidopsis thaliana columbia
  unsure (1)..(656): unsure at all n locations
tttttgacagaagaacgtcccgggacaaacaacgctactgttactgctctcatttcactgaaatggaaggaattgagtgaagaagagaagcaagtttacaacggaaaggccgcaaaactgatggaagcatacaaaaaggaagtggaagcttacaacaagaagtctgcggctactaccagtagctagataaatctctcttagtattgaaatcatgttcaagtcctgttgaacattccttattatgcatcgttagattactctaagtacttttatgttttaactctcgctgatcattacttactagttactatctatttctctgttacaaattttaattaataataaatcgactcgtgtaaaaacgcggggaaagttgtgtcaatctcgaccgttggattgaaccagtcaacaacgtcggagatcggagaactctccacgtggccgaacttcgccgttgatagttccgtaattgtaaaacggcggcgtttcaggggacgggaaaccgtctttaccatattaagcccttggttcgaccgggtnaagttggtttaagccttcgggattnctttgggttttggggaattgctggtttnccttggggnttttnggtttccggggggtatggggggnnttttnnccctggcaagtnttttntc

SEQ ID NO: 98708 - DNA, 167 bp, Arabidopsis thaliana columbia
ctcgagccgaatcggctcgagaagaaaacaattgaggcagacatgttttcacattttctgcctgttttgaatgtgatgcttaagagaaaattcaaaatatttaaaattcccaagtagtagttactaaaagatttatatatatggtattgagaaaagttgttataacc

SEQ ID NO: 98709 - DNA, 549 bp, Arabidopsis thaliana columbia
tttaggtgccactatagaagagctttgacgtcgcacgcacgcgtacgtaagctcggaattcggctcgaggaaaaaaaatatggtgttgtggagagtcccttgtcgcagtctccagaactttgaacgtagcaaagagtctcagcttctttgttccctaaacaatcagctctcatcaacccgatctccgctggacgtcgaaacaacctgcctcgtccaaacctcagaagacgatgtaaggtcacccgctgcgcgggctaatattgaacaagaaggtaacacagtgaaagaacccattcagaatattaaaggaaagggatacataacggcccaagaagagtttctggagggcataacttggtcgagaggtctcgatgacattgctgatatccgcggcagatcattgctcgtcgagcttattagcgccaagactgaccagcggattacggtagaagactacgcacaacgtgtatgggccgaagcccctgatgagaagtacgagtgcgagtttgagatgcctgaagactttggaccagtgggagccatcaagat

SEQ ID NO: 98710 - DNA, 871 bp, Arabidopsis thaliana columbia
  unsure (1)..(871): unsure at all n locations
gcgnnnnnnnnnnnnnnnnnnnnnnnnnnnnnnnnnnnnnnnnnnnnnnnnnnnnnnnnnnnnnnnnnnnnnnnccacgcgtccgaaattttccgccataagggggttggctgaggaagataagaccgcagaacatggagtacgtctgacgataccagactatccatttgcaaatgatggtctaatattgtgggatgcaattaaagaatgggtgacagactatgtgaaacattactatcctgatgaagaactgatcacatcggacgaggaactccaaggatggtggagtgaagtgcggaacataggccacggagacaagaaagacgaaccttggtggcctgtcctcaaaacacaagatgacttgattggtgtggtaactacgattgcatgggtcacctcaggtcaccatgcagctgtaaactttggacagtacggatatggaggatactttcccaaccgaccaacgacaacaaggataagaatgccaacggaagatccgacagatgaagccttaaaagagttctatgagtcgccagaaaaagtgttgcttaagacatacccatcgcagaaacaggcgaccctagtgatggtcacgttggatcttttatcaacacattcacctgacgaagagtacattggagaacaacaagaagcatcttgggccaatgagcctgttatcaatgctgcatttgaaagattcaaaggcaagctccaatatctagaaggagtgatagatgagagnaacgtgaacattacnctaagatagagctggantggtgttgttagaatggcttttgaancacctctganatggngttccggatnggggtcctaaagaatccattggcatnattcttcccaaatntcatnt

SEQ ID NO: 98711 - DNA, 3033 bp, Arabidopsis thaliana columbia
  unsure (1)..(3033): unsure at all n locations
nnnnnnnnnnnnnnnnnnnnnnnnnnnnnnnnnnnnnnnnnnnnnnnnnnnnnnnnacgcgtcaggtaaatatgagaccacgcgaagccttatagaagagaaaaaaaatatgtattgtagagagtccttgtcgagtctccagactttgaacgtagcaaagagtctcagctctttgttccctaaacaatcagctctcatcaacccgatctccgctggacgtcgaaacaacctgcctcgtccaaacctcagaagacgatgtaaggtcaccgcttcacgggctaatattgaacaagaaggtaacacagtgaaagaacccattcagaatattaaagtaaagggatacataacggcccaagaagagtttctggagggcataacttggtcgagaggtctcgatgacattgctgatatccgcggcagatcattgctcgtcgagcttattagcgccaagactgaccagcggattacggtagaagactacgcacaacgtgtatgggccgaagcccctgatgagaagtacgagtgcgagtttgagatgcctgaagactttggaccagtgggagccatcaagattcagaaccaataccatcgacagttgttcctcaagggggtagagcttaaattacccggcgggtcgataacgtttacatgtgagtcatgggtggcccccaagtccgttgacccaaccaagcggatattcttctccgacaagtcctacttgccttcccaaacaccagagcctcttaaaaagtatcgaaaagaggagctcgagaccttacaaggcaagaaccgcgaggaagttggtgaatttaccaagtttgagcgcatttacgactatgatgtgtacaacgatgttggtgaccctgacaatgatcctgaacttgctcgtccggtaattggaggcctcacacatccatatccaaggcgttgcaagaccggtcgaaaaccttgtgagactgacccctcttcagagcaacgctacgggggagagttctatgtaccaagagacgaggagttctctacagccaagggcacttcattcacaggcaaggccgtactggcagctcttccctccatcttccctcagatcgagtctgttctattgagtccccaagaaccttttccacacttcaaggccatacaaaatctctttgaagaaggcattcagcttcccaaggatgctggcctcttacctctgctccccagaatcatcaaagctcttggcgaagctcaagatgatattctccagtttgatgccccagttctcattaacagggatagattttcatggttacgagacgacgagtttgctcgccagacacttgccggccttaatccttatagcattcagctagttgaagagtggccgttaataagcaaactagacccggccgtttatggtgatcccacctcactcattacttgggaaattgtggaaagagaagttaaaggaaacatgacagttgatgaggctctaaagaataagagattgttcgtgttggattatcatgatttgcttctaccatatgtgaacaaagtgagagagttaaacaataccacattatatgcttctagaacactattcttcctcagcgatgatagcacattgaggcctgttgccattgagttgacttgtccaccaaatatcaacaagccccaatggaaacaagtcttcacgccaggctatgatgctacgtcatgctggctatggaatcttgctaagactcatgctatctctcatgacgccggttatcatcagcttatttcccattggttgaggactcatgcctgtacggagccatacataatagcggcaaatagacaactaagtgccatgcatcccatttataggcttttgcatcctcatttccgctacaccatggaaatcaacgctcgtgcacgccaaagtcttgtcaacggaggtggaatcattgagacttgtttctggcccgggaagtatgcattagagctaagttcagccgtctatggtaaactatggaggtttgaccaggaaggcttacccgcggatctcatcaaaagggggttggctgaggaagataagaccgcagaacatggagtacgtctgacgataccagactatccatttgcaaatgatggtctaatattgtgggatgcaattaaagaatgggtgacagactatgtgaaacattactatcctgatgaagaactgatcacatcggacgaggaactccaaggatggtggagtgaagtgcggaacataggccacggagacaagaaagacgaaccttggtggcctgtcctcaaaacacaagatgacttgattggtgtggtaactacgattgcatgggtcacctcaggtcaccatgcagctgtaaactttggacagtacggatatggaggatactttcccaaccgaccaacgacaacaaggataagaatgccaacggaagatccgacagatgaagccttaaaagagttctatgagtcgccagaaaaagtgttgcttaagacatacccatcgcagaaacaggcgaccctagtgatggtcacgttggatcttttatcaacacattcacctgacgaagagtacattggagaacaacaagaagcatcttgggccaatgagcctgttatcaatgctgcatttgaaagattcaaaggcaagctccaatatctagaaggagtgatagatgagagaaacgtgaacattactctaaagaatagagctggagctggtgttgttaagtatgagcttttgaagcctacctctgagcatggtgttaccggaatgggtgttccttatagtatttctatttgatctatgcattttctttctcaaaaatgctttcattaattttctgtatctctgtcttcttgataaaatgaataaaacaaatgctcctttgtctcctaaaaaaaaaaaaaaaggggcggccgctctagaggatccaagcttacgtacgcgtgcatgcgacgtcatagcttaagtagtagtgtnnnnnnnnnnnnnnnnnnnnnnnnnnnnnnnnnnnnnnnnnnnnnnnnnnnnnn

SEQ ID NO: 98712 - DNA, 552 bp, Arabidopsis thaliana columbia
  unsure (1)..(552): unsure at all n locations
cagctannnnnnnnnnnnnnnnnnnnnnnnnnnnnnnnnnngcaaagttgatactgaagagctagacaagagccccctcgcggcggctagagtgaaaagtgagccaacagctttgagctcagggttaaaaggaaagttggataactttcctggttcaggaacagagaagagcaaactggtaagcaaggtgacaagaaatatcccacgtcccaaaccgcggccgaagaagaagatattgcttaaaaagaagctaaaaatcgttgtaaattctgctacaaaaatggttgaggaagtcgatacttccttagagcctagtgcaagtcaacttctgtgccagaagtgccactgtgcggtaaagagcaccagcactgaaaaccacccgccctcgaatactagtcatactactgataaaaatgtcagtatagaagcagatcaagaatcactcgcaagcccgcgtctcattcgcattgtgaagtgtaataaagaggccagcaagggttcctcggattcttgtgaggttagtgatagcggtgaagctgtcattgtcatgaa

SEQ ID NO: 98713 - DNA, 767 bp, Arabidopsis thaliana columbia
  unsure (1)..(767): unsure at all n locations
nnnnnnnnnnnnnnnnnnnnnnnnnnnnnnnnnnnnnnnnnnnnnnnnnnnnnnnnnnnnnnnnnnnnnnnnactttttttttttttttatacagtccattataggcccataacaaacctatatgtggcccattaacataggctaccatcatttttaagagaaaatcgacaatgcaaatttagagtttgacatatacatgtcacacttgtagaaaattggaactcagggatgacattaagaaccacaacaaagcaaaaaaaaaaacttcacttattcacaaacgcagttcaaacttaaagtaacgaaatttagtacactgtatagaattgaaaactgtatttcccttctctactttggtgtgtttaccacctcttgttcactctcttctgcttctactttggttagggactcttaaaccactttaaagccgtgttgaaggatcaaagccattagatttaccattactcttctcaccattcacgaactcgtgatcattatgatcatccatgaacctagcccagaaccaatgcttcttccaaactctctcagtcatctcctcgataggaatattcttagtctccggaagtagggaccatcacaaagacagacataatcaaaacccatggcagaaaagaagaggaatatccccaacttgaaatggcaaagctagagaggaagcttgagnggtaatggacgngagngcaagttacggnnccgtaacttgnccggganggnnccaggggntgnnncaggggtacncccgngg

SEQ ID NO: 98714 - DNA, 470 bp, Arabidopsis thaliana columbia
cggtcgcgtgggctcagaacgacgacctatctatgaagattgaaacagcatactattctgttggaactcttgtcctttcagattcatcgccacctgctatgtcttctcttcttgttgttagcagagattcaagcgtgcactctcaggctggcagcagttcagggccaagttcaaggagttctcgggctttacgagaagttgtgtcttcccttcctattgaaggccgtatgctttttgtagcagatgtgctcccctctcctgatactgctgctactattcaatcattatattcagaactagaatactgtggtgtcgaagtctccggagaatcttatgaaaaggcatgtggaaaactctgggcgagaagtgatctttcaacccagcatattttgccaaggagaaagattgttgtttttaccaccatgggtatgatggaacttgttttcaataggcctgttgatatcttgaga

SEQ ID NO: 98715 - DNA, 359 bp, Arabidopsis thaliana columbia
aaaccaatcttctacttgaccaatattcgttattctgcattaaaggtgattaacaatggaaatctttgtaaggcgtcgaccatgtatatacatgtagacatatttttaccagttgtttttttggtcttgaagctgatcaacgctagtcttgttcgtcggtagatatcttaacattgttttcaacaatacatgagacagctcaattctcaaatcgtctaaaccagtcaacgatcgtcctggaaagaactcgagtttcgctaagaggaatggtctttagcgcctgagccacagcgtctgctggccgagtacacagacccaatttgccactttgggtcctgtatgcaaggtgtgagatggtt

SEQ ID NO: 98716 - DNA, 516 bp, Arabidopsis thaliana columbia
  unsure (1)..(516): unsure at all n locations
nnnnnnnnnnnnagctactnnnnnnnnnnnnnnnnnnnnnnnnnnnnnnnnnnnnnnnnnnnnnnnnnnnnnnnnnnnnnnnnnnnnnnnnnnnnnnnnnnnnnnnnnncctttttttttttttttcaaaccataaaccaatgaccaatatttgatattctgtgttaaaggtgattaacaatggaaatctttgtaagacgtcgcccatgtatatacatgttttttggccttgaagctgatcaatgctagtcttgttcgtcggtatatataaatcttaacattgatttcaacattacatgagacagctcaattctcaaaccgtctaaaccagtcaacgatcgtcctggaaagaactcgagtttcgctaagaggaatggtctttagcgcctgagccacagcgtctgctggcgtgtacacagtcccaatttgccactttggatcctgtatgcaaggtgtaagatggtttccgttcagccgaaccttttcaagtgtaccaccaatagattctatccgagg

SEQ ID NO: 98717 - DNA, 529 bp, Arabidopsis thaliana columbia
  unsure (1)..(529): unsure at all n locations
accacgcgtccggaaaatagtttcttaagagattttattgtcttgcccttacaactacgaaacacattattataaagccaactagggaaaacagaggtacttcaagtaaggtttggtttataaaaccttataaatcccctactgctacttagaaacatgatacaaacaaacaaaaacacacttggaaacagaagcacttcaagatatatagtttggtttgtaccaaccttattgatcactcccttctacttcgaaacatggttggtcccagagacaagatcctgcaatgactctatgaaattatcgacataaccggtcacaagtccaggactagttagtgtctccctccacttgggggtgattcttcttcaccagattcccgatctcactggcccctttcatcacactattgatagcatcgaacagctctctttcgggaccaccnggttcncncttgcacttaaccgaaccttgggtcggcaccagnatctgngtggggcnggtaccaatggggnaaggattggaacnt

SEQ ID NO: 98718 - DNA, 724 bp, Arabidopsis thaliana columbia
ggaaggaagccagcatgttgatttgattagaaagggcccgagtgctagaggggataaaaccaagaaggggtagctttccaaggtaaaggggttttgggttttattaaaacccttaataaattccccgacgtgggtagttaggaaacatgatacgaacaaacaaaaaccccacttggaaacagaagcgcttcaagatatataggtttggtttgtaccaaccttattggtcacccccttccacttcgaaacatggttggtccccagagacaagaccctgcaaatgactctatgaaattatcgacataaccgggtcacaaagtccaggactagttagtgtctccctccacttggtgtgattcttcttcaccagattcccgatctcgctgtcccttttcatcacactattgatagcatcgaacaagctctctttcgagaaccatcctgtttcctctcttgccacttcaaccgaaaccttgagttcgtcactcagcaatcttgtgttgaggacctgatcacccaactgtggtgccaagactatctgacaatcactcagcaaagactcccacattgatccaaacccacaatggctcgcaaagcacccgactgatggatgagacaatagcaatggttgttgagcccattctccccaatacaactcctcttcctttaaccctctcctcgaatccttcaggaagtgcttctcggacgcgtgggtcgaacctga

SEQ ID NO: 98719 - DNA, 771 bp, Arabidopsis thaliana columbia
ctatgatgtcgcatgcccgcgcccgggaggttggataatgtagagccgcccacccaaaaaatttttttatttttttttcgaaaaggaaattcctcttttttttttgggggttgtttgcaaagttaatgttttacagtacatacagaattacatggtacacgctgattgtggaacattgtcagaaacacttggcaaaccaaattgtagattctacaaaggagatggctatgtgcaagcgatttgttatgtgcagagataaagtttgttggcattgatcacgtgtaaagccgtggtcagaaaaaaagttcgtggccattgatcatgtgtaaagctttagccggttcgtgatccttactcgacagatcgggcaatttgatattttggatccgcaatctccacaagtcatgtggccacagctgaaagccacgtcttttcggttagtcagacaaatcgggcaactctgggtttgttcaggggatgcaggtgatgcagttgatggtagttctagcattaattggaggggggtaccgaatcggaaccgtgggtttacaccgggaaaattgggaccgggatcactgggaggggtacccaagcgttattccttatagagaggggacggaatttaaggaagccttgggcggactaaactaaatgagggcaaaaagacctggaggttcacctgtggggcgagaaacaaacaggggtaatatatcggctgtttcaacaaatattttgtctcgctgaggagaataaaattactctaagagcgcg

SEQ ID NO: 98720 - DNA, 514 bp, Arabidopsis thaliana columbia
caatgtaacagatatcatcatataaacgctaaagatttcaagataatgaacatattaaagacttgtgatggttctaattcctcagatctcctgcggaaaccatattttctagaaagttccatccgtatttcccaacctcaaaggaaaacagggacgggaccttctgtgtctgagttctcactccaaaaccttgtagtggatccgagtctacgagcatttgagtttgagaatctacataaggcttcattcatctgttctgcctacgtttgcgaaaatgtctgaggatgaaactgtctgcatacagaggatacttcttttttataagaccttttatgcatttccaatacgaaaagtcgactacttctccatcttttcgaactataaacatacatcgagagctctcaaaatccgggtgatgccctaccataatatagtctataccacatccgatcttcttctcacattcaggatgataagcaagtagcatctcaataattgttctctcatgctcggg

SEQ ID NO: 98721 - DNA, 2458 bp, Arabidopsis thaliana columbia
atttcttctctttctctctctctcttctctcatatctctctcttcgccgtcaggttttgcccaaatttctcggtcttcttcactcccgcgagttttttttctcgggaaaattttccaattccaagctccattgaagccaagtaagaggtgcgattctcttcaattttgacttggaacttgtaaatagcgtatggatttgagctggttatggacagaattctagctcgtatgaagaaatcaactggacgaagaggaggagataagaatattactccggtacggcggttagagcgtcgcgatgcggcgaggaatatcaattacgccgcagcttcatgttctagttcgtcagctgaagatctttccgtttcgacttcttcgttgatgactcgctctttggagtttccggagcctactagtttccgaatcggtggtggtgttggagagatggatcggatttatcggtctcttggtgtttctggtcctgatgatttggctatttcttttgatgcttgggaagcttgtaagaaacgttcttcttcagatgttgttaataggtttaagtcttttgatcttgataaggttcgtgatcaggatttgagtgaagaaggtcctagtggtgttgttgttggttctgattcaatgaatcataaggttcagggtcaggatttgagtgaagcaggtcctagtggtggaattgttactgagttgagtgagattgggaatttaatcactcctgtggataggttagtagctgatggtgtggtagagaatagacgtgttatggaaagaacaccaactattgtgaagtcgaaagggtatcttgtaccaaataatgtagtggctgttggtgttggtgttggtggtggtattaaggggctaagaccaccagtacttaagcctcctccggctatgaaacgaccccctattgatcatcggggatcgtcttgggatttcctgacgcatttcgctccaagtgaaacagttaagcggccgagttcctcttcttcttcttccgaggatggatgcgatgaagaggaaggcaaggaagaggaagcggaagcggaagagatgggagctaggtttatccagttgggggatacggctgacgagacgtgctcattcactacaaatgagggtgactcctcaagcacagtatccaatacttcgcctatctatccagatggaggagctatcataacgtcttggcaaaagggtcaacttttgggacgaggatcatttggttctgtgtatgaaggcatttctggagatggggacttctttgctgtcaaggaagtttcacttcttgatcagggaagtcaggcacaagaatgcatacaacaacttgagggggagattaaactacttagtcagcttcagcatcagaatattgtgagatatcgtggcacagccaaggatgggtcaaacttgtacatttttcttgagcttgtaacccaagggtcccttctaaaactctaccaaagataccagcttcgggactctgtagtctccttgtacactagacagattcttgacggtctgaaatatctccacgataaaggttttattcacagggacatcaaatgtgcaaatatattggtggacgctaatggcgccgtcaaacttgcagattttggattggcaaaggtttcaaagtttaacgacattaagtcctgcaagggaactccattttggatggctccagaggttattaaccgaaaggatagtgatggctatggaagtccagctgatatatggagcctcgggtgcactgtgctggaaatgtgtactggtcagatcccctactctgatctcgaacccgttcaagccctgtttaggatcggaaggggtactcttccggaagtacctgatacgttatcactagatgctcggcttttcatacttaagtgtcttaaagtgaacccggaagagcggccaactgcagctgaactgctgaaccatccatttgtgagaagacccttaccatccgtgggttcaggaggctcgggatcagcatctccccttctccgtagatgaggctaattttagtaatttcctcaataggcataacccgaagatttatgagagattagatcccagagaaactattgggagacacgagacttgattcaacgacacacacacacgtgcggtcgggttgcgcaagcaaagagccaaacttacttagtttcctgtgtcattcgttggttatttgttgcaagttatgtgttgggcttgattttaaaactgaagagccttatttttctaggaattagaaatgtcgaccttggggtttttgggtgtataggttttgtttagttttttttgttaaattatagtgtatgtatgtctgtatctatatcatgtaaatgtataattatagttggttcttatagttcctggcttgttgtaactgtgtacacacatcgatgggtttaagttctatttgtctcatatttta

SEQ ID NO: 98722 - DNA, 506 bp, Arabidopsis thaliana columbia
gaagaggtgaactggtagatgatgctaaggcaatagccttaaagtatctctcttcttacttcatcattgatctactctctatccttcctctcccacagatagtagttttagccgttattccaagcgtcaaccagccagtctctttgctaacaaaagactaccttaaattttccataattgctcaatatgttcctcggattctccgtatgtatccgctttacactgaagtgacaagaacatctggcattgttactgaaacagcatgggctggagctgcttggaacctctctctctatatgttagccagtcatgtgtttggagctttatggtacttaatctcagtagaacgagaagacagatgctggcaagaggcatgcgagaagacaaaaggttgtaatatgaaattcctctactgtgaaaacgatcgtaacgttagcaacaatttcctgaccacttcttgcccatttctcgaccctggtgatataacaaactcaaccatcttcaac

SEQ ID NO: 98723 - DNA, 570 bp, Arabidopsis thaliana columbia
cgattgaattaggtgccttatagaagagctttgacgtcgcatgcacgcgtacgtaagctcggaattcggctcgagtttggatttgctgctaggaatgctatctctgctactgcttttacagtcactggtgttgttaacaagttcttgactgttgtcatcaatgttttgatttgggataagcatgccactcctgttggtttggtttgtcttctttttactatctgtggaggtgttggttatcagcagagtgtcaaattggataaacccattgagaaggtcagcgagaaagatagcgagaagggagaggaagatgaggagttgacgcagttggttccggggaaactagcttctgttgtatgagagaagtgtcattgttttgcagcctgccttttcaggtgtgtaaccttttgaatatcttagccttttttacattttaacgaggtttctagtaaaagggaatacctttttctggttcctggcctctatagtattaaattttgtaaaacccttgtttcacaattattcctcatatccatttcatacaaaatcaatttctggtaaaaaaaaaaa

SEQ ID NO: 98724 - DNA, 486 bp, Arabidopsis thaliana columbia
  unsure (1)..(486): unsure at all n locations
ccttcttcttctcactttcccatttctctttcccaaattacatctcaaatacacaatccagcaacacctttctctctctaacagcttcgagcttctacactcatggctgcttcatcctttgtagacggagaaagagatatggagaaaggaggaatgatattactacagtcaagtgagaatcaaaatcctatgatagatccttcaccaacaccttcaccatctgcaactgctactgccccagctttggttttgtctaattcaggcaagagaatggttcaagctggcaagaaaaagtatgttaagcaagtcacgggtcgccacaacgncaccgagctttcacttagcggcccaacgaggtgattttggctcctgtgcanagnattctcaagggtatttaactntncagatggaagggnttctnaggtgggggaaggagtttgantntgaagnttcggnggattcgggcattcgatttttnattgngga

SEQ ID NO: 98725 - DNA, 537 bp, Arabidopsis thaliana columbia
taggtaccactatagaagagttatgacgtcgcacgcacgcgtacgtaagctcggaattcggctcgagataaaaaaaagatgagagaaggatctcatgttattgttttgcctttcccagcacaaggccacataactccaatgtcccaattctgtaaacgcttagcctcaaaaagtcttaagatcactcttgtcctcgtctccgacaagccctctccgccgtacaaaacagagcacgacacaatcactgtcgtccccatctccaatggtttccaagaaggccaggaacgatcagaagacctagatgagtacatggaaagagtagaatccagcatcaaaaaccgcttaccgaagttgatagaagacatgaaactatcgggaaatcctcctagggctcttgtgtacgactccaccatgccgtggcttctggatgtagctcatagttatggtttgagcggtgccgtgtttttcacgcagccttggcttgtctcagctatttactatcatgtattcaagggctcgttctctgtaccgtctaca

SEQ ID NO: 98726 - DNA, 562 bp, Arabidopsis thaliana columbia
  unsure (1)..(562): unsure at all n locations
tgatatnnnnnnnnnnnnnnnnnnnnnnnnnnnnnnnnnnnnnnnnnnnnnnnnnnnnnnnnnnnnnnnnnnncgggacaaaacataaatactaatggagcaccaccaccagcatcaccgtcaccaccaacgcgacgacggagaagacgatcgtcaatcctttggagtaccaccgccacacgtcgatgctccgccacaacctcatggtctttaccagtcacagcctcattttgatccttacgcgcctactcctcaagctccggcgccttaccgatcagaaactcaattcgaaccccacgcgcctccgccttaccgatcagagccttactttgaaactccggcaccaccgccttcatttggtcatgtgagtcatgttggtcaccaatcacccaacgaatcttacccaccggaacaccaccgttacggaggttatcaacagccgtctaattccttactggaaagtcatggagatcacagtggagtcacgcacgtggctcaccatagctcaaatcagccccaatcgtcttctggtgtctaccacaagcctgatgagaatcgtcta

SEQ ID NO: 98727 - DNA, 405 bp, Arabidopsis thaliana columbia
gcacgcgtacgtgagcttggatcctctatagcggccgcgctttatctttttttttttttttgggaggaaataagatctgataataatatgcatagaaatagaaatcgatccctgcccttaacgaacgaaatcacatagtacagtacaaccttgtaaaaagctagcagataaaaagagaacattcagtagaagccaaagagatgcagaagaacaaagctcaatgacttgaagcggctggagaagtaagctctctagaagacaacagtgtcgagcatagtgcctagtgtctgaacaatgttggatgacatgaggttcgagacatgttcttccagatgcttctttgcatcttgtcttcccacattcacaattgccagcttctctggtgacaactcgtcctcctcttga

SEQ ID NO: 98728 - DNA, 742 bp, Arabidopsis thaliana columbia
  unsure (1)..(742): unsure at all n locations
nnnnnnnnnnnnnnnnnnnnnnnnnnnnnnnnnnnnnnnnnnnnnnnnnnnnnnnnnnnnnnnnnnncggccgctgctaacataattaacatgaaaacgacacaaacgtaaaaaattgacacgaaatataagagagaaacataaaaagcgttacatgtaatacaaagcaaaccccacgctccgctcttagattattcatccaaaagatgaacacacagaaactgtcttcaagctttaacgaaaacgaaaaatcttcaacggattaaaacctcaagaagctctctatccctttttgtcaatcgatctccacaatctgaggccttctctctgcagctttcttgcgtataaagataccccatctcaaagcagctttaagctttagccatccaacaacagctttccccgagcctctattacgttctcttcggtacgtgttatcgatctgagcttggtacgggatgctataaccgtaacaagactcatcagtctgaccaaaccctccttgtgttcccacagtgttcacaccgataccaaacgtcttcaacagtctctgcatatcgtcagtctcaagcatttcagaactccttagtctgatttcttcgctgaaaatgtcttcaagaccttgtcctgcagctcttggtggacaccaatcttctccattgtatgagctngaatcattggagctntccatcgacctggtgtagtctggtaccgtgcaagggaatganggtaataaatgggt

SEQ ID NO: 98729 - DNA, 521 bp, Arabidopsis thaliana columbia
  unsure (1)..(521): unsure at all n locations
aagttaatccttcttcatcttcctctaccattacaacaaactaactaaaatgttacattcaaaccaaaagggcatcagaagagagaattaagtttcagacattgccaatggctggtcacaaaaaacaaaactcttccaccatttttcacgagaactccctcccaagcttctgaattgcacaatacatcttcctcctagacccaacagcattaatccccatatctttaagatcctccaatgtcaacaatggtaacacttgttcatcaacttcatgcatctcaaacattggccaatatctccctaaccctaactcttgtaaccatatcttcactccttcttttcctcttcctccactttgccaatctcctaacnattcnacctctctattctcgtaccgncttcgtctttcatcgggtctcggatcttctctggtggaancctaaaccttctntccnccaattctcanccctcccctctctccccncatgattccancctggcaaaacgttngggcattgnaa

SEQ ID NO: 98730 - DNA, 475 bp, Arabidopsis thaliana columbia
cccacgcgtccgattcagagctcaataattaactgattcgaaatggcgaagatgtaccggaagttggcactctgcggtggtgagggaggacaagaatgggacgacgatgtatatgagggtgtaagaaaagtgtatgtagggcaagatctcaaccgtatcacttacatcaagtttgagtacgtgcaggaagacggcgaagtagtaacaactgaatatgggacaacaaatcagcaccctaaagagtttgtaattcaatacccggacgaacacatcatagcagtggagggaagttaccaccaagtggctctcattgccacagaggtgattacgtccctcgtcttcaagacctcaaagggtagaaagtctccattgtttggtccaaacttacttggaattacgaccggtacaaagtttgtttttgaggatgagggaaagaagatcgtaaggtttcatggacgggcaggtgatgctgtcg

SEQ ID NO: 98731 - DNA, 531 bp, Arabidopsis thaliana columbia
  unsure (1)..(531): unsure at all n locations
nnnnnnnnnnntatagggacagctggtacgcctgcagataccggtccggatttcccgggtgggcccacgcgtccgcccacgcgtccgcaagaatttacagtatttgaaaaaatacaaaatggcgaaaatctaccggaagttgacaggctacggtggtgaaggagggcgtgaatgggacgatgatgtatatgagggtgtaagaaaagtgtatgtaggacaagatatcaatcgtatcacttacgtcaaattcgagtatgtgaaggaagacggccaagtcgtaacaactgaatatgggaaaatcattcaacaacccaaagagtttgtacttcaatatccggacgaacatatcatagcggtggaaggaaactatcgcggagtggctctatgtgccacagaggtgatcacaaacctcgtcttcaagacctcaaagggtagaaagtcaccactgtttggtccaaacttgcttggaattacgaccggtacaaagttcgttattgaggatggaggaaagaagatcgtacggtttcatgg

SEQ ID NO: 98732 - DNA, 1598 bp, Arabidopsis thaliana columbia
  unsure (1)..(1598): unsure at all n locations
atgatactctnnnnnnnnnnnnnnnnnnnnnnnnnnnnnnnnnnnnnnnnnnnnnnnnnnnnnnnnnnnnnnnnnnnngtccgagcgttggccaaatctctctcacttccacaggtttctctctccggccaaatctaacctccggggaacgtcgttggtcacttatcaccgagggaaaacaaaaaatggcgactttggttgatcctcctaatgggataaggaatgaagggaagcattacttctcaatgtggcaaactctgttcgagatcgacactaagtacatgcctatcaagcctattggtcgtggagcttacggtgttgtctgctcctctgttaacagtgacaccaacgagaaagttgctatcaagaagattcacaatgtttatgagaataggatcgatgcgttgaggactcttcgggagctcaagcttctacgccatcttcgacatgagaatgtcattgctttgaaagatgtcatgatgccaattcataagatgagcttcaaggatgtttatcttgtttatgagctcatggacactgatctccaccagattatcaagtcttctcagcgtcttagtaacgatcattgccaatacttcttgttccagttgcttcgagggctcaagtatattcattcagccaatatcctgcaccgagatttgaaacctggtaaccttcttgtcaacgcaaactgcgatttaaagatatgcgattttggactagcgcgtgcgagcaacaccaagggtcagttcatgactgaatatgttgtgactcgttggtaccgagccccagagcttctcctctgttgtgacaactatggaacatccattgatgtttggtctgttggttgcattttcgccgagcttcttggtaggaaaccgatattccaaggaacggaatgtcttaaccagcttaagctcattgtcaacattatcggaagccaaagagaagaagatcttgagttcatagttaacccgaaagctaaaagatacattagatcacttccgtactcacctgggatgtctttatccagactttacccgtgcgctcatgtattggccatcgaccttctgcagaaaatgcttgtttttgatccgtcaaagaggattagtgcctctgaagcactccagcatccatacatggcgccactatatgacccgaatgcaaaccctcctgctcaagttcctatcgatctcgatgtagatgaggatttgagagaggagatgataagagaaatgatatggaatgagatgcttcactaccatccacaagcttcaaccttaaacactgagctctgagctcaagtcttgtttgtacgggtaatttacagaaaacttcttcttcttatgtctgattgtcatcatagactcatagtgtatatagtcttgaaaaataagatgaagactaacttatagtttaagcgaatagtgatgccatggaagctctgttttatttaattacaagcttgatgtgtgtctgtaacatatgtacatagagagagctgttttttttttttaattacaagtttgatgtgtgtctgtaacatatgtacatagaaagagctgtgttttttttttnnnnnnnnnnnnnnnnnnnnn

SEQ ID NO: 98733 - DNA, 1586 bp, Arabidopsis thaliana columbia
cgggcgaccacgcgtccgcgttgaccaaatctctcactctcaccagccaaatctctccaacttcctctttctctccacccaaatctcgccggcgatcgtcactgacgaatctgattcgtccccaacactcaacgggaggtagaagaatggcgactcctgttgatccacctaatggaattaggaatcaagggaagcattacttctcaatgtggcaaacacttttcgagatcgataccaaatacgtgcctatcaaaccgataggccgaggcgcgtacggtgtggtttgctcttcggttaacagagagagtaatgagagagtggcgatcaagaagatccacaatgtgtttgagaataggattgatgcgttgaggactcttagggagctcaagcttctacgtcatcttcgacatgagaatgtggttgctcttaaagatgtaatgatggctaatcataagagaagctttaaggatgtttatcttgtttatgagcttatggatactgatcttcatcagattattaagtcttctcaagttctaagtaatgaccattgccaatacttcttgttccagttgcttcgagggctcaagtatattcattcagcaaacattctccatcgggatctgaaacccggtaacctccttgtgaatgcaaactgcgacttaaagatatgtgactttgggctagcgaggacgagcaacaccaaaggtcagttcatgactgaatatgttgtgactcgttggtaccgagccccagagcttctcctctgttgtgacaactatggaacatccattgatgtttggtctgttggttgcattttcgccgagcttcttggtaggaaaccgatattccaaggaacggaatgtcttaaccagctgaagctcattgtcaacattctcggaagccaaagagaagaagatcttgagttcatagataacccgaaagctaaaagatacattagatcacttccgtactcacctgggatgtctttatccagactttacccgggtgcaaatgttttagccattgatctgcttcagaaaatactcgttcttgacccttcgaaaaggattagtgtcacggaagcgcttcaacatccatacatggcgcctttatatgacccgagtgcaaatcctcctgctcaagttcctattgatctcgatgtagatgaagacgaggatttgggagcagagatgataagagaattaatgtggaaggaaatgattcattatcatccagaagctgctaccataaacaacaatgaggtctctgagttttgagttcaagtcttttgcaggtactgttcagagagatctttcaacaacttaaacttatttattttcatgtttgcttcttgaaatgttgttaataatagtgtcgaagaagaagaacaataactttaaattatgtgatatgtttgtgtcatggggctttgttttgtttttggttacaagcttaagtgtctgtaacgtttgtacataagtgtatgtgtccttaaaacttcatactctgtctctgatcttattgttggtgatttttcttattgaagattttcgaatgttcaaagagcaaaccattggattaaaaaa

SEQ ID NO: 98734 - DNA, 537 bp, Arabidopsis thaliana columbia
  unsure (1)..(537): unsure at all n locations
nnnnnnnnnnnnnnnnnnnnnnnnnnnnnnnnnnnnnnnnnnnnnnnnnnnnnnnnnnnnnnnnnnnnnnnnnnnnnnnnnnnnnnnnnnnnnnnnnnnnnnnnnnnnnnnnnnnnnnnnnnnnnnnnnngagctaaaaccacttaaaagcccattaagaatatcacttaggcccatattaaacaacacaatttcaatcattcaacaaaacatagaaacaaactcattgttgttctgagcggaactacctccttcagaaacagcctcttgagccaacactttccatttctcagcattctttctaatctctttaccttgctctgcctccataacttcttccacacgtctcacaaactcttctcttctcacgaacccatcactggctgctttaaccctaactccaactttccacacatcctccatgaacttagcatttggagggctgatctgcccaatgaggcataccaatcattggaactcccaaattcaatccctttaagggggagttccatccacagtgggggaagaaacaaccga

SEQ ID NO: 98735 - DNA, 521 bp, Arabidopsis thaliana columbia
tgacgtcgcacgcacgcgtacgtaagctcggaattcggctcgagcttacatcctgcgagttcatccataaaaacatcccttgtctcagaaaaaccatccaagatttagtctcatcatcatcatcttccggaggtggtagtagtcatgtcgccggcttgattcttgatttcttctgcgttggtttgatcgacatcggccgtgaggtaaaccttccttcctatatcttcatgacttccaactttggtttcttaggggttctacagtatctcccggaacgacaacgtttgactccgtcggagttcgatgagagctccggcgaggaagagttacatattcccgcgtttgtgaaccgtgttcccgccaaggttctgccgccaggtgtgttcgataaactctcttacgggtctctggtcaaaatcggcgagcgattacatgaagccaagggtattttggttaattcatttacccaagtggagccttatgctgctgaacatttttctcaaggacgagattaccctcac

SEQ ID NO: 98736 - DNA, 726 bp, Arabidopsis thaliana columbia
  unsure (1)..(726): unsure at all n locations
gatcctaggccgtcgctggcccccgtccgtaagctcggattccggttcgagcgagaaaaaaaaatggggttcgaagacatcaacaaatatggttgctcttctcttatctcttcttattctgattttcactctttcctctcaagttaaagtcgtcgaggctacaagtcgcaaacttggtaagtacttatccttagacgcttataatttaatcacctcgcaatcatcggatcgcataagctaatatgttaattaaaccaaaaatgattaagaaattcacttgaattttatttgttcacctatgcgatttgtgcacttgatgtcgtagcaaacggaaggcccatcgtgtggactccggcatctagatcatgtggagcttcccatgcatcgtggaagaagaataatggaccttgtaaacgtcctccgagaacagctcctgcttcttacaactctccttaaaaccataaaacacatttttcggggttttttttttttttttttttttttggaatctttggctgatttgaaacaaacaaattgtatggtttttgtatgaattagcgtgtactcaaattatgaactatgcaactccatataacctttttccgattgtgtagatcgtcaaaatatgtaccaattttgtattttngttatgagatatatgtagcaaatttcagnnnnnnnnnnnnnnnnnnnnnnnnnnnnnnnnnnnnnnnnnnnnnnnnnnnn

SEQ ID NO: 98737 - DNA, 497 bp, Arabidopsis thaliana columbia
aggtgcactatagaaggactatgacgtcgcctgccccccttccttagcttggaattccgcttgagggagactggagctgacccttatggttggcagtttgggtggaagaaaatggataagaaagctaagaaaatggaacgtttcatatcatctaatgctagtctctaccaggagactgagattcttgctgatcttgaacagactttcaagagaatgaagagcaatgaatctgctactgacaatcttttggagtatcagaaaaaagttacatggaaaagacacgaagtgaagaatctgcgggatgtgtctctttggaaccgtacttatgactataccgtcattctcttggttagatcagttttcacaatccttagcaggactaaacatgtttttggcattagttacagagtggaagcaagtgatgttagctctgcagattctgatttttttggccgcagccactccgtttctactattttaactcctgtatctcataa

SEQ ID NO: 98738 - DNA, 625 bp, Arabidopsis thaliana columbia
  unsure (1)..(625): unsure at all n locations
aaacaccacatcacaaaagggcaaaacctagatgatgttgttgttgttgatcgtgaggcaggtgatgttagctcctccaaattcagaaaacatagaagatcaataaaccttggcgaagaaagcagcagcttcatgggactatcaactattggatcattcggtaggataaccggccgtggctcgggaaggatcgcagccgaaaacgagctgatggacaaaccaatattgtgagggatcgattccgttttaagggacattttggggcatgggggagcaataaaaaagatgaggggatgaaattgtgagaatgtataaaatatagatgaatttatgttagatcttttgttgaagggaggaagattgaaataaggaaaaagatgtggggaggtgtgtaatgcaaggatttgttgtttctttgattaagtttggccaaaattgtttgttgttgttattatttggttacttgatatgaaagggaaacccataaaaattttgtctcnnnnnnnnnnnnnnnnnnnnnnnnnnnnnnnnnnnnnnnnnnnnnnnnnnnnnnnnnnnnnnnnnnnnnnnnnnnnnnnnnnnnnnnnnnnnnnnnnnnnnnnnnnnnnnnnnnnnnnnnnnnnnn

SEQ ID NO: 98739 - DNA, 525 bp, Arabidopsis thaliana columbia
ttaggtgacactatagaaagactatgacgtcgcatgcacgcgtacgtaagctcggaattcggctcccgaccagatctgctttcgaagacgaatctagctattagccatggacaaaccgtacggatacgcgagcgtgagcatgagcggcatagatcgttccgccggaaaggatattgatcttgagatgggagtcggagaagcgacgctttatcctgggctaagttacggcgagaatcagctccgatggggatttattcgtaaggtctatgggattctctcagctcagcttcttcttacgacgcttatctccgccgtcgttgttcttaatcctcctgttaacgatctcttgaccggatctcctgggattcttctcttcctctgcatcgttcccttcatcttaatctggcctctgcacatttaccaccagaagcatcctgttaacctgatcctccttgccctcttcactgtttcattgagtttcactgttggtgtcagttgtgctatgacagaaggacgaattgtgct

SEQ ID NO: 98740 - DNA, 458 bp, Arabidopsis thaliana columbia
aaaagagagaaatgggtaactctttgatctctcttctctcaatcttccacttgctggtgttatggggatcctcagtgaatgcctattggccaccatcacctggttattggccaagctccaaggttggttccctcaacttctacaaaggttttaggaatctttggggtcctcagcatcagagaatggaccaaaatgccctcaccatctggcttgatagaacctcaggaagtggattcaagtcagtgaagccattcagatcaggctactttggagcaaacatcaaactccaacctggctacactgctggagtcatcacatctctctatctatcaaataatgaggcacatccagggttccatgatgaggtagacatagaatttttggggacaacatttgggaagccttacacacttcagacaaatgtgtatattagaggaagtggtgatgggaaaatcatt

SEQ ID NO: 98741 - DNA, 482 bp, Arabidopsis thaliana columbia
ggcacactttggcatatgataaatgttggacggttcggaccgacttcaagcagtaccaagtccttaaacaaaatccattctggtggacacaccacagacatgatgggaagttgtggaacttgaacaattaccgcactgatgtcatccaagctcttggaggtgttgagggtattcttgagcacacattattcaaggggacatatttcccgacatgggagggacttttctgggagaaggcgtctggttttgaggccccgatgaaacataagaagctgactaatgctcagaggtctggtctgaaccagattccgaatacaagattcacgctctggtggtcgccaacaattaatcgagcgaatgtgtatgtgggtttccaagtgcagttggatttgacaggaatatatatgcacggaaagattcctactcttaaaatatctttgattcagatattccgtgctcatttgtggcaaaaaatccatgag

SEQ ID NO: 98742 - DNA, 471 bp, Arabidopsis thaliana columbia
gaattcagtgcggatcttcatgggagccgatttattcagcaaaagctggggaattgtaaaccagaagagggagcagctgtctttagggaaattcttcctcatgcttgcaaactcatgacagatgtgtttggaaattatgtcattcagaagttttttgaatatggaaactcaacacagagaaaggaactcgctgatcaactcatgggacaaatagtaccacttagtctgcagatgtatggttgtcgcgtgatacaaaaggctcttgatgtcatagaacctgatcagagagttcgtttagcacgtgaactagacgggcaggtcatgagatgtgttcgggaccaaaatggaaaccatgtgatccagaaatgcatcgagaacatcccggcagacaaagttggtttcatgttatatgcattccgtggtcaagtttcctcgctctctatgcatccttatggctgccgtgtcatacag

SEQ ID NO: 98743 - DNA, 524 bp, Arabidopsis thaliana columbia
  unsure (1)..(524): unsure at all n locations
tacccagcagtctccaggtgctcctgggagctaatggtagtcagtctgggtatgcccaaccagcagcttcagggtatggacaacctccagcgtatgggtatggtcaagcgccacagggatatgggtcttatggaggatacacacaacctgctgctggtggaggttactcttcagacgggtctgctggagccactgctggtggtggtggtggtacaccagcttcacagagtgctgctccacctgctggaccgcccaaagcatccccgaaaagttgatatgtgtatggataaatttctactgttatacaaaacatgcttccatgctcttatctttttcttgaggatttatcaatgtttgtgtttcacattttagctcttgtctgtcaactctctttatattaaagataatgttacgttttagcctgttaaaaaaaaaaaaaaaagnnnnnnnnnnnnnnnnnnnnnnnnnnnnnnnnnnnnnnnnnnnnnnnnnnnnnnnnnnnnnnnnnnnnnnnnnnnnnnnnc

SEQ ID NO: 98744 - DNA, 481 bp, Arabidopsis thaliana columbia
cttaaatgttcttccgcctttgacgccttaatctcatctccacaacccttgcagtcaagttgatgctgttgggatcaaagagtagcaaacaatacgagagcagaagaacttacttatagaaaaaaatgggaatttcaaaaccactccctctattttcgattttagtcctctatttttcactctacaccattacaccaacttcttcattagcctccctccaagatcaattcatcaactgtgtccaaagaaacacacatgtttacttcccacttgagaaaacgttctttgctcctacaaaaaatgtctctatgttcagccaagttcttgaatcgacggctcaaaatctccggttcttgaaaaaatccatgcctaaaccgggattcatattcagccctattcacgagtctcacgtacaagcttccatcatttgttccaagaaactccaaatgcatctccgtgtcagaagcggcggtcacgacta

SEQ ID NO: 98745 - DNA, 411 bp, Arabidopsis thaliana columbia
cggacgcgtgggtttttgaatcattcatgatttcttagctctctcaaaaaaatggcgtacaaatccctaaattcaatcaccaaatctgatatcgaagctctaggaatctccggtgatgtctccgagaagcttctcagagatctcgaagacattattcacggttcatccacgccgccggagacgtggattcagatttctcggcggatccttcaccctaatctccctttctcttttcaccagatgatgtattacggttgctacaaggatttcggacccgacctacccgcttggatacccgacccgaaggttgcttctttaactaacgtaggcaagttattagaaaagcgaggcaaagagtttttaggtggaaattacaagaatccagtttcgagtttctccagttttcaagag

SEQ ID NO: 98746 - DNA, 771 bp, Arabidopsis thaliana columbia
aatacgactcactatttggaaagctggtacgcctgcaggtaccggtccggaattcccgggtcgacccacgcgttcggcaaaatccttgtcgaagctcgctgctgcaaccatgtccgacgaggagcatcactttgagtccagtgacgccggagcgtccaaaacctaccctcaacaagctggaaccatccgtaagaatggttacatcgtcatcaaaaatcgtccctgcaaggttgttgaggtttcaacctcgaagactggcaagcatggtcatgctaaatggcattttggagctattgatatcttcaccagcaagaaactcgaagatattgttccttcttcccacaattgtgatgttcctcatgtcaaccgtactgattatcagctgattgacatttctgaagatggatatgtcagtttgttgactgataacggtagtaccaaggatgaccttaagctccctaatgatgacactctgctccaacagatcaagagtgggtttgatgatggaaaagatctagtggtgagtgtgatgtcagctatgggagaggaacagatcaatgctcttaaggacatcggtcccaagtgagactaacaaagcctcccctttgttatgagattcttcttcttcttctgtaggcttccattactcatcggagattatcttgtttttgggtgactcctattttggatatttaaacttttgttaataatgccatcttcttcaaccttttccttctagatggtttttatacttcttctaattgattgatt

SEQ ID NO: 98747 - DNA, 255 bp, Arabidopsis thaliana columbia
cacagggctaattttattttcagcccaaaccatttcagatccataaacccgggggaattacgggacgacaaaggccggcaggatataatcctccggtacacaagccggcgaggaatgaaaccccgacactaagccccgacatggggaaacgccgtagaaagacaaaataaaacatgatgggtgattttacacataaacatagttctctctttaaccagataaaccaagatcgaaatttaactggcttcggaaatt

SEQ ID NO: 98748 - DNA, 560 bp, Arabidopsis thaliana columbia
atcaataatcaactaagaaatctattgactttaatttcaaactttgacaaacccacatacgaatacagttgaccaaaagggaggagaagaccaaggacgagtaataataatacaggacacctttttttttttttttaatttaaggaatcttctgtatcaccaacgagtattacagaatctaaaacaaccttggcacatacgtatatatgcagtatgtaactcaccacaataaaaatcatagaacaatatacaacgcatcatcatcctactacaagtcagaattttgcaatccacgaagcagaatagtaaacggggaagaagataaagaggtgctcagatcataatacctctcatgtaattaatcgagcacctttccgtactctggtttggtccaagctgcataggatacagggcgcgcccacggtatggtttacccagtgggtgagatccagtgccggtttaggtcaacgaggtagtaaaaatccagacttgtgtgtgtcgtcttggagagctttactagttatctgtgtccaagcatttctcaagggttttactactgg

SEQ ID NO: 98749 - DNA, 529 bp, Arabidopsis thaliana columbia
  unsure (1)..(529): unsure at all n locations
nnnnnnnnnnnnnnnnnnnnnnnnnnnnnnnnnnnnnnnnnnnnnnnnnnnnnnnnnnnnnnnnnnnnnnnnnnnnnnnnnnnnnnnnnnnnnnnnnatgcacgcgtacgtaagcttggatcctttagagcggccggcctaaagaagtcaactttatgagttgctttacatatttatcggacaaacaatttgggtacacttacaatcatgatctcataatctgacgattttttgttcacttggttacaaattagtttgagagacaaaagagaacaaagacagggatttgatttgagatctggattctcatatttggagatcgtctaaagataaatcatcatttgcagtcaaaagcttcaatttcgttatgaactgtggaggatcgtccaggctcgtggaaccgaggattacttctcttttgagttttgtggatagtttgtggcatacttttaactctgatctagtcgctccaccgacgatgaacacaaatattcgctgtcccatcttcctgaaatcgcttgacgcatgt

SEQ ID NO: 98750 - DNA, 571 bp, Arabidopsis thaliana columbia
  unsure (1)..(571): unsure at all n locations
atgatcctgccagctacnnnnnnnnnnnnnnnnnnngtaaaaccctaaaatctcaacgaaagggacgaccaattgttcgacgccacgcgtccgggaaaaccggaatccaattgttcgacgattcgaggaatgggtttttctccgtttccgatttaggattcgattcgagcctaaacagctctaattaccacccaattggtgggttattcgccagcgttaatcagactaatccattcgcatccctctcgtcctcggatctttccaacagaggcaacaacagcttctctacccagctcaatgatctctacaccaagtatatgccgggaaaagaggaggaggaagaagtagttaatggcgagaagaggaagaggaagaagaaaggtgggctcacactgaagattaagatcgctaatccttcgttgcggcggctattaagcggagcagtagctggagcggtgtcgagaacggtggttgcgccgttggagacaatcaggacgcatctaatggtgggaagtggaggaaactccagcactgaagtgttcagtgatatcatgaagcatgaaggttggac

SEQ ID NO: 98751 - DNA, 343 bp, Arabidopsis thaliana columbia
ggtgaattagtgatatttaggttaagctacacgtggaggcttattattcgttgatatcaactattgtccatgtctgtaagcctctccctacgacagaggttttcagagcagtaacaaacaacttacacatgagagttaacattgcacagtctgagattatactcgctagattcttttcaagtcttgaagaacaacatgtgcagcgtttcttccaggtgcacccataactccgcctccaggatgagctccgctgccacacaagtagagacctttcaaagggcttctgtaatttgaccatcctttcacagggcgcatcaggaagagagagtctaatcccatggca

SEQ ID NO: 98752 - DNA, 517 bp, Arabidopsis thaliana columbia
  unsure (1)..(517): unsure at all n locations
ttctatatacgattcattttagggaaggttggtccgcttgcaggtcccggtccggaattaattccggggtcgacgagctcattagtcggcggccgcccttnnttttttttttttttttttttttttttttttttttnnaaaacctaaagtaagaaccttaaagatcaagtgacagatacaaacattgaatcaaattttttaaacacctttttaaatttatccaaaaaagcctttacacaccgtgctattcccacccaattcaacctcacatcaaagaacttatattgcagcctttttttgctacttgctaacacagcatcggaagtgattcacgatctatcaatttggaatcaaaatataccaggaggagagaggagggttttgatcaagaaacaagcgtacgcgatcaagccacggtgctcttctccaccatcagcaagagataccaccaatgtagagcaggttctagtggaccacaacacaaacaaagccgnaggcacaaaccgaaccggccttg

SEQ ID NO: 98753 - DNA, 386 bp, Arabidopsis thaliana columbia
  unsure (1)..(386): unsure at all n locations
nnnnnnnnnnnnnnnnnnnnnnnnatctacaatcttattgtatataataagggggaagcatcataggtcaggggtgatcaaaagccaagtttcggaattacataaacaaatgttgcacaacacgatacagcagaagcagattctcttacttccgccacaacatttaccatcagagatcaacccgtatggtaatacaggtgtgagcaggtttggattaagtcgccttctcatcttctggtttagcttccatggccgacatacgggccacatcagcaactagtctctcaacaggcaccttgctcacatcccatcgcatgcctatatctgaaactaagcgactggtgcagtacatgccatagccagccacagccaaaccaccaaaacct

SEQ ID NO: 98754 - DNA, 508 bp, Arabidopsis thaliana columbia
  unsure (1)..(508): unsure at all n locations
gttacgataacacgggcatccttacgactataagatttcatgaagtgattgcattgttttgaagcttcttaaatctcagaagctacataaagcagaagaacgtaagctagaatttcttctgctgtaagaatacactccaatacgcaaattaagttgaaagaatgattacaataacggaactcagacttcaaagttgaaagaatggtccaattgtcaacatggaagctcccaatagccgagatttgaatcaaggtgatgccgtctactcgagttagtagaaggagaaaaaccaacgaacagtagtgaagctttctaatcttctattgcacacagacgctttaagtatccgtaagtcaatatcatcgggggtccccaagccggcatggctaaagactctgggggcccaaccccctatagacccctttccggccattttngggnggggnttttncccnctttttccggggggggntntttncttggggcccaanncnnggngggtttntgg

SEQ ID NO: 98755 - DNA, 318 bp, Arabidopsis thaliana columbia
ggtgaaccaacttagaatagatattccttatgaacctaaaagatcactgttgctgaaccaaatcatatagtttctaaatcagctcgacaaaaggtaaacaagcatttcattcaggtttcttcatgttcaggcaattgtcagcagcttgtccaaacagctcttgtacttgctttagctccttctctgcagcctctagttgcttttggagttcttgaccaacaagatcattttccacctggagttcagcgattcttttgagctgagcaccttcaccaccttctgacaaaggaagtgcagcaaccaaagcatcaaactgtt

SEQ ID NO: 98756 - DNA, 772 bp, Arabidopsis thaliana columbia
  unsure (1)..(772): unsure at all n locations
nnnnnnnnnnnnnnnnnnnnnnnnnnnnnnnnnnnnnnnnnnnnnnnnnnnnnnnnnnnnnnnngggtggaactattttcttttttttgtctttttatacaaagtaatgtttacatgttgaaaaacgaagagtgccagtattactagagaaaatcgtcattctcttggtactaggaattgaggaatttagaaacaaataactaatgatcgaatctaaatctgtatgtgcaaaaatctctctaattaaaacgctttttttatatcttctccaaagatctgcattttctaatccttaacaacatttctttctcttttctttttcctacttttccttccatcacctcacaacactgtctcctcggtgccttgttccaatactcaggatccgtcttcattgaagtcaccaatatcctcttcactttagttaatcgagtatgctcaatctttccgcaatgaccatagttcttatcccctatgctataccaagttttcgtcccactatcccgtacatcctcggcaccatccatgaaataagtgaccggacgctcacaggggtcaggtttcaagggccgagtgttaaacacgaaaggtccatcgctggaagaccgccaagttttgaaggtctgcaacggcgtagtcagctccgtagcagtcaagaagtaagtgtatatctgaatggtgtatccccaagcggacgcgtggnnnnnnnnnnnnnnnnnnnnnnnnnnnnnnnnnnnnnnnnnnnnnnnnnnnnnnnnnnnnnnnnnnnnaa

SEQ ID NO: 98757 - DNA, 549 bp, Arabidopsis thaliana columbia
  unsure (1)..(549): unsure at all n locations
cnnnnnnnnnnnnnnnnnnnnnnnnnnnnnnnnnnnnnnnnnnnnnnnnncgcgtacgtaagcttggatcctctagagcgttcgcccttttttttttttttttttagtcaataacaaataatttcattacatactgattaaagaagattacaaaaacgaatatataaagtataaataaaagaatatcgtatctaacgtatactaataggtattcaaaacagagtcgagcaagaatctgttttagggtcaaacaaagccggtaacaaatattttctcccattcagtcccttaacgttataactcccaccggtcgttgcatccacaagtaactctccagcataaccaggatacgaacctttcccatagactccagtacaagccgatccagcctcaagcggtgccgttttaggcccttggtaatatccatctccgaacgggttcgttgccgtcgcagccatgagactcgccaagttaatcaccatcccgtctaaaccaacgtcgttgttgggcgccactagtggtgggctttggcggccgtaaaccggcgcg

SEQ ID NO: 98758 - DNA, 460 bp, Arabidopsis thaliana columbia
  unsure (1)..(460): unsure at all n locations
tttttttttttacgagaacggcccaatacaaaggctcattatttaggcccattattaaaatgtaaacacaatgaacaacagcccaataagatccatgacaaagacacccacaaagatttagatttcaattagtaaagttagcgatcgtagcgccgggctgagtcgcctgagcttcagccgccggtttcacttccttcgacggctcaacatgttttccggtaagctccacaggtaaatcagcagcaacacctttcaagtagaaagtgtaaaacagcttcgtaggatacacaagctgacgaagcttgacctgtccataagctccttcaaacacgccggagccaccggtggatagcaagcggacgcgtngggtcgaancgggggattccggaccgggaactgcagggngtacaagtttnccnatagtgagtcggattaanagcttgggggaataatgggcaaa

SEQ ID NO: 98759 - DNA, 1268 bp, Arabidopsis thaliana columbia
  unsure (1)..(1268): unsure at all n locations
nnnnnnnnnnnnnnnnnnnnnnnnnnnnnnnnnnnnnnnnnnnnnnnnnnnnnnnnnnnnnnnnnnnnnnnnnacactgcacgccacgcgtccgctcaaaagcacgaggaaggatcaaatcggaaacttaacagaatttagctaccaattactgtctccggcgagatctcaatttgatccttcacggtggcgtcgacgtccgggcaacaacaagctctctcgagaagaaagccattatcatcatcatcatcatcttcatcatctcctcctccgtcttcctcacctgttcgagctcctgcggcgaagaaaccgagtccggaatacccattttggcagcagaactggtttatcggtctgctattcgtgatggctttaggattcttctgtctcgctatcttcctttacctaagtctcgatcctgattccggttacacgtctgcctccgccgctgcttctggtaaagaaggtgtcgagattacttatggaagtgcgatcaagttgatgcaccgagaaactaaatttcgattacattctcacgatgtgccgtatggatccggcagtggtcagcaatcagtcactggttttccaggcgtcgttgattccaacagctattggattgttaaacctgtgcctgggacaacagaaaagcaaggtgatgctgtcaagagtggagcaaccttaggttgcagcatatgaagaccagaaaatggctcacagtcacttgcatgcatcttctatatcagggaacttagagggtagctgctttggagatgatacaaattccgatactggggatcactggaagcttataattgaaggaagtgggaagacatggaaacaggaccaaagagtccgtcttcaacacatagacactagtggctacctccatagccatgacaagaagtaccaacgtatagctggtggtcagcaagaggtgtgtggaattcgggagaagaaggcggataacatttggttggcagcagaaggagtctaccttccccttaatgagagcagcaagtaaggttaagagtgaaaaaacttctctggaggactttgaatcttatctcttactctctaaactcacaatcaagaaaatagagatatatatttcttaattttcgattggtaatacttttagtggcacgaatatatcttgttttggtagatattctgcatttatctcttttttaggtcacccttaagagacactatcttattatcctgatagtaaatccaacaatcctctaaaaatatcgtcttgtctttct

SEQ ID NO: 98760 - DNA, 444 bp, Arabidopsis thaliana columbia
atcttaagtagaaagagtgaaacatggctaatcacaaaaatctcttctttctatgtttcttaataggtttagggttatgtcctgctagacgagcactactctcctcctctgaatccgaggctgaagtcgctgcctatggcgtgaatagtggtttaagtgctggtcttggtgttggtattggtggtggtcctggaggaggatctggcgtggagaaggaagcggtggctatgtaccatgaaaaattatctatatggcagtgtaacggcaattgagtgaagtgtcatatctcgtaagggactatatagtttcacgatttatatgtggcaataaatagagtaatccttcgtataataagccgtagaaaggcggctattggtgaagtttttaaattgtaccacgaccaatattgttgtaagctactactacgtgtgtatcaagttttta

SEQ ID NO: 98761 - DNA, 539 bp, Arabidopsis thaliana columbia
  unsure (1)..(539): unsure at all n locations
tcnnnnnnnnngactcactattgggagagctgacacgcctgcaggtaccggtccggaattcccgggtcgtacccacgcgtccggaaacatggctaatcacaaaaatctcttctttctatgtttcttaataggtttagggttatgttctgctagacgagcactactctcctcctctgaatccgaggctgaagtcgctgcctatggcgtgaatagtgggttaagtgctggtcttggtgttggtattgctggtggtggagaaggaagcggtggctatgtaccatgaaaaattatctatatggagtgtaacggcaattgagtgaagtgtcatatctcgtaagggactatatagtttcacgatttatatgtggcaataaatagagtaatccttcgtataataagccgtagaaaggcggctattgttgaagtttttaaattgtaccacgaccaatattgttgtaagctactactacgtgtgtatcaagtttttataaatggaaatcatagttgttcctacgcgtgacgtagaatctatattaaat

SEQ ID NO: 98762 - DNA, 706 bp, Arabidopsis thaliana columbia
  unsure (1)..(706): unsure at all n locations
catggtggaggatacggtggtggacaaggtgctggtgctggaggaggatatggaggtggaggtgccgggggacatggaggtggtggaggcggtggaaatggtgggggtggaggaggaggttctggcgaaggaggagctcatggtggtggttacggagcaggaggtggagctggagagggatacggtggtggtgctggagctggtggacatggtggtggaggaggaggcggtggtggttccggaggtggaggaggaggaggtggaggttatgctgctgcttctggatacggtcacggtgggggtgctggtggtggagaaggaagcggtggctatgtaccatgaaaaattatctatatggagtgtaacggcaattgagtgaagtgtcatatctcgtaagggactatatagtttcacgatttatatgtggcaataaatagagtaatccttcgtataataagccgtagaaaggcggctattgttgaagtttttaaattgtaccacgaccaatattgttgtaagctactactacgtgtgtatcaagtttttataaatggaaatcatagttgttcctaaaaaaaaaaaaaaaaaaataaaaaaaaaaaaaaaaaaaaaaaaaaaaaaaaaaaaaaaaaaanaaaaaaaanaaanaannaannaaaaaaaaaangggggngncccccctaggggccccngttttgngtccggg

SEQ ID NO: 98763 - DNA, 1479 bp, Arabidopsis thaliana columbia
ctcagctcaatcctcaatctcagtctctctgttgactccgactgttatataaaaccatacaaataccttcagattcactacttcaaacctcaaagcaaccactgaatctcgactttgatcaattgagagagaaatgaacaccggcggtggccaatacacggattttccggcggtggaaactcacggaggacagttcataagttacgatatcttcggtagtttattcgagatcacatctaagtatcgtcctccgattataccaattggtcgtggagcttatggaatcgtttgctctgtgttggatacggagacgaacgagctagtagcgatgaagaagatagctaatgcttttgataatcatatggatgctaagcgtacgcttcgtgagatcaagcttcttcgtcatcttgatcatgaaaacattatagctataagagatgttgttccaccaccactaagaagacagttcagtgatgtttatatctctactgaattaatggatactgatcttcatcaaatcatcagatctaaccagagtttatcagaagaacactgtcagtacttcttgtaccagctacttcgaggactgaagtatatccactcagctaacattattcatagggatttaaagccgagcaatcttctgttgaacgcgaattgcgatttaaagatttgtgatttcggtcttgctagacctacttcagagaatgattttatgactgagtatgttgttacgagatggtatagagcacctgagcttctgttgaactcttcagattacacagctgctattgatgtttggtctgttggttgtatctttatggagcttatgaatagaaagcctttgttccctggtaaagaccatgttcatcaaatgcgcttattgacagagttgcttggcacaccgacagaatctgatctcggttttactcacaatgaggatgcgaaaagatacatccggcaacttcccaacttcccacgtcagcccttagctaaacttttctctcatgttaacccaatggccattgatcttgttgacagaatgttgacgtttgaccccaacagaagaatcactgttgaacaagctctgaatcaccagtaccttgctaaattgcacgacccgaatgatgagccaatctgtcaaaagccattctcttttgagttcgaacaacagcctctggatgaggaacagataaaagagatgatctaccaagaagccatagcactcaatccaacatacggttagaagtgcagcagccccgtgaatgcctggtattacccaataaccatccgaatggctacttagtatctttgcctgttcttttattcatgtacttcttccacatatgtaatcttgtaacttttatttgtttgttcatgttatttactgctagtgattaagtgtagctccaatgtaaagtactccagttattaaagaatatctatagacttttttacttcacataaaaaaaaaaaaaa

SEQ ID NO: 98764 - DNA, 930 bp, Arabidopsis thaliana columbia
  unsure (1)..(930): unsure at all n locations
actcactttagggaaagctcgtacgcctgcaggtaccggtccggaattccgggtcgcccacgcgtccggttttgcttttgaattttcaaccgactctgttcactcacatatctctcttagtgtctactggattcggaatgagatcgatgagatctgggagatgacaacaacatctgcttcctgggttttctctcctttgcccttatctcccttccctccttgtcacttgctcttaccaatcctgacgatgttgcggctattaacagtctcttccttgcactggagtctcctcttctccccggttgggttgcatctggaggtgacccatgtggtgagagctggcaaggtgttctatgtaatgcttcccaagtagaaacaataattctcatcagtgccaatcttggaggagagcttggtgttggctaaacatgtttacctctcttaaagcaatggattttagcaacaatcaccattggaggaagtatcccatccacgttgcctgtttcattgcagaacttgtttctttcaggtaacaactttacaggaaccatcccagaatctctttcctccttaaaatctttgtctgtcatgtccttgaacaataaccttttgtctggcaagatacccgatgtctttcaagaccttggccttatgatcaatatagatntgtctagcaacaatctgagtggaccattacctccttccatgcagaatctttcgactcttacatccttgcttttgcagaacaatcatctttcaggagagcttgatgttcttcaagatctccnctcaggacttgacgttgagacacctcntcatgaccatacagaaagttgtgagataccaattatanaggcgtatctgttacgtactatgtcatcgcttactgaacacctcagtcacatactagcggcattttgacacttccat

SEQ ID NO: 98765 - DNA, 534 bp, Arabidopsis thaliana columbia
gaaaaatagtgggaaagactcctctgagctactctcattcgattttcctcaggcgattttggtgtatggtcgtccctttcactgtatttcttagtcaatagcatcttctccgatcatcgacgtccggagatttcttcggccctctcatacttgagttgttgtaggatttgttgctctggctctggtggtaggtctatgaaatcaacccatatcgtgaatggactgcaacatggtatcttcgtcccagtgggattgggagcatttgatcatgtccaatccgtcaaggactgaagatgacagcaaacagctacctactgagtgggaaattgaaaaaggtgaaggaattgaatctatagttccacatttctcaggccttgagagagtcagtagtggctctgccaccagcttctggcacactgctgtatcgaaaagctcacagtcgacctctatcaactcatcatctcccgaagccaaacgatgcaagcttgcatcagaaagttcccctggagattcttgcagcaacatagactttgt

SEQ ID NO: 98766 - DNA, 380 bp, Arabidopsis thaliana columbia
  unsure (1)..(380): unsure at all n locations
gtcggttattccatcgagtagaccgctcgtgttcttgaagcagagattgttgtttcttactgagtctggtgctggttccttggacttaagaagcatgaagataagagaaactgagtgtgaaggactgaaccattcgcttgnagnaacttatgtttttaatgctgcggaacggtctaaagcttatggattcacatccgagggcgagatcattcacgtattgcttcatggagatataatgaacttcaaatgtagggttagatccaagaagaagtttcaaatggaggagccagtagctttacaatcaatcaaaggctttcctccggttatcaacgaggaaaaggttttcgctttcaatgtatcgacttcagcattatgtcgta

SEQ ID NO: 98767 - DNA, 682 bp, Arabidopsis thaliana columbia
  unsure (1)..(682): unsure at all n locations
atgcnnnnnnnnnnnnnnnnnnnnnnnnnnnnnnnnnnnnnnnnnnnnnnnnnnnnnnnnnnnnnnnnnnnnnnnnnnnntcccacgcgtccgcgtctctctctctcgggtcaaaattagggtttcgtttcactatccagagtgtatacaaaggttgttgtggagcttttatcagatcacaggaataagatggaggtatttggaaaatctcccatggttgttacatctgccaatgttatttacttgtctgcaattctgggtcgcgattgcgatggacacaaatgtgattggaaatgtgagaatgaaaatgtttgtgggaatatgtatcgctgcaaactaactggactaactcatgtctgcgacaagaactgtaaccagcggattctctatgataaccatagctctttgtgccgagccagtgggaggattttccctctctcgtccgtcgaggagcaggcggttaaaggtgttcggaggaagcttgacgccgctgagagtcatccttttgagagctgttcgtttaagcgtcgtcgttcggatgctcaattccatcgctttcctttcaagaagacttatactgcttggaggcctatctggagccccgctggagacagaangaagatggttaagattacatgttgatctccngaaattctgagactgagaggccttttatcttacg

SEQ ID NO: 98768 - DNA, 515 bp, Arabidopsis thaliana columbia
  unsure (1)..(515): unsure at all n locations
nnnnnnnnnnnnnnnnnnnnnnnnnnnnnnnnnnnnnnnnnnnnnnnnnnnnnnnnnnnnggctcgagcgtcatcgtcttcttcttctgattctgattaattccagatgtcttcctgagtcttacggagattaggtcattttcgcctcgactcgaactctgtctcgcagcttccgtgagagagtcatggacacgccaccgacttctcgtatcgcatcttttggtcagacggagattaactgggacaaacttgacaaaaggaggttctacattaatggagctggcctcttcactggtgttacagtagctctgtatcctgtatccgttgtgaaaacaaggcttcaagttgcttctaaagagattgctgagagaagtgccttttctgtagttaaaggaattttaaagaatgatggtgttcctggtctgtaccgaggttttggtactgtcattacaggtgctgtacctgcaagaatcatatttctaactgctcttgagaccactaagatttctgctttt

SEQ ID NO: 98769 - DNA, 662 bp, Arabidopsis thaliana columbia
  unsure (1)..(662): unsure at all n locations
nnnnnnnnnnnnnnnnnnnnnnnnnnnnnnnnnnnnnnnnnnnnnnnnnnnnnnnnnnnnnnnnnnnnnnnnnnnnnnnnnnnnnnnnnnnnccttttttttttttttttcatgcaaagatatatatttcatctatagctattgcccatgaacaagaaccaaaattaggccagatccacaacattttcacgtttattgttttcagattaaaaaaacaaaatctaagtatcaaattcaacaaatgaatcatatagaaagatttacccaggcgagggaatggtagatcggaatcgcatttacacgcgagcggcgataacagcaggcgcggctgaagaggcggcaccaccgaggaaagagaggaatccggtagcagcaggctcttgctcatcaaggaaaagatcttccggagctctaaaagcaccatgagcacagatcaacgcaacaccaatcatcatagccgaaaccagaacagatccaacatcggtgaggaagatcacaaagatactgaacaaaatcaaacaccctaacgtctcacgatcggagaatgtacgaccgaatagaacgatcggctgatccgtgggacggaacaagtagaggaagagccacgacgcgaggagacagaggaggaagacgagagagaaaggatgagtgacgagagagaa

SEQ ID NO: 98770 - DNA, 472 bp, Arabidopsis thaliana columbia
  unsure (1)..(472): unsure at all n locations
nnnnnnnnnnnnnnnnnnnnnnnnnnnnnnnnccataagatagtgtgtttgtagattgtaaatataaaataatgtgattaataaatgataagaaaataacaaaactcttctatcattcattccaaatttccaaaatataaatgtattattgcgtctattatacagagatggggtcatcctaaaaaacaaaagggatacatcatacatctatccaaatgttcaactaaagtccgtgataacttaaaagctctatatggattattatttcttttccgtttgtgatcatttacaccagagattaaactgatcacaaaatcactaccaccaaattgggattttgaggttaattattacataactacaccaataaacccaactaaaactaatacggtttgattattattataaaataaaaaaaccacaaacaaatgaaagatttcttatatactcacaaacgtaaataattcgcgag

SEQ ID NO: 98771 - DNA, 492 bp, Arabidopsis thaliana columbia
agaaaaaactatagtaactaaatttttaaaaatcttacaaaaaaaaatacaatccaaaccatatagtaatctttcgatttcatacacacaatatactaaaagtacaaagacagaatgaaatcttcaaagcaaataacaaaaccagaggttttttttcttcttcgaaatctggtttcaaggaatgtccttaagctcaaattcagagctctctttcttcgtcacttccttctccactgaatcatcatcagtcacaacaacagtaatcacatcagctttatactgatgtttcatggcaaacacaataaaaatcaagaagttcaatgctcccaagacaacaagtaaccagtagaagtagttcaatctcgctttgttaaggttacttctaagccagcttttgtctgtaaccctatcaacaagcgaaacaagcaagctactcacgaagaatcccatcgatatcgtgcttagaaacaatccggtgctcatcgatttcat

SEQ ID NO: 98772 - DNA, 457 bp, Arabidopsis thaliana columbia
agtttttcttcggcattgactttaccaatcacaactttctccgggatcgccgatttatcttcgtttcaaccatgactcgtggaagtcagagagagcgtgaccgtgaaagagctgccgctcgtgctggtggaaagggtaagaatggtgacgatggtttgacgccggagcaacgccgtgaaagagatgggaaagcattgcaagagaaagcggctaagaaagctgctcaagctgcaggtgcgagttctggtggtgcagctggaggaaaaggagctgctgctaagaagtgatgatgatcatttggtttgtcttttgagcatattgtagactttatgtttgaaattgggttgtttagacctgaagctttgactcttgtctgaaatcccattataatgtccttgtgttgaatttgctatttgatgcctttggtgaaatcttatttggtctttctttgatcaat

SEQ ID NO: 98773 - DNA, 1330 bp, Arabidopsis thaliana columbia
ctagggttcttcgttttcgttgttgtgaggaattttgctccgatgtcggcggagagttgtttcggaagctcgggtgatcaaagcagcagcaaaggagtggctactcatggtggtagctatgttcagtataatgtctatggcaatctcttcgaagtttctagaaagtatgttcctcctcttcgtcctatcggtagaggcgcttatggaattgtctgtgctgctacaaactcagagactggagaggaggtagctatcaagaagattggtaatgcttttgacaatattatcgatgctaaaaggactttgagagagattaagcttctcaagcatatggatcatgaaaatgtgattgctgtaaaggatataataaaaccaccgcagagagagaacttcaatgatgtttacattgtttatgagcttatggacactgatctccaccaaattattcgctctaaccaacccttaactgatgatcattgtcggttttttctgtatcagttgttgcgtgggctcaaatatgttcattcagctaatgtattgcatcgagatttgaaacctagcaatttgctcctgaatgcaaattgtgatctaaagcttggggatttcgggcttgcgaggaccaaatccgagactgactttatgactgaatatgttgttacacgttggtatcgagctccagagctgctacttaattgctctgaatacacagcagcaattgatatttggtctgtcggttgtatactcggtgaaacaatgacacgagagcccttgtttcccggtaaagattatgttcatcagcttagactcatcactgagcttataggatctcctgatgactcaagcttgggattcttaagaagtgacaatgcaagaagatacgttagacagcttccacagtaccctagacagaactttgctgctagattcccaaacatgtcggctggtgcagtcgatttgctggagaaaatgcttgtttttgaaccaagcagacgcatcacagttgatgaggcgttgtgccacccatatttggcgccgctgcatgatatcaacgaagaaccggtatgtgtgaggccgttcaattttgatttcgagcaacctactttgacagaagagaacattaaggagcttatataccgtgaaacagtcaagttcaatcctcaagactcagtgtgagagaaagagagagagatatatatccttaaaaggaaactcatcaaaatgctatgttttgttttgctctgcttttgttatcaaatctctgataagtttgataatatgtctgtaatttgaataacatcctaaaaaattgaaaaaaaaaaaaagaacaacc

SEQ ID NO: 98774 - DNA, 543 bp, Arabidopsis thaliana columbia
tgatgatgcagaggtttcacagaggccagcttatccatcttctaagaaagttaaggactgggacaagctggaagctgaagtgaagaagcaggaaaaagatgagaagctggaaggagacgcagctttgaacaaattcttccgggagatataccagaatgcggatgaggatatgaggcgagcgatgagcaaatcatttgtggaatcgaatgggacagtgctgtcaacaaactggcaagaggttgggactaagacaatcgagagtactcctccggatggcatggagctcaagaaatgggagatctgatctgatatgatatgatgatcctttcctttttatgcagttgtgaattttgcctaaatgtagacaaatcttgaaacctggtccctttcttcctgtaatgaggatcctaaggtttttgcttttttgttaaatatggctttctacccaaaaaaaaaaaaaagggcggccgctttaaaagattccaggttaaggaagggggcaagggacgtcatagcttttctatagttcacctaatagtattc

SEQ ID NO: 98775 - DNA, 407 bp, Arabidopsis thaliana columbia
gcgactaaccctaattggatacttggtgcgggtttccttgcgggcgagtatttctgtgttccattgtgggacattgctcagactcaaatcatgagagagtatccggccgagtttaccgttatttgcttttatagcattggtgttagcttttggaccgcgctagtcacattgttcactgaagggaatgacttgggtgcatggaagataaaacccgatatagctttagtgtcgatcgtttgctcgggattgtttgggaccttgcataaacaatacttttccacacggtgggcaacttccgggccaaggggcctttatttgttgcaatgttcaagccattgtctattgcaattgctgttgcaatgggagttatcttcctgcgagattctctctacatcggcagcttgatc

SEQ ID NO: 98776 - DNA, 940 bp, Arabidopsis thaliana columbia
  unsure (1)..(940): unsure at all n locations
atatctcccaggccacccaactattctccccttttataaaaacccctccctaccctttttcgggtttgagggaggtgtctacaacaaaatggataagttccccgcttctcgggggcctaaacccttcaaagcccgtgggcgaaacccaccccctttttttcttcccccccccccccaacgaatctggcgggtcccccccgggaattttgttcccccggggcctgtcccccccccccaaaagaaaaccgcccccgctccggtgttccttttaacaaaggcctacctttggcccccccagctccctgtttctcaagggaatcattggggcagcaaaaaaaacccaaaacccttaaggtccctcgttttnncgcctgtttggttttgataacaaatcattccccactgggcctttcgggacaaggggcccttttttgttccaatgtcaaaccatttttaatgcaaattcttgttcaaatggaagattttttcctgcaaaattctctttcaatcgccagcttgatccggggccccggtaaaaccaatcgggttttcccccgcaaagtggggaaaaccaaagaaatggccttggtcgaagatgataccaagcctacccccagtaggcccaataaagtgccccttaattctccatcgggtttccagaaggtccctctcttggaaagttccaagaccttttatacatgtatgagtatcatcaactagcccccatcccgcctatatatatatgtgtgaaaaaattcatatgtgaattgtctttgtaatttatttgatgagacacaatgtgatctttaattttaggatccaagtgttttctaatcacaatctagcaagtcctttttataaaaaaaaaaaacaagcgcggccgctatagaggatccaagcttacgtacgcgtgcatgcgacgtcatagtaaatctaaggt

SEQ ID NO: 98777 - DNA, 451 bp, Arabidopsis thaliana columbia
tttttactctgtttttgttttcttcgacgactgagataaaagattcatacaagaaaaaagcaaatttcgccactgatggatcctatggagtcgtctagtgaacaggacattgttgaagagagtcaaaagctggttgactcattggacaagcttcgtgttagtgctgcgagttcatcttctaatttcaagaagaagcctatcattattatcgttgttggaatggcaggtagtggaaaaactagctttcttcatcgcttggtctgtcatacttttgattcaaagagccatggttatgtggtgaaccttgaccctgctgttatgtctctaccatttggtgccaacatcgatataagagacactgtcaagtacaaggaagttatgaagcagtataatctgggtcctaatggtggaattctcacttcactcaacttgtttgctactaaattcgacg

SEQ ID NO: 98778 - DNA, 515 bp, Arabidopsis thaliana columbia
atacgactcactttagggaaagctgcgtacgcctgcaggtaccggtccggaattcccgggtcgacccacgcgtccgacttattacaaagtgaagtgattccaaaggcatatcttccgttctgtctaatcttattctttgttttaaacccctccatgcactcctcttgtttatatatttattgcttcttctctaagtttgttgagtcctaatcatctctctatctagcaacgtataaatataaagagagagagcagagaaatgggtttcggctccttcatatctaccatcacttactgtttgttctttcgctatccacataagaagccaaagttcaaaagtgtgagccacctcaaccattaccacaccatgccaatggctcgtccactttctttacagacgatagacctgaaagtaaggatgtgttgcagtggatgtgagagggttgtcaagcatgccatttacaagctgagaggggtggactcggtggaggtgaacctagagatggagagagtaa

SEQ ID NO: 98779 - DNA, 563 bp, Arabidopsis thaliana columbia
aatacgactcaccttagggaaagctcgtacgcctgcaggtaccggtccggaattcccgggtcgacccacgcgtccgcccacgcgtccgcacaaagatcacaaaaatggaggtcgaaggcaaaggaggagaagctggaaccaccaccacaaccgcacctcggaggttcgcacttccggtggacgcggagaacaaagcaacaactttccgactattctcagtcgctaaacctcacatgagagctttccatctctcatggtttcaattcttttgctgcttcgtctccactttcgcagctccgcctctcctccctgttatccgtgaaaatcttaacctcaccgccaccgacatcggaaacgccggaatagcctctgtctccggcgctgttttcgctcgtatcgtcatgggcacggcatgtgatcttttcggtccacgtctagcctccgccgctttgacgctctccaccgctcccgccgtctatttcaccgccgggataaagtctccgatcgggtttatcatggtgagattcttcgccggattctctctcgccactttcgtctcgact

SEQ ID NO: 98780 - DNA, 512 bp, Arabidopsis thaliana columbia
aatttttttaggtaccactatagaagagtctatgacgtcgcatgcacgcgtacgtaagctcggaattcggctcgagaggtgggacagcttcacttttaacgtatattcttcgggagcaaaaagagtttgcctcggctacctgtttcacttttgcaccagctgcttgtatgacttgggatttagcagaatcaggcaagcacttcattactactattatcaatggatctgatctagtcccaacattctctgcttcttcagtcgatgaccttcgttctgaggtaacctcgtcctcatggtcaaatgacctacgtgatcaggttgaacacaccagggtccttagtgttgtttatcggtctgcaactgctataggatctcgtttgccttctatagccagcgcgaaagcaaaagtggctggtgctggggcgattctgcggcctgtctcaagcggcacacaggtcatgctaaagcgtgctcaggatgtagcgcaagccgttgtgcagacccgttcaact

SEQ ID NO: 98781 - DNA, 881 bp, Arabidopsis thaliana columbia
  unsure (1)..(881): unsure at all n locations
nnnnnnnnnnnnnnnnnnnnnnnnnnnnnnnnnnnnnnnnnnnnnnnnnnnnnnnnnnnnnnnnnnnnnnnnnnnnnnnnnnnccacgcgtccggcttacagacaactaagaaaaaaaataaaaatgaagatgtttatctctcctcaaaccctagtactattggcattagctcttgtcctagcttttgcagttccactgaaagcccaagaccggcgacaagactaccttgatgtacacaaccatgctcgagacgacgttagtgtgcctcatataaaatggcatgcgggagcagcccgatacgcctggaactatgctcaaagaagaaagcgggactgtcgtctcattcactcaaactcacgcggacgttacggtgaaaacttggcatggagcagtggtgatatgtccggagctgccgcagtgagattgtgggtcagggagaagtctgactacttccacaaatcgaacacatgccgtgctggaaaacaatgtggtcattatactcaagttgtgtggaaaaactcagagtgggttggatgtgccaaagtcaagtgtgacaatggtggaacctttgtgacttgcaactattctcatcctggtaatgttaggggacgtaggccttactaactatatgtgtacgcagacgaaagaaacttgtccatagaggacgtgtgtgttttctataatttggaataaatgatcaccatctatcaggatgtggtggttcctttgtacgtttatagtttgtataatattttgtcatggaataatacttttttcttgtgtgtgcttnnnnnnnnnnnnnnnnnnnnnnnnnnnnnnnnnnnnnnnnnnnnnnnnnnnnnnnnnnnnnnnnnnnnnnnnnnnnnnnnnnnnnnnnnnn

SEQ ID NO: 98782 - DNA, 838 bp, Arabidopsis thaliana columbia
catggaaattcttacatgagtgccctctttttcgccctcattatacttcttgttgacggattcccagagttgtctatgacggctcaacgtctagccgtgttttataagcagaagcagttgtgtttctatcctgcatgggcgtatgcaatccctgcaacagtgttaaaggtccctctctcgttctttgaatctctcgtttggacctgcctctcatactatgtcattggatacacccctgaagcatccaggttcttcaagcagttcattctactctttgctgttcacttcacctcgatatccatgttccgccgcccggccgcaatcttccagacagtagttgcttcaatcacagctggcagttttggtatattattcacatttgtctttgccggtttcgtcattccaccaccttctatgccagcatggctcaagtggggtttctgggcaaatcctttgagttacggtgagattgggttatcagtaaacgagtttcttgctccaaggtggaatcagatgcaacccaataattttaccttaggacgaaccatactccaaacccgtggaatggactacaacggttacatgtactgggtatcattatgtgccttgttgggtttcactgtgctcttcaacatcattttcactctggctctaacgttcttgaaatcacccacatcatctcgagccatgatttcgcaagacaaactctctgagctgcaaggaacagaaaagtcaacagaagattcttctgtcaggaaaaagaccacagactcccctgtaaagaccgaagaagaagacaaaatggtcttaccattcaagcctctcactgtaacatttc

SEQ ID NO: 98783 - DNA, 537 bp, Arabidopsis thaliana columbia
  unsure (1)..(537): unsure at all n locations
nnnnnnnnnnnnnnnnnnnnnnnnnnnnnnnnnnnnnnnnnnnnnnnnnnnnnnnnnnnnnnnnnnnnnnnnnnnnnnnnnnnnnnnnnnnnnnnnnnnnnnnncctttttttttttttttcacgagggaaatagttttggatattactaacatactacaagttgagaaacagtaggaccaatgtacatttactcacttgtaggatgaaatatacatttggaaacttacatgagaaaggcctaaaatgttcatttcttggagagcattttatctatttggccgtttttgttgtacatttccactatctttttggcatatgatggcatgtgggtgtttgctctttgctttccccatttgcggtttacgtacaaatagtttctgatggtatggtagtccaacgagtaccgagcaaattctagacccttaggaccaaccaaatttaggatgaacgcaataatgtttccaacaaatagtggcgctggctgagcaggaccttgaccaaacttagcagcattggctgccttaacagtttctgt

SEQ ID NO: 98784 - DNA, 1037 bp, Arabidopsis thaliana columbia
atgacgtcgcatgcacgcgtacgtaagcttggatcctctagagcggccgccctttgttttttttttttttttttttttttttttttttttttggaagaccaatgtacatttactcacttgtaggatgaaatatacactttggaaacttacatgagaaaggcctaaaatgttcatttcttggagagcattttatctatttggccgtttttgtttttcatttccactatctttttggcatatgatggcatgtgggtgtttgctctttgctttccccatttgcggtttacgtacaaatagtttctgatggtatggtagtccaacgagtaccgagcaaattctagacccttaggaccaaccaaatttaggatgaacgcaataatgtttccaacaaatagtggcgctggctgagcaggaccttgaccaaacttagcagcatcgtctgccttaacagtttctgtcacaaaaggtcgccgatcaccgctgctgattgttggagtgatctccaaaaggttttctaccaagctgagcatttctttcccacgttcatttctcactgtaatatactgtggatggtcagtcatgttcagacctgaatacttcggaacacccatgtaaccgataaccaaatccgctaatgcatttgtgtaatcaaagcagctgtaacacgatggagctatgacatctactaaatcgtttgcaggtagagagaaatagggaacctcttcaatgtgtccatccaagtgtttgagttggaccttgtaatcttgcataaattcataatggagaacagtctctggctctttactagctgctttcagaaacgtgtctagtccatctcgtgttccgttgtccacacaactggtgcctagtacatacaacttttccagattcagatgctgctccactgatctcaatgcttgcacttggcaacccacaccgcaaaacagaagacgcttcactccggaagcctcgattaattcaagagtattcagattaggagacagagttggcttgacacctcttgcagccaaagcttc

SEQ ID NO: 98785 - DNA, 422 bp, Arabidopsis thaliana columbia
tccctaattctccaaattttggggttttacattttccttatcaagagaacacctgaatctgaaaatgatcactacagtgctacgacgatctctccttgatgcgtcgaagaggaatctctccgcttcgttgacctcaatcaatactgttctgtttcacaacctggccccagccgccactagagtctccgacctagccttaattggatcttccgatgtcaaagctgggtttccgtttggtgttgaagcgaaaggaattcattttcaatctgggccgttggattttagagcttcgatggtttctcaagctggatttgcgatctctgagagtagcgagagaagggttggtgattcggagagtgttggtggtgatgggcttgcgatatctgagcttgggatatctccggagattgttaaagctttga

SEQ ID NO: 98786 - DNA, 1866 bp, Arabidopsis thaliana columbia
cacgtctctctctatctccttagattttcaaagttttcaacattcaacaaaatcattattttaattttgcagagacgaatcgaatcgatctcatctccaaaaatcttgtattcaaagtttgattttctgggtttcttctgtattatctcgatatttgaaaaaaatggcgaaggaaattgaatcagcgacagatttaggtgatactaacatcaaaggagttcttgttcatggaggaagatattttcaatacaatgtttatggaaacttgtttgaagtttctaataagtatgttcctcctattcgacctattggtagaggagcttacggttttgtctgtcctgcagtagattcggagacacacgaagagattgcgataaagaagataggtaaagcctttgataataaagtagatgcaaagagaacattgagagagattaagctacttcgtcatttagaacacgagaacgttgttgttataaaagatatcattagaccaccaaagaaggaagatttcgttgatgtttatatagtttttgagttaatggatactgatcttcatcagattattcgatcaaaccaatctttgaatgatgatcattgtcagtacttcttgtatcagattctacgaggactcaaatatattcattcagcaaatgttttacatcgtgaccttaagccgagtaatttgcttttgaattcgaattgcgatcttaagattactgactttggtttggcaaggactacatcagaaacagagtatatgacagagtatgttgtaacacgatggtacagagcaccagagctgcttcttaatagttctgagtatacatctgctattgatgtatggtctgttggttgcatatttgctgagattatgacaagggaaccgcttttcccggggaaggattacgttcatcagcttaaacttatcactgagttgataggatcacctgatggagcgagtctagagtttctcagaagcgcgaacggaggaaaatatgttaaggagctacctaagttcccaagacaaaacttttcagctaggtttcctagtatgaattctacagctatcgatctactagagaaaatgctcgtgtttgatccagtaaaacgtatcacggttgaggaagcactgtgttatccttacttgtcagctcttcacgaccttaacgacgagcctgtttgttccaaccatttcagtttccattttgaggatccgtcttccactgaagaagagataaaggagcttgtgtggctcgaatctgtgaagttcaatcctctgccgagcatttaaaacattatttaagaaggggaaagcaagttttatactctgacattgagcaaaacaaattagtagtgtttaagctctgtttctccttcatctcatgttgatcgttgtttaagctatttcactagttaaaaaagctgtcttgcaactcaagaaattgttctataaggatccttgtaacccaagacatatctttagtagttatgtccattcttattatcaggatgtcttagatagtgttctgtttcttctacatatcatgttgttatcttgtaactcaagaaattaaattaaaaagctatctttgtttaaaaaaaaaacatgtcacttggattgtactcgtagaaaatgggaaaaactcgatgtgtttattcatctccagcagtttcttcaagcactacgtcgagctcttgcaaattttggtaatgaacactagttcgatccttcactctcgaaactcgacaaaaaagtctatcaacttcgtctcttgactctattcgagtgatattttcatcatctagaaggacgttgatcccactccttcgtaacgcggctctaagaaggctggagaacttgtt

SEQ ID NO: 98787 - DNA, 403 bp, Arabidopsis thaliana columbia
gtaggagaacacaaacatgttttttttttctggtcatagcttcctaggcacaatcactcttattgccatattgtgtgagaaacaaaatcatgagaaagattctataatctcaagaaggcgttgaagccatgaactctaaaggaaccaaagaaggaaagagttctgtaaatctaaaaccatgtcgttgattctttgtcttcaagcagtttgagcaactggttcatcagatgcttcaagcctttcgattccttccccaacctcgactctaagaaaatcggtaaccttcactggagaacctacctccttggacaaattatccaccagtgtcttaatgtttatagcatcgttcacaataaacttttgctccattagagcaacttcttcaaaatacttacggagacgc

SEQ ID NO: 98788 - DNA, 893 bp, Arabidopsis thaliana columbia
gcagtaccgcaccggaattcccgggtcgacccacgcgtccgcagaaaaaaaaaaataaacacaaaatttcaataaccatggagggtgttagtgcaactatgcataagttaaggccttatttgttaatgatctttttgcaatttggagcagcaggaacatatattgttattatggccactcttaaccaaggccagaaccgttacgtcgtaattgtgtatcgtaatcttgtggctgctcttgtccttgcaccttttgcactcatctttgaaaggaaagtgaggccgaagatgacactatcggttttgtggaaaataatggcacttggtttcttagagccagtcttggatcagggttttggttacttggggatgaacatgacatcagcaacatatacatctgcgatcatgaacattcttccttctgtcacatttataatagcttggattttaagaatggagaaagttaacatagcggaggtacgaagcaaagcaaagatcattgggacattggtgggtcttggaggggcactagtaatgacattgtacaaaggtccgcttattccttttaccgggtctaacccgaatatggatcaacaaaacggacctccaaatagttcacaagaccataacaattgggtttggtggaaccctggtggattctcctcgggttggggtgcttggccctggtttttatggttttaccaggccgataaccaaataaaagaccgtccccttgcccaatcttttcattttttaagccccttaaatattgccttagccccggggggctgttccccaaaagccttttccgcggtaaccgcctttgttgggtgggaaaaagaacaccccttataccggaatggggccgggtttggtttggggaaagccaaaggc

SEQ ID NO: 98789 - DNA, 502 bp, Arabidopsis thaliana columbia
  unsure (1)..(502): unsure at all n locations
nnnnnnnnnnnnnnnnnnnnnnnnnnnnnnnnnnnnnnnnnnnnnnnnnnnnnnnnnnnnnnnnnnnnnnnnnnnnnnnnnctcactagttttttttcgccctttttttttttttttttttggattaaactcaatgcataacaagtggtgtagaagtattgatacattcctgtaatgtcactagcaatctcaaacaatcatgatacatcatatttctctcatggagccaaaatccccggctggtggaaaaataatagtttgcgcaagtgtgtatgattatttctattgaggtgaaaaacaatctaaggttttctttttacttttatttccaacacaaaattgattacgcatatgtattccacatgcaaagaattttaaataccgggatttgatagtgaacttatgctgcgacagactgtttctcctcgtaatcgtcaagccttaaagcttccaatagccttggccatgactctgggatgcctccaggtaagtcaaactccat

SEQ ID NO: 98790 - DNA, 650 bp, Arabidopsis thaliana columbia
  unsure (1)..(650): unsure at all n locations
atgatttnnnnnnnnnnnnnnnnnnnnnnnnnnnnnnnnnnnnnnnnnnnnnnnnnnnnnnnnnnnnnnnnnnnnnnnnnnnnnnnnnnnnnnnnnnnnnnnnnnnncctttttttttttttttttttttttaaaacaagtaaactctgtgtataataaatatttataatgtacagttgatgaggatgatgaagctgagggagctcatgacgagtgtgaatcacactcgagctcagtaattaagagttccatcatctttttatacattggcatataatgatcgtttatcattgttctcgatagcctaatctttctgtacagttctcttggcgtctcatatatccttacacgctccaccgtcgtcgttcccactaccaccacttcgtcacgctctgtttcagactctgtctcagttactgacactatgtgcattatcttacccggcgggtaaaaccgctggttctctatcaaatccattgaagatgctggataccggactctgggtctggcctgtggaggaatcgcccccgccagtaatgacagtctcttccccggtaaccccttgcggtgcnggtcttccnccaagggtcacggcccttcgnccccngcgngcaatcnnggcagtcgnccaaggcacctttggaaggtta

SEQ ID NO: 98791 - DNA, 728 bp, Arabidopsis thaliana columbia
  unsure (1)..(728): unsure at all n locations
nnnnnnnnnnnggcaaatatttgatttaccattaacttctcatagagaaaaaganttctgaaaatcatgcattatcaacaaacataacaattaacacaagttgaattacaattcaatttaaaacaaatgggttattacaattttgttcaccacgatacaacaaattaataatattatatttaaaagaattacaaatatatggtttaacaaccaacgtggtcacgccagtccaagaacaagagagcagctgcatagtgagacaaagcacccaacaaaacgaacacttggaagatctgatgactatgtcccacacgatcaaaccatcccggtttaagcctttctggcactctccctacgtagaatcctgttccaacaagatagaacactgccataagcaactcgtacacgagcgtcacgttcctttgcgggtttcccccaatttgaccacttagcgcgtggggagctgggacaatcccaaacangccccatgggaggcaaagagcnaagcncgggaagctcggtactttggggaccgggaagtgatgggggtggaaagtgtgatgattgtgaanttcccctgggatgtgatccctccgggggtnntgaggtnccccgggggggtgncttggaaaatnttaaatttggtngggnaaaaggaanttttgcnttggngggngtccggggntgctnttttggggagggngantnagcctttttggngggaaatt

SEQ ID NO: 98792 - DNA, 730 bp, Arabidopsis thaliana columbia
aatgactcgtgcccctgaaaattacttctacaggcttctcatgcttaattcaccggaatggccttactcaatcatgggagcagcaggctcaattctttctggtttcattggtcctacctttgcttttgtgatgagcaacatgatcgaagtcttctactacacagactatgattcaatggaaaggaaaacaaaagagtatgtcttcatctacattggtgctggcctctatgctgcgggtgcttattcgatccaacattacttctctagcatcatgggagaaaacctcacaacaagagtaagaagaatgatgctctcagctatcttgagaaacgaagttggttggttcgatgaggatgaacacaactcaagcctgatcgctgcacgtttagctactgatgcagcagatgttaaatccgttatagccgagagaatctcagtaattctacaaaacatgacttcacttctcacatccttcatagtcgccttcatagtagaatggagagtctcacttctcatcttaggcacattcccacttctagtcctcgctaactttgctcagcaactatctctgaagggttttgctggagacacagttaaggctcatgcaaagacttcaatgattgctggtgaaggagtcagtaacattagaaccgtagcagctttcaatgcacagagcaagattctctctttgttctgtcatgagcttcgggtacctcaaaaaagaagctta

SEQ ID NO: 98793 - DNA, 607 bp, Arabidopsis thaliana columbia
ttaggtaccactatagaagagtctatgacgtcgcatgcacgcgtacgtaagctcggaattcggctcgagcaaagagcatcatcggcgctgaagaagaagaagaagaaaatggactcatctttgtcgcagaagttcactcttgcttatgcttctctcctcggagttggtgggttgatgggttacctgaaacgcggaagcaaaatatcacttgtcgcaggaggaggttcagctgcgttgttctattatgtatacacggagctcccaggaaatccagtcttagcatcctccattggcattgtggggtcggcggcactgacagggatgatgggatcacgttacctaaggacgaggaaagtggtaccggctggacttgtgtcggtggtgtcactcgtcatgactggagcttacttgcacggcctcattcgctcaagttgaagtgtctctgctatcttccttggacctattttccaatattgttaaggttttttgggtgcgcatttcaaatttctgaaaattgttgtataaatgctttgtggtgttgtttcttttaccaagttcttatgtccttgtgtacttttaagagattatatgatgcttcgagttcttc

SEQ ID NO: 98794 - DNA, 262 bp, Arabidopsis thaliana columbia
gagaaacaagacatagaagctaaagctgcagaaggtggatggactgtggtcgtgcatcacaaaggaaggaaaaagacaacagaatctgtgaccggaacagccgttggatctttttctcaggctgctttggaggataagatcgctaaaaagaaacagagtgagcctgtcgctcatggtttctaccgtttccaaaggcgagatgcacaacgcaatgaactcttggcgcttcagagtaagttcgaggaagacaagaagaggatac

SEQ ID NO: 98795 - DNA, 262 bp, Arabidopsis thaliana columbia
cagaagtctctccttcgctgtcagctctgttctcagcattagtagaattgcagtggagaccagacaccagatcccatctctcttcaagccttacagggaccggaattggggaaaaaggtgggaaatttttcaagaaaacatgaatacttaacacttcgcaactctttcttcaatgttgttttttgaaagtttcttaggttctctttctttgtttcttctcgttgaacaatgtagcaattactgtaaattctactttttatcc

SEQ ID NO: 98796 - DNA, 743 bp, Arabidopsis thaliana columbia
  unsure (1)..(743): unsure at all n locations
cnnnnnnnnnnnnnnnnnnnnnnnnnnnnnnnccgctggacgcctgcggtaccgggccgctctcccagggcgccatgcgtccgcttctctcgaatttacgcaggaagatcattagcagagaattctcatctgattcagtccatggctgccacggctcttttccgatcgattcgccgacgcgacgtcgtctccgcgcctctttccgtttacaaatcccttgctggtaatgctcaaccttcctggggtagttcatacattggtcagaactatgcaagtttctccagagctttcgggtcaaaacctgttgtgaatgacattcttggtactggtttgggcactaacaatgccattagagaggagagagagaagtcaaaatctactgaagctgcaattgttggtgctcaattgactcgatctttccgtgctcttgatgtgggaacatcgaaacgattgttttctacaatctcaggggatataaagacaacacaggaggaaccaaaaatcaaaagctttcgccctttatctcctcacctttctgtttaccagcctcagatgaactccatgctatcgattttcaacagaatctcaggggtttacttgaccggtgtcactttcgctggctaccttctctacctgaagatggggatgacctgcctaaacttccccggggtttttcccagggccctttcccttaaaaaagggaattttccngtcataaccgcgggttacttgnannnggcngc

SEQ ID NO: 98797 - DNA, 438 bp, Arabidopsis thaliana columbia
ttttattttttttttttttttgaacaacacgtgacatgttacgaacatccaaaatatagttggtgaataagaaactctgcaacaaatccgataaacatagaaaataagactgcaaattgagaaattttgtcacttcattcgacctacgatgaccatcgccatctctcatccgcttactctggcttccgggccaagaagaaatacattggcgtgaaaatctctctccttccaccgtcgactaatccttccgcagcctgctccaggaaatttgagaccctttggcttccttgaggtgcaagtcttatgtattcaaggatcttgaccatgtttttggttatgaatcgtccaacagctgtaaggcggaagctactgagtgagaaatacattggcgtgaaaatctctctccttccaccgtcgactaatccttccgcagcctgc

SEQ ID NO: 98798 - DNA, 766 bp, Arabidopsis thaliana columbia
tctttctcaacccaagcatcgagttttccaggtaactcagtctaaatgatgaaggcaaccgctgcagattaatctgtggccaatatcaaggagcgtagttaggttttaccaggaaaattccagtggttttggaagtttggacgcaatgtcactgctgaggagacgagatgtaatggagtcgaaagtagtaagagcgatttagtttgctcttctgagtcacattctcttccacaggcttcatcgtcgggcagcaaaggagacacagaccagaatgtgatgaatactctgaaaaacccttggccattcggtcctcgaacaccattccggtgatagagcccgttttccagcaagaacggggtccgggttcaggccggcctaattgagcatttatctaagaacaatttggtcgaaaagggacaagtcacagccatgactgctctgaaggagcttcgaaaaattcgtaatcttttgttggaaatgtgatggaccctttgattcttcttgttctgctctctgtatatatatatatatctaattttttgtaaagtattgttctttagagcacagaataaaattaaggaaacgttttccttgatctctgtcgattttgctgcagaaataccaaaactttttggtttagcggtcatgtgtaagatgttatcaataaagatacctaagtcctgaaaaaaaaaaaaaaaaaaagggcggccgctctagaggatccaagcttacgtacgcgtgcatgcgaagtcatagctcgtttata

SEQ ID NO: 98799 - DNA, 545 bp, Arabidopsis thaliana columbia
  unsure (1)..(545): unsure at all n locations
aggtgacactatagnagagctatgacgtcgcatgcacgcgtacgtaagctcggaattcggctcgagcttgagcgaaggaggtcgcgatattggagagatcttttctaatggcagcgttgggagaatcatcatcctcagagatggacaacgcgaaatcgccggagattcaacaatcttcgccagtgcatccgccggagtatcagaagatcgcaacgacgacggtggaaaatgcggcttcctggatcgatgatgcgttgcgtcaggcgcttgtttaccagaagacgatcacggagacggtggattctaccattgacgcctccaaagctcgattgtctcagattcgagatacttctgtagctcacacgagccaaaccatcgattctcttcgagacattgcttctgagtataacgtttacgagcaaatggtgtttgggaagatcaaagatgggtgtgaatgttgctgcatctcatccgctaatatcaggcaccttagcttttggagttgggattcttgctctgaaaaagaccagaagatttgtatatta

SEQ ID NO: 98800 - DNA, 499 bp, Arabidopsis thaliana columbia
taggtacaactatagaagagttatgacgtcgcacgcacgcgtacgtaagctcggaattcggctcgagacaaacacaacagaaacttaaccaaagacatatctctctctcctcaaacccacctcttgtctctatgggatcgcaactctcaaacgcaatcgacggtaaagataacaccaaaaccatcggatcagcggatccggaccagcttatggagatcgaatccttggagaagatcttaaattacaagttcaaagacaagagtttgttgctgaaagcgttcacagacgctagttacgttgatgacaagagtgaatcgtacgaactcctagaacttttaggagattcgatcctaaatatgggtataatctatgattttattaagctctaccctaaagaagcacctggtccgttgaccaagctccgagccgtcaacgtagataccgagaaattggcacgggtcgctgtaaatcaccaactctatagctatctccgtcataa

SEQ ID NO: 98801 - DNA, 508 bp, Arabidopsis thaliana columbia
taggtgcacactatagaagagtctatgacgtcgcatgcacgcgtacgtaagctcggaattcggctcgagcgcgatatcctcccttttctgagactagctgttccttctgcacttatggtctgcttagagatgtggtcctttgaacttttagttctcttatcaggacttcttccaaacccggttctagaaacttctgttctctcaatctgccttaatacatcaggaacaatgtggatcttcccatttggtctaagtggcgctgcaagcacgaggatctcaaatgaattaggagcgggtaacccgaaagtggctaagcttgcggtgcgtgtggtcatttgcattgcagtagcagaaagtatagtgatcggatcagtcttgatattgataaggaatatatggggattagcttatagtagtgaactagaagtagtcagctacgtagcctcgatgatgccaattctcgccttaggaaattttctagacagtcttcaatgcgttctctcagggg

SEQ ID NO: 98802 - DNA, 360 bp, Arabidopsis thaliana columbia
cccacgcgtccgtggagtttcgacaaagcttgagagagatcgatgtcgtcaaagatggtgaagtcttcagaaatcgtcggaaaacttaatctcagggcacaccaagaaggaggctggttcgctgaaactttcagagattcttctggtttcctctccacctctcagctccctccaacccggagctctcttccccggttatttgcatctatctatggcttcccttggtttggaatcttggtgatataggggcctcattaggttcccgttttgcattttgagatttcagcggtatgatcctccgaaatctgatcagacataagtcacggcttccgtagaattcttgtctttcctgttaccaag

SEQ ID NO: 98803 - DNA, 623 bp, Arabidopsis thaliana columbia
cagactactaaagagtaaagactagtaacaacaaacctgaactcatgccaagttagaattgagatttggagtttcgacaaagcttgagagagatcgatgtcgtcaaagatggtgaagtcttcagaaatcgtcggaaaacttaatctcagggcacaccaagaaggaggctttttcgctgaaactttcagagattcttctgttttcctctccacctctcagctccctccaacctttaaggtggacagagctgtgagcacaagtatctacttcttgcttccatctgggagcgtttctcgtcttcatcgcataccaatggctgaaacctggcacttttatttgggtgaaccccttactgtagtggaactctacgatgatgggaagttgaaattcacatgtcttggtcctgacttgtttgaaggtgatcagaagcctcagtacacggtccctccaaacgtctggtttgggtcggtttcccacaaagggggttcctttttctcaagacggggctctgcttaaagctgaggctagagactctgagaaccatttctctcttgttggctgcacctgcgctcctgctttccagttcgaggactttgagctcgcgaaacgctctgatctcttat

SEQ ID NO: 98804 - DNA, 334 bp, Arabidopsis thaliana columbia
  unsure (1)..(334): unsure at all n locations
cgcgcacgtaagctnggatcctctagagcggcctgcctttgttttttaagtctggagatgaataatgataatctggaggatgtatcgttaaacacaaacactagaggataacagagaaagaaaaccattccaaaccgacaaatataaataagcacgcaaacttaaaaactacaacttgataggaaatactattccggttgtgccggaaaacaactnnagngagaaacnaacaaaagagaaaanccagcgnagggccaccgccgggncnaaccgccaaagacgngacanggnnaaggcggaaagcaggagggggcaagggcagcganaaaaccac

SEQ ID NO: 98805 - DNA, 469 bp, Arabidopsis thaliana columbia
aagattatgacgtcgaacgcacgcgtacgtaagcttggatcctctagagcggtcgcccttttttttttttcttaaacttagatgagaaactgcttctaatcaacgacgtggtgttcaacattgatctgtaagctaacctccaagattggtttatgaatgatgtgtttaacaacacagaattgcgtttacagacaagacagccttacaaataataaaagacgaaccaaaaagaattgcatactgacctaaaaactgacttctccctaggtcattgcaaaaaaccttcagtaatatttgactcaatgctctcatctccatgtgtttgatggcctcaaaaaaaaagcagcagtagaaacctcttggttagaggaaaggccatttcttgactatctctacatcatgtatatagccatttttctattacttgaacaatattatacaacataatgggtgcttcacccttaaaaca

SEQ ID NO: 98806 - DNA, 553 bp, Arabidopsis thaliana columbia
  unsure (1)..(553): unsure at all n locations
cnnnnnnnnnnnnnnnnnnnnnnnnnnnnnnnnnnnnnnnnnnnnnnnnnnnnnnnnnnnnnnnnnnnnnnnnnnnnnnnnnnnnnnnnnnnnnnnnnccttttttttttttttttatctgaaatattttatccattcctgtctaaaaagatgagaaacaaaaagctgggagataaggtcccttcagtgccaataatacattcatagttatgatgaacaatgagcatcatactaaaaagtgtaaaaactatggtttctgagttttgaaaatgctacaagaatatcataagatgagggaggttcatatcacttaagtaactgttgcagttatctcacaaaagtgttgtcgttgtcgcgcggttttagcggattattttaaaatacaagagacgctgattcatcagtggaaaacaaatcctccgcccgagtgttcaacttcctgaggagggggtagagatgaaacccaatctgatgcatgtgttggaagaagccccaaagtgttaagcttccagacacccaaagctagccctccaaggtttagggcaaggaacac

SEQ ID NO: 98807 - DNA, 603 bp, Arabidopsis thaliana columbia
  unsure (1)..(603): unsure at all n locations
aaacttgtcccccnccaggtcccggnccggattccccgggtcnccccacggtccgggaactaattctccccgggggcgcttgctttcaatcccggatatccccccaatagtttgaagaccagcatttggggagatgaagatgagatagggggtttggcgttatttggtttggacaacattcttaaaaggaggaaagatcattgtttgtcttttgtgtatacttgtgagagatgttgaaggggatgggtctcaaactttatatttcagtcttttggataatttgttctctctgtttttttttttcctattcgtatttgtaatttgccctcattttgttgttgcagttatttaagacttaaattgtctcagaaatagttatgttatgatagcccaccttcaattcctctaaaaaaaaaaaaananaaaaaaaaagggcggccccncctagngggtncccaagctttacgtncggcgttcattcggccggcnatagcccntcctttaggggtcaccnaaattcnaatnnncntggccgtcgggtttcnaacggcnggggcnttgggaaaacccngggggnttcccccaccnttaancngccttnna

SEQ ID NO: 98808 - DNA, 1688 bp, Arabidopsis thaliana columbia
acgcgtccgcagtatcattcataattcactcaccccaaaattacaaaaaaaaaaaaaaagaaaagattttccatttccctcttctcgatccaccaccaccaccaacctcaaaagctttcatctttaccggtcatggacggtggttcaggtcaaccggcggctgatacagagatgacagaagctcctggaggttttcccgcggcggctccatcgcctcagatgcctgggattgagaatattccggcgactcttagccatggtggtaggtttattcagtataacatatttggaaacatcttcgaggtcaccgctaagtataagcctccgatcatgcctattggcaagggtgcttatggcatcgtttgttcggctatgaattctgaaactaacgagagcgttgcgattaagaaaattgctaacgcttttgacaataagattgatgctaagaggactctccgtgagatcaagctgcttcgtcacatggatcatgaaaatattgttgcaatcagagatattatcccgccaccattaagaaacgctttcaacgatgtttacatcgcgtatgagttaatggacactgatctccatcaaatcattcggtcaaatcaagcattatccgaagaacattgccagtattttctttaccagatcctccgtggattgaaatacattcactctgcaaatgtgcttcacagggatttgaaaccaagtaatctcctcctgaacgcaaactgcgacctaaaaatctgcgattttgggctagctcgagtcacttctgagagtgatttcatgactgaatatgttgtcacgagatggtaccgtgcaccagagcttctcttaaactcttctgattatactgcagctatcgatgtttggtctgtaggctgtattttcatggagttaatggaccgtaagccactcttccctggacgagatcatgtccatcagcttcgcttgctcatggagctcataggaactccatcagaagaagagctcgagttcttgaacgaaaacgcaaagcgatacataagacagcttccaccttatcctcgccaatccatcactgataagttcccgacagtgcatcctttagctatagaccttatcgagaagatgttaacatttgatcctagacggagaatcacagttttagacgcattggcccatccatacctgaactcgttgcacgacataagcgatgagccagagtgtacaatacctttcaactttgattttgaaaaccatgcactctcagaggagcagatgaaggaactaatctaccgcgaggcgcttgctttcaatccagaatatcagcaatagtttgaagaacagcatttgggagatgaagatgagataagggtttggcgttatttggtttggacaacattcttaaaaggaggaaagatcattgtttgtcttttgtgtatacttgtgagagatgttgaaggggatgggtctcaaactttatatttcagtcttttggataatttgttctctctgtttttttttttcctattcgtatttgtaatttgccctcattttgttgttgcagttatttaagacttaaattgtctcagaaatagttatgttatgatagcccaccttcaattcaaaaaaaaaaaaagggcggccgctctagaggatccaagcttacgtacgcgtgcgatgcgacgtcatagctcttctat

SEQ ID NO: 98809 - DNA, 385 bp, Arabidopsis thaliana columbia
cctttgttctcaaacaccaaaagcaaaacatcacaaaagaaaagagactaatcaagaagagatatcatcaattgaagctgttttcttgagtagagatggcgaaccatagaatgagcgaagctacaaaccataaccacaatcatcatcttccttattcacttattcatggtctcaacaacaatcatccatcttctggtttcattaaccaagatggatcgtccagtttcgattttggagagctagaagaagcaattgttctgcaaggtgtcaagtataggaacgaggaagccaagccacctttattaggaggaggaggaggagctacgactctggagatgttcccttcgtggccaatcagaactcaccaaactcttcctactgagag

SEQ ID NO: 98810 - DNA, 567 bp, Arabidopsis thaliana columbia
  unsure (1)..(567): unsure at all n locations
atgatactcttnnnnnnnnnnnnnnnnnnnnnnnnnnnnnnnnnnnnnnnnnnnnnnnnnnnnnnnnnnnnnnnnnnnnnnnnnnnnnnnnnnnnnnnnnnnagtgaaaccttttttttttttttttttttgacccaataatatggtcatgtaaaaatgtgccaatgggctttacaaaagagttttatcaattcatattttctctatatatatccttacaccttaatttcaaatcctctttgaataataatcatttagtagcttttagagatgcgaggcattgctctattgctttgtctctcatcgtaaagccttaaaaccactgccgcagtttcctcaattgcactctctgtcacttcaatcactggccaagtcggattctctgcaaagattttcttggcaagctcaagctcttctttaacagaacctaactcagagtacttagtcttaaaactcgaaccaagtccaagactcttggctctagcctctcttatccctgcacaccatggnttatcacaaccaaacttnccgggggttcaacaagctggngtancgncaancggagtt

SEQ ID NO: 98811 - DNA, 484 bp, Arabidopsis thaliana columbia
cgactagcacatcagctggattggatcagattctaccatggatgttctaccataaggttctaggcgtctcaacattcttccttttcgttgaagggaaagctgctactccgagtatttctaaagtgctcgagtctattcctggtgttaaagtaatatacaggacgaaagagcttgaggagaagcaagcgaagagccggatttggaatgagacctggctttcgtctttcttttataagccctgcaattatgagttatttgtcaaacaatctctcaacatggaaatggctattgtcatggctagggatgcgggcatggattggatacttcatcttgacactgatgagctgatatacccagcaggtgctcgtgagtactcactaagacggttgctgcttgatgttcctccaaatgtggatatggttatatttccaaattacgaaagcagcgtagaaagagatgatatcaaggatccttttacagaggt

SEQ ID NO: 98812 - DNA, 520 bp, Arabidopsis thaliana columbia
  unsure (1)..(520): unsure at all n locations
nnnnnnnnnnnnnnnnnnnnnnnnnnnnnnnnnnnnnnnnnnnnnnnnnnnnnnnnnnnnnnnnnnnnnnnnnnnnnaaaagggaaaattggatttaaaaatacaccttcatggatgggagacttaaacatgacaacatcatcatgaacttgtattactaagtactaactatcgccaatgaacgaaacccttgaaaaccgaagacaacaagagattacatctttagcatttgacacgaaaccaaaagaaaaaaaagaaaaggagtttgaatcatgttgtagacattattattgggtaattttgctccatcatctaaagaagaacctcaagagtaaagaaattcgtaactcgaaaatggggtttggtttgcctcatacggagataccataattgctgatcttgttcacttcctttgtcaaagcgtttctctcttgcttcacttcagaagcacgcttcgatatttgagtgcggaatcgagaagcttctctcgttggcagttctttaagaacatctttcaaac

SEQ ID NO: 98813 - DNA, 846 bp, Arabidopsis thaliana columbia
  unsure (1)..(846): unsure at all n locations
gttacnnnnnnnnnnnnnnnnnnnnnnnnnnnnnnnnnnnnnnnnnnnnnnnnnnnnnnnnnnnnnnnnctttttttttttttttgttaagaaaaatgaaatgatgaatttgaatacaagctggttaaaatacaaagacagtacatatttctttatgttttctttttgccttttttttttttaacaaaaagaaaacagaaagatattacaatttatactgtaaaaatttataaaaatataatttttctttttcttttcgatatatctaaaggtctccgaaaaatttagcaaaattgtcaatagcattttttgcagcgaaattacgagcagtttctttcttgacaggatggtgaccacatccaacaaacttatcctcaatatggaaacaataggtttgattttcttcccaagtgtctttggacgtcaatttcaagttcctcttctgacacatctcattgagttctgtcattggatggctcttcattttgtctaaatgtattattggctccaacaatggttttatcaccttccagacggtctcggtggagttgcagtccatgaagaaagctccaatggtagactctactatgtctgctagaaactttaggaaacttttaaaaaaccattttgaatggtaatgggaaaattttttccatggccttttccacaaaaattctaagtaattttggcttcctccaaagcaaaggggttttctttatttaaccggagataaaggcctttttaagagatttgggtgggcgggacccccctttggggtataaaccaccggggaaatttttcggggacccggttaaccttggcaggggcgttaccccagactttttt

SEQ ID NO: 98814 - DNA, 847 bp, Arabidopsis thaliana columbia
cgccaagggtttttcccaatcccctaaggttgtaaaaacgatggggcaattgaatttaattttagggtggcaccaatacaaaaaattaatcagggtcggaacgcacggcgtacgtaaagcttggatacctctataagcggcccgccctatttcttttttttttagttaagaaaaataaaattattggatttgcattcaagctgggttcaaatacatagacagtgcatatttctagatgttttcgttttgccttttttttttttatcaaaaagaagacacaaagatattgcaatttatactgtaaaaatctataaaaatataatttttcttcttcttgtagatatatcaaaaggtctccgaaaattttagcacaattgtcaatagcattttttgcagtgaaattacgaacagtttctttcttgacaggatggtgcccacatccaacaaatttatcctctatatgcaaacaataggtttgattttcttcccaagtgtctctggccgtcaattacaagttcctcttgtaacacatctcattgagttctgtcattggatggctcttcattttgtgtaaacgtattattggctccaacaatggttttatcaccttccagtcggtctcggtggagttgcagtccatgaagatagctccaatggtagactctactatgtctgctagaactttaggaacttttaaaagtccgtttgaatgtaatggatatttttccatggcttccacatattctagtatttgctcctcaagcaagggtttcttatggcggagatatctatagagttggtgcggacgcgtgggtcgcacccggaaattcaggtccggtaccgcaga

SEQ ID NO: 98815 - DNA, 516 bp, Arabidopsis thaliana columbia
  unsure (1)..(516): unsure at all n locations
atgatatnnnnnnnnnnnnnnnnnnnnnnnnnnnnnnnnnnnnnnnnnnnnnnnnnnnnnnnnnnnnnnnnnnnnnnnnnnnnnnnnnnnnnnnnnnnnnnnnnnnnccttttttttttttttttttggttaaaaatgatgaagtaaaatacattttttaaactatcaatgacaatgattgagtgtctttgttgttaagaacaaaacacacacaatggttctcaaaatacaacaactgatctgtcatcgactgcaaaatctttcacacttgaagaagactcaattctgtttgtagctttcttggcctcttcatcccaatttgtaaaaatagtgacgaggccaagaccaaaaacttgaacaacgagggcacatatgattccaagccaaagcccccgaccaccaacgtgaaagtgaaaagcaagtaacaatcctgaaggaactccaacaagataatatgaaccaagattaatgattgctcctatcttctgccatccacatcctctagcaacccctgag

SEQ ID NO: 98816 - DNA, 537 bp, Arabidopsis thaliana columbia
ttaggtgcaactatagaagagctatgacgtcgcatgcacgcgtacgtaagctcggaattcggctcgaggttgacatgacgatttcttttactactagccaaatcatttaataatcagtcacaaagaggaagagaaatgtgttcattagagaaacgtgatcgtcttttcatactaaaactcaccggcgacggcgaacaccgtctaaacccaaccttactcgactctctccgctccaccatcaaccaaatccgatcagatccatcattttcacaatcagtactcatcacaacatcagatggtaaattcttctccaacggctacgatctcgctttagccgagtcaaatccttctctctctgttgtaatggacgcaaaacttagatccttagtcgccgatctaatctctcttcctatgccaacaatcgccgccgtcacaggtcacgcttccgccgcgggatgtattttagcgatgagtcatgattatgtattgatgcgtcgtgatagaggttttttgtatatgagtgaattggatattgag

SEQ ID NO: 98817 - DNA, 893 bp, Arabidopsis thaliana columbia
  unsure (1)..(893): unsure at all n locations
cgggtttccatgttggctcagtgcgtgaagcaacaacaacagcaacagcagcagcagcagcagcaacatcagttccgtagccttagctccagagagctcagaacaaactctagcccaatcgttggttcaccggtaaacaacaacacatggtcatcaaaatggggatcttcaaatggtcaaccggattggggaatgagctcagaagcacttggtaagttgagatcttcgtcatcgtttggtggtgatgagcctgatgtgtcatgggtccagtcactggtgaaggagactccagcagaagccaaagagaaagcagcaacatcttcctcaggggaacacgtgatgaagcagccaaatccggttgaaccggtaatggatcatgctgggctagaagcttggattgagcaaatgcagctcgatcagcttgtggctcagcagaattgagagacctaaccaaagaatcacatgttcttgtctggtctctctatgtggtagataaaaacctcttttttacaggtggtggtggtagaagggtaacaagattaacaaagaagagaagagaagaaagaagatttctttgtttttggtcaattaattttcacaaaaaacagttttttttttttttatttagagaagagaagggaccaatacaagaaaaaggcttatgggaagaaaggagatgaaacaaaaccttcttggttttctttctcccattttcaatttttttttagggatttctttctcccattatcattattattattgttattaatattattattttttatatattttattgttatgaaaaaaaaacaaaaaaaggaaggccgctctagaggatccaagcttacgtacgcgtgcatgcgacgtcaaagtcttnctatagttcaccnnnn

SEQ ID NO: 98818 - DNA, 517 bp, Arabidopsis thaliana columbia
gtttcttgttgttaaaaatatcgtacaaaaatggccgatgaggtcacaatcgggtttcgcttctatcccacggaagaagaactggtttcgttctacctacgaaaccagctcgaaggaaggagtgatgactcaatgcatcgtgtcattcccgtacttgacgtctttgaggtcgagcctagtcatcttccaaatgttgctggagtgagatgtcgaggagacgctgagcaatggttcttcttcgtgccacgacaagaacgcgaagcaagaggaggcagaccgagtagaactactggttcaggatactggaaagcaactggatcacctggtccagtctttttccaaaggcaacaaaatgattggggcaaaggaaaactatggttttctacactggaaaggcacccccaggaggaaaacctaaatggaaaatgaatgagttccacgccgttgacgaaacagtcaacgcttccacaatccctaagctgagacgtgagttcagtttatgtcgagtctacataac

SEQ ID NO: 98819 - DNA, 810 bp, Arabidopsis thaliana columbia
  unsure (1)..(810): unsure at all n locations
aggtgcactatagaagagcttgacgtcgcatcgcacgcgtacgtaagctcggaattcggctcgagcgaagcaagaggaggcagaccgagtagaactactggttcaggatactggaaagcaactggatcacctggtccagtcttttccaaagacaacaaaatgattggagcaaagaaaactatggttttctacactggaaaagcacccacaggaagaaaaactaaatggaaaatgaatgagtaccacgccgttgacgaaacagtcaacgcttccacaatccctaagctgagacgtgagttcagtttatgtcgagtctacataacaacaggaagctccagagcttttgatagacgtcctgagggagttttgcagacagagagaatgctaacaagtgatgttgcagtagctgagacatcgttccgtgtggaaagctcactggaaacttcgatttcaggaggagaacatattgatgtctctatgaacacagagtttgttgatggactatcagaaccgatgtgggactgggaacagctgacttggccttgaagctatatagattttataatcaagcaaatttaaacttgtttcaattgcttattgttagtttgaattttatgacccgaaagattctttttctttctttaccttgtaacgtgagaatttgagaaataataaatgacctagacagtgacaaaaaaaaaaaaaaaaaggnnnnnnnnnnnnnnnnnnnnnnnnnnnnnnnnnnnnnnnnnnnnnnnnnnnnnnnnnnnnnnnnnnnnnnnnnnnnnnnnnnnnnnnnnnnnntagctg

SEQ ID NO: 98820 - DNA, 529 bp, Arabidopsis thaliana columbia
ttaggaccactatagaagatctatgacgtcgcctgcacgcgtacgtaagctcggaattcggctcgagaatcaagacttgtgattacttcatcagacaataacaccccagtggattctgtactttcctctgattcaatttgcatcaatgtgtcagttgatgatatccgagttggagactcgctattggttttgcctggtgagacatttcctgtcgatgggagtgtcctagctggaagaagtgttgtagatgaatctatgctgacaggagagtcacttccggtgtttaaagaagaaggctgctcagtttcagcgggaacaattaactgggatggccctctacggatcaaagcttcttctactggttccaactcaacgatatctaaaattgtcagaacgcgctgaggatgcacaaggtaatgcagctcctgtacagaggctggcagatgcaatagctggacccttcgtctatactataatgtctttatctgcaatgacggttgccttctggtatttatgtcggtcacacata

SEQ ID NO: 98821 - DNA, 365 bp, Arabidopsis thaliana columbia
ctaaagttcttctcgctcgtaggaaccagagagattctgtctgactactgtggggtttatggttatgctagcgagatcaaggctagctcgagatgtgagcagaagatcacagtctttgcagagaatctgctactacgcacgtctctcctctagattttccggcggcggcggtgatgatggcggcggcagcgcaccggaaatcggtggtaccgattcagcacacgaatgggagaagctccttataccattcgatctggattctctaaggaattcatttcacaagataactccctttcagctcgataagctacttgagttagctctcaatgtatccacttcaatggagttgttctcatggaccggtt

SEQ ID NO: 98822 - DNA, 550 bp, Arabidopsis thaliana columbia
  unsure (1)..(550): unsure at all n locations
ctgatcagcgtttaacattgttcaaccgagtgagaatgcatgcatctgcattgaagaaatacacatatgggaaacatattgttagtcgtttggaacagccctctattgaaggtatgaaattcccccataaaacccagaattgaggagatgagtggctcttctgatttcaagacagtgggctgactcagattccctcaatacaattcgctttttcatgaaagctggatattcattgggaaggtcttagatgattgtgaaggacatcgatattgttgtttacttggaattttatcataaccgttgtgatgattgtgtggcatgttctgtaaatattcataactgtatcagtagtttacttcagatctgtaactggtttgtggaatttcacatggtattcgaaactttcttgnnnnnnnnnnnnnnnnnnnnnnnnnnnnnnnnnnnnnnnnnnnnnnnnnnnnnnnnnnnnnnnnnnnnnnnnnnnnnnnnnnnnnnnnnnnnnnnnnnnnnnnnnnnnnnnnnnnnnnnnnnnnnnnnnnnnnnnnnnnnn

SEQ ID NO: 98823 - DNA, 459 bp, Arabidopsis thaliana columbia
ccgtaccgttccgaaactctcgggtcgacgcacgcctccgtacgtcggcgcgaagacgacagaaggggagaagagatcgacacaacaatagtttgatcatcttgtgagaaaaataatggctgcttcagtgatgctatcttcggtgacattgaaaccagctggtttcacggtggagaagacggcggctagaggattaccgtcgctcacaagagctcgtccctccttcaaaattgtcgccagtggcgtcaagaagatcaagaccgacaagcccttcggaattaacggcagcatggacttgagggacggcgtcgacgcctccggcagaaagggcaagggatacggtgtttacaagtacgtcgacaagtatggagctaacgtcgatggatacagtcccatttacaacgagaacgagtggtcagcgagcgagtggtgacgtgtacaatggacgagtcaccggat

SEQ ID NO: 98824 - DNA, 849 bp, Arabidopsis thaliana columbia
  unsure (1)..(849): unsure at all n locations
tnnnnnnnnnnnnnnnnnnnnnnnnnnnnnnnnnnnnnnnnnnnnnnnnnnnnnnnnnnnnnnnnccaggcgtccgtcggctgcgagaagacgacagaaggatacggctgcgagaagacgacagaaggatacggctgcgagaagacgacagaaggatacggctgcgagaagacgacagaaggatacggctgcgagaagacgacagaaggatacggctgcgagaagacgacagaaggatacggctgcgagaagacgacagaaggatccggctgcgagaagacgacagaaggatccggctgcgagaagacgacagaagggggaagagatcgagagaagaatagtttgatcatcttgtgagaaaaataatggctgcttcagtgatgctatcttcggtgacattgaaaccagctggtttcacggtggagaagacggcggctagaggattaccgtcgctcacaagagctcgtccctccttcaaaattgtcgccagtggcgtcaagaagatcaagaccgacaagcccttcggaattaacggcagcatggacttgagggacggcgtcgacccacgcgtccgatgcatctgcattgaagaaatacacatatgggaaacatattgttagtcgtttggaacagccctctatttgaagaaaaccaagaattgaggagatgagtnggcccttctgatttcaagacagtggggctgactcagattcactcaatacaattcgcttttcaatgnaagctggntatccatttggaaggccttagatgattgtngaggcannnnattgtgttcctggaattttncaanccgtnggnnnttnnnggntgccnggaaantccaaccgg

SEQ ID NO: 98825 - DNA, 789 bp, Arabidopsis thaliana columbia
cccgggtcgacccacacgtccgacaacccgtcggccaacccttcgttacggttgaaaaaacacaaaaaggtaacggtgccaaaagaccacaaaaaggggaaaagagattcagagaagaataatttgattaacctgtgaaaaaaataatggctgcctcaatgatgctaacctccgtgacatataaaccaactggtttcacagtggagaaaacagcggctataggattaccgtcgctcacaaaagctcgtccctccctcacaattgtctccagtggcgtcaagaagatcaagaccgacaagcccttctgaattaacggcagcatggacttgatggacagcgtcgacgcctccggcagaaaagggcaaggcggattcgggtgtttacaagtacgtcggacaagtaatggagctaaacgtcgatggacacatggcctactttacaactagaacgagtggtcagcgagtagttacgtgtacaaggtaggagtcaccggattggcaatttgggcggtaactctcgctggaattcttgccgcaggtgctcttcttgtgttcaacacaagtgctttggctcagtaaatctcacagctgttagcgcatgtgtaatcatgtttctataaatgtttctgtgttgttctctttctctccaatgttgtaaaactcagacatactttgaatttataagacttctagtgtttgtatatatattcatcttcctatccttagtaatataacaaccgcacaaacccatagatcgaccgctctagaggatccaagcttacgtacgcgg

SEQ ID NO: 98826 - DNA, 646 bp, Arabidopsis thaliana columbia
  unsure (1)..(646): unsure at all n locations
cnnnnnnnnnnnnnnnnnnnnnnnnnnnnnnnnnnnnnnnnnnnnnnnnnnnnnnnnnnnnnnnnnnnnnccacgcgtccgcccacgcgtccggcgagaagacgacagaagggtacggctgcgagaagacgacagaagggtacggctgcgagaagacgacagaagggtacggctgcgagaagacgacagaagggtacggctgcgagaagacgacagaaggatacggctgcgagaagacgacagaagggggagaagagatcgagagaagaatagtttgatcatcttgtgagaaaaataatggctgcttcagtgatgctatcttcggtgacattgaaaccagctggtttcacggtggagaagacggcggctagaggattaccgtcgctcacaagagctcgtccctccttcaaaattgtcgccagtggcgtcaagaagatcaagaccgacaagcccttcggaattaacggcagcatggacttgagggacggcgtcgacgcctccggcagaaagggcaagggatacggtgtttacaagtacgtcgacaagtatggagctaacgtcgatggatacagtcctatttacaccgagaacgagtggtcagcgagtggtgacgtgttcaagggaggagtcacccgattgggcattg

SEQ ID NO: 98827 - DNA, 788 bp, Arabidopsis thaliana columbia
  unsure (1)..(788): unsure at all n locations
tttgacgtcgcatgcacgcgtacgtaagcttggatcctctagagcggcctctcgcgatctggcggacgcgtgggcggacgcgtgggcggacgcgtggggaagaatagtttgatcatcttgtgagaaaaataatggctgcttcagtgatgctatcttcggtgacattgaaaccagctggtttcacggtggagaagacggcggctagaggattaccgtcgctcacaagagctcgtccctccttccaaaattgtcgccagtggcgtccagaggctccaggccccccagccccttcggaattcacggccagcatggactctgaggggacgccggcgtccccgccctccggccagaaagggcaaggcatccggtgtttacaagtccgtcgccaagtatggagctcccgtcagatggatccagtcctatttacaaccgaagaacgacggtagtggtcacgcgagtggtgactgtgttcaaggggaggggttcaccggatcggcaatttttggccatttgggcgggaacttctatgcgccggtattctctgccgcccggtgctcttggtgtgttctctcaaggtgctttggctcngttnncttctcccgatgtgaaccgatgtgtcntcatgtttctataaatgtttctgtgttgttctctttctctcataatgttgtgaaactcagacatcctttgaatttattagacttctagtgctcgtctcgtgggcggaacaataaaaaaaaacgattagcggccgctctaaaggatcccagcttacgtacacgtgcggg

SEQ ID NO: 98828 - DNA, 795 bp, Arabidopsis thaliana columbia
  unsure (1)..(795): unsure at all n locations
ctctaatacgactcactttagggaaagctcgtacgcctgcaggtaccggtccggaattcccggtgtcgacccacgcgtccgcccacgcgtccgtacggctgcgagaagacgacagaagggggagaagagatcgagagaagaatagtttgatcatcttgtgagaaaaataatggctgctccagtgatgctatcttcggtgacattgaaaccagctggtttcccggtggagaagacggcggctagaggattaccgtcgctcacaagagctcgtccctccttcaaaattgtccccagtggcgtcgaagaagatcaagaccgacaagcccttcggaattaatcggcagcttggactctgaggggacgtcggcgtcgtcgcctccggcagaaagggcacggggatccggtgtttccccgtccgtcgcccggttatgtgagctcccgtcgatggtttccgtcctttttccccacccggagccgccgtgggccgcgcggcgggtggtgcgtgtcctaggtaggagtcgccggcttggccctttggtcggtggctctccccgtttttcttgccggaggtgctcttcttgtgtgccccccaaaagcccaggcgccgtcgttcttaaagttgttagcgcatgtgtaatcatgtttctataaatgtttctgaattgttctctttctctctaatgctgtaaaactccgacatactttgaattcccccgacttttagcgtttgtatagtaaaaaaaaagaatttcccccccntggagaggccgctctagaggntcccagcttcgtccg

SEQ ID NO: 98829 - DNA, 707 bp, Arabidopsis thaliana columbia
ttgacggcgcatgcacgcgtacgtaagctcggaattcggctcgagatttactttgatcatgttgagagagaaaaatggctgcttcagtgatgctatcttcggtgacattgaaaccagctggtttcacggcggagaagacggcggctagaggattaccgtcgctcacaagagctcgtccctccttcaaaagtgacgccagtggcgtcatgaggatcgggaccggccaagccctttcggaattaaccggcacgcatggacttgagggccggcgtccacccctccggcacgacagggcaagggatacggtgtttccaagtacgtcgccaagtatggagctaacgtcgatcggatacagtcctatttaccaacgagaacgagtggtcagccgagtggtgacgtgtccaaagggaggagtcaccgcattgccaatttgggcggtaactcggtactgctcggaattcttgccggaggtgctcttcttgtgtacatcccaagacctttggaacaataaatattaaagttgttagcgcatgtgtaatcatgtttctataaatgtttctgtgttgttctcattctctctaatgttgtaaaactccgacatactttgaatttataagacttccagtgtttgtatcaaaaaaaaatataaaaaaaagatttaaaacaccctgagcaaaccgctctagaggatccaagcttacgtacgc

SEQ ID NO: 98830 - DNA, 681 bp, Arabidopsis thaliana columbia
  unsure (1)..(681): unsure at all n locations
acgactcactatagggaaagctggcacgcctgcaggtaccggtccgtccggaattcccgggtcgacccacgcgtccgcccacgcggtccgcccacgcgtccgtacggcggcgtgcgaggacgacagacagaggggggagaagagatcgagagaagaatagtttgatcatcttgtgagaaaaataatggctgcttcagtgatgctatcttcggtgacattgaaaccagctggtttcacggtggagaagacggcggctagaggattaccgtcgctcacaagagctcgtccctccttcaaaattgtcgccagtggcgtcaagaagatcaagaccgacaagcccttcggaattaacggcagcatggacttgagggacggcgtcgacgcctccggcagaaagggcaagggatacggtgtttacaagtacgtcgacaagtatggagctaacgtcgatggatacagtcctatttacaacgggaacgagtggtcagcgagtggtgacgtgtacaaggggaggggttcacccgggtttggcaatttttgggcggtaaacttttcgcccggaatttttttcccggaggtgcttttttttttttacaacaaaagtccttttggctccagtaaatctttaaagtttttcgccctttttaacatgtttctaaaaggttctgggttgnccnttcc

SEQ ID NO: 98831 - DNA, 650 bp, Arabidopsis thaliana columbia
  unsure (1)..(650): unsure at all n locations
tgggtgccgggccccccctacgggtcgacggtatcgataagcttgatatcgaattcgcggccgcagtgatgctatcttcggtgacattgaaaccagctggtttcacggtggagaagacggcggctagagggattaccgtcgctcacaagagctcgtccctccttcaaaattgtcgccagtggcgtcaagaagatcaagaccgacaagcccttcggaattaacggcagcatggacttgagggacggcgtcgacgcctccggcagaaagggcaagggatacggtgtttacaagtacgtcgacaagtatggagctaacgtcgatggatacagtcctatttaccaacgagaacgagtgacgtagtggtcagcgagtggtgacgtgtacaagggaggagtcaccggattggcaatttgggcggtaacctctcgccggcatttcttgcccggaggtgctcttccttgtgtacaacacaagtgctttggcctcagtaaatcttaaaattgttanccctgtgnaaccagttccaaaaatgttcnggggtgtcccttnggcccgaattcctgaacccggggggccacaattttaaacggcccacccggtgggcccactttttncctaaganggaattttncttggaananggaacgtgc

SEQ ID NO: 98832 - DNA, 637 bp, Arabidopsis thaliana columbia
aatagttggatcatcttgtgagaaaaataatggctgcttcagggatgctatcttcggggacattgaaaccagctggtttcacggtggagaagacggcggctagaggattaccgtcaagaagatctagtccgcccagcccttcggaattaacgccagcatggacttgagggacggcgtcgacgcctccggcatgaaagggcaagggatacggtgttttcaagtacgtcgccaagtatggagctaacgtcgatggacacagtcctatttaccatcgagaaccgagtggtcacccgagtggtgacgtgtacaagggaggagtcacccggattggcaatttgggcggtaactctcgccggaattcttgccggaggtgctcttcttgtgtccaacacaagtgctttggctcagtaaatcttaaagttgttagcgcatgtgtaatcatgtttcaacaaaagcttctgggtggttctctttctcccaaacgttgtaaaactcacacacactttgaatttataagacttctagtgtttgtattaacaaaaagtataatataaaaaaaagacaaacccctaaagcggccgctctagaggatccaagcttacgtacgcgtgcaggcgacgtcataatcttctatagt

SEQ ID NO: 98833 - DNA, 862 bp, Arabidopsis thaliana columbia
  unsure (1)..(862): unsure at all n locations
gtgtcggcactggtgcgctcgccttggctgcgtcgacccgtagcggtcagcctctcgtgacagtacgtcgcctgagttgaaagccataaatagaactgcgcgatagcactgcccgtcgcgagcatgtggagacgcactccacggaaaggagcttgatccccctcgctctatgaaagtcacnnnnnnaagctggtacgcctgcaggtaccggtccggaattcccgggtcgacccacgcgtccgcttcatcaaatctcacaaatcttcaacacttaatcacaaatctcaaagcttcggataccaaatggctcgtaccaagcaaaccgcaaggaaatccaccggaggaaaagccccaaggaaacaactcgcaacaaaggcggcgaggaaatcagctccggcgaccggaggagtaaagaagccacacagattccgtcctggaactgttgccctaagagaaatcaggaagtatcagaagagcactgagcttctgatccgcaagcttccgttccagcgtttggttcgtgagatcgctcaggatttcaaaacagatctgcgtttccagagcagcgccgtcgcagcacttcaggaagcggctgaagcatacctcgttggattgtttgaagacaccaatctttgcgcgattcatgctaagagagtcactatcatgcctaaggatattcaattggcgaggagaattagaggcgagagggcttaagaaggagattgaagtactctagactgtgatcggtatgcttatgtatatctttcgttttccctaatttccgggtttagggttggattaggttttgcgtttatgttgttcgttcaaatgcctcaatgaatcaaaattaagtctgttttcg

SEQ ID NO: 98834 - DNA, 724 bp, Arabidopsis thaliana columbia
  unsure (1)..(724): unsure at all n locations
cctgcttgtaccggtccggaattcccggttcgacccactcgtcacgcccacgcgtccgcggacgcgtgggctgcgagaagacgacagaagggggagaagagatcgagagaagaatagtttgatcatcttgtgagaaaaataatggctgcttcagtgatgctatcttcggtgacattgaaaccagctggtttcacggtggagaagacggcggctagaggattaccgtcgctcacaagagctcgtccctccttcaaaattgtcgccagtggcgtcaagaagatcaagaccgacaagcccttcggaattaacggcagcatggacttgagggacggcgtcgacgcttccggcagaaagggcaagggatacggtgtttacaagtacgtcgacaagtatggagctaacgtcgatggatacagtcctatttacaacggggaaccgagttggtcaaccgagttggtaaccgttttcaaagggggggggtccacccggttttggcaatttttgggcgggtaaccttttcgcccggattttttttcccgggggggcccttttctttgntntacaaacaaaaagtncttttggctcagnaaatcttaaaagttttttagnncatttttaaaacnaggttttnnaaaatntttccngggttgnccctttcccccnaantttgaaaccccgnanacttnattttaagctctgggtttttnaaaaaaaaaaaaatttc

SEQ ID NO: 98835 - DNA, 678 bp, Arabidopsis thaliana columbia
  unsure (1)..(678): unsure at all n locations
cccacgcgtccgcccacgcgtccgcccacgcgtccgcccacgcgtccggctatcttcggtgacattgaaaccagctggtttcacggtggagaagacggcggctagaggattaccgtcgctcacaagagctcgtccctccttcaaaattgtcgccagtggcgtcaagaagatcaagaccgacaagcccttcggaattaacggcagcatggacttgagggacggcgtcgacgcctccggcagaaagggcaagggatacggtgtttacaagtacgtcgacaagtatggagctaacgtcgatggatacagtcctatttacaacgagaacgagtggtcagcgagtggtgacgtgtacaagggaggagtcaccggattggcaattttgggcggtaacctctcgccggcaattcctgtcgccggaggtgctcttccttgtgtacaacacaagtgctttggcccagtaaatcttcaagttgtgtaagcgcatgtgtaaacatggttccaaacaatggttcgggggtggccccttccccccaaaggtggaaaaaccggccanccttgaatttactaaacccccagggtggatcaaaacggccgggatcctgaacccgggggccccagtttaagggncanccgggngnccacttgncccttgangggaattcanttggaanatggnaa

SEQ ID NO: 98836 - DNA, 723 bp, Arabidopsis thaliana columbia
tgcaggtaccggtccgaaattcccgggtcgacccacgcgtccgcccaagcgtccgcccacgcgtccgcccacgcgtccgcccacgcgtccggctatcttcggtgacattgaaaccagctggtttcacggtggagaagacggcggctagaggattaccgtcgctcacaagagctcgtccctccttcaaaattgtcgccagtggcgtcaagaagatcaagaccgacaagcccttcggaattaacggcagcatggacttgagggacggcgtcgacgcctccggcagaaagggcaagggatacggtgtttacaagtacgtcgacaagtatggagctaacgtcgatggatacagtcctatttacaacgagaacgagtggtcagcgagtggtgacgtgtacaaggcaggagtcaccggattggcaatttgggcggtaactctcgccggaattcttgcggccgtgctcggtgctcttcttgtgtacaacacaagtgctttggctcagtaaatcttaaagttgttagcgcatgtgtaatcatgtttctataaatgtttctgtgttgttctctttctctctaatgttgtaaaactcagacatactttgaatttataagacttctagtgtttgtatatatattcatcttcctatcaaaaaaaaaaaaaaaaaaaaaaaagggcggccgctctagaggatccaagcttacggacgcgtgcatgcgacgtcatag

SEQ ID NO: 98837 - DNA, 824 bp, Arabidopsis thaliana columbia
  unsure (1)..(824): unsure at all n locations
aagctggtacgcctgcaggtaccggtccgtttttcccgggtcgacccaccgcgtccgcccccacgcgtccgtacggcctgcgaacgagtccgcccacgcgtctgtacggctgcggaagacgacagaggggggggatcgagagaagaatagtttgatcatcttgtgagaaaaataagggctgcttcagtgatgctatcttcggtgacattgaaaccagctggtttcacggtggagaagacggcggctagaggattaccgtcgctcacaagagctcgtccctccttcaaaattgtcgccagtggcgtcaagaagatcaagaccgacaagcccttcggaattaacggcagcatggacttgagggacggcgtcgacgcctccggcagaaagggcaagggatacggtgtttacaagtacgtcgacaagtatggagctaacgtcgatggatacagtcctatttacaacgagaacgagtggtcagcgagtggtgacgtgtacaaggcaggagtcaccggattggcaatttgggcggtaactctcgccggaattcttgccggaggtgctcttcttgtgtacaacacaagtgctttggctcagtaaatcttaaagttgttagcgcatgtgtaatcatgtttctataaatgtttctgtgttgttctctttctctctaatgttgtaaaactcagacatactttgaatttataagacttctagtgtttgtataaaaaacacacccaaagggcggccgctctagaggatccaagcccacgcacgcgtgcgtgcgacgtcatagctcgtagtagnnnnnnnnnnnnnnnnnnnnnnnn

SEQ ID NO: 98838 - DNA, 887 bp, Arabidopsis thaliana columbia
  unsure (1)..(887): unsure at all n locations
nnnnnnnnnnnnnnnnnnnnnnnnnnnnnnnnnnnnnnngctggctacgcccctgcaggtaccggtccggatttcccgggtcggcccacgcgacggtacggctgcgagaagacgacagaagggggagaagagatcgagagaagaatagtttgatcatcttgtgagaaaaataatggctgcttcagtgatgctatcttcggtgacattgaaaccagctggtttcacggtggagaagacggcggctagaggattaccgtcgctcacaagagctcgtccctccttcaaaattgtcgccagtggcgtcaagaagatcaagaccgacaagcccttcggaattaacggcagcatggacttgagggacggcgtcgacgcctccggcagaaagggcaagggatacggtgtttacaagtacgtcgacaagtatggagctaacgtcgatggatacagtcctatttacaacgagaacgagtggtcagcgagtggtgacgtgtacaagggaggagtcaccggattggcaatttgggcggtaactctcgccggaattcttgccggaggtgctcttcttgtgtacaacacaagtgctttggctcagtaaatcttaaagttgttagcgcatgtgtaatcatgtttctataaatgtttctgtgttgttctctttctctctaatgttgtaaaactcagacatactttgaatttataagacttctagtgtttgtatataaaatcatcttcctaaaaaaaaaaaaaaaaaaaaaaaaaaagggcggccgctctagaggatccaagcttacgtacgcgtgccatgcgacgtccttacctctttctattggcgtcaccctaaattcaatttcacttgggccgtcgcttttaacaacggtcttgaactg

SEQ ID NO: 98839 - DNA, 1709 bp, Arabidopsis thaliana columbia
tcttcttcttcctcttcccctaacattccattccccgtatgggtctcaccacttcctaactcttctctctcttatctcttcttgttttagctatgaagaagcaatctcaattcagatccaatcatacccttctcttctttcatctctgatcattaacaacaacaacaacgactcgggttctgtaaattcagttattggagagaaaatggcgatgttagttgagccaccaaatgggattaagcaacaagggaaacattactactccatgtggcaaacattgttcgaaatcgatacaaagtatgttccgattaaacccattggaagaggagcttatggtgtggtttgttcttctatcaatcgtgagactaatgagagagttgctattaaaaagattcacaatgtgtttgagaatcgtgttgatgctttgagaacgttgagggaacttaaacttcttaggcatgtgaggcatgagaatgtgatcgcgcttaaagatgttatgttgcctgctaatagaaccagtttcaaggatgtttatttggtttatgagctaatggatactgatcttcatcagattattaaatcctctcagtctctttctgatgatcactgcaagtacttcttgtttcagttgcttagagggttgaagtatcttcattctgcaaacatacttcaccgggatttgaagcccgggaacctcttagttaatgcgaactgcgatctcaagatttgtgatttcgggttggcgagaacgagccaaggtaatgaacagttcatgactgagtatgtggttacacgttggtacagagcacctgagcttcttctttgttgtgataactatggaacctccattgatgtatggtcggttggttgcatattcgcggagattcttggtaggaaaccgatttttccagggacagaatgcttgaatcagcttaagctaatcatcaacgttgttggtagccaacaagaatctgatattcggttcatagacaacccgaaagctcgaaggtttataaagtctcttccgtactcaagaggaactcatctctccaatctttatccacaagccaatcctctagctatagatttgttacagaggatgcttgtgtttgaaccaaccaagagaatctctgtaaccgatgcgctcttacacccgtatatggcggggttgtttgaacctggaaccaatccgcctgcacatgtcccaatctctctggacatagatgaaaacatggaggaaccagtgataagagagatgatgtggaatgagatgctttattaccaccctgaagctgaaatcttaaatgcctaaatcaacatcaatgatcattaagagtaagctttttccagttttttttttttttgctttctaaaatgcagctttgatgttatgttatatatagcgagtccacaaacgcgggaacagatcgataaaaagcccggtgctttgatctcgtctggtttgatttagttgcagtgagtgagtagtagtaacagagtttgaaaagtggctctcagtatctttaccactttgtaaatgtgactgtttgttactaagtaagttaaggcttgtttttgttacattatctttgagttgatgagttttactactgattttcaggccaactcttgtattttgtatagctttgccattgccccacttgctagccacacgaaataattttttaaaaaaaaaaaactctcatact

SEQ ID NO: 98840 - DNA, 896 bp, Arabidopsis thaliana columbia
tccggaaagaatcctatgaattcttcattattggctgaggtgtatgtcgatatttttgctgcaataatcctaatcactggaggaggaatctgcttctatggcctgcgtctgctctttaatctaagaaaggtgcggtctgaacaagtttcatcagagatgcgaaaggtatcgggtctagcaggagtctcagttgtttgcttcactgttagctctttaatcgctcttctcacacacattccactcttttatcattggaacccaagcaaattacacggcatcaaagcattggttcttctgatcatatactatttcataggttccaccgtcccattggctttcgttttatgggttttgcgggagttaccccctcaaaacattgtgagtaggcaagaagacaccagaaggattacttatgtcaactatgaaactgttccaaggcaacctcaaggtcctcaacaagactgggcctccgccacagtgtcgaaaaatcaggtgtctaaagcaagtcctatatgaaccaaacaatcatcataatcattgacctgaagcaaacatccgccaatcttcttttgtagttaccgggaaaaagcctcgtgggattgcagaatggttcttaggcccaatgtggtgtgttgtggtggagtgaatgaaagtggaaacaagctcgttttcttctctctgagtcgccttggaatacaaaaatttgtttataagatagaaatggaggtttgaatctgagaaagctgtctgtaaatattaacttttgattgcaatttatagtttagcatcatgtgttggggggacttgtggatggatataaaatgtgttccaaggaagatataattttgtcttccatactaaaaaaaaaaaaaaaaaaaaaaaaaaagggcggccgc

SEQ ID NO: 98841 - DNA, 636 bp, Arabidopsis thaliana columbia
  unsure (1)..(636): unsure at all n locations
ctatagtgttccttacttaattctcatacctctctctctctctctctcctttgcctaaccatttcttcatcatcttctttctgcagatttctccgtttttccttgaatatgccttcaaaaaatctacaacaggcagtcctcacaaacgaattcacaaccaacttcattacgacctgtaaggactggctcgacgtaaatggtcttgctaaaggaaacttggagaagaagagagatgataatgaagaagaagagcgtctgaaaaccgagtctaaacttccgggccatgacatccacggtttcgataacgagatcaagtcattgcaacacttcttgttggatcagaaggttaggagggagttcaagagtcttgtgattgtcggagaatatggtgttgggaagacagcattatgccagaagatcttcaatgatgaagctgtgaagagtgtttatcctcccagggtttggntgtctatggaaaacaaagaatctaaggagggacttnatgggaagatatgtgtnttgaagaagatcttgaagggtcttggagttgaagagttaatcctcgaaactatcagtactgatgccaaacaagattttaaggacaatgaggaagttgcaagcaatcaggaagctgga

SEQ ID NO: 98842 - DNA, 479 bp, Arabidopsis thaliana columbia
cgacgacgacgacggagatagccgtaatcttagacataataataataacaattcgagtgaccaaattgagataattacaacagaccaaacagatgataaaacaaaaccaatcttctttgatttcatgagaaaagaaagaccaccagatttgaaccttttgccgagctctccttcttccgatcatgcttcaagtggagtcacgacggagatcttctcttcttccgatgaagagaccagtagttgcaatagtttcagatgaaatctttaatttaattttaatgttgactatcttaataagttatcatagttttagattaatacgactctctttcctttttattccatttttacttgaaagcgaatctgtgtcctctcttttcgtttcggtttttatatgatttcgtgaaactttgttggagttttatctgagtgattaaccacccgtttcaagaaaatgtatgttaactttattctctagc

SEQ ID NO: 98843 - DNA, 506 bp, Arabidopsis thaliana columbia
cggcactatacgactcctatagggaaagccggtacgcctgcaggtaccggtccggaattcccgggtcgacccacgcgtccgagcaaactcaagatttcaagtaaggcaaaacctaaagaatcaaagggtgaatctgagagacgttcacattcattgatgcctacatttagcagagagagaggggagagcgaatcacacaagccttccgtctctggacaacccttgtctagtacagagagaaatcaggcagcctcaagcaggcacactatttctatcccgcggccatcattaagtatggacacagatcaagctgaatcgcgtaggcctcatcttgtgatacgaccaccgacagaaagagaacagcctcagaagaaacttgttataaaacgttcgaaagagatgaatgatcatgacatgagtagtcttgaagagagtccacggtttgagtcccggaaaacaaaaagaatggcagaactggcgggttttcagaggcagcagagctttag

SEQ ID NO: 98844 - DNA, 704 bp, Arabidopsis thaliana columbia
  unsure (1)..(704): unsure at all n locations
nnnnnnnctccaagactttgacgtcgcatccacgcgtacgtaagctcggaattcggctcgagtccttctatcttgttctgcactttaaaaaaaaaaaatatccgtctcactctctcgccgccggtaacatttcccggcgacaaaacttctctactctcaccattcctccatcgtaatctctaaattcttctccattctcttcttcctcccgatcatctcgagctcttcgtgagagattatgtgattatgtaatcgttgttgctgtagaagacgatctctaacaactgattccttcatcatcaccttcgctagatttgtaattttcagagcttgagatgttggatcttaacctcaacgctgattctcccgagtcgactcagtacggtggtggactcatacttagatcggcagacatcagacaactccgccgggaatcgagtggaagagtccggtacatcgacgtcgtcagttatcaatgccgatggagacgaagactcttgctctactcgagctttcactctcagtttcgatattttaaaagtcggaagtagtaacggcggagacgaaaagcccgccgctcagcttcgtactaagagtttttcggtagtgagatgggactctacaatgtgaggactagcttnanctgatgacttcttgaccgtgtacgaaacaatgtactcgttcatcgctcgttcgtagtaaaa

SEQ ID NO: 98845 - DNA, 748 bp, Arabidopsis thaliana columbia
  unsure (1)..(748): unsure at all n locations
aatacgactcattatagggaaagctggtccgcctgcaggtaccggtccggaattcccgggtcgacccacgcgtccgatcccatccgatctcagtattgatgtggaaaaagccaaaagagttgtccatgatctcgctcagagtagattatcgaattcgctggtccaagccgtggcattactcaggcagagaaactctaaaggagtggtcttgtcgctgaatgatttgcttgcatgtgacaaagctgtgccggctgagccaatgtcatgggaggtctcagaggaattatctgatctataggctatttattcaaagagtgatcccaaacccgcaccggaaaaagttttgaggctacaatatctgctgggaatagatgattcaactgcaactgccctccgtgaaatggaagatggagctttatcttctgctccagaagagggcaatttcgtcttttaaatctttggagaaatcacttgagttattatgtattgtgttacggccgagggtggaaaaatgattttgaatttgaaatttgaccaaagtctgtgaaaattttgtatcagaaccataaacttgatatgattaatttgaaaatctgccccacanaaaaaanaaaaaanaaaaataaaaaaaaaaaaaaaaaaacaaaaaaaaaaaaaaaaaaaaaaaaaaacaaagggcggccgctctagaggatccaagcttacgtacgcgtgcatgcgacgtcatagtattctataggtgtcctaa

SEQ ID NO: 98846 - DNA, 620 bp, Arabidopsis thaliana columbia
  unsure (1)..(620): unsure at all n locations
aggtgacacttagaagagctatgacgtcgcatgcacgcgtacgtaagctcggaattcggctcgagggaaatgatcgagggagggctatctccaaggagaaggcctgagttggtagaaaagtccttggacgaaacgcttgtctgtagagaatagataactagatatgaagaaactctttggttatgtgttcaaaacagacatgaagcaatagagaagcgtccttttggatggagaaatctccccaaggtatatcatctttgccataaagtggctttgtttcaactcaaaaccgaggagaaaacactgaggttcattgagaaatctggttgagttgtgtgtcttaagccaaattccgaagatttggttttgaaagatggtttgtcgcctcctatatgtgttctactacatatacgtaccatttgtaattcactctctaacttaatttttttttgttgttgttccactctgtgacaaccacaggcattttgtggctaaaaaaaaaaaacgtggagctcaataaaactccctacagaancgataaaatgatccatcatggatcacattcttnnnnnnnnnnnnnnnnnnnnnnnnnnnnnnnnnnnnnnnnnnnnnnnnnnnnn

SEQ ID NO: 98847 - DNA, 756 bp, Arabidopsis thaliana columbia
  unsure (1)..(756): unsure at all n locations
tggacatgggggtccnccactactcnctttttcaacgcccctcttctcnggagtattgggacncgtgatggnctnctttgctggactnagnggaagaccactggagctcctcagaatcactggtttggacctgcggggncccgagaggggccgggatagggccnccagaggctataaagctggtttggtcatgccacagagaagtcatctacgattatggtccggttccacaaggttgggaacttcctccatctacttagaagtggtgtgtccactaataattaataaactaagatcttagtgtgctgttgcatcaaataaatatgagttttgtagttttatctctacgagtagtttccgtgtgagggaataagagcttgaaacatgaagttttcaacgacgttgacttagtcaaggggtagagggattaagacagagagagaactattgtaaaactcagtccaccagaaattttcttcagctcaaagccagacaataatacaaatgtttttgaaagaagaagagtgaaaagaaaaacaagatgataacttgttaatgttctcttcattaataatgttgctaagaccctaatctaatcgatcttaaataatctaatgaacagttttttttcatcactatcatgggaaaacaatagaaagggactctaccagtcctgatcattttggagttggtaaacagacaaatacaaccatggtgattgtgtccttgaaacaaaaacgccaaagtgatctgcaa

SEQ ID NO: 98848 - DNA, 806 bp, Arabidopsis thaliana columbia
  unsure (1)..(806): unsure at all n locations
atcgactcatatagggaaagacggtacgcctgcaggtaccggtccggaattcccggttcgacccacgcgtccgcccacgcgtccgggataataaaacctacgaactcgtcaccaaagaaatctttggaccatttcagattgtaacggaatacaaaaaggatcaacttcctctagtgttggaagcattggagaggatgcacgctcatctaactgcagctgttgtttcaaacgatcccatctttcttcaggaagtaatagggaactcagtgaatgggactacatatgctggactaagaggaagaacaactggagctcctcagaatcactggtttggacctgcgggggacccgagaggggccgggatagggacaccagaggctataaagctggtttggtcatgccacagagaagtcatctacgattatggtccggttccacaaggttgggaacttcctccatctacttagaagtggtgtgtccactaataattaataaactaagatcttagtgtgctgttgcatcaaataaatatgagttttgtagttttatctctacgagtagtttccgtgtgagggaataagagcttgaaacatgaagttttcaacgacgtggacttagtcaaggggttgagggattaagacagagagagaactattgtaaaactcagtccaccagaaattttcttcagctcaaagccagacaataatacaaatgtttttgaaaaaaaaaaaaaaaaaaaaaagggcggcagctctagaggatccaagcttacgtacgcgtgcaggtgacgccaangatcttctata

SEQ ID NO: 98849 - DNA, 559 bp, Arabidopsis thaliana columbia
  unsure (1)..(559): unsure at all n locations
nnnnnnnnnnnnnnnnnnnnnnnnnnnnnnnnnnnnnnnnnnnnnnnnnnnnnnnnnnnnnnnnnnnnnnnctttttttttttttttgagcctctaaaattcattgggatcgacatcaaccctgacaagttccaactaggtatgcagatgaacatgcatgtcagtcttaaagtaggttaaagagcattgttactaaatgaagtgtgctttgctggatgaacaggcagagaagcagggattagtgaattcataaatccaaaggagagtgacaaggcagttcatgagagagtaatggagataacagagggaggagtggagtacagcttcgagtgtgcaggaagtatagaagcacttagagaagcctttctgtctacaaactcaggagtgggagtgactgtcatgctgggcgttcacgcaagcccacagcttctccctatccatcccatggagctcttccaaggcagatccatcaccgcctctgttttcggaggcttcaaacccaaaacccaattaccctttttcatcacccagtgcctccaaggtcttctcaatctcgatc

SEQ ID NO: 98850 - DNA, 882 bp, Arabidopsis thaliana columbia
  unsure (1)..(882): unsure at all n locations
tgacgtcgcacgcacgcgtacgtaagctcggaattcggctcgagggctgatattcagcctgcctccaccgtcgctatttttggacttggcgctgttggacttgccgtggctgaaggtgcaagagccagaggagcctctaaaatcattgggatcgacatcaaccctgacaagttccaactaggcagagaagcagggattagtgaattcataaatccaaaggagagtgacaaggcagttcatgagagagtaatggagataacagagggaggagtggagtacagcttcgagtgtgcaggaagtatagaagcacttagagaagcctttctgtctacaaactcaggagtgggagtgactgtcatgctgggcgttcacgcaagcccacagcttttccctatccatcccatggagctcttacaaggcagatccatcaccgcctctgttttcggaggcttcaaacccaaaacccaattaccctttttcatcacccagtgcctccaaggtcttctcaatctcgatctcttcatctctcaccagcttcccttccacgatatcaacgaagccatgcagctgcttcaccaaggcaaagctcttcgttgccttctccacctctaaactgaacaaacatcttttacattttccaaatccgtttgattgattgttctactgcttttagagtttccttattgggtctggtccccccccatactaaaataaaagttggaaatgttttctcccnnnnnnnnnnnnnnnnnnnnnnnnnnnnnnnnnnnnnnnnnnnnnnnnnnnnnnnnnnnnnnnnnnnnnnnnnnnnnnnnnnnnnnnnnnnnnnnnnnnnnnnnnnnnnnnnnnnnnnnnnnnnnnnnnnnnnnnnnnnnnnnnnnn

SEQ ID NO: 98851 - DNA, 648 bp, Arabidopsis thaliana columbia
  unsure (1)..(648): unsure at all n locations
acccccccccagacccggttcccccancaacnagncccccngcagagcanttgaccggncgccaaagctntcngcnaanactgnnccccgcccgggatgaacccgccacttctttaactaatccgacctccagttttgagtttcctataatgggtggttccgatttactacctggtttctcaaatgctttcgcccggtgggtattccccgcaagggcatggtaaaggagggtctgggagaaagaaatggacccttgcacaggaaggtaccggtggttacttggcaggtacggcagggttgaacagagtcgtaataacaggaaaagcacagaataacagttacatcttgtaaatatccgactcatacctttgtaaagatccacgtttcttgttttcttttttttttctttctttctttctattcttagcaaaatagatttcattcttgttttttcaccaccacccacaaagtttgattctgtttttctgtttttggtatatatagagggtttggtttgtttgtttttccatttttttcgtaatttattaaccgccaattcatgcgcggcaataaattgtgttattagacctttgaagcggccgcgaattcgatatcaagcttatcgataccgtcgacatcgaggggggg

SEQ ID NO: 98852 - DNA, 894 bp, Arabidopsis thaliana columbia
aggtgacactatagaagagctatgacgtcgcatgcacgcgtacgtaagctcggaattcggctcgagctttctcgatctttgagatttctttcaaaggaagaaaaaaaaaaaaactcgcgatgtccgccgaatcagctagccaaattcctaagggacaggttgatctactagattttattgactggtctggtgttgaatgtcttaaccaaagctcaagtcactctttgcccaatgctctcaagcagggatatagagaagatgaaggtttaaacttatagagtgatgctgatgaacaacttctcatctatattccttttaaccaagttatcaaactacattcctttgctatcaaaggccctgaagaggaaggtcctaaaactgtaaagtttttctcaaacaaagagcacatgtgcttcagcaatgtcaatgattttcctccaagcgacaccgctgaactaactgaagaaaaccttaagggaaaaccgggggtcctaaagtacgtaaagtttcagaatgttcgtagcttgacgatcttcatcgaagccacccaatcaggttctgaggtcaccaaggttcagaagattgctctctatggctcaacggtggagacgactgatatgaagggattgaaaaagattgaagatcactgagcatacaaaagtgttttaatcatatgatcgtatatcagtttgatttctagtgttctattgcgtttcatcgtttgttttttacttacttttttttgaattaaaatagaccagaacttgtgattgcctattcgcaggaattcgaaacgaaggataagtcaatttgaaaaaaaaaaaaaaagggcggccgctctagaggatccaagcttacgtacgcgtgcaggcgacgtcatagatcttctatagt

SEQ ID NO: 98853 - DNA, 1226 bp, Arabidopsis thaliana columbia
  unsure (1)..(1226): unsure at all n locations
atgatttgccggcannnnnnnnnnnnnnnnnnnnnnnnnnnnnnnnnnnnnnnnnnnnnnnnnnnnnnnnnnnnnnnnnnnccacgcgtccgattttcttccactttctcgatctttgagatttctttcaaaggaagaaaaaaaaaaaaactcgcgatgtccgccgaatcagctagccaaattcctaagggacaggttgatctactagattttattgactggtctggtgttgaatgtcttaaccaaagctcaagtcactctttgcccaatgctctcaagcagggatatagagaagatgaaggtttaaacttagagagtgatgctgatgaacaacttctcatctatattccttttaaccaagttatcaaactacattcctttgctatcaaaggccctgaagaggaaggtcctaaaactgtaaagtttttctcaaacaaagagcacatgtgcttcagcaatgtcaatgattttcctccaagcgacaccgctgaactaactgaagaaaaccttaagggaaaaccggtggtcctaaagtacgtaaagcttcagaatgttcgtagcttgacgatcttcatcgaagccaaccaatcaggttctgaggtcaccaaggttcagaagattgctctctatggctcaacggtggagacgactgatatgaagggattgaaaaagattgaagatccctgagcctacaaaagggtttaaatcatatgatcggatatccaggttgatttctagggttcctattgcgtttcatccggttgttttttacctaacctttttcttgaaatnaaaaaagaacacgaacttggggattgcccaaaaaaaaaataaaaaggggcggcccgctctagaaggaatccaagcttaacgtacccggggcctgcgaatgtattaactttttttatagggcgcccctaattcaaattccctcggccggggttttaacaaggcggagactgtggaaaccctgtgggtcacccaacttaatggcttggaaaacatccccttttgccagtttgggtattaacagaaaggccccccccgacccgcctctcccaacattgcccctccttaatgggaaatgggacccgccctttatcgggccattaaccgcggcggtgggtgggtgttaccccaagggaaccgttcatttgcaaggccttaaccccttcttttttttttcctttttttcaccagttgcggttttcccgaagattaatggg

SEQ ID NO: 98854 - DNA, 529 bp, Arabidopsis thaliana columbia
  unsure (1)..(529): unsure at all n locations
cgattgaattaggtgacactatangaagactatgacgtcgcatgcacgcgtacgtaagctcggaattcggctcgagctctgtctcaaaagacaagtagattccttttttttacagtatccaataatttgtaatcatataaataatcggtgaaaaagaaggattctttgtttgtttcccgagaaaatatcctcgatttccatctcctatctgtcatcggagctttctacttccgaaggagtaaaggatcaatcaagagtttgatcttgttagaatagccgataatggaaggagatgtgttgtcaggatttggagacagacacaatatggatgggaaattgttgcagagtttccagaagagctttgtggatgttcaagacattttggaccaaaaccgattattgatcaacgagatcaatcagaaccatgaatcgaaacaacccagatacttgngtcgaaaccgtggggttgatcaaagagctcaacaaccatatcagaagagtagctagcctttatggtgatctctctcat

SEQ ID NO: 98855 - DNA, 368 bp, Arabidopsis thaliana columbia
cacgccgtcgaggaattcttctccaccaacgaatccggcgacgtcttatcaccaccttgtcgcatctttagttgatgttgtttaaaggttttagctaataagggcatgaaacggatctgctcggtttcaagtgttcaactccttaccagaagtttcagagctttagcatcgccacgttccttgaactatcccctgcagtgtatcaagcgttcatcagttcggatggagagtagcaactttccttctggtgtcagaaccgagagtagtgtgaagccaagaggagcattgatagttctagaaggtcttgatcgcagcggggaaatcaaccacagtgtgctaaagctactctctttctttgaatggtttta

SEQ ID NO: 98856 - DNA, 829 bp, Arabidopsis thaliana columbia
  unsure (1)..(829): unsure at all n locations
atgatactgccnnnnnnnnnnnnnnnnnnnnnnnnnnnnnnnnnnnnnnnnnnnnnnnnnnnnnnnnnnnnnnnnnnnnnnnccacgcgtccgcccacgcgtccgccctgttccatcaagatgctcatttatgggctccggtcgtagatactacttctcgtgacatggcagttgctgcaagggaaagctcaagaaagcttcaggccttatcttcagaagataggaaacaaattctacacgacattgccaatgcccttgaagtaaatgagaaaacaattaaagctgagaatgatttagatgttgctgcagcacaagaagctggatatgaagagtctttggtagctcgcttagttatgaagcctgggaagatctcaagccttgcagcttccgttcgccagctagccgaaatggaagatccaataggccgtgtattaaagaaaactcaggttgcagatgatcttattttagagaagacctcatcaccattaggcgttcttctgattgtttttgaatcccgacctgntgcacttgtacagatagcttcacttgccatccgtagtggaaatggtcttctgctgaagggtggaaaggaggcccggcgatcaaatgctatcttacacaaggtgatcactgatgcaattccagagactgttgggggtaaactcattggacttgtgacttcaagagaagagattcctgatttgcttaagcttnatgacggtatcggtcttgtgatnccaagngggagcaacaagntttnttacctccggtaaaaaaattcnttcaaaaannccccntggttanggcaaaaccntattngggatntttc

SEQ ID NO: 98857 - DNA, 731 bp, Arabidopsis thaliana columbia
ttttttttttaagaataacaatctttattaaacaaatccaacaaattatatacattgcacaaaactcagacgagaaataaagaactcaatgaaaattgaccaatgtcaccactcaccaacacgagagggcgtttctagcaaaatcagaagtcacaagaggaaatctgcaaaaacctcaacattgagaggagaagcaaccaaataaatgaaagagataaaacaatctttttcagtttctcctctgtttcttttcttcattctttctgcaccacgcgtccgctgatgcaattccggagactgttggaggtaaactcataggacttgtgacctcaagagaggagattcctgatttgctcaagcttgatgacgttattgatcttgtgatcccaagaggcagcaacaagcttgtttctcaaataaaaaactcgacgaaaatcccagtgctaggccatgctggtatgtttataagttcagttccattaagttcttaagttggattggcctagagagaacatggcttattttttgggtgtttccagatggaatctgtcatgtatatgttgataagtctggtaaactggacatggcaaagcgcattgtttccgatgcaaagttggactatccagcagcctgtaatgcgaatggaaacccttcttgtacataaagatttggagcagaatggttttctcgatgatcttatttatgttctgcaaaccaaaggcgtcactttg

SEQ ID NO: 98858 - DNA, 439 bp, Arabidopsis thaliana columbia
  unsure (1)..(439): unsure at all n locations
ggaagatagtgaagtagcagaaatattcctccgccaagtggacagtgctgctgttttccacaatgcaagcacaagattctctgatggttttaggttcggacttggtgctgaggtgggaataagcacaagcaggattcatgcccgtggtccagttggagttgaaggattattgacaacaagatggataatgaggggaaagggacaagttgtggatggagacaatggaatcgtttacacccataaggatcttcctgtcttacaaaggccagaggctgttgagaatgggatttaggtccccccttcctctgctgatggccaaattaaggtttaccaattttggattgaaggtttttnccccccttttaacatagggttttaggggtccctggagggttggtcccccccttagggaggncctcatttccttaaaggggccttt

SEQ ID NO: 98859 - DNA, 439 bp, Arabidopsis thaliana columbia
  unsure (1)..(439): unsure at all n locations
ataaaaaactcgacgaaaatcccagtgctaggccatgctgatggaatctgtcatgtatatgttgataagtctggtaaactggacatggcaaagcgcattgtttccgatgcaaagttggactatccagcagcctgtaatgcgatggaaacccttcttgtacataaagatttggagcagaatggttttctcgatgatcttatttatgtnctgcaaaccaaaggcgtcactttgtatggtgggccaagagcaagtgcaaaactgaatatnccggaaacaaaatcatttcaccacggcgtacagttccaagggcctgcaccgttgaaattgtaggaggccggtttatggggtctattaggtccatatttcncccaccatgggaaggggcacaccacttggtttcccataggtgccgggaggtttgttaaggtggcaggaattt

SEQ ID NO: 98860 - DNA, 1034 bp, Arabidopsis thaliana columbia
  unsure (1)..(1034): unsure at all n locations
gtacacttagagagcttgacgtccatgccgcgtacgtagctcggaattggctcgacactgatgcaattcagagactgttgggggtaactcattggacttgtgacttcagagaagagattcctgatttgcttaagcttgatgangttatcgatcttgtgatcccaagaggatngcacangcttgttactcagataagacatactacannaatccctgtgctaggtcatgctgatggaatctgtcatgtatatgtcgacaaggcttgtgatacggatatggcanagcgcatagtttctgatgcaaagttggacctatccagcagcctgtatgcgatggaaacccttctcgtgcataaggatctagagcagaatgctgtgcttaaatgagctatcttttgctctgcagagcaatggagtcactttgtatgggtgaccaaaggcangtangatactgaacataccagaagcacggtcattcaaccatgagtactgtgccaaggcttngcactgtngaagttgtagaagacgtttatggtgctatagatcacattcaccgacatggggagtgcacacactgactgcattgtgacggacgatcgcgaagttgcagagctattcctccgccaagtggacagtgctgctgttttccacaatgcaagcacaagattctctgatggttttaggttcggacttggtgctgaggtgggaataagcacaagcaggattcatgcccgtggtccagttggagttgaaggattattgacaacaagatggataatgagaggaaagggacaagttgtggatggagacaatggaatcgtttacacccataaggatcttcctgtcttacaaaggacagaggctgttgagaatggaatttagttctctctttctctgctgatgtcatattatgntttacaattatgattgaagtttttcccccttttacatagggtatagngtcccttaggttntnccnccnaaggaggnncattnnttaggggctttnaaaaaggaatttttccnccccctttt

SEQ ID NO: 98861 - DNA, 2672 bp, Arabidopsis thaliana columbia
  unsure (1)..(2672): unsure at all n locations
tacgactcactatanggagagctggtacgcctgcaggtaccggtccggaattcccgggtcgacccacgcgccacgtccgcttcttccttcaactgagtccgactaagttgactcgttctctcgtgttttcgatagacacaaactatgacggagatcgatcgttcacgcgcgttcgccaaagacgttaagcgtatcgtcgtcaaggttgggactgcagttgttactgggaaaggtggaagattggctcttggacgtttaggagctatctgtgaacagcttgcggagttaaactcagatggatttgaggtcattttggtgtcatctggtgccgttggtcttggtcgacaaaggcttcgatacagacaattagtcaacagcagttttgcagatttacagaagccacaaatggaacttgatgggaaggcttgtgctggtgttgggcagagcagtctcatggcttactatgagactatgtttgaccagttggatgtgacggttgctcaaatgcttgtgaccgatagcagttttagagataaggatttcaggaagcaacttagtgaaactgtcaaagcgatgctgaggatgagggttattccagttttcaatgagaatgatgctataagcactcgcagagccccctacaaggattctactggtatattttgggataatgacagcttagccgctcttctgtcgctagagctgaaagctgatcttttgattcttctaagtgatgttgagggcctttacactggccctccaagtgattctacctcaaaattaatacacacattcattaaagaaaaacaccaggacgagattacttttggcgaaaagtccaaattaggacgagggggtatgactgcaaaagttaaagctgctgttaatgcagcttatggtggcgttcctgttatcataaccagtggatatgcagctgagaatataagtaaagtccttagaggactgcgtgttggtaccctgttccatcaagatgctcatttatgggctccggtcgtagatactacttctcgtgacatggcagttgctgcaagggaaagctcaagaaagcttcaggccttatcttcagaagataggaaacaaattctacacgacattgccaatgcccttgaagtaaatgagaaaacaattaaagctgagaatgatttagatgttgctgcagcacaagaagctggatatgaagagtctttggtagctcgcttagttatgaagcctgggaagatctcaagccttgcagcttccgttcgccagctagccgaaatggaagatccaataggccgtgtattaaagaaaactcaggttgcagatgatcttattttagagaagacctcatcaccaataggtgttcttctgattgtttttgaatcccggcctgatgcacttgttcagatagcttcgcttgcaatccggagtggaaatggtcttctgctgaagggtggaaaggaggctcgtcgatcaaatgctatcttacacaaggtgatcactgatgcaattccggagactgttggaggtaaactcataggacttgtgacctcaagagaggagattcctgatttgctcaagcttgatgacgttattgatcttgtgatcccaagaggcagcaacaagcttgtttctcaaataaaaaactcgacgaaaatcccagtgctaggccatgctgatggaatctgtcatgtatatgttgataagtctggtaaactggacatggcaaagcgcattgtttccgatgcaaagttggactatccagcagcctgtaatgcgatggaaacccttcttgtacataaagatttggagcagaatggttttctcgatgatcttatttatgttctgcaaaccaaaggcgtcactttgtatggtgggccaagagcaagtgcaaaactgaatattccggaaacaaaatcatttcaccacgagtacagttccaaggcctgcaccgttgaaattgtagaagacgtatatggtgctatagatcatattcaccaacatggaagtgcacacactgattgcatagtgacggaagatagtgaagtagcagaaatattcctccgccaagtggacagtgctgctgttttccacaatgcaagcacaagattctctgatggttttaggttcggacttggtgctgaggtgggaataagcacaagcaggattcatgcccgtggtccagttggagttgaaggattattgacaacaagatggataatgagaggaaagggacaagttgtggatggagacaatggaatcgtttacacccataaggatcttcctgtcttacaaaggacagaggctgttgagaatggaatttagttctctctttctctgctgatgtcatattatgttttacaattatgattgaagttttttcccccttttacataggatatagtgttccttgaggtttgtaccatcataagaagatctcattacttaagtggtctttgataatagtgaaatgtttagcagcttctcttcatgtcaaaaaagctccatacatgtccacaacctttgatttaccacaactatttgtatcatttctccatgcagaataatgaatctctttaaaaaaaaaaaaaaaaaaagggcggcgcgctctagaggatccaagctcacgtacgcgtgcatgcgacgtcatagctcgtctatagtgtacggga

SEQ ID NO: 98862 - DNA, 777 bp, Arabidopsis thaliana columbia
  unsure (1)..(777): unsure at all n locations
aataaaaagagatttatttaagaattgactaggnattaccnataaattatatgaaaatagaatagcaaagtaattcacttaagaataacaatctttattaaacaaatccaacaaattatatacattgcacaaaactcagacgagaaataaagaactcaatgaaaattgaccaatgtcaccactcaccaacacgagagggcgtttctagcaaaatcagaagtcacaagaggaaatctgcaaaaacctcaacattgagaggagaagcaaccaaataaatgaaagagataaaacaatctttttcagtttctcctctgtttcttttcttcattctttctgttttggtttttctctttacttcaatttcgcatctctctacgtgtttcttcaataatacaagacgagatgacgctcgcacgaagaacatgagtatttgcgtttgaccttgaaacaaagtggtaagaaacagaacaaccacttcgtctctatatccaccgccgatacttttccgccgcaataaggacacatccctggtgcttgttgccgaccaagctccgtcttctcttcatgatacacaacttccaaacacatttttactcacaattctcagacttcctttgtgtcttatctttatagtgtttctaggcttggcttccttttttctggtacgttagctagggaaaatctagaacttctagaagtgtggagaaggagaaacgaaaaggatatttttattaccaagaaagggaaaaacttatttcaagtgtaaagatgtgtttt

SEQ ID NO: 98863 - DNA, 2782 bp, Arabidopsis thaliana columbia
  unsure (1)..(2782): unsure at all n locations
nnnnnnnnnnnnnnnnnnnnnnnnnnnnnnnnnnnnnnnnnnnnnnnnnnnnnnnnnnnnnnnnnnnnnnnnnnnnnnnnnnnccacgcgtgcgcgcacgcgtccgctgatatttattttcttaccttaaatacgacggtgcttcactgagtccgactcagttaactcgttcctctctctgtgtgtggttttggtagacgacgacgacgataatggaggagctagatcgttcacgtgcttttgccagagacgtcaaacgtatcgtcgttaaggttgggacagcagttgttactggaaaaggtggaagattggctcttggtcgtttaggagcactgtgtgaacagcttgcggaattaaactcggatggatttgaggtgatattggtgtcatctggtgcggttggtcttggcaggcaaaggcttcgttatcgacaattagtcaatagcagctttgcggatcttcagaagcctcagactgaacttgatgggaaggcttgtgctggtgttggacaaagcagtcttatggcttactatgagactatgtttgaccagcttgatgtgacggcagctcaacttctggtgaatgacagtagttttagagacaaggatttcaggaagcaacttaatgaaactgtcaagtctatgcttgatttgagggttattccaattttcaatgagaatgatgctattagcacccgaagagccccatatcaggattcttctggtattttctgggataacgatagcttagctgctctactggcgttggaactgaaagctgatcttctgattcttctgagcgatgttgaaggtctttacacaggccctccaagtgatcctaactcaaagttgatccacacttttgttaaagaaaaacatcaagatgagattacattcggcgacaaatcaagattagggagagggggtatgactgcaaaagtcaaagctgcagtcaatgcagcttatgctgggattcctgtcatcataaccagtgggtattcagctgagaacatagataaagtcctcagaggactacgtgttggaaccttgtttcatcaagatgctcgtttatgggctccgatcacagattctaatgctcgtgacatggcagttgctgcgagggaaagttccagaaagcttcaggccttatcttcggaagacaggaaaaaaattctgcttgatattgccgatgcccttgaagcaaatgttactacaatcaaagctgagaatgagttagatgtagcttctgcacaagaggctgggttggaagagtcaatggtggctcgcttagttatgacacctggaaagatctcgagccttgcagcttcagttcgtaagctagctgatatggaagatccaatcggccgtgttttaaagaaaacagaggtggcagatggtcttgtcttagagaagacctcatcaccattaggcgtacttctgattgtttttgaatcccgacctgatgcacttgtacagatagcttcacttgccatccgtagtggaaatggtcttctgctgaagggtggaaaggaggcccggcgatcaaatgctatcttacacaaggtgatcactgatgcaattccagagactgttgggggtaaactcattggacttgtgacttcaagagaagagattcctgatttgcttaagcttgatgacgttatcgatcttgtgatcccaagaggaagcaacaagcttgttactcagataaaaaatactacaaaaatccctgtgctaggtcatgctgatggaatctgtcatgtatatgtcgacaaggcttgtgatacggatatggcaaagcgcatagtttctgatgcaaagttggactatccagcagcctgtaatgcgatggaaacccttcttgtgcataaggatctagagcagaatgctgtgcttaatgagcttatttttgctctgcagagcaatggagtcactttgtatggtggaccaagggcaagtaagatactgaacataccagaagcacggtcattcaaccatgagtactgtgccaaggcttgcactgttgaagttgtagaagacgtttatggtgctatagatcacattcaccgacatgggagtgcacacacagactgcattgtgacagaggatcacgaagttgcagagctattccttcgccaagtggatagcgctgctgtgttccacaacgccagcacaagattctcagatggtttccgatttggacttggtgcagaggtgggggtaagcacgggcaggatccatgctcgtggtccagtcggggtcgaaggattacttacaacgagatggataatgagaggaaaaggacaagttgtcgacggagacaatggaattgtttacacccatcaggacattcccatccaagcttaaacaagacttccgagtgtgtgtttgtgtatttggttgagacttgaggagagacacagaggaggatgggcttttttgtttcctctctgcttagtactcatatcctatcattattattattactactacttattattgaaaccctcgcttatgtagtggttttgatttagggttaggattgcaccaaaaataagatccactttaccacttagtcttgctcataagtacgatgaagaacatttaattagcttctcttcttgtcattgtaagctacctacacatttctgatctttatcaagatactactacttttcaaaaaaaaaaaaaaaaaagaaaaaaagnnnnnnnnnnnnnnnnnnnnnnnnnnnnnnnnnnnnnnnnnnnnnnnnnnnnnnnnnnnnnnnnnnnngtacctaaat

SEQ ID NO: 98864 - DNA, 430 bp, Arabidopsis thaliana columbia
tctgtacaatccaccattggtgacgtgccatcttcatcctctgagatggggaggtcctccttcttcttatcgttatctattctttgatgttagcgcggtgcaatctgcagaatcgatcttcctcccaagtcaaatcggagttgaagattcccgcgtctttgaatctcttaggcttagtcctgtatgctccgcggctgatccaaacctcaactacaagccggtcatcgggattctgacccaccctggcgaaggtccacgggacgctcgccttcactctctgaaaaactacgcctacgcgacgaacatatcgtacatcgcagcttcgtatgtgaagttagctgagactggtggagctcgtgtgattcctcttatctacaacgagcctgaagaaatcttgtttcagaagctagaattggtaaatggtgtgata

SEQ ID NO: 98865 - DNA, 815 bp, Arabidopsis thaliana columbia
  unsure (1)..(815): unsure at all n locations
ggtnagatctacnttgctggaggtggtggtggttcggangttgcggcggcggtggaantagtatgatccggagttgaatcggtgggaagttgtgactcaatcggcnaggaanagatacggttgcatcggagcagccgttgacggagttttttatgtgatcggtggattgaaaattgggaatgagacctcacgcgcggtggcggcgcgtgcttatgcgagctctatggatcttttcgatgtggagtcgcgtcagtggttaaggagtcgttcggttcctggcggtggatgtgtagtggcggcgtgtgcggcggttggatatgtgtatgtgctaaccagtcacgcggtggagctttcgtttttggcgatttgatgcgcgtcgtcgtggtggaaacaccgggtttggaaaaatggcagaagctgaaaagtcccccgttaccggcacaaggtgccggttaagatggaaccggtgaaggtttaacctgcgtcggagtggaagataaagtggcggtggttcaggtggtgggatgcattgacgatttgcttcggcggagtgggaggggtgagagagggattagagaaagccttgtgttgctgtatgatacgacggagggagagtggaggagagcggcggatttacctgagatgattacacgcgccgcctgtgcgtgtgtggagtggtaagagnggagaccacggcgcaggattatgggtacgagaagttggaagatgctancgtacgcaggatatattaaagtgggcaaaaacaatatcattatgattggtgcacatgtttactgtntgaaaagcaatagcgt

SEQ ID NO: 98866 - DNA, 459 bp, Arabidopsis thaliana columbia
  unsure (1)..(459): unsure at all n locations
gacttggtggccccctacaatgncnaggacttctttcaaaccccgtgntcgcgcacaaggcttctattctatgacatggaagatggacttcaaatccgtggtttccctacacgtggtgtttaactcaacggaacacaaagggacatgaacataatgggtgctgatttgatgatggagcccaacaagagatctaatcggtcgttggtgggacaggtgacttcttcatggctcgtgggatcgctaccttcgtgactgatttatttcaaggggctaagtatttccgagttaagatggatattaagctctatgaatgttactaagtagctaagaatgtgtgttttgtttgaaaattttatgttgacacagagaaatgtgtttacaataattaagttttttttttgccttttcttttgctgttgtctttttgtttatctataattattatgtgatttatttcaa

SEQ ID NO: 98867 - DNA, 486 bp, Arabidopsis thaliana columbia
tcttattcgtgtccgcagaagaaacgagagaagagagagaagcaaaagaccttaccaagaatatttataacacacaaacatctagagacagagatagacatagagagagagcttgtggttgtggttgtgcgagataatatctagagatggggaagaagaagtgcgagttatgttgtggtgtagcgagaatgtattgtgagtcagatcaagcgagtttatgttgggattgtgacggtaaagttcacggagctaattttctggtggcgaaacacatgcgttgtcttctatgtagcgcgtgtcagtcacacacgccttggaaagcttctgggctgaatcttggcccaactgtttctatctgtgagtcttgtttagctcgtaagaagaataacaacagctccctcgccgggagggatcagaatcttaaccaagaagaagagatcattggttgtaacgacggagctgagtcttatgatgaggaaagcgatg

SEQ ID NO: 98868 - DNA, 618 bp, Arabidopsis thaliana columbia
acgcgtacgtaagctcggaattcggctcgagacataacccctctcaaccaaataatacaccttcttcttcttcttcttcttcttcttcttcacagctgggtttcttctaatggcggaaccgattccctcatcgtctctgtcaccgaaatctctacaatctcctaatcctatggaaccttctcctgcatcttctactcctttaccttcatcatcatctcaacaacaacaactcatgacagctccgatttccaattctgttaattccgctgcgtctccggcgatgactgtaactaccaccgaaggtattgtaattcagaacaattcgcaacctaacatctcctctcccaaccctacttcttctaacccaccaatcggagctcagatcccgtcgccttctcctctctctcacccttcttcatctttagatcagcaaacacagactcagcaactcgttcaacaaactcagcaattgcctcaacaacaacaacagattatgcagcaaatctcttcatctccgattccacaattatcgccgcaacagcaacagattctgcagcaacaacacatgacttcacagcaaatcccaatgtcgagttaccaaattgctcaatctcttca

SEQ ID NO: 98869 - DNA, 762 bp, Arabidopsis thaliana columbia
  unsure (1)..(762): unsure at all n locations
nnnnnnnnnnnnnnnnnnnnnnnnnnnnnnnnnnnnnnnnnnnnnnnnnnnnnnnnnnnnnnnnnnnnnnnnnnnnnnnnnnccacgcgtccgcccacgcgtccgcggaccttttctctctcccctgaagctcccctcactcactcttctccgaggaagaacaacagagacaatggcggttcccaaagccattattctacctatcttgctactcatctgtggtgctgctctcggagctcctgcttctgaaggttatcttcgtaatggaaacttcgaagagtcaccaaagaaaaccgacatgaagaaaacagttctactaggcaaaaacgccttgcccgaatgggaaaccaccggtttcgtcgagtacatcgccggcggtcctcagccaggaggcatgtacttcccagtggctcatggagtccacgccgtgaggctcggaaacgaagctacaatctctcagaagttagaagtgaagccaggttctctctacgcactcacgtttggtgcgtcgagaacttgtgcacaagacgaagttcttagagtctctgtaccttctcagtccggtgacttgccacttcaaacactttacaacagtttcggaggtgacgtgtacgcttgggccttcgtcgccaagacttctcaagttactgtgactttccacaatcctggagttcaagaagatcctgcttgtggtcctttgttggacgctgtcgccattaaagagcttgttcaatccaatctacaccagagggaacttggtga

SEQ ID NO: 98870 - DNA, 521 bp, Arabidopsis thaliana columbia
  unsure (1)..(521): unsure at all n locations
ctatagaagactatgacgtcgtacgcacgcgtacgtaagctcggaattcggctcgagggtagtttagatcgatggatcttcgaaaacgatgagaagattactacccttagttgcgaagagagaattcgtattttgaaaggtgtagcttcaggaatattgtatttgcatgaaggatgggagtctaaggttttacatagagatattaaagctagtaatgttttacttgaccgagatatgataccgaggcttagtgattttgggttagctcgggttcatggacacgagcaaccggttaggaccacgagggtggttggtacagctggctatttggctcctgaagtggttaagacggggcgtgcatcgacacagaccgatgtttttgcttacgggatattggntcttgaagtaatgtgtgggagaagacctattgaagaagnaagaaaccgttgatggattgggtttgggggattaatgaaagaggggggaattctaatgggcttggaccacagatgatgatgacc

SEQ ID NO: 98871 - DNA, 679 bp, Arabidopsis thaliana columbia
  unsure (1)..(679): unsure at all n locations
tatacgactactatagggaagccggacgcctgcaggtaccggtccggaattcccggtcaccacgcgtcgacaaatattccaggtcatagcttggtgttgagttctcttctatctttctcatggagacgagctctaacttgtcttccatggttcgtcttaacatttggtggatagaaatttttgtacgaccattgatactttgactattcgtgagccagactcaatgctcgcagcgatgtttagtggtcgacatgcaatgtgccaggaatccaaaaagggatatgtattcatagatagggatgggaagcacttccgtcatattttaaattggttgcgtgatggcgttattcctagtctgtcagatcctgattgttctgaacttttgcgggaagcagactactatcagcttcttggactgaaagatggaataaaagattcgagataagatgttggtgaagtagaagctgaattaacgcgtatagatatcatcaaatgtatacaaaccgaaagagtcaggttccgaggagttaatctttctggaatcgatctttctaaactggatctatcccttgtggatttcagctatgcttgtctcaggaatggtgttttctctcgtacanatcttcaatgtgccaaaattcggaatgctgatgcagaaggctncatctttcacaatgct

SEQ ID NO: 98872 - DNA, 898 bp, Arabidopsis thaliana columbia
  unsure (1)..(898): unsure at all n locations
ttaggtacaactatagaagatttatgacgtcgcctgcacgcgtacgtaagctcggaattcggctcgagcaaatccgccaagggaagcggctctgagcatcttcaagctctcgttccttctcacccttctctccggcggttcagaccttatcgactcgttgccgccgaattgtaaccgagccgagtgtccgagttatgaggttgtccacgccgggaatggctacgagattcatcgctacaacaccaccgtttggatttctaccgaaccaattcaagatatctctctcaacgaagcttctggcaacgattgtctgattacatgaacgggaacaacgattatcaccagaggatagagatagcacttccttatatcacccaagtctctcagaacttgagcaccttcatagtctctttcttcgttcccaaggcattccaacctgatccacctccgggaaacaacctccacgtacagagatgggactcgaggtacgtggcggtgaagcaaattagtggatatgttgcggatcataaaattggaaaacaagtggctgagctgaaggcgagcctacaaggtaccgtatgggccaaggcaattgagaaaagcagagaaaccggcggtgtcggatcggcttgggcttacacggtggcgcaatttagctggccgttccagtggagtcagcgggtcaatgagatttggtttccgtttgaaatggaagatgaagaaactcgttagtatcgttactcagtgaacaaaaaaatgaacacttttttatctaaaaaaaaaaaaaaaaaaaaaaggnnnnnnnnnnnnnnnnnnnnnnnnnnnnnnnnnnnnnnnnnnnnnnnnnnnnnnnnnnnnnnnnnnnnnnnnnnnnnnnnnnnnnnnnnnnnnnnnnnnn

SEQ ID NO: 98873 - DNA, 671 bp, Arabidopsis thaliana columbia
agaaaaagaggagtttttagtagccaagggagaggctgagattaccaaattgaatgctttaccaaactcacataaccatctcttcttgacccttttctttaatctttaatctctttcttcttcttcttcttcttcttcttctcgccaccgctccttcctccctccttctctctgtatcagtttttttctcgataggaaaatggaacaagccgcgttgaagagcagcgtcaggaaagagatggctctcaaaacgacttctccggtttacgaagagtttcttgccgtcaccaccgctcaaaatggcttttccgtcgacgatttctctgtagacgacttgcttgacttgtcaaacgatgacgtttttgccgacgaagaaactgacctcaaggctcaacaagagatggtccgtgtttcttctgaggaacccaacgacgacggagacgctcttcgccggagcagcgatttctccggctgtgacgactttggcttctctccctacaagcgaacttctctcttccggcggatgattttgcgaaccctgaggggctctctcatttcggtggaggcctccttcacggaatatttcggggccaaacctctaccgggaccccggctgttgaaacccggcgtggttaacgggtgaccggaaacatcctgtgactgcagtcacg

SEQ ID NO: 98874 - DNA, 497 bp, Arabidopsis thaliana columbia
  unsure (1)..(497): unsure at all n locations
gtttagcttcatctgaaactgcgaatcccgcttatggaaccgatggatccaagaaaagtgagtgattatacaaaccatgatggtggtttttgatcgccggtattacactttgtttggtttgcagctatcagattctcaacatcatggcttattttggacgagttaggcagtatcttaatagtaacaaagcattagtttttgtacttcttaagttaaaagcttagaacaaaataacactgttgttttgttctaagcttttaacttaagaagtacaaaacaacagtgttattttctataccagacacaaaaactgtgtcgttgtaataacacttaccataacattttctttcagtgtatgtttaaaacccgtttatatggttgtaaaaaaaaaaaaaaaaaaaggnnnnnnnnnnnnnnnnnnnnnnnnnnnnnnnnnnnnnnnnnnnnnnnnnnnnnnnnnnnnnnnnnnnnnnnnnnnnnnnnnnnnnnnnnnngga

SEQ ID NO: 98875 - DNA, 791 bp, Arabidopsis thaliana columbia
cccactcgtccgctcctgcctcctctgaacttctagagcttgctgcagctcgggactcggtatctgcaaaaaacagaaagccccaatgattttgccatcgatgctgacccgtttgttcaaagtcaggagagcctgaatgaattcccctttgcgatcaaagaacgggaatgggaatttatcagtatcttggccacggaggtcaaatccatggctgtctacggtgaccagataaggctccaacaggttctcgcagaatttctgctaagtattgtccgttatgcacccatggaaggctcggtagagctccatctatgcccgactctgaaccaaatggctgacggattctccgctgtacgtttggagttcagaatggcgtgtgcaggggaaggtgtgccgccagagaaagtgcaagacatgttccatagtagccgatggacaagtccagaaggattaggactaagcgtttgcagaaagattttgaagctgatgaacggaggggttcagtacataagagaattcgaacgctcttatttcctaatcgttatcgaactcccggttcctctaatgatgatgatgccctcttcatgagtggcattgaatgttttgattttggtccgggtaggtttagaaggaagtacttttgctacggggtacatgtaagagtagtagttatagttgggaacttttttggttgattcccttacgctgtgtatattattatagtctcagactctcagtcatagaatgtgagagtagttgtttgtgataatgtaatatctttcctctacagg

SEQ ID NO: 98876 - DNA, 646 bp, Arabidopsis thaliana columbia
  unsure (1)..(646): unsure at all n locations
gtagctcggaattcggctcgaggataggtaacagtcaaacatctgtggagattccaaccaacagggaggtctcgcttcctccttccaccatgtcaaactcttcaacttttcctccaatctcagaggggctaatgcctatagatctcccagaacagcaaaatgagttcaaggtggcctatcctgtttccccagcattaccgagtaagaattatgagaattcagaagactctgtcagctggctaagtgtgccattcctcaacttctaccgttccattaacaagaatttcctgcttagctctcagaagcttgatacatttggcgagcatagccctatctatatttcatcttttagagaggcagagcttcaaggtggaccaaggctacttctgcccgtaggcttaaatgatattgttgttccggtttatgatgatgaacctactagtatgatcgcatatgccttaatgtcaccagaatatcaacgccaaacttctgctgaaggggaatctctagtttcatatccttctgaactcaatatccctcgcccagttgatgataccatntntgaccctagcagaagccatggttcagtcgacgagagcatactntcaatatcctcatctcgcagtacctcacttctggacccact

SEQ ID NO: 98877 - DNA, 2085 bp, Arabidopsis thaliana columbia
gttttactctatatctggatttgtttgaaaattgcttgtgttatgcgccagctttttccctaatatatagactaggtcttaattacagatattagagttcgtttcctcgagggtttctttcgacctcgtgtcctggtgaaattttggaattctaaggctttggggttttatttgggaggggatgatcatctaaaggatattcgggcggtgtcgtgttttcttaatctcaattctgttgactttagctttgcgcttaaagtactttgatggcattgggacacttgtgcagcatccactgtttccttaaaatagggaaacaagaagagcttcttgtcctagatattggtttgcctattcccagtttcttcctcattaactttattggtagcagagcctcatccatctggtgaacttgtgaagcttcctctgtgattcttttggcgattggttagaaatatggtttcttctcagtgttctgttgcaaacaaaaaccagactgggaagccgtttcagaaacatctatctttatccatcagccctccaaaatctgtcttgggtgataaccttgagcttcaattctctgatgtctttggaccaatgcctgaagctaactctgaagaggcctgtgatgttgcttacgacgagcctgctgttgtctacagtcgatcccactcattggttggcccgtctttggttgttagccattctttgaagatgaacaagctcactttacgagaaactgaggactcagttgacttggtggagtgtgttgaaggtgaatcgataaaagagaacgatgaattctctggtaatgatgacactgacagtgagaaatctccagaggaggtctcaggtgtagtaggcattgaggactttgaggtattgaaggttgtgggacaaggtgcatttggaaaagtgtaccaggtgaggaaaaaagacacgtctgagatatacgcgatgaaggtcatgagaaaagataaaattgttgagaagaatcatgctgaatacatgaaagccgagcgcgatattctaaccaaaatcgatcatcctttcattgtgcaacttaaatactcttttcagaccaaatacagattgtatcttgttcttgactttataaacggaggtcatcttttcttccagctctatcaccaagggcttttcagggaggacttggctcgtgtgtacactgcagaaatcgtctctgtagtttcccatctccatgagaaaggcataatgcatagagatcttaaacctgaaaacatactcatggacgtagatggccatgtgatgttaactgattttggtttagcaaaagaatttgaagaaaacacaagatcaaactccatgtgtgggactacggagtatatggcccctgagattgttcgtggaaaaggacatgataaggctgccgactggtggagtgtaggaatccttctgtatgagatgctcactggaaagccgccgtttctcgggagcaaaggaaagatacagcagaaaatcgttaaggacaagatcaagcttccacagtttgtgtttaatgaagctcatgccttgctgaaagggctgctgcaaaaagagccagaaaggagactgggaagtggaccgagcggagcagaggagataaaaaaacacaaatggttcaaggcgataaactggaagaagctggaggctagagaagtacaaccaagtttcaagccggcggtttcgggaagacaatgcatagctaattttgacaagtgttggactgacatgtctgttttggattctccagcaagtagtcccaactctgatgctaaggcgaacccttttacaaacttcacatacgtcaggcctcctcattcattccttcatcggaccacatccaacttgtagatgaactataatatgttatcccccgcttctgtttttgtaaaccgaaacatatgaatatgcacaaaatcaacggttgtttgaagaaacctatttctcgatttaatatattatactagataagacattcctattaaaaaaaaaaacaaaaaaagggcggccgctctagaggatccaagcttacgtacgcgtgcatgcgacgtcaaagtcttctat

SEQ ID NO: 98878 - DNA, 1809 bp, Arabidopsis thaliana columbia
  unsure (1)..(1809): unsure at all n locations
tcgtctcctccctcagccatcccctctgagcttataaaaccttcatggcatttgcgcacttctgcagcatccactgtttccttaaaatcgggaaacaacaagagcttcttctccttgttattggattgccttttgccagcctttgttttagtcagttttctcctcattaacttctgtcggtacagaatctctctccaggctggtgaactcttgcagctttctcagtgattctgtatcgatttttcccgtgtaaattatggtttcctctcagcgtcctgtccccaacaaaatccagaaacagcaatatctatccatcagcccttcaaattctgtcttgaaagatgatgttgaacttgagttctctgatgtgtttggtccactccccgaagaggccaatgatattgcttacgacgagcctgctgttgtctacagtcgatcccactccttggttggcccgtgttcgctcgatagtcattctttgaagctgaccaagctcaccttactagagactgaggactcaattgacttggtggagtgtctcgaaggtgaatctttaaaagaaaatgatgatttctctggtaatgacgacagtgacaatgagaaagctttagagggagatctggtgaaagtctcaggtgtagtaggcatagatgattttgaggttatgaaggttgttgggaaaggtgcgtttgggaaagtctaccaggtgaggaaaaaggagacctctgagatatacgctatgaaagtcatgaggaaagatcacattatggagaagaaccatgctgaatacatgaaagctgagcgcgatattcttacaaaaattgatcacccattcattgttcaacttaaatactcttttcagaccaagtacaggctgtatcttgtgctcgactttataaacggaggtcatcttttcttccaactctatcaccaagggcttttcagagaggacttggctcgagtgtacactgcagaaatcgtctctgcagtttcccatctccatgagaaaggcataatgcacagagatctgaaacccgaaaacatactcatggatacagatggccacgtgatgctaacagattttggtttagcaaaggaatttgaagaaaacacaagatcaaactccatgtgcggaactacggagtatatggcacctgaaattgttcgaggaaaaggacatgataaagcagctgactggtggagcgtagggattcttctgtatgagatgctcacaggaaagccaccgtttctcgggagcaaaggaaagatacagcagaaaattgtgaaggacaagatcaagcttccgcagtttctgtctaatgaagctcatgcaatactgaaagggctgctgcaaaaagagccagaaaggcgacttggaagtggactgagcggagcagaggagataaaacagcacaaatggttcaagggaataaactggaagaagctggaggctagagaagtgatgccaagtttcaagccggaagtatcgggaaggcaatgcatagcaaattttgacaagtgttggactgacatgtctgttttggattctccggcgagcagtcccagttcggatcctaaggccaacccttttaccaatttcacttacgtcaggcctcctccttcattccttcaccagtccacaactactttgtagatttactatatttttatgtagttcctacttctttggttgttgtttccttctgacacatgaacattaaagaaaactttggttaccaagacgcttaatttataattgattttatgagattgttattgattgagattnnnnnnnnnnnnnnnnnnnnn

SEQ ID NO: 98879 - DNA, 703 bp, Arabidopsis thaliana columbia
gcactctgtgcgttaggtttcattttagcggcagacgagagagctaaagcaaggagcaaccctaaccatggcgactcaaccagctactgaatctgtgcaatgcttcggaaggaagaagaccgcagtggccgtcactcactgcaagcgtggatctggtttgatcaagctcaacggttgcccaatcgagcttttccagcctgagatcctccgattcaagatcttcgagccggttcttctcctcggaaagcaccgtttcgctggtgtgaacatgaggatccgtgtcaacggtggtggtcacacatcccaggtttacgccatccgtcagagtatcgcgaaggctcttgttgcgtactaccagaagtatgtggatgagcagtcgaagaaggagattaaggatatcttggtgaggtatgataggactctgcttgtggcggatccgaggaggtgtgagccgaagaagtttggtggtcgtggtgctcgttctcgttaccagaagagttaccgttaaacaaagctggtttgtgttttgtttttcaatttggaatcatcgtaaggtttttttgggagtatggacttgtgagactctttagattttataatttctgctttattatgcttgttggattatggtgattctccaagaaacttatgttttgttatgtctactattttcttatttttatttcattgtcttgttggtatt

SEQ ID NO: 98880 - DNA, 516 bp, Arabidopsis thaliana columbia
acttagaagattatgacgtcgcctgcacgcgtacgtaagctcggaattcggctcgagtgtgaatcgaaatggtactgctggggaaagcatatatgccggaaaatttccagatgagtcaccgaaactaagacatgaggagactggtcttttatctatgtcgattgcagaccgtgacaagttcggatcacactttcatattaccttcaggccaaatcagcagcttgatagaaataatgctgttttcggaaagctaattcaagggaaagagatattgaaaaaaattgaacgtgtgggtgatgaggaacgtaaacctactgtcagcgtgaagataatccgttgtggagaatattctggagataagaagaaaagtgacggtaaaaaaaatggaaagcacaagaagtctttaagagtgagaagaaaaaagaggcgaagacactcttcatctgagtctgagagctcttcagattctgagacagattcctcagaatctgatagtgagtcagattcagacttgtc

SEQ ID NO: 98881 - DNA, 484 bp, Arabidopsis thaliana columbia
  unsure (1)..(484): unsure at all n locations
gcgnnnnnnnnnnnnnnnnnnnnnnnnnnnnnnnnnnnnnnnnnnnnnnnnnnnnnnnnnnnnnnnnnnnnnnnnnnnnnnnnnnnnnnnnnnnnnnnnnnnnnnnnnnnnnnnnnnnnnnnnnnnnnnnnggctcgagtccgaattttccgattggtttccgttaaaacctcggaaagcaaaatttgttgttgttctctgagctcgaacatggacgctcaaaaacaggaaaagcttgaataagaatgagactatgaccatggatctttgtgtgcccatgggtgagcgaagtaaagaaggagataaagagatcctttgaagagttctttgttagataatttcttttatggacatgagatgagagtttgttttttttctttcaaaaaaaaaaaaaaaaaggnnnnnnnnnnnnnnnnnnnnnnnnnnnnnnnnnnnnnnnnnnnnnnnnnnnnnnnnnnnnnnnnnnnnnnnnnnnnnnnnnnnn

SEQ ID NO: 98882 - DNA, 537 bp, Arabidopsis thaliana columbia
  unsure (1)..(537): unsure at all n locations
taggtgccactatagaagatctatgacgtcgcacgcacgcgtacgtaagctcggaattcggctcgaggtccagaacgaatctccctgactttggcggcccatcggagtttagcgtgcgaagaagattcagagatgttgtcacattggctgatcgattggctgagacgtatagagggttctgcataccaccacggccagataagagcgtcgtagagagccaagtaatgcagaaacaagagttcgtggagcagagaagagttgcattggagaaatacttgcgcaggctaagtgcacaccctgttattaggaacagtgacgagttgaaagtgtttcttcaggtgcaagggaagttgccactaccaatgagtactgatgtggcctctcggatgttggatggggcggtgaagctcccaaaacagttgttcggtgaaggcggagcctctgcagtgccggtgactgangtgggtcagcctgcaagaggaggtagggatctgctgagattattcaaggagctgaggcagtcagtttctaatgact

SEQ ID NO: 98883 - DNA, 1035 bp, Arabidopsis thaliana columbia
  unsure (1)..(1035): unsure at all n locations
caccaccatgtcagagcgcgaccgccgcgaacgagagagggataaggaccgtgaaccagaccgtgatagacgccgaggtagagacgaccgtgaccgtgaccgtgatcgagaccgggaaagagatagagagcgcgaccgtgaccgagggcttagaaacaaaaaatcccgatctcgtactccagaccaccacgctcgtgctcgccacgtgcgctctccggagaggtatcgctctcgttcccgctcgattgaccgtgaccgggaccgggaccgtcaacgacaccacaggcgcaggtctccttctccagatgctccgtcgcgaaaacggcctcgccagggttcagtagacgatgagaaagaaaggaatcgcaaaagagtagtgactgattccgttgacgagaatgcgtctactattactaagaagaaggataaacaaccaagtgatgctgctgataatggcggaggcgaagatgaagaaggaatggatgtgaatgagattgagatgatgaagatgttagggattcctactggatttgattccacaaaaggcaaaccagttgctggtgctgatgttagtggtattagagctgtaactaagcgtcagccaagacagtacatgaaccgtcgcggtggatttaaccgtcctctaccggccgagcgtaatcgctagtcttctcaaggtccctctaacgctgtcttgaacactagtcaaaaagatgagggctagagctgcatttcccagatagtagttactagttactccaattcttccccagactctgttctgatgtcttatagagaacaaacttgtactctctgaatttggttggaaacaactcgtgagttatttctttttcgagatttaaaaatgttaatgtttgtgtgtaatctcccggctctaactgtcagactatggttcatttgaaatcaggcttattcaaaaaaaaanaaaaaaaaaaggaatancacaagggcggacgctctagaggatcccagcttacgtacgcgtgcagtcgaccgtcataactctnctatagt

SEQ ID NO: 98884 - DNA, 671 bp, Arabidopsis thaliana columbia
cccacgcgtccgcggacgcgtgggcttaagttgagcatctccaattcctcttgacacagctaaagatccctggattctccaaacaccgtgaaacgtatcaacaggaattggagatgctcaacttaagaaatgggttatagctgaaccagagacaaagatttcgagaatcgagcatgaccatgagtttttgatcttggcatctgatggtttatgggataaaagtgagtaaccaagaagcagtagccattgctcgtcctctctgcttaggaaccgagaagccattgttgttagctgcctgtaagaagcttgtcgatttatctgcttcacgaggctcgtctgatgatatcagtgtgatgttgatcccttttacgccagttcatatagaaaagagaggcatcttagaagattttaaatatatgataaacgttagaaatttggaggttttatatgatttagttcttttgtttaacttgatccattcatttatttattctttctaacttagtgaacaaagctaaactcattgtggctcaaaaaaaaaaaaaaaaaaaaaaaaaaaaaaaaaaaaaaaaaaaaaaaaaaaaaaaaaaaaaaaagggcggccgctctagaggatccaagcttacgtacgcgtgcatgcgacgtcatagaattctatagtgtcgcctcaa

SEQ ID NO: 98885 - DNA, 715 bp, Arabidopsis thaliana columbia
ccttcttcttcttctacatctcctcagccgtttcctacggaggattccgatcgatcccttttctctttttttttttcttctggtcaccgaatcattgtcataccccactttgagctcacaactcttcttcctcagattgcttgattagggttttcttctgcttgccgaattgatttccaaggaacaactttttatttattttcatcacctaatctttcgttttcagattccgagtatccaaataatattttaatatttcctctttcgccgccatgagttcctcgatccagatcgttgttgaggagaagcaagtggatgtttttgccctcttcaagatcaggatgaaaagaaggctccacaagtgttcaatgagctgagttttcgggaaccattggggggctgttgtgcaaattttgcttgggtactataccccttcaagaaacagctatggttaaaggctgtgagcatgcttactgtgtgacgtgcatactccgttgggcaagttacaaggagaaacctacctgcccacaatgtaagcttccatttgattttctcaatgtccaccgcgctctcgatggaagcgttgaagatttcatgttcgaggagagtgtatgcctcctcctgagggcatcatggttccagccactggaagcagtggagcgggtttcagacaatgacaatttcaactatgatttcgacattccacctgagtatg

SEQ ID NO: 98886 - DNA, 531 bp, Arabidopsis thaliana columbia
  unsure (1)..(531): unsure at all n locations
tatagagacttgacgcgctgccgcgtcgtaagctcgnattcgctcagctttgcagagtctatgggactaccgcattgattctcacagcgaagcgtgcagtcatgagttagggactgtggaagagagatatctaagaagagctgaggctacatagacaaggctgtgtctaaacctctctagtgtatatttatttactcagaaaccgnccgtttgacacgatttggagcttcggttttctgagttattcaattaggataaaaactacaagtttaggaatattgtgagacctttgaatttgtcttttgaaagagaggactgtgtcctctgttagctgtgttgtgcttgctccctaggcaaactctcaatgtattttagttatcttcgggttttcggctttaccaagaagctgtattcggtaaatgtattaaagaaccctccaaactgctttatattgaccggagagaaacattcttattcttcggaatggtactttgaagtttgaagagttattttaaaaaaagatttaacagc

SEQ ID NO: 98887 - DNA, 818 bp, Arabidopsis thaliana columbia
atctcattgatcaaactcacatgtgtttgtaccgtatcacgcttgagcagttcaatgacgttctgtctcaagaaaatggtttgaatgtggattcagattctccggtctttgatctagctgctttgcagttagtagataacaaaggatccattttagaagctcctttgaatagttggtatggaaatgttgtctgcttgggaaaagaacgcgacattcctatacttacaatgacttgcacgctttccgctgttgagaaattcaaatccggtgagacccctataggacctcctgcaaaagcttatgccaaccctttaataaggggacttgtggaaggaggaagattatctaaagaagaagctgaggcttacatagacaaggctgtgtctaaccctctctagtggataattatttactcagaaaccgcccgtttgaacacgatttggagcttcggggttctgagttattccattaggataaaaacccccagtttaggaatattgtgagacctttgaatttgtcttttgaaagagaggactgtgtcctctgttagctgtggtgggcctgctccctaagcaaactctcaatggattttagttatcttcgggttttaggctttaccaagaagctggattcggttaatggattaaagaaccctcccaactgctttatattggccggaaaaaaaccattttaatttttgggatgggtaaaaaaaaaaaaaaaaaaaaaaaaaaaagggcggcccccggataattaagcctggtggaccaggaaattaattcgggccgggtcccggcaggggtcccaccttcccaaaa

SEQ ID NO: 98888 - DNA, 494 bp, Arabidopsis thaliana columbia
  unsure (1)..(494): unsure at all n locations
gaatgtattaggtgcactatagaagagttatgacgtcgcacgcacgcgtacgtaagctcggaattcggctcgaggtctcctcgagttcaaataggggcttcgggagacacttcaaggcaacctcttgggaccggtgagatctgatagtaaagcaaaagctaccgtacgtacctggttcaacgatcctgtgcctcctcgagttcaaataggggatgatagcaaattctcgatctttttcaatgtggtattcgggtaaaataatcacaaaggaatctgtagtcactggaatttcaacccttttcaatagaatacgtttgtttgtttgttccactgtaatctcacggtgtgtcatgttaatgatccaaccgaaagttccttaaacggatctcctttgtaccaaaaaactgtctggtagaactaaaattgaaccgataaatggatgagccggttcattgaaaaaaaaaaaaaaaaaagagactnnngnntttnttaaa

SEQ ID NO: 98889 - DNA, 887 bp, Arabidopsis thaliana columbia
  unsure (1)..(887): unsure at all n locations
taggtgccactatagaagagctatgacgtcgcatgcacgcgtacgtaagctcggaattcggctcgagaaaattaaacgcaatttattgagaaaatacaaacagcgtgcactatgaagaagacgtcgaagatacaatttcttttcaatctctgcatcatatttggggttgtagtaataagaagatgtaacgcaacgacatactttgtaggagacagctccggttgggacataagctccgatctcgagtcttggacttcaggcaagcgattctctcctggtgatgttctaatgttccaatactcatcgacgcatagtgtatacgaagtggctaaagacaactaccaaaattgcaacacaacagatgcgatccggacgttcacaaacgggaacacgaccgttgctctttccaaaccgggaaaccggttctttgtatgcggtaataggctccattgcttcgccggtatgaggttactagtcaatgttgaaggcaatggcccatctcaggctcccgtgggatctccccaagccgccacttcagggattcttcaaccatcttctaaaaagaataaccctgcgaccggagtcgctagctcaaccgcccgttttgttggcgacagcggttggaggggtaccatgggaatttttgtatattttatggtttttgcttttccattcatatggttttgctgattaaaaactatctataataagtgttttcatgtatatgtgtattcatatttgccctataatgagtgagagtatttatttgttgaaaaaaaaaaaaaaaggnnnnnnnnnnnnnnnnnnnnnnnnnnnnnnnnnnnnnnnnnnnnnnnnnnnnnnnnnnnnnnnnnnnnnnnnnnnnnnnnnnnnnnnnnnnnnnnnnn

SEQ ID NO: 98890 - DNA, 531 bp, Arabidopsis thaliana columbia
aaagaaacaagaaaacgaaaggaaaaaatacagaaatgggtggtttgaagtttcatgtacttatgtatccatggttcgcaacaggccatatgaccccgttcctttttcttgccaacaaattggctgagaaaggtcatacggtcacttttttgattcccaagaaagctctgaaacagttggaaaatctcaatctgtttccacacaacattgtctttcgctctgtcaccgtccctcatgtggatggtctccccgttggcacagagacagtctctgagatccccgtgacatcagctgatctcttgatgtctgctatggatctcacacgtgatcaagttgaaggtgtggtccgagccgtggaaccggacctgatcttctttgacttcgctcattggattccagaggtagctagagactttggccttaagactgtaaagtacgtcgtggtatctgcatcgactatagctagtatgcttgttccaggtggtgagttaggtgttcctccgccgggatatccttcatcgaaggtgctgc

SEQ ID NO: 98891 - DNA, 682 bp, Arabidopsis thaliana columbia
  unsure (1)..(682): unsure at all n locations
nnnnnnnnnnnnnnnnnnnnnnnnnnnnnnnnnnnnnnnnnnnnnnnnnnnnnnnnnnnnnnnnnnnnnnnnnnnnnnnnnnnccacgcgtccgcaaaacaaaaagaaagaacaatggccaaagctcttagccttacaatctttctctttctcttgatagcttccaatgtccaatccgctcgacttctcgatgaggttcaaactcagccacaattagtcccccaggtaccggaagaggaagatgatagtccacaagccgtaacaacaactccaacaccaattcctctcccaggacccgccacgggaggacccgagccaatcctagagttctttatgcatgacgtgctaggcgggtcacacccatcagcacgtgtggttacagggatagtagcacaaacagaggtgaatggaataccgttttctaaatccagcaacaacattttcccagtagataacgcagtgccgcttgtgaacgcaaacagcatcaacaacttaatcaatccaaacacaggtccactcctaacaggacttagtggctttaagccaacaccgtaattcaaaacagtaccggtacttttaaggtcccttggttcaaaaacttccctttttaccaggggtagttcctccanggtgcctcaaagtttnttggttttccgggtnngtggtccgggcttgttngggc

SEQ ID NO: 98892 - DNA, 534 bp, Arabidopsis thaliana columbia
taggtgccactatagaagagctatgacgtcgcatgcacgcgtacgtaagctcggaattcggctcgaggttctagatcgcgagcggccgccctttttttttttttttttaaagaaacaaaaaattaatagattccatctaaaaaaaattgggttttgctcactcccttttctttcacatcacaatgaaaaaacaaatattaatgcaaaagtgattcaataaccctacaaaccgttcgtttgggggtgatttttttagcacttggtgaaaaattgaattgtttagtttgtgttttccaaactgataagagctcttttcttgttttatggtttgagggcgagggcgagaccaagctttggtgaagaggtcacagcctttgagtcatactcagctgagaaagtgatgtgcgacttcggtctccattctctctggaccaccatccctgctttcccactgttagaaaatctggtcttaaccactgtgaattgatccacagagtgagagcttccgacggtgaagctgttgttataattgga

SEQ ID NO: 98893 - DNA, 2085 bp, Arabidopsis thaliana columbia
  unsure (1)..(2085): unsure at all n locations
ctctctctatctatccccatttccatggaagcaagcagatgtgttcttacatctctttctctctctacagccttacatgaacagtgactgtnctctctctttccctctccttccttttttcttctacttctccttccctttgcttcgaaaagggtatctcgtgatctttatcgctcaaaaatcttcactttcagatcaggccactcgttgatggaatctgtgacagtattgattactagagagtaaagacaagttctttaaatctcagggcatggggaattggtgtttaagattgctctgtgttaatgatggcttcaaaaactccagaaggatcacttaccaattccagtcaaagtatgtcaatcaacactttagcagatcaagtatcttcgagtttgtctttcgctgatccaagtagtgatggcaaaaccggtaatagtaagatcaacgagcaaggtgagagtggaaagagtagcacttgtagaccaagtacaagcagtgatataagcgatgagagcacttgtagcagctttagtagcagtatcaacaaacctcacaaggctaatgatgtgagatgggaagctattcaagctgttagaactaaacatggtggtttgggtttgaatcattttaggctcttgaagaggttaggatgtggagatattggaactgttcatcttgctgagttgaatggaactaggtgttattttgcgatgaaggttatggataaaactgctttggctagccggaaaaagcttcttagggctcaaactgaaagagagatattgcagtgtcttgatcacccgtttcttccgactttgtatagtcattttgagacagagaagttctcttgtttggtgatggagttttgtcctggtggtgatttgcatacactaaggcagagacaacccgggaaacgcttcaccgagcaagcagctaagttttatgtcgcggaagtgcttcttgcaatggaatatttacacatgcttgggatcatttaccgtgatctgaaacccgagaacgttcttgtgagagatgatgggcacgtgatgctttcggattttgatctctccctgagatgtactgtgagcctctctatagtcagatcagctaatgttggatccgaaggcttgtcgaagaattcggtttcttgctcgcaacaacctgcatgcatccagcaaccatcttgcatctcaatggctccaacatcttgcttcggtcctcggttcttctcatcgaaatccaagaaagacaagaaaccgaaaaccgaaaacgggaaccaccaagtaactccgttaccagaactcgttgcagagcccacaggcgcccgttctatgtcttttgttggcacacacgagtacttagctccagagatcatcaaaggtgaaggacatggaagtgcagttgattggtggacctttgggatctttctttatgaactattgtttggtaaaacaccgtttaaagggtcaggaaatcgagcaacgctcttcaacgtggttggtcagcctcttagattccctgaatctccggttgttagcttcgcagctagggatttgataaggagtttgcttgtgaaggagccacaacatagattagcttataagcgtggagcaacagagataaagcaacatcctttctttgaaggagtgaattgggctctggttcgatgtgccagtccaccggagattcctaaaccggttgatcttgaagctttgaatcctactcctactgtgccagcagccgcatcttcgagtgtaagatctgatcagagtaattatcttgagtttgatttcttctgaagaaactgtttccacagttgatgattctcattattgtttctttgcaaattctgtttagtgttttctacaaatgtgtttctttttttttcttctttttaattttcacgtcttggaaaaagttatgagatttgtaatcattcttcaaagttgtgagacagtctctgtaccatcttcttgagtttaatgttagacacgaaccattgagnnnnnnnnnnnnnnnnnnnnnnnnnnnnnnnnnnnnnnnnnnnnnnnnnnnnnnnnnnnnnnnnnnnnnnnnnnnnng

SEQ ID NO: 98894 - DNA, 1203 bp, Arabidopsis thaliana columbia
  unsure (1)..(1203): unsure at all n locations
atgatacttcagctctctacgactcactatatggaaagctggtccgcctgcaggtaccggtccgctctctgtctctctctttgggtaatcggaaaaatcagaaaaatgggaaccctaggacgagcgattcacactgtgggtaatcggattcgtggaactgcccaagcccaagctcgcgttggttctcttcttcaaggaagccaccacatcgagaaacatctgtcgaggcatcggacgttgattactgtggctccgaacgcttctgtgattggtgatgttcagatcaataaaggctcgttcatttcgtatgcaagtgtttctcgtgatttgcagtatcctcgtgcaatgggaatgggacaggtccggagatttagcgaagatgtttctcacatgcctgaaatggaagactctgatgttctgaatgcattcaaagacttgatggctgcagattgggctgagcttccttctgctgttgttaaagatgctaaaaccgcgatatcgaaaaacacagatgacaaggcagggcaagaggctttgaaaaatgtgttccgagcagctgaagctgtagaggaatttggtgggattctcacttcgattaagatggaaatcgatgatagcattggaatgagtggggagggtgtgaagcctttaccaaatgatataaccgatgcgctgcgtactgcttatcagaggtatgctgagtatctagactcctttgaacctgaagaagtctacttgaagaagaaggttgagatggagttggggactaagatgatccacttgaagatgagatgcagcgggcttggttctgaatggggaaaggttactgttcttggaacctcaggactctcgggatcttacgtggagcaaagggcctaaaacaaaaagagaagatctagaattacgtgcgaagcttgttatgttgttattgcgttattttgtcttagcacataataaaggtcaatctgaccaaaagacatatcaggtgagtctgttcattgtttcctccaaatgaagctttaaaatttagagcttaaccccacattgaaaaataaactcacatgaatttgtcgttcatttgttactgtttccttttatgagagatcttttgtttatnnnnnnnnnnnnnnnnnnnnnnnnnnnnnnnnnnnnnnnnnnnnnnnnnnnnnnnnnnnnnnnnnnnnnnnnnnnnnnnnnnnnnnn

SEQ ID NO: 98895 - DNA, 614 bp, Arabidopsis thaliana columbia
  unsure (1)..(614): unsure at all n locations
cataaacctctctctatctggtggagcgacaccaaaaacaacaaagccttctcattttcacactttgggtaatcggagaatcacaaaaaaatgggaaccctaggacgagcaatttacactgtgggtaactggattcgtggaactggtcaagctcttgatcgcgttggttctcttcttcaaggaagtcaccgtatcgaggaacatctgtcgaggcatcggacgttgatgaatgtgtttgataaatcaccattggtggataaagatgtgtttgtggctccgagtgcttctgttattggtgatgttcagatcggaaaaggctcgtcgatttggtatggctgtgttcttcgaggtgatgtgaataacatcagtgttggatctgggacgaatatccaagataatacgcttgtacatgttgcaaagaccaacataagtggcaaggttctacctactctgattggggccaatgtaccagtaggtcacacgtgctgcaatcatnggngaccttttgggggtatcctttttttgnatggggcaacctacttnatgggtggggttaaaaaaatccatggtcctntgnccttttnaaaacncggntcctttgggggttggggacc

SEQ ID NO: 98896 - DNA, 1052 bp, Arabidopsis thaliana columbia
tgcaggtaccggtccggaattcccggttcgacccacgcgtgcgccgacgcgtgggtcgaggcatcggacgttgatgaatgtgtttgataaatcaccattggtggataaagatgtgtttgtggctccgagtgcttctgttattggtgatgttcagatcggaaaaggctcgtcgatttggtatggctgcctccttcgaggggatgtgaataacatcagtgttggatctgggacgaatatccaagataatacgcttgtacatgttgcaaagaccaacataagtggcaaggttctacctactctgattggggacaatgtaacagtaggtcacagtgctgtcattcatgggtgtactgttgaggatgatgcttttgttggtatgggagcaacactacttgatggtgtggtggttgagaaacatgccatggttgctgctggttctcttgtgaaacagaacacgcgaatcccttctggagaggtgtggggaggaaatccagcaaagttcatgagaaagttaacagatgaagagatagtatacatctcacagtcagcaaagaattacatcaatctcgcacagattcacgcctcagagaattcaaagtcatttgagcagatcgaggttgagagagcgcttaggaagaagtatgcacgcaaggacgaggattacgattcaatgcttgggattacccgtgaaactccaccggagttgattcttcccgacaatgtcttaccaggtggtaaacccgtcgccaaggttccgtctactcagtacttctaattccaatctcaggttgtttttgtgtgttgaaatcatttcaagacaggattgattctctggaaggtcaagagagatattattttggttttaacttttcttccgagcaagcaggagatttatcatccttgctcaataatgtatggttgcattatgaagtcatttcttcgaggaacaatttgcagaaagagaaacaaagttggaataaaaaaaaaaaaaaaaaataaagggcggccgctctagaggatccaagcttacgtacgcgtgcatgcgacagtca

SEQ ID NO: 98897 - DNA, 536 bp, Arabidopsis thaliana columbia
taggtgccactatagaagatttatgacgtcgcacgcacgcgtacgtaagctcggaattcggctcgagctgttctatatatttcccaaacttagtgccacttagacacaataagaaaaccgttaacaagaagaaaaaaaaaagatcgaaaatggaatatcaaactaacttcttaagtggagagttttccccggagaactcttcttcaagctcatggagctcacaagaatcattcttgtgggaagagagtttcttacatcaatcatttgaccaatccttccttttatctagccctactgataactactgtgatgacttctttgcatttgaatcatcaatcataaaagaagaaggaaaagaagccaccgtggcggccgaggaggaggagaagtcatacagaggagtgaggaaacggccgtgggggaaattcgcggccgagataagagactcaacgaggaaagggataagagtgtggcttgggacattcgacaccgcggaggcggcggctctcgcttatgatcaggcggctttcgctttg

SEQ ID NO: 98898 - DNA, 697 bp, Arabidopsis thaliana columbia
catagacgagctatgacgtcgcatgcacgcgtacgtaagcttggatcctctagagcggccgccctttttttttttttttttttttttttcagccgacaacacgtgaagattttatcaacacgtattcaactccaccgcttaaagattcacttgtccgatttataaaaaaaaaaaaaacaagtctaagcattaaattgagaaaacaaaagtacattatccgtaccggctccggtcagatctaattattaagcgcatcctcctggagcaaacccgacccgggaactcgctaagtcgtatacaacccggaaaccctgttgctggatattcccaattatggatagtccgcccatcgtaccggcaaacgcaaaacagaacttgccgttggtatccacagggatcaggtaattcgtcgccggaagtgatacgtcagctccacggaaatgtaaaaccaccgtcggtactttaacctcgttcatattggagagatcgaaacacgtgtcgaagagtgagaaatccggagctcttttcaatgtcttagctccgacccggaacgcgtctctcatagcaatataagctggtcggatcaaccgggtcacagacgtacccgaatcgataataactccaccgttaccgatctggtcaagtttaaaaagagaagccgttacgccggggacacgtgtccctccgacgctaattc

SEQ ID NO: 98899 - DNA, 538 bp, Arabidopsis thaliana columbia
ttaggtgcactatagaagagctatgacgtcgcatgcacgcgtacgtaagctcggaattcggctcgagtgagctaatcccgaagtcaactcatgtttgtagaggatggagagctgcttgttgcgatccgattctttggaagacggtggatttgtcaaacatgagatctagtttcatcaagatcccacatagacataaggctctaatgggatcttgaaactctccatgaaccttagcggaggaagcacgaggaccttgatttttcatttcaacttgttcttgagtgatgatcagcttacttacaccgcagaaaggtgtccagggttgagacgggtcgtcctaccggcttggaacagaataaagaagactggtatatgcaaagcgataagaatctggaaagatctagagtcactaacaatgccaagcatcgcaaacccgccttatctcttaacagaaattgccaagaactgcaagaattttaaagagctgaagatcatgggtccattcgaggtcttctttgcaacacgctcatcacttgcc

SEQ ID NO: 98900 - DNA, 627 bp, Arabidopsis thaliana columbia
  unsure (1)..(627): unsure at all n locations
atgatcctnnnnnnnnnnnnnnnnnnnnnnnnnnnnnnnnnnnnnnnnnnnnnnnnnnnnnnnnnnnnnnnnnnnnnnnnnnnnccacaggtgcgcccacgcgtccgcccacgcgtccgtctctctctctggcttgctgtttactctcatcgtctcctttacttcattcgtcttcttcctctctttcccacaagctcccattgatatagagagagagatttaaggaaggaatcatggcagggggtggagctccagcacccaaagcagacgaaccacaaccacatcctcctaaagatcaacttcccaacatttcttattgcatcaccagtcctcctccttggcctgaagctattcttcttggattccaacattaccttgtgatgcttgggacaacggtgctcatacctactgctcttgttccccagatgggaggtggatatgaagagaaggcaaaggtgatccagactattctctttgttgctggcatcaacacattgctccaaacactgttcggtactagattgcctgctgttgttggagcttcctacacattcgtgccaacaacgatatccataatcctctctggcagattcagtgatacctctaaccctatagatcgctttgaga

SEQ ID NO: 98901 - DNA, 578 bp, Arabidopsis thaliana columbia
  unsure (1)..(578): unsure at all n locations
atgccagttggattgatcgctacatcggtattgtggaatttccaggcattgttgtctggcttttgcatcagttggagccaccatctccaaggagccctgctgttgcagcttcaaatggattttctcatgatttcaccaccgatgttctggataacggagattcagcagtaacttctggaaacttctttgaggtccttacttcttcagagctatacaagaacaccaaggttcgagatatctctggaacattccgctgggcaccgttcctggctctgcagaaagagaactcctttttgaccatgctgttacttctttctaaatacaaaatgaagagcatcccggtggttgatttaggtgtagcaaagatcgaggaccattatcacacaatcacggagttataccatatgctggcagaatgcgcggggctttctctgggttttgaggacttgggggattcaaaaactctctcttgaaggccgggtctttcccattaatgtcaaaagggccctattcataaagattttttggagggatggaaccagttctttcaaggcattcaaaggtttttnnggngaaag

SEQ ID NO: 98902 - DNA, 478 bp, Arabidopsis thaliana columbia
catttatttgataaatagatttaagctaagagttaaaaaaagatggcaacactaggagatattggagtagcagcagcaatcaacatactcactgcaatcatcttccttttggcatttgcaatcttgaggattcaaccattcaacgatagggtttatttccctaaatggtatctcaaaggtataagaagcagccctttgcattcaggtgctcttgtcagcaagtttgtcaatgttaacttaggctcatacctccggttcttgaactggatgcccgcggctctaaagatgcctgagcctgagcttattgatcatgctggattggattctgctgtctacttgaggatttacttgatagggcttaagatctttgtaccgatagcgttacttgcttggtcgattcttgtacctgtcaattggactagtcatggtctgcaactagctaagcttcgtaatgtgacatctagtgatattgataagt

SEQ ID NO: 98903 - DNA, 424 bp, Arabidopsis thaliana columbia
ttttcgagcttccaactcctacaatgaggtctagactgggtcctacaatgccaccaccacctatcaatgtgaggaatacgatagaccgggcagactggagtaatcgccaaccaactacaacacctggaagaacaccgaccagtgcaacaccttctggaaggacacctgctctgaagaagccaaaggcaaacgaaccaaataaaagagatatgacgtatgaggagaagcagaagcttagtggccatttgcagaacttgcctccagataaactagatgcaattgtacaaatcgttaacaagaggaatactgcggtgaagctacgggatgaagaaattgaagttgatattgatagtgttgatccagagaccctgtggagttggacagatttgaaccaacatataaaagggcttgagcaagaaaagag

SEQ ID NO: 98904 - DNA, 1187 bp, Arabidopsis thaliana columbia
  unsure (1)..(1187): unsure at all n locations
atgatctnnnnnnnnnnnnnnnnnnnnnnnnnnnnnnnnnnnnnnnnnnnnnnnnnnnnnnnnnnnnnnnnnnnnnnnnnnnnccacgcgtccgcgttcatatggagtttcgttccctggttcgaaacagcagctagacgaaaactgtgtaatggctatatcactgaagaggaaccgtttcttcattccttatacgaatctcgtcttcttcttcttcttgtgtgtctctctgctcgataaaactgtatccatcaggatttcgaatcagatctcggatactgtcgttgattctcccgatcgtcctttgaaatctgcggttttcgctcttggaagcttctggagatcggaggcggcgtttggttgtatcaatggcgtcgtacgaacctccgccggttacgccggtggaacgaagacgaatccggagtataggaacttaggtgatcacgccgagtccgtacaggttgaatatgatccaaggataattggttatcgtcagctcttagatgtattttggtctagtcatgattctagacaagtgtttggacaaggtcctgatgtgggtaatcaaataccagatcctgtaattttcactaattctacagaaggattgagactcggcttctaccagcaaagaaagggggcaactttattacaagaagcagtatcgtgaccactcaaattcaacagctaggaacgttttatcgcgcagagcctgatcaccagaagttcgagctgaaacaacatccatttcttattcagctaattggaaacatggtagaagaagagcttgagagatcagctctagccacaaaactaaacggttacgcagccgagctctgcccgcctagaatccagaaacatatcgactctagagttaatgagatcattagaaaaggttggcccgtcttgagagacatctaatatataagccttgtgagatcttcgcgttcttggatttgattgcttagtctcagatgtaagttttggttcattcttttggccaggaatttggtcacaacaatgtttatgtcttactcttgccccttgagtggtgattgttcagcgttttgtcttgtttcttttaagatctctcaaatagtatatgctttttgttttaaaaaaaaaaaaaaaaagggcggccgctctagaggatccaagcttacgtacgcgtgcatgcgacgtcatag

SEQ ID NO: 98905 - DNA, 835 bp, Arabidopsis thaliana columbia
  unsure (1)..(835): unsure at all n locations
gcatcatgaactccatcccaatttcatcgctcgaaccaggcggttcagtccctaaccaacccgagaaactcgtccctgcaccatactctctcgacgactcattccgcagtaacatctccttctccaaatcatcatttgaccaccgctccctcgatttcagcagttctagattctccgaaatgggaatatcctgcgacgacaacgaagaagaagcgagtttcagaccgttgattctaaagaacaagcagccaaggtggcacgagcagttgcaatgctggtgtttgaatttccgcggacgtgtgacagttgcatcggttaagaatttccagcttgtagcagcaagacagccgcagcctcaagggacaggtgcagcagcagcaccaacaagtgcacctgctcaccctgagcaagacaaggtgattctccagtttggtaaagtagggaaagatatgttcacaatggactataggtatccattatcggcgtttcaggcgtttgcgatatgcttaagcagctttgacaccaagcttgcttgtgaatagaagaaaccactcgtctccttgatcattcatgctaatcccttgtctctctctctcttttatctatgcttttggttttttttaggcaaatcaaaatttgtctcaatactcagttgctgtactgtgagagtcagacgtctactattaacatcctcttctctattctaaatcaattgaccctttaataggtagtcnncgnccnnacccnnaggncgacccgctctagagggatccaagctttacgtacgcgtgcgtgcgacgtcnnnnnnnnnnnnnnnnnnnnnnnnnnnnnnnnn

SEQ ID NO: 98906 - DNA, 623 bp, Arabidopsis thaliana columbia
  unsure (1)..(623): unsure at all n locations
cagctctatacgactcactattagggaaagctggtacgcctgcaggtaccggtcccgaattcccgggtcgacccacgcgtgcgggtgggaaaaaggacaatcgttcctctctcttctctctcttcttaacctatttttcggatctagggtttttccatggccgcctctgtaaggagcttcatcgacgaaggttgggttagcggctgacacgggagtgggcgcctttcttctccggtggtgtgtggtgtggtggatctatggtttcaatgcgaattggtggctctcctcacagcagccatgagatgatgttcctccttgtctgctggtcatggacgctagcggattggaatggattctttaggctcgacagcttgtgagctgtagctccggtgagcggcagaagtcggactgtagatcggtgggtttcacctctttgcgacgagattaacagtggatctttggtcggatcctagatggcgagctgcgggtgttccttagctggatcttgggtggaatgatggcttgcctgaacccagagaccggcttcttccgccggaagctaagttttccccttagccggaacttaaagtaaggtttnctttggaaaaggcccttgggggngc

SEQ ID NO: 98907 - DNA, 538 bp, Arabidopsis thaliana columbia
ttaggacaactatagaagattatgacgtcgcacgcacgcgtacgtaagctcggaattcggctcgaggttatttttcagaacaatttcagtcctaaaatctcagaagtcagagcatctctgtctcagatcatattagcaggaggaccaaacacactcgactcaatcttctcacttctcactccctcctccgtagaatccgccacaacatcattcaacactcacaatcctccgccaccgccgcagctcgggtcctccgtctatctccgccaacgagatatcatcgagaagttccaccttcagaacagagcaatctccactcctcatcctcctctgttttcctcaacgtacgatcatcatcaaacttccgagctaatgctccaagcggcggccgggtctccagccgccgctttcgccgctgcgttagcggctgggagggtgacgaaaaagaagaaactttacagaggagtgaggcagagacattggggaaaatgggttgcggagataagattgccgcaaaacagaatgagggtttggttag

SEQ ID NO: 98908 - DNA, 576 bp, Arabidopsis thaliana columbia
aaacaaactggggaagatgaagatggagtggtgaagaacaaaaccgtataaccgttcggttcagaggtgccgaaccgaaccgacccgtaaaccgaaatcctcaaaagaaattgccgatcggtttgctactgttcaaaacctcggtgccgagaaccgaaactgtcggttttttcggttcgggtttctcggtttcttccgaactcccaggcctagtttggttttatttttcacgagttttgcttctcttttcatcggcgacgacgacgtcgagtttctgtcaaaacgttaacgatccgactcgagcgtcgacagtaagagaagaagacagcgattgtgtgtagatcgacggcgaacgtgtgtcgatccgtctcgatcgacggagaatacgtttcgatccggtttcgatccaaatcggggagtttgaggatccaaatcgggaattgcattaatactcatctccaatctcttctgaagagtccgaatccgatctaccaccactactcgtaccgccggtcatttactgccgccgatttcaaattatccgatcatttccggcgatatccaatcgcagactga

SEQ ID NO: 98909 - DNA, 359 bp, Arabidopsis thaliana columbia
ttcgagccgggaagaagctcaggagtcgcaatgaaatcgctgccttcgttgaagccaatccggaattcaggaacgcaccacttggagacttcaatttcactgtccccaaggtcatggaagatactgttccccctgatccgaagcttggctctccttttccaagcactactaccactacttcagagaagagcagtgtcaagcagagccataactaatatgttctcttctaccttctttctgctccctaaagcaatgcgttttgagtctttatagatttgatgttctctaaaactgttatgatattaacatctctaagcaaaaaaatatgatcttttgtctcatataaaaaaaataataaa

SEQ ID NO: 98910 - DNA, 400 bp, Arabidopsis thaliana columbia
aacaggaaatccaagtgggaatgggacctgcaggagagctgcgttacccttcgtaccccgagcaagaagggacatggaagttcccagggattggagccttccagtgctatgataagtactcgttaagcagcttgaaagcagcagctgagacttatgggaagccagagtggggcagtactggcccaaccgatgctggtcactacaataactggccagaagacacccagttcttcaaaaaagaaggtggtggttggaactcagagtatggagatttcttcctctcatggtactcccagatgctgttggatcacggcgagcggatcctatcctcagccaaatcaatattcgaaaacatgggtgtcaaaatatcggtcaaaatcgctggaatccactggcacta

SEQ ID NO: 98911 - DNA, 896 bp, Arabidopsis thaliana columbia
  unsure (1)..(896): unsure at all n locations
gttaaaaaacaagatttctgtcaactccttgtctcgagacacattacaaatcaaaaaaagaaaaaaaaccacgatggctcaaaatggttcgaatactactgtgaagctgatagggacatgggcaagcccattcgctataagggctcaagtggctctacacctcaagtcagtagagcacgagtatgtcgaagaaaccgatgttctgaaaggaaagagcgatcttcttattaaatccaaccctatacacaagaaagtccctgtcctcatccatggtgatgtatcaatctgtgaatctctcaacatcgtccaatacgtcgatgaatcttggccgtctgatctttccatcctcccaacactttccctcggaacgtccctttgcccggtttttgggctcacttcgttgccggaaagttgtttgaatcgatcgatgcggtgccgggagcaaaagacgcccccgccaggatgacattggcggggaatctgaatggagaatctagcggcacttgaagaggcgtttcaaaagagtagcaaaggcgggatgactttttttggaggggggaacattgggtttgtcgatataactgttggggccatagtaggtccaatctctgtcattgaagctttttcaggtgttaagtttttgcgtccagacacaacaccgggcctgattcagtgggctgagaacatttagggcccatgaagctgtaaaaccttacatgcctaccgtttgccgagttcatcgagtttgccaaaaagaaattcagtgtttagtgactacaaaaaaaaaaaaaaaggnnnnnnnnnnnnnnnnnnnnnnnnnnnnnnnnnnnnnnnnnnnnnnnnnnnnnnnnnnnnnnnnnnnnnnnnnnnnnnnnnnnnnnnnnnnnnnnnnnnnn

SEQ ID NO: 98912 - DNA, 801 bp, Arabidopsis thaliana columbia
gcggtcgttctttttttttttttgaattaacagtttcagcaattccaatatactttcagggtaaaaggctacaaccaaactcagctaaactcagctttaagaacaaatctacaacaaaatgggaaagcaaagaacattgtgaagtaagtttttgtttttttcattcttttttccaatcttgagtttgttcgtacggatgtacgttcaaaagtaaactcatctttacattaatcttacacaagaaagctacaagggttaatacaagccttgacctgaaggtgcttgagcttcagatacagaacttgaccacacattgacgctggattgtatcaatgttaaactgataagactgcacagagtaaacgccaccggataaaaccgatgcacaagaacgatcagctgactcatgttcttgatgactgcagagacattttgaacatctagtaaccggaaagataatgactttttaatcgtctcgagttgggaataaagttaagacagttctccctccattagcgtttgcagattccaaatcctcaacgtaattactaactggactatgcaatgatggtgtagacattctctgaattggttgctgctgcgtttgcctcaccgccaagaacgaaggatcaaacttcccattagtcgtcggtgatccaaatccattactagtcggtgatccaacctgtccattactcgtcggtgaactgaatccaccattagtcggtgaaccaaaatgcgcagctgcgatttgacggtggaactgaggcggttgcaaatgaggattagctgctgcagcaa

SEQ ID NO: 98913 - DNA, 519 bp, Arabidopsis thaliana columbia
  unsure (1)..(519): unsure at all n locations
tgnnnnnnnnnnnnnnnnnnnnnnnnnnnnnnnnnnnnnnnnnnnnnnnnnnnnnnnnnnnnnnggctcgagctcatgtctcctctaatggcgtcgatatcaggtatgtggcagttgggaatgagccttttctaaaagcattcaatggaacatttgagggtataactctacctgctcttcagaatatacaatcagctatcatcaaagctggtttagcgactcaggtgaaagtcacagtgcctcttaacgcagatgtgtaccaaagtgcgtctaatctccccttcggatggagatttcaggcctgaaatccgtgatctcatgttgaacattgttaaggttctgagtgataacggagcaccattcactatcaacatttacccttcatcagtctctacaacgacccgaatttccctgtggagtttgctttctttgatggaactggtactccgataaacgacaatggaagaatctacgacaatgttcttgatgcaaactacgatacacttgtgtggtcgttgc

SEQ ID NO: 98914 - DNA, 540 bp, Arabidopsis thaliana columbia
  unsure (1)..(540): unsure at all n locations
cannnnnnnnnnnnnnnnnnnnnnnnnnnnnnnnnnnnnnaggaagaatcggtttttgttctctcacaccctcgccttcgcttggctctaccttgaatttctactttggtgctactcttcttcacatacctagctgctgtatactatacgtgaaccaactccgtattctactttagaggccatgggaaaagcttctcgagacaaaagggatatctattatcgtaaagctaaagaagaaggatggcgtgcaagaagtgcttttaagcttcttcagattgatgaagaatttaatatttttgaaggtgtgaagagggtcgtagatttatgtgctgcacctggtagctggagtcaggtcttgagtcgtcaattatatcttcctgcaaagtcctcagctgagtcaaaagatggggatcttcctcttatagtagccatcgatttgcagcctatggctccaattgaaggtgtcatccaggttcaaggggacataactaatgctcggactgctgaagtggtcattagacactttgacggctgcaaagc

SEQ ID NO: 98915 - DNA, 556 bp, Arabidopsis thaliana columbia
atgttttaggtgcactatagaagagctatgacgtcgcatgcacgcgtacgtaagctcggaattcggctcgaggcatgtctttcttctggctttttccttttctccttcatctttcatttgccgattccttatctcctctttcagctccagttcaaaattttattcacctaaaccattcttgtccaagtagtatattaacgtattcaagaaacagcacttacttcaccaatctcaaaacacttttgtcctctctctcttcccggaacgcttcatactctaccggattccaaactgccacggcgggacaagctcccgaccgtgtcaccggacttttcctttgtcgcggagacgtctcacaagaagtttgccgtaactgcgtcgccttttccgtcaaggagactttatattgggtgtccgtataacaaagaaggtcgtgctttattacgatgagtgtatgcttagatactctcaccgaaatattctctcgaccgttacatacgatggaagtgctatcttgttggacggcgctattatttcatcaagtaatcaaaatcag

SEQ ID NO: 98916 - DNA, 628 bp, Arabidopsis thaliana columbia
  unsure (1)..(628): unsure at all n locations
nnnnnnnnnnnnnnnnnnnnnnnnnnnnnnnnnnnnnnnnnnnnnnnnnnnnnnnnnnnnnnnnnnnnnnnnnnnnagtttttccacgcgtctgctctgatctttctttctttttttttttttgaaagaatcaatttccctctcaaatcagaaatctaaaaatgggaacaacgatcttggttctctccaagatcctaactttcttactaacaacaatgctgattggatccagtgtgatccagtgtagtagtgtaacctacgataagaaagctatcgtcatcaatggccaccgtagaatcctcctctctggttctattcactacccaagaagcactcctgagatgtgggaagatcttataaagaaagctaaagacggtggcttggatgttattgatacttatgttttctggaatggtcatgaaccttctcctggaacttacaatttcgaaggaagatatgatttggtaagattcattaagacggttcaggaagtgggtctttatggtcatcnaagaattggnccnnatgttttgtcagaaatngaattttggngggttccngngtggtgaggatntaggtggnttaggttcagacctncaatggnccntcaagcttnaaatcaaagggt

SEQ ID NO: 98917 - DNA, 746 bp, Arabidopsis thaliana columbia
  unsure (1)..(746): unsure at all n locations
ttgttcgaggctgagatgaaggcaaaggcacaactaccatcagagaatttaccaaaatttgaggtgaatgatttggagagcctaactgggaagtatgataccgttgtatgtctcgacgtgttgatacattacccgcagaacaaagcagacggaatgatcgcacatcttgcttctttagcagagaagagagtgattctgagttttgctccaaagactttttactatgatatcttaaagagaattggagagcttttcccagggccatcaaaagctacaagggcgtatctacactcggaggcggatgtggaaagagcgttgggtaaagtcggctggaaaatcagcaagagaggactcactaccacacagttctacttctctaggctcatcgaagctgttccaatgtagaccaatttgaaaactagtagatctctgtatagcatattccgagaaggattttcgtggaagacatgcagattctcctaaattcgctgaagagattctcataaactcttcttatatactaggaggacggtctgtacaaacttgcacttctgcagaccctaattgataattggccaaaatgttcaatgtaatcaacgttatttgttgtgctgcttaactgtgtccaaaaacatgtctatacttttctacccaaaaaaaaaaaaaaaaaaaagnnnnnnnnnnnnnnnnnnnnnnnnnnnnnnnnnnnnnnnnnnnnnnnnnnnnnnnnnnnnnnnnntccccta

SEQ ID NO: 98918 - DNA, 857 bp, Arabidopsis thaliana columbia
  unsure (1)..(857): unsure at all n locations
atgatctnnnnnnnnnnnnnnnnnnnnnnnnnnnnnnnnnnnnnnnnnnnnnnnnnnnnnnnnnnnnnnnnnnnnnnnnnnnccacgcgtccggaaaatatttcgaacgcagctgttatgattcagccatctctaacaacatattcgtttaactcactacctcaacctgcattgttggatgttgcttccattggtgcagaccgtatcctcctgttggattcttacattagtgttgtcgttttccatggaatgaccattgcacagtggcgcaacttgggatatcaaaatcagcctgaacaccaggcatttgcccaactcttggaagcccctcaagaagatgcgcagatgatcattcgtgatcgtttccctgtaccaagattagttgtttgtgatcaacatggatcccaggcaaggtttctgttagcaaagctaaatccgtcagcaacatacaacaatgcaagcgagatgaatgcaggctctgatataatcttcacggatgatgtcagtcttcaagtcttcttccaacatcttcagaaattggctgttcaatcttgagaacacagaggtctctctgttcttccatttcaattgagacaagttcaaataaagaagatgcagtcgtcgctcaccaaaatgcctcaagtgtcttacatttgttatacacacacatgacaagactacgcttctgttcctttcttttcactggggcctttatttatcatagtgtgattcaacaaattttgtagtttccatttggtcatagtattatcatcttttctcaaaaaaaaaaaaaaagggcggccgctctagaggatccaagcttacgtacgcgtgcaggcgacgtcatagtcttctaa

SEQ ID NO: 98919 - DNA, 396 bp, Arabidopsis thaliana columbia
cgcttgaatctctcaaaattctcctaattcccaaaattacccctctcatggcgacgaacggatcgtcggagcatcttctcccggagacgacaagaccaagcgcgatcatcaacaaacaacaaccggagtttcctgcatcacgattcacgttcatgtccctcgtgctctggttcgaccagtcaaatttcggtacggctctgctttcgtggtccgttttcttccttctcgtcgtcatcgttcctttgatctctcacttcttgctcgtttgctccgactgcgatttccatcaccgacgtccgtacgacgttattgtgcagctttcgttatcgattttcgcaggaatctcgttcgttagcttatcgatttggtcgagaaaatttgggatgcgacggtttt

SEQ ID NO: 98920 - DNA, 364 bp, Arabidopsis thaliana columbia
cttgatcctcaacttccttttcttcacaacaatatccgcctgcggtaactgcggttgcccttctcccaagccaaaacataaacctagcccctctcccaagccaaaacctaaccctaaacccaagccaacaccacaccctagtcctagcccggcaatagccaaatgccctagagacgcccttaagctaggagtttgcgccttcgtactcaacggcctactaaacgtaacccttggcaagccaccggtcgagccatgttgcaccctcatccaagggctcgctgatcttgaggctgcagcttgtctttgcactgccctcaaggctaacatcctcgggtatcaacctgaatatcccactctctctcag

SEQ ID NO: 98921 - DNA, 720 bp, Arabidopsis thaliana columbia
  unsure (1)..(720): unsure at all n locations
ttaggagcactatagaagagctatgacgtcgcatgcacgcgtacgtaagctcggaattcggctcgagcccttggcaagccaagggttacgtttagtaggccgttgagtacgttggcgcaaactcctagcttaagggcgtctctagggcctactaaacgtaacccttggcaagccaccggtcgagccatgttgcaccctcatccaaggactcgctgatcttgaggctgcagcttgtctttgcactgcgctcaaggctaacatcctcggtatcaacctgaatatcccactctctctcagtcttcttctcaatgtttgcagcaaaaaagttcctcgtggcttccaatgctaatcaagaacctaattatacaacacacacttcatatcaatataatcttcttgtttggacagacaagatgatttctaccaaaaaaaaaaagattatatattattgtctttgttatcttgtatttgtgtgttcatctagctacttatgtatgggtgtatgattgcttctaaacttcacagttatgtgtttttttctgttctcttatatagtttcattggggtgtgtatttgttgttgtatgaattaataaataatatccttataaaaaaaaaaaaaaaaaaaggnnnnnnnnnnnnnnnnnnnnnnnnnnnnnnnnnnnnnnnnnnnnnnnnnnnnnnnnnnnnnnnnnnnnnnnnnnnnnnnnnnnnnnnnnnn

SEQ ID NO: 98922 - DNA, 969 bp, Arabidopsis thaliana columbia
taggtgcactatagaagagctatgacgtcgcatgcacgcgtacgtaagctcggaattcgtgctcgagattccaaaaaaaataaaataatacaaatctctctttttctctctaaaaaatcttgatatggatcaaaacgtaccaataagcaagaagctatggaacatcgtacgttttctcttgtacatgatccgcaaaggcgtctcaaaaaacaaactcatcgctgacttcaacgccactctcaaacgtggcaagaacctcatgttccaccaacgtcgtcgtgtccacgccggttccaccgcctcagccgctctaaacgctacttcagccaccgcgtcatcgcgacaagagtacgagtttagctgcagcaacactccaaactattcattccctttctctaatatggctttcatgaggaaaaagagtcacaataatctcttcacgtgtggtcaaacgcctcagacgcttgacgacgacgtagcccccgctagagccgttcttgagctttttaacggcgttggagagaaaggaaacgtcacgccggcagatttaacggtggctttgtctccttatttccccggttttggacagactccattggttagaccgttaagagtaacggactcaccgtttccgttaacgccggaaaatggtgatgtggctaatggacacgttgacaaagcagctgatgattttataaagaagttttataagaacttgaatcagcagaaaaaaatgattgagttcagctaaatattaatccgaattgtgtgtatcttcgtcatatttctcttcttccttaaatatttttttacccctttttctttctttcttttttttctctcgttttgtgctgattaaaatccaaagatgtaatgatattttggggggttttattttcgattcctaacacaattggatattatgaataaaaaaatatcatcggttctattagtaaaatatgtattgtt

SEQ ID NO: 98923 - DNA, 1961 bp, Arabidopsis thaliana columbia
ctgtttcttgtttttctctctcgcttaactttcacaagaaaaaaaaaagatgaaagaatcattcaaagtgtgtttctgttgtgtaagaaacttcaaggtgaaatcaagtgagccacctgaagaaatcaagaaccttttccatgattactctcaagacgacaggatgtctgctgatgagatgctcagattcgtgatccaagttcaaggagaaacacacgctgatatcaactacgtgaaggatatcttccacagacttaaacatcacggcgtttttcatcctcgtggaattcatcttgaaggattctaccgttatcttcttagtgatttcaactctccattgcctctgacccgcgaggtttggcaagatatgaatcagccattatcgcattacttcttgtacacgggacataactcttacttgactgggaatcagttgaacagtaatagcagcatcgaaccgattgtgaaagctctgagaaatggagttcgtgtcattgagcttgatttatggcctaactcttcaggaaaagaagctgaagttcgtcatggagggacgttaacgagtcgtgaagatctgcagaaatgtcttaacgtggttaaggagaacgcgtttcaggtgtctgcttatcctgttgtgcttactttagaagaccatttaactccaattcttcagaagaaagtcgctaagatggtgagtaagacgtttgggggatcattgtttcaatgtacggacgaaactacagagtgttttccttcaccagaatcactcaagaataagatcttgatctcaacaaagccaccaaaagagtatcttcagacccaaatctcaaaaggttcaacaacggatgaatccactagagctaaaaaaatttcggatgcagaagaacaagttcaagaagaagatgaggagagtgtagcgattgaatacagagacttaatctcgattcacgctgggaaccgcaaaggagggttgaagaattgcttgaatggagatcctaaccgagtcatacggttaagcatgagtgagcagtggcttgagactctggcaaaaacccgtggacccgatttagtaaagttcacgcagcggaatcttttgaggatatttcccaagactacacggtttgactcatctaactatgatcctctcgttgggtggattcatggggctcaaatggttgccttcaatatgcaaagccatgggaggtatctgtggatgatgcaaggaatgtttaaagccaatggtggatgtggctatgtgaaaaagcctgatgttttgctctccaatggtcctgaaggtgaaatctttgacccttgtagtcaaaacctcccgatcaagacaactcttaaggtgaagatctacactggagaaggatggaatatggactttcctttagatcactttgaccgatactctcctcctgatttctacgcaaaggtcggaatcgcaggggttccattggacacagcaagttacagaacagaaatagataaagacgaatggtttccaatttgggacaaggagtttgagttcccattacgtgttcctgagttatctcttctgtgtatcacagtcaaagattacgacagtaacactcagaacgatttcgctggccagacatgttttccgttgtcggaggtaaggccaggtattcgtgccgttcggctccacgatcgtgccggagaggtctacaagcacgtgagactgctcatgcggtttgtcttggagcctcgttagcgcttcgtggataatgttcatttcatcactcgtgtcaatgtcggtacacgttttttatgtttgtaatgttaaggtgtcggtatacattagtcagtcatactaagccatacgataataagagatgtgaaaagaaaaaattaaacgtaattaagatcagcaaaattatgaaacgtatgactttaatataaacaatttgtttgaacagttgataaagataattttgttt

SEQ ID NO: 98924 - DNA, 415 bp, Arabidopsis thaliana columbia
atcaaatcaaaagcttctctatcaagcttatcgaaaagtcacatcttttggaagaaacaatggctcgtaccaagcaaaccgctaggaaatccaccggaggtaaagctcccaggaagcagcttgccaccaaggtttgtccttctatctttcattcataccgaaatagtagatctagggttcaaatttgggttgaataacgagtttttgtggacgaaatctgaaaaatatgatctaggttttctatattgtgttgaatttttagtttatgatctaatttagtatgaatcttgcggttttgattttgtttatgatgaaattggttggaaggggatctagggtttatctaatttgagtattcgattgcgtctctaacgaattcttcaatacaggcggcgaggaaatcagcaccaaccac

SEQ ID NO: 98925 - DNA, 707 bp, Arabidopsis thaliana columbia
taccggtctcggtaagtcccggcctccgcgcccgcgaaaacaaaactcgcttcctgataatcaaatcaaaagcttctctatcaagcttatcgaaaagtcacatcttttggaagaaacaatggctcgtaccaagcaaaccgctaggaaatccaccggaggtaaagctcccaggaagcagcttgccaccaaggcggcgaggaaatcagcaccaaccaccggaggagtcaagaagcctcaccgttaccgtccaggaaccgtcgctcttcgtgagattcgtaagtaccagaagagtactgaattgttgatccgcaagcttcccttccagcgtctcgttcgggaaatagctcaggacttcaagacggatctgaggtttcagagtcacgcggtgttagctcttcaagaggcggctgaggcatacctagttggacttttcgaggatactaatctctgcgctattcacgccaagagggttacgatcatgcctaaggacattcaattggctagaagaattcgtggagaacgtgcttaagcttttatttacctaattcaagtttagatttttacgatgatgtattagtattctggattcttgtttcctatcgctcttttatttgcttaccaagtacatgggggtaattgttgaacttacagctcttttaagcaaacagttatgaaatctttcctttcagttaaaaaaaaagaaaaaa

SEQ ID NO: 98926 - DNA, 665 bp, Arabidopsis thaliana columbia
  unsure (1)..(665): unsure at all n locations
cgtcgcatgcacgcgtacgtaagctcggnatcctggctcgaggtacagtgtcatttttaggattttctaagaagaaaaaaaaaacagggaagatctttttaagcttctctttcctctctcttctatctttctttctctttctcaatctctctcaggtttctctctcctctctccaggaggtcaaaaaattctttaaagagccgtttagaccaaacccatttttataatcatcaatggacgatgatggatttcgcaattggggatactatgaaccagcggctgcttcttcgtttaaaggtaatctcggtttgcagcttatgtctactattgaccggaacactaaaccgtttttacccggtcgtgaatcgaatcttatgatcggttctaacggttcgtatcactctcgagagcaagacatgaactatagctggattaatcaaccaaaggacaacaagttcttcaacatgttgcctataacgtacaccgggtttatagtaattgtgttgtcggaaacatcttggttcggaattcggtttcagatggtaccatcaaaccgggttttaaatttcacccccggttttgagggggaatnccggtttccncctccctgcttccttgtggaggggcagccttgttagaaggggaaanatgnggggngagnatng

SEQ ID NO: 98927 - DNA, 552 bp, Arabidopsis thaliana columbia
  unsure (1)..(552): unsure at all n locations
taggtgcactatagaagactatgacgtcgcatgcacgcgtacgtaagctcggaattcggctcgagcaggttatactcacagcaatggcgctcatgggcagcattcttcattcaagcggcatggaggaaacattgcaaaaggaagctttctaagacaagagacaacgagaatattccacaaggcacgcaactcaatcttgcatcaacgctctacgtgtccagatttgtgtccaaagctttgcaaaatcgacgaaaagatacagcagattgttccagctctcctgatatgtcacctccggtacctcataaaccagccgatctcgagtttgcaaaggctgaagcatagtgtgtctttgaaggaaaatgactctctacacaaacaaggtagtgaagactccatgtaagctcaaaacatgccctacaacgtaactttccagttattgtcaaataattgactcatcaccacgtcctagatataaaaaaaaacagtangaaaacaagatcattccaaaaaacccagtgaggcacttgatgagctctaaatatataaaat

SEQ ID NO: 98928 - DNA, 793 bp, Arabidopsis thaliana columbia
acaactacaagtacgatgaaaacgttaaggaagagtctttccccgagaacaatgaagacaacaagaaaaacgtctacaactctaacgcttacgggaacagagttagaacgtgaaacaccgtacaaaggttacagccacaacttggagagacaaggcatgagtgacacaaggttcatggagaaaggtagctactactacgacctttacaacgacagaaaccacggccattactaccggaagtcacacagtaaaagccccgccggttactattcttctcccgcgaccgagactaactacgaacagcaatcgtactgcgtacggaaacaacaacgaggagaacagttttaaggatccgtacaactccaagtgggagaagaacttgatgaacgaacagccttaagagttttttcgggggcaaaggcactaatcagttcaagcctttatgaaggtttttatttgatttcctctcaaggctgctacactcttaaaagtgctctcttttatttccacctaagttatatcccatgtcggggtttagtccatttaaatcgttgttatcattgcaagagcttaaaagtgtaagctataccaaaaaagagaaaggagtttttttttttttttagttaatcggtgggtttgcttttctatgggtttttgaactttgatgtttgcgtttgcatatattattcggtgaaagggagatagtttaaataaaaaaaaaaggcggacggccgtccgctatacaggatccgagctgaggcaagcggcatcaagctcttctatagtgtcacga

SEQ ID NO: 98929 - DNA, 378 bp, Arabidopsis thaliana columbia
catctgtctttctatcgcctaatggttgtttggttagttggactagtcggtggctttaagatgcctctaccgtcaacttgccctatggaattctcctgtatgcctgagcattttgttggagatgcaatggagttgctgacattcgcttcaagaattcccaaagctttggacggggtgccgctggacgactttatgaacttcataattatgttcatggcaagtcctgaatatgttagaaacccgtatctcagagcaaagatggttgaagttctgaactgctggatgcctcgttcaagtagttcttcttctgctacatctactctctttgagggacatcagttatcgctcgagtatcttgtcaggaatttactgaaacta

SEQ ID NO: 98930 - DNA, 558 bp, Arabidopsis thaliana columbia
  unsure (1)..(558): unsure at all n locations
attgtnnnnnnnnnnnnnnnnnnnnnnnnnnnnnnnnnnnnnnnnnnnnnnnnnnnnnnnnnnnnnggctcgaggccgtgcatacaacattccagtatgcaggtaccgaaggaaaacgccacaggcttcgagaggggatggttttctatgacccaccagaatattatgattcaccaggaggtttcattgcgtttaaaccatcgattccaaaaagcttgttacttgacgggaagcataccattgaatcgcattttatcctcgttaatcaccaaatgaaacagatcagatcagctctagccattgcatctcttcttaatcgtacactggtgatgccaccaatatggtgcaggttagataggctttggtttgggcatcctggtactcttcagggatctatgacccgacaacctttcttctgcccacttgatcatgtctttgaggtcaatatcatgcttaaggagctaccagaggaagagtttggccctgggattggtatcagagagtattcttttctagataaccccattgctgccaaaacaagtgaaagagtcatggctt

SEQ ID NO: 98931 - DNA, 1018 bp, Arabidopsis thaliana columbia
taggtgacactatagaagagctatgacgtcgcatgcacgcgtacgtaagctcggaattcggctcgagaggagttagagcgaatgctcaaggaaatactaatcccgaccctttccattgatcgcattgacaagtcacatgctaaatggaagcgagctgacattcttgtctttaaacactggacattggtgggttcatggaaagaccgccagaggtgcaggaaaaactactacaaagaaggtgactacatctacccgaaatttgatgctactgaagccatacagaaggtcgttgaagacttgggcaaaatggatcgatcagaatgtgattcccaaaaagcagcttgtattttatcgcggatactcctctgcccattttcgaagagttaagttcttccgtgtattctgtgtcctgacttgaacaggggaggtgagtgggactcgggagggtcatgcaacgggaaggtagaacctgtgaagaagggttcaatcatcgattcctatcctttgaaaatgaagatagtccaggaagccataaaggagatgcaagttcctgtgattcttctaaacgtgacaaagctgactaatttccgcaaagacggacatccatcaatctacggtaagaccaacacggatggtaagaaagtgtcgacaaggcgacaggattgcagccactggtgcctgccgggagttcccgatgtttggaaccatcttatctacgcatctttgctccttcaaccacattcttaaagttgagctcatacatcaccaaaattagatagaaagagaagagcagaaacaaatgaccagtccagtcttcactgttgtagtagtgatgtcaaattttgtgtaatttattgcccttggagctgataagtagttttttgttactttcatgtagaggtgtgaacaaacggaatcaggatgaaattttcggggtcgcgtaatacatgcagcccgggggatccactagttctagaacggccgccacctcggtggagctcccgcttatggtggcttt

SEQ ID NO: 98932 - DNA, 531 bp, Arabidopsis thaliana columbia
  unsure (1)..(531): unsure at all n locations
gaggaactgttttatcccttcacatccctgagtacactgcgctacatgcatccaagagagtcatggatatgtatgagtttatgaacagtaaggcccttttcaagactgtaagaaagaatcatgaactgaagaagaaagtgaacccagtgattgttcatgtgaattaccatccagataagctcaatagaatgcaagccgtcgttgagttctacgttaacggtaagcaagacgcgcttgatagcttccccgatggttctgaatgattcacctgaaaagcagataggctaaaaaaaactttccgagtttcttgacatttgtgattctaatatatttctcccttttccaatgtttactgcttcatgccttctactttcctctttgtattatgaatttttgtgtatcttatggctaaaatcgcaagtcttttttttctttcttnnnnnnnnnnnnnnnnnnnnnnnnnnnnnnnnnnnnnnnnnnnnnnnnnnnnnnnnnnnnnnnnnnnnnnnnnnnnnnnnnnnnnnnnnnnnn

SEQ ID NO: 98933 - DNA, 537 bp, Arabidopsis thaliana columbia
cccacgcatccggcgctcttgaagctttccggttagatcctgaaaagtggggagtgaatgttcaacctttgtctggatctcctgccaacttccatgtgtacactgcattgttaaagcctcatgaaagaatcatggcacttgatcttcctcatggtggtcatctttctcatgggtgtcagactgacaccaagaagatatcagctgtgtctatcttctttgaaacaatgccctatagattggacgagagcactggctacatcgactacgatcagatggagaaaagtgctactcttttcaggccaaaattgattgttgctggtgcaagtgcttatgctagattgtatgactatgcccgcatcagaaaggtctgtaacaagcaaaaagctgtaatgctagcagatatggcacacatcagtggtttggttgctgctaatgtaatcccttcaccgttcgactatgctgatgttgtaaccaccacaactcacaagtcacttcgtggaccccgtggagccatgattttcttcagaaagggtgtta

SEQ ID NO: 98934 - DNA, 577 bp, Arabidopsis thaliana columbia
ggatctagagttgagaaagtgttggaagctgttcacattgcatccaacaaaaacactgttcctggagatgtttctgccatggttcctggtggaatcagaatgggtactcctgctctcacttccagaggctttgttgaggaagactttgccaaagtagctgaatacttcgacaaagctgtgacaatagctctcaaagtcaaatctgaagctcaaggaaccaagttgaaggatttcgtgtcagcaatggaatcctcttcaaccatccaatccgagattgcgaaactgcgccatgaagtcgaggaattcgctaagcagttcccaacaattgggtttgagaaagaaaccatgaagtacaagaactaaactgtttcaccccacaagtgttttctgttatgctttgaattcccatggaatgtatagatgatacatgtaaaactctattttcacgctatgcgaaaaataatgatctgttaaattaaaaaaaaaaaaaaaacccaaccccaagggcggccgctctagaggatccaagcttacgtacgcgtgcaggcgacgtcaagatcttctaaggtgtcctaaa

SEQ ID NO: 98935 - DNA, 872 bp, Arabidopsis thaliana columbia
  unsure (1)..(872): unsure at all n locations
cccactcgcccgcccaagcgtccaaccgttgctacaggaccacagaaaggtacggctgctagaatacgacaaaacggtacagctgcaagactacgacagaacggtacagctgcggacaaaacttcattattgctacnggctgctacttaaccaagattgggtaccgatgcccgcatcagacaagtcggtaccgctgccaaaaacactactgctgggtactgtggcacacatccatcgtttggttgcggctgctataaacccttcaacggtccacgatccagatgttgtcaccaccacagctcactcgtcacttcgtggaccccgtggagccatgatttttttcagaaagggtgttaaggaaattaacaagcaagggaaagaggttttgtatgattttaaagacaagatcaaccaagctgtcttccctggtcttcaaggtggtccacacaaccacactatcacaggactagctgttgctttgaaacaggcaactacttcagagtacaaagcataccaagaacaagtcctgagtaacagtgcaaagtttgctcagactctaatggagagaggatatgaacttgtttctggtgggactgacaaccatctggttctagtgaatctaaagcccaaggggattgatggntctagagttgagaaagtgttggaagctgttcacattgcatccaccaaaaacactgttcctggggatgtttctgccatgggtcctggtggatcagaatggggtcctcctgctttaacttccaggggcttttttttngggaggctttnccaaagtggctgattacttcggcaaagctgtgccaattccnccaaggcaaactgggcgataggccccaggttgagggttnggc

SEQ ID NO: 98936 - DNA, 905 bp, Arabidopsis thaliana columbia
tacggctgcgagaagacgacagaagggtacggctgcgagaagacgactcttttcaggccaaaattgattgttgctggtgcaagtgcttatgctagattgtatgactatgcccgcatcagaaaggtctgtaacaagcaaaaagctgtaatgctagcagatatggcacacatcagtggtttggttgctgctaatgtaatcccttcaccgttcgactatgctgatgttgtaaccaccacaactcacaagtcacttcgtggaccccgtggagccatgattttcttcagaaagggtgttaaggaaattaacaagcaagggaaagaggttttgtatgattttgaagacaagatcaaccaagctgtcttccctggtcttcaaggtggtccacacaaccacactatcacaggactagctgttgctttgaaacaggcaactacttcagagtacaaagcataccaagaacaagtcctgagtaacagtgcaaagtttgctcagactctaatggagagaggatatgaacttgtttctggtggaactgacaaccatctggttctagtgaatctaaagcccaagggaattgatggatctagagttgagaaagtgttggaagctgttcacattgcatccaacaaaaacactgttcctggagatgtttctgccatggttcctggtggaatcagaatgggtactcctgctctcacttccagaggctttgttgaggaagactttgccaaagtagctgaatacttcgactaagctgtgacaattgctcttaaagtccaatttgaaactcatagaaccaatgttgttaggatttcaggtatgcatttgggaaatcctttttaaacccatttcaattccgaagaattgcaaatacctgttccccatgaaaagttcgaaggtaattt

SEQ ID NO: 98937 - DNA, 1145 bp, Arabidopsis thaliana columbia
  unsure (1)..(1145): unsure at all n locations
aacgcgcattagaagcttttcagttagatccttctaaatggggagtcaatgtgcagtctttatcaggatcaccagctaatttccaagtttacactgcattgttgaagcctcatgaaagaatcatggacacttgatttacctcatggtggacatctttctcatggttatcagactgacacgaagaaaatatcggctgtatccatcttttttgagacaatgccatacagattggatgagaacactggttacattgattatgaccagctagaaaagagtgccgtgcttttcagaccgaaacttattgttgcgggtgcaagtgcttatgctcgtctatatgactatgcacgtattcgtaaggtctgtaacaagcaaaaggcagttatgttggctgatatggctcatattagtgggttggttgctgctggcgttattccttctccttttgagtatgcagatgttgttacgactacaactcacaaatctcttcgcggtcctagaggggctatgatattctttaggaaggggttaaaagagattaacaaacaagggaaagaagtcatgtatgactatgaagacagaattaatcaagctgtttttcctggactgcaaggtggtccacataatcacctataacgggtctaacagttgctctgaaaccagcaagaacccctgaattcaaggcctaccaggaaacaatttctccgtaattgcccccaatttgcctgaaactttgcttgcgaaaggatatgatttagtgtctggaggcactgataatcatttagttttggtgaatctgaaaaacaagggaatagatggatcaagagtggaaaaagtattagaattagtacatattgcagcaaacaagaatactgttcctgggtgatgtttctgccatgggttccccggtgggcatccatatgggaaacaaccagccctcacatcaagaagattcattgaagaagattttgcaaaagttggcggaatattttgatttaaccntccaaaatanccttaaagaaccaaaccanaattctccaaggaaccaaaatttgaaaananttttgtttnccaaccaatgccnatccaattganaaaattaccnttccnaaaatttncaaacctcccttgaaaatngttaaaaaaaa

SEQ ID NO: 98938 - DNA, 353 bp, Arabidopsis thaliana columbia
aagaaatcggaaaactggagaaaccctaaatcgacgaaaaggagagacctttgaatcgaagcttggtgtgtttatactatgaagagtcaatggtctaattttcatcagattgggagaaactctttcttagctgcttctactgtttacgtttcaaacgaattcaacttcttaaacacttctcttcttaatcgaagaagcttctgttttgcagaaggagatcgatccagctttgtagtgttgaaatcggaagcagagttcaacagtgcattgagtaaagctcgagatggatctttgccatcggttttctatttcactgccgcatggtgtggaccttgcttatctctcctgtgata

SEQ ID NO: 98939 - DNA, 537 bp, Arabidopsis thaliana columbia
ttaggtacaactatagaagactatgacgtcgcctgcacgcgtacgtaagctcggaattcggctcgagatccgaagcggagccacttgatctcgaaggtatgttggattcagaagaccaaccagagacggattctggactcagaaagcggcgattcgatttcaaaacccggtaaaactccttctccaaatgcttcatagctttccgcatcaaatcctgtcctttagcaagcttagcggaggccggattcatagcaacggtgctctgaatggcgtattgtaacttgccgagaacctcgaggaagcgtctgccttctaggcggttttgagcggagaagagggaagagaggctgcatgaacaagaagaagagtcgcagaggtgtggagtaacccattggcatatgaaggcgtcagctgcctccacactatcgccgattagagactcggagaagccctgttgctgttgcgggccgaccttagaggatttttgataacgtggtgggtttaaagaccaccattgtttcttggggttgaagaaat

SEQ ID NO: 98940 - DNA, 611 bp, Arabidopsis thaliana columbia
  unsure (1)..(611): unsure at all n locations
agcggggaaggnttcatnccccccgatctgacttanttggggnggcncgnagnccttttaccattggaatggggggccctccnanggntttggaaccccttttcccggggggtccaactttccccggncnggtgggcatttcattgggggatagggctcaacagntctgccccctaaantgctcgngctcttctcttncgaaaccaaccccgattcacggttggtgcgtgaagcnctgtgtgagctggagcttcccntatgtattacacaacattggagaagggtccacacggatgaaatcacttctaaatgcttcaggatccaataaggttccattcttggttgatccaaacaccngtgtccaattaggtgattacgagaagattctggcttacctcttcaagacatattcttcagcagcatttgcatagtccatagaacctatacatcattattcccaaggatctggatgcatagatacaaggccctttctcttaaaacttgtgatgtatataattgtggtaaatattgtatatcaagacaaaacacatgtcttttttttttgtgttttggtataagaatcttctctttcaagcagcagtttgatatcc

SEQ ID NO: 98941 - DNA, 2330 bp, Arabidopsis thaliana columbia
  unsure (1)..(2330): unsure at all n locations
cttattccgacaaggttcaagatcgattaaacattacatggaggagattcactagaaagaaaggaaaaaaatctctttgtctttgcagatgcgacacgcaaaacgacgattctgatctcgcttgtctgatttcaaaaacaatgagaagatagttctgattatataacacacaaaccctacttcattccttcatcatcgtctccaatcattacccaaagatccgtctttttctttacttcatgtcgaagcaaacgtacaaagtgtgtttctgctttcgccggaggtttcgttacactgcatcggaggcaccgcgtgagatcaagaccattttcgaaaagtactcagagaatggagttatgaccgttgatcatctccacaggtttctgatcgatgttcagaaacaagataaagccaccagagaagatgcacagtcaattatcaattctgcatcttctcttcttcatcgtaatggtctccatcttgatgctttcttcaagtacctctttggtgataataaccctcctcttgctctccataaggtgcatcatgacatggatgctcctatatcgcattatttcatattcactggtcataattcttatctgactggtaatcagctgagcagtgactgtagtgaggtacctattattgatgcgttgaagaaaggtgttagagtcattgaattggatatatggcccaattccaacaaagacgatattgatgttcttcacggaatgactctcactacacctgtggggttgatcaaatgtctcaaagctatcagagcacatgcctttgatgtatctgactatcctgttgttgtaactcttgaagatcatcttactccagatcttcagtctaaagttgctgagatggttactgagatatttggggaaattctgtttactcctcctgtgggagaatctttgaaggagttcccatcgccaaactctttaaaaagacgtattatcatctcaaccaaacccccaaaagagtacaaggaaggaaaagatgtggaagtggtgcagaaaggtaaagacttgggggatgaagaagtttggggaagagaagttccgagctttattcagaggaacaaaagtgaagctaaggatgacttagatggaaatgatgatgatgacgatgatgatgatgaagacaagtctaagattaatgcaccaccccagtataaacatttgattgcaatccatgctgggaaaccaaaaggcggaattactgagtgtttaaaggtagatcctgacaaggttagacgccttagcttaagcgaagaacaacttgaaaaggcagcagaaaaatatgcgaagcagattgtgaggtttactcagcacaatttgctgaggatatacccaaaaggaactagagtcacatcatcaaattacaacccgttggttggctggagccacggtgctcaaatggtggctttcaatatgcaggggtatggaagatcattgtggctaatgcagggaatgtttagagccaatggcggatgtggctacatcaagaaacctgaccttctgctgaaaagtggttcggatagtgacatatttgacccaaaagctactctacctgtgaaaacaacacttagggtaactgtatacatgggagaaggctggtactttgatttccgccacacacactttgaccaatattcaccgcctgacttctatacaagggttgggatagctggagttccaggggatacagtaatgaagaagacgaaaacactggaggataattggataccagcttgggatgaggtgtttgagttcccattaaccgttccagagctggccctgctacgattagaagtgcatgagtatgacatgtcagagaaagatgattttggaggacagacatgcttaccggtttgggagctaagcgaaggaataagagcatttcctttacatagccggaaaggagagaagtacaaatccgttaagcttctcgtgaaggtggagtttgtgtgagacatgattaagaaagatacagcatttaaacttgtctggtaggtttgagtgccacagagtttgtgaatttggaggatttgtatgtgtgagagagaatgtatgcttgatttgttgtttgtaatattatgtacataaaagacgaaagtgagagagagagagacggtcttgtatcgtgtgttgttgtattattatgtagtagtctcgtgtaacacttgaatcgtatgatgatttgtggtttttgtgtaaaaaaaaaaaaaaaaagggcggccgctctagaggatccaagcttacgtacgcgtgcgatgcgacgtcnnnnnnnnnnnnnnnnnnnnnnnnnnnnttcat

SEQ ID NO: 98942 - DNA, 529 bp, Arabidopsis thaliana columbia
atgatctgccagcactaatactgactcactttagggaaagctcgtacgcctgcaggtaccggtccggaattcccgggtcgacccacagctccgggtgcggcatgatttctgtgaaacctatgggaataattgccagaatgttgatagacattgctttgagccaggttcaagtttcctccggcagtttctgttttttttcaaggcacaaaactcgggagattttgtgatacttgtggagacttgtcgtctactgcagagtttcgttgacagcagtggtgacattgtcagccttttttctggcttggactattcttctgagcataatttggtggattttagagtaaagaaacttgcatttacctgtatcgaggcgatacaccagaataggaaccgtttaagggatcagctcttagttactcctgaagaagctagcatttcaacagctatctttgatggaggcaggtttcgttgttgctagatcctaaggtgccttgagtttgcaagatagttaggtatctacagaaaagaa

SEQ ID NO: 98943 - DNA, 530 bp, Arabidopsis thaliana columbia
  unsure (1)..(530): unsure at all n locations
gactcggacttgcaattggtgccattttaatggatttaaagaaggctacgactttggcttcagtaactgtcatgacattcatgctcgccggaggattcttcgtcaaggcaagtcctctgtttcttgatttcctctgtttttaacttcccctgtttcttgatttcccctgttttactgatttccttttctgtgtctacacagaaagtgccggttttaatatcgtggatacgttatctatctttcaattaccacacctacaagcttcttcttaaagtacaatatcaggacttcgctgtgtccatcaaccggatgagaatagacaacggactaactgaagtagccgcactcgttgtcatgatattcggttatcgcctcctcgcgtatctgtctctaaggcaaatgaaggtcgtaacataacccattttccacacggggaaatcaaataccatgggggaggcattaaaagggggcatcaggtcttgttgtctttgcanggccatcccttgcaattgttaaggntgggccaaggt

SEQ ID NO: 98944 - DNA, 1056 bp, Arabidopsis thaliana columbia
  unsure (1)..(1056): unsure at all n locations
atgttttaggtgacacttagaagagctatgacgtcgcatgcacgcgtacgtaagctcggaattcggctcgagcttccctgtttggcagcgatctttgcgtttccgcaagagcgagcgatgttaaataaggagagagcagcggatatgtacagattaagcgcatatttcctagctcgaaccacgagtgatctccctctcgactttattctaccttctctcttccttcttgtcgtctatttcatgacaggtcttcggatcagcccatatcccttcttcttgagcatgctcacagttttcctttgcatcatcgcagctcagggactcggacttgcaattggtgccattttaatggatttaaagaaggctacgactttggcttcagtaactgtcatgacattcatgctcgccggaggattcttcgtcaaggaaagtgccggttttcatatcgtggatacgttatctatctttcaattaccacacctacaagcttcttcttaaagtacaatatcaggacttcgctgtgtccatcaacgggatgagaatagacaacggactaactgaagtacccgcactcgttgtcatgatattcggttatcgcctcctcgcgtatctgtctctaaggcaaatgaagatcgtaacataacccattttccacacgaagaaatccaataacatagaagaagcataaaaagagtgcatcagatcttgatgatcttgacacgaccaatccttgacaatgattaagagattggtcctaagattattcttgcttaattacaaaggtgttgtgagtttgataatgattggatggtgatagatgtcttgattggagataaatatatatgttcaagtttgtaattgtagttcgaatctaaaattggttaaagtttattaacaagaagaaccttgtggctggnnnnnnnnnnnnnnnnnnnnnnnnnnnnnnnnnnnnnnnnnnnnnnnnnnnnnnnnnnnnnnnnnnnnnnnnnnnnnnnnnnnnnnnnnnnnnnnnnnnnnnnnnnnnnnnnnnnnnnnnnnnnnnnnnnnnnnnnnnnn

SEQ ID NO: 98945 - DNA, 727 bp, Arabidopsis thaliana columbia
taggtgacactatagaagagctatgacgtcgcatgcacgcgtacgtaagctcgggcgtccggaaggtattcttgtgaataccttctttgagctagagccaaatgctataaaggccttgcaagaaccgggtcttgataaaccaccggtttatccggttggaccgttggttaacattggtaagcaagaggctaagcaaaccgaagagtctgaatgtttaaagtggttggataaccagccgctcggttcggttttatatgtgtcctttggtagtggcggtaccctcacatgtgagcagctcaatgagcttgctcttggtcttgcagatagtgagcaacggtttctttgggtcatacgaagtcctagtgggatcgctaattcgtcgtattttgattcacatagccaaacagatccattgacatttttaccaccgggatttttagagcggactaaaaaaagaggttttgtgatccctttttgggctccacaagcccaagtcttggcgcatccatccacgggaggatttttaactcattgtggatggaattcgactctagagagtgtagtaagcggtattccacttatagcatggccattatacgcagaacagaagatgaatgcggttttgttgagtgaagatattcgtgcggcactttagccgcgtgccggggacgatgggttagttagaaagacagaagtggcttaagtggtaaaaggattgatggaaagt

SEQ ID NO: 98946 - DNA, 416 bp, Arabidopsis thaliana columbia
ggaggaaggagaaatgataggtttattaactgagagtagcagcagtcatatggcagtcatatgtctccggttaatgcggaggttgaggagatgagatcagagtcgccggtggttaatgataaggcgttagatatttctgatgatgatcatgatgatgagaatgaaccgcttattgtttctggtgaatgtcgtatttgttctgatgagtctcctgttgagaatcttgagagcccttgtgcttgcagtggcagcctaaagtatgctcatagaaaatgtgttcagcgttggtgcaatgaaaagggaaacattatatgcgagatttgtcaccagccttatcaacctggatataccgctccaccacctccacttcagcctgaagaaacaactattgacattggtggaggatggacaatctc

SEQ ID NO: 98947 - DNA, 501 bp, Arabidopsis thaliana columbia
  unsure (1)..(501): unsure at all n locations
atcttgcatctgcctcagaaaattttctggggagctttcaccaattagttcttctcgtctctctctctctctttggttaatgtttctacagattctctcctcctaattcagagacgacaaaacgctataaacaacatttttacagtttggaggaggaaggagaaatgataggtttattaactgagagtagcagcagtcatatggtggtaaatgtggatgggttgatgcgtccgataccgatgtctccggttaatgcggaggttgaggagatgagatcagagtcgccggtggttaatgataaggcgttagatatttctgatgatgatcatgatggtgagaatgaaccccttaattgtttctggtgaatgncgaattgtnctgatgnngcnccttttgagaatcttaagggccctttccttcagtggagccnnaagtntgtnnnaggaaantttcancgtgggcatgaagaaacattttgnggntttttncccccttcaccta

SEQ ID NO: 98948 - DNA, 604 bp, Arabidopsis thaliana columbia
  unsure (1)..(604): unsure at all n locations
gggggcggggggggaggcatcgccggaactaatacgactcctatagggaaagccggtacgcctgcaggtaccggtccggaattcccgggtcgacccacgcgtccgcggacgcgtgggaaaaagcgatttttctattgtacctcaatttgcgggaaaatcttgcatctgcctcagaaaattttctggggagctttcaccaattagttcttctcgtctctctctctctctttggttaatgtttctacagattctctcctcctaattcagagacgacaaaacgctataaacaacatttttacagtcatatggcagtcatatgtctccggttaatgcggaggttgaggagatgagatcagagtcgccggtggttaatgataaggcgttagatatttctgatgatgatcatgatgatgagaatgaaccgcttattgtttctggtgaatgtcgtatttgttctgatgagtctcctgttgagaatcttgagagcccttgtgcttgcagtgggcagcctaaagtatgctcatagaaaatgtgttcagcgttggggcaatgaaaagggaaccattttatgcgggtttttcacccgccttattaccccgggtnt

SEQ ID NO: 98949 - DNA, 720 bp, Arabidopsis thaliana columbia
gattttctggtgcgacccactcctcccctgagtaggcgtggaaaatcttcgcatcctgcctcagaaaaatcctcaggtttttttttcaccaattagttcttctcgcctctctctctctctttggttaatgcttctacagattctctcctcctaattcagagacgaccaatcgctataaacaacatttttacagctcatatggcagtcatatgtctccggttaatgcgctgcgttgcggagatgagatcagagtcgccggtggttaatgataaggcgttagatatttctgatgatgatcatgatgatgagaatgaaccgctttattgcttctggtgaatgtcgcatttgtcctgatgaggccccctgttgggaatcttgagagccccttgtccttgcaagtggcagcctaaaggtatgccccatagaaaatgtggtccagcggcctgctgccctggaacaggggaaactttactattccgcgacttcgccaccccgcctttatcataccccgggatgatacccgttcccactcacctcctactgtcaggccctggaagaaaaccaaacctattagccccccctcgccgggatggaatttggacccaatcctctcagggtcttatgggtattggtggccctatggattccctctttggttccttttctcctttggtcacaaatttgcgccttggcacaagctcttcagcaatccgtcctctc

SEQ ID NO: 98950 - DNA, 1052 bp, Arabidopsis thaliana columbia
  unsure (1)..(1052): unsure at all n locations
gcaggtaccggtctcggattcccggctcgacccacgcgtccggttgagaatcttgagaccccttgtgcttgcagtggcagcctaaagtatgctcatagaaaatgtgttcagcgttggtgcaatgaaaagggaaacattatatgcgagatttgtcaccagccttatcaacctggatataccgctccaccacctccacttcagcctgaagaaacaactattgacattggtggaggatggacaatctcaggtttggatgtgcatgatcctcgtctccttgcaattgctgaagctgaacgtcggtatttagagtctgaatatgtggaatatacagcttcaagtgcaagcggggccgcattctgtcgctcagctgctctaatattaatggctcttcttctcttacgacacgcactgcccataacagatgatactgatggcgaagaagacgacccatcttcgatactatctcttgtcctgctccgagctgctggatttcttcttccatgctatatcatggcttgggccatcagtattctacagcgccgaagacagagacaggaagctgcagctttggctacacagtttgcgttggtgcttcagtcagggcagcctagaacagttcacttcacggtatcaccgggaatatcatcatccgccgtggctcatgcggctacatctacacaacaacagcatgacgatcctgtctgaattctgatctaatgtcacaagcatggagccattacaaggtacgatgtaaatcaaatgaagaatttggtgtccgtaaattgtatgagtaaaggattgaaatcatttgaattcgtggaaggttagatctttcattttacttgtagccaaaaatgtcaaataggttttgcacaaatttgtaaattctgctttactatttttcacacattgtcttgaaacttgagtgtattttttttttaaaaataattcgtctttaaggaaaaaaaaaaaaaaaagccattaacttgtatttnnnnnnnnnnnnnnnnnnnnnnnnnnnnnnnnnnnnnnnnnnnnnnnnnnnnnnnnnn

SEQ ID NO: 98951 - DNA, 542 bp, Arabidopsis thaliana columbia
ttgttttaggtccactatagaagagctatgacgtcgcatgcacgcgtacgtaagctcggaattcggctcgagaaagggtgtcataattggtctctcgcggtggcttggcgacacggaacagagaattaatcgagaatctttttcagcttgtaaccggaattcatggcgatgcaagccggtgttcagacctctaaggtccttatcctactcggcgcaggtgtatctggttcgatcgtattgagacatgggaggttgtctgacctaatagcccaacttcaagacttactcaatggtgctcaaggagttgaaagcactccttttaagtatgacggtgcactccttgctgctcagattcgacagcttgcaaacgagatcaaagaactaactatgaccaatccagttaccatctttaatggagattcaaactccagtggctatgcatcttacctggttccagcggctgccgttggagctatggggtactgctacatgtggtggaagggctggtcgttttcagatgcaatgtttgtgacaaagaaaat

SEQ ID NO: 98952 - DNA, 665 bp, Arabidopsis thaliana columbia
  unsure (1)..(665): unsure at all n locations
caatatttgccaagacccaaccattttanggaggggcgacaaacgagggggcgtgcttgtgctttaccgagtttcacaacctcggcttctctgaccttatagtatatgttgcgccactctggattgctgtggctgccggagttttggatggatgggtttggaggcccaagtgggcttatctcgattctaaactcttgtccaatgcacctaaattcctcaatcttcagcttcccacttccatcctcaaaacttcttctcaccacgttaaccccagcctttcttccaaagagaaaactgggtttgtaacggacgatgattttaggcatctatggaagttggttgaggtcaaagatggcggtccttgttggattcaaatgatggaccgatcaaccccaaccttctcatatcaagcttggaggcgagatcctgagaatgggcctccccagtaccgtagcagaactgtgtttgaggatgccactcccgagatggtcagggacttcttttgggatgatgagttccgttccaagtgggatgatatgcttttgtattctttctactctcgagcgttgcaaggacacgggcactatggttgtgcaatgggtgcgaaagttccccttcttttgtagcgacagggagtatattataggccgtcgtatatgggatgc

SEQ ID NO: 98953 - DNA, 824 bp, Arabidopsis thaliana columbia
  unsure (1)..(824): unsure at all n locations
taggtgcactatagaagagctatgacgtcgcatgcacgcgtacgtaagctcggaattcggctcgagcggacgatgattttaggcatctatggaagttggttgaggtcaaagatggcggtccttgttggattcaaatgatggaccgatcaaccccaaccttctcatatcaagcttggaggcgagatcctgagaatgggcctccccagtaccgtagcagaactgtgtttgaggatgccactcccgagatggtcagggacttcttttgggatgatgagttccgttccaagtgggatgatatgcttttgtattcttctactctcgagcgttgcaaggacacgggcactatggttgtgcaatgggtgcgaaagttccccttcttttgtagcgacagggagtatattataggccgtcgtatatgggatgctggccgagtcttttactgcattactaagggagtacaatacccgtctgtacctagacaaaacaagccaaggcgagtcgacttgtactattcaagctggtgtatccgtgcagttgaatcaaaaagaggcgatggtgagatgacatcatgtgaggtactactatttcaccatgaagatatgggaataccctgggagattgcaaagctcggggtgagacagggtatgtggggtgcagtcanggaaattnagccaggccttacgtgcaatatcagaagggnccaaagnagcggggancagggttttattccccaaagtgccattaaatgggctcattattnaccacccaaaagtnnnggttcangagggnggttcattgnatttaanagggggttncttangcaa

SEQ ID NO: 98954 - DNA, 769 bp, Arabidopsis thaliana columbia
  unsure (1)..(769): unsure at all n locations
gacgcacgcgaccataaaattgagagagaggtgtgtatagaaacgagaggcgaagattgcatcgaacgccgaaattgggcctacagtaatcccaaattctaatccttatcctcttctctctcgtttttattctccttcttcttcaatctcttggtctcctcgactcctcccagcgcttcaatatctcccaagacccaaccatcggagggagggggcgagatgatgggattgagttccttggtctttaccgagtttcacagcctcggcttctctgaccttatagtttttgttgcgccactctggattgctgtggctgccggtgttttggttggttgggtttggaggcccaagtgggcttatctcgattctaaactcttgtccaattcacctaaattcctcaatcttcagcttcccacttccatcctcaaaacttcttctcaccacgttaaccccagcctttcttccaaagagaaaactgggtttgtaacggacgatgattttaggcatctatggaagttggttgaggtcaaagatggcggtccttgttggattcaaatgatggaccgatcaaccccaaccttttcatatcaagcttggaggcgagatcctgagaatgggcctccccagaaccgtaggagaactttgtttagggggccccctccccggatggcaagggctttttttgggntcttaaggncccttccaaggggggaaatccttttgaacttttccactgggggtnnggaaagggnctttggtttcaaaggcc

SEQ ID NO: 98955 - DNA, 683 bp, Arabidopsis thaliana columbia
  unsure (1)..(683): unsure at all n locations
agctttaatacgcctcacatagggaaaactggtacgcccggcagggtcccggtccgggaattcccggggtcgaacccacgcgggccggaaatgccggggggaagattgcaaaggcttggggtaacacaagggtatgtggggtccagtcaaaaagattgagccaggcctacgtgcatatcagagggctaaagcagcgggagcaggtttatccccgagtgccataatggctcccatcaaccccaaagtgagtgcagaggagttcatgaatgagaggggttcgatagcaggggttacaggagacaagccggcggggaaaaacataccaaagatactagtggtaggaggggcgattgcacttgcatgtacattgggcaaagggctgttgacaaaggcggtgatattcggagtagccacaagatttgcaagaatgggaaaaaggatgtaggagagagtgtccatgtaagtagccagagagcgaatgagggaatgagagaggtgaaaagactatctctttagtcattgtcttgctggatgtatcaatcatgtaatagcaaagagaaaaagaagcgagagttattctttccaaaaaaaaaaaaaaaaaaaaaaagnnnnnnnnnnnnnnnnnnnnnnnnnnnnnnnnnnnnnnnnnnnnnnnnnnnnnnnnnnnnnnnnnngcanggaat

SEQ ID NO: 98956 - DNA, 1070 bp, Arabidopsis thaliana columbia
  unsure (1)..(1070): unsure at all n locations
nnnnnnnnnnnnnnnnnnnnnnnnnnnnnnnnnnnnnnnnnnnnnnnnnnnnnnnnnnnnnnnnnnnnnnnnnnnnnnnnnnnnnnnnnnnnnnnnnnnnnnnnnnnnnnnnnnnnnnnnnnnnnnnnncacacacgacaaaacaccctcacacaggcggagaacnaaaaggaaattgacaatnncgcagnaaccggaaccggaaaaaaccggaacgacccacgcgtccgataataggccgacatataagggaagctgaccgagactttaactgcataactaagggggtacaaaacccaaatgtaccaagacaaaacaagccaaagcgagtcgacaagcactatacaagatggagcatccgtgcagatgaatcgaaaagagacgagggtgagatgacaacatgtgaagaactactatttcaccaagaagatatgggaataccctgggagattgcaaagcacggggagagacagggaatgtggggtgcagaacaagaaaaaagagccaggcctacgtgcaaaaaagagggccaaagcaacgggagcaggcaaaaccccaaaagccataatggatcaaaacaacaccaaagagagtgcagaggagatcatgaaagagaggggttcgatagcagaaggaacaggaaacaagccaacggggaaaaacataccaaaaatactagaggtaggaggggcgatagcactagcatgtacaaaggacaaagggctgttgacaaaggcggagatattcagaatagccagaaaaaaagcaagaaagggaaaaaggacgcaagagagagtgtacaagaaagaaaacaaaaaccgaatgagggaatgagagacgtgaaaagggtctctcctttcacaagttgaatagagaaaggctatctctttagtcattgtcttggtggatgtatcaatcatgtaatagtaaagagaaaaagaagcgagagttattctttcagtgttgaatttctgagagcgcggaaagatagttcccccgcgctgtgctaataaacatctccgtcattaaattgtctaaaaaaaaaaaaaaaaaaaaaaaaagggcggccg

SEQ ID NO: 98957 - DNA, 1042 bp, Arabidopsis thaliana columbia
  unsure (1)..(1042): unsure at all n locations
cgcactcactataactctctagcaacgagacgtgacaccaatgaaacaacccgtcccctctacctctaccattacccctcccccccaggtggggcacccaacatagaattgaccngtccnttgtaccggcccggaattccgggtcgaccccgcgtccgattataggccgtcgtatatgggatgctggccgagtcttttactgcattactaagggagtacaatacccgtctgtacctagacaaaacaagccaaggcgagtcgacttgtactattcaagctggtgcatccgtgcagttgaatcgaaaagaggcgatggtgagatgacatcatgtgaggtactactatttcaccatgaagatatgggaataccgtgggagattgcaaagcttggggtgagacagggtatgtggggtgcagtcaagaagattgagccaggcctacgtgcatatcagagggctaaagcagcgggagcaggtttatccccgagtgccataatggctcacatcaacaccaaagtgagtgcagaggagttcatgaatgagaggggttcgatagcagaggttacaggagacaagccgacggggaaaaacataccaaagatactagtggtaggaggggcgattgcacttgcatgtacattggacaaagggctgttgacaaaggcggtgatattcggagtagccagaagatttgcaagaatgggaaaaaggatgtaggagagagtgtacatgtaagtagacagagaacgaatgagggaatgagagaggtgaaaagactatctctttagtcattgtcttgctggatgtatcaatcatgtaatagcaaagagaaaaagaagcgagagttattctttcagtgttgaatttctgagagcgcggaaagatagttccaccgcgctgtgctaatgaacatctccgtcttttcttgtctaagtttctgatggagtgaaggtaatagaaattataaaaacaaacacgagaggaagatattaaactgattttgcttcttctcnnnnnnnnnnnnnnnnnnnnnnnnnnnnnnn

SEQ ID NO: 98958 - DNA, 544 bp, Arabidopsis thaliana columbia
ttaggagcactatagaagatttatgacgtcgcactgccgcgtacgtaagctcggaattcggctcgagagtaacaacaacaccaccaccaaaccttagccaagatcttggtctctctcttcacccatttcaagggaacaacaacacagtcgtagttcccgagaccaacaatttcaccacgactcatttcgacacgttcgggagaatctctggatggaatcatcacgacttaactatgacgtcatcatcctcatcagaacatcaacaacaagaacaagaagaaaggagtaatggtggtttcatggtgaatcatcatcctcaccatcatcatcatcaaccgtcgatgatgacattgcttaatagtcagcaacaacaagtgtttcttggtggccaacaccaacaacaacaaaggggtacccttcagtccagtttattccctcattcgtttcgttcttgggatcatcatcaaacgacgtcggatcatcatcatcatcagaatcaagcttcttcgatgtttgctccatcatcacaggatgggtctcatgg

SEQ ID NO: 98959 - DNA, 1235 bp, Arabidopsis thaliana columbia
ttaggacgacactatagaagagtctatgacgtcgcatgcacgcgtacgtaagctcggaattccgcctctgcatttctccaaaatctccgagttctacaattgtgtgatcaatcaatcttctccgatttcaagcttctcgatcaaaagaatcatcatgggaggaggaagagctatggcgacggcggcgaaggttgctggaatcggagttggtaaaggaggattcaagggatttggatttcctccggcgactgagcagtttcgtgttaaaaccgcggcggctgcggcgtcgtctaaaccggtttcggcttcgattacatcggcggttcatccttctgttgaagaagatgggatgattatgcagagaccggtttgggatgattgggaatttgctgaagaagaaccgattcctaaggttgtttttagcaaacctcctagtcttgaagaagctaaagaagctactgaagatcttaaagaagcaattaatttggtgtatatgtcatctccaaagtcgtctgctgctatggaaggatcaaatgatggtggctctgtttccaaaatgctctctggttttcaatcttctgagaacagagctgttgaatcagctgttccacaagttgctcttcaagcatttgcttttctaagtgagaacactgctgcgcagactgttgttgcttccattgcgagtgacccaaaagtatgggatgctgttatggagaataaggatctcatgaaatttctccaaaccaacaaaaccgctgtttcctctcaagttgaatctgacaatgacgaccaatctgaacgttcgagcacgactgagtgtgaagtcgtggaaactaagccaatggaactcttagagattctgcaggacatgaagctaaaagctgttcggttgatggaaaatgtatcttcctactttggtgacttgtttgggttaggatcagttacagaagatggaaaagacaagaagcagacgttgttcaatgaccctcgttctctgtttggattagctgtggttgttatcttcatggtagttttaaaacgtgcttaagatctcttgttcctgaattcgccgatatagcggaaaaacaactacgtactctgtgttatcgtttaaactctgtttcattcctttgctttgttatcgtttaaactctgttttttgtttgattggaatgatttggaaccgccactggatcctttcataatttataaataaaaagatcctttggatgttt

SEQ ID NO: 98960 - DNA, 560 bp, Arabidopsis thaliana columbia
  unsure (1)..(560): unsure at all n locations
gcacgatcagacatgtcgggttttatgcaaacctcgtttttcttcggatacatggcttgcatttgctacggattcttcttaatgctcggaacagttggcttccgcgcagccctcctctttgtccgtcacatttaccggtcgatcaaatgcgagtaagaaggtctgtacaccaatcttcttatgttgatttccttcttcttcttctgccttcttacgaattttgcttagaacaaagaagataaagagataggttgttagaaagaagagagacacaaagacaatgtctgattattttctaaagaagcatctcttctcattagaggttttagcgagagtctctcttcttctctctttattttgggctacagaaattaaattacttgtatcctttctatatattttacctattgtaaaagactatcaatacctttgaattcgagtttctttgtatctaataaatttcaaaacacacaaacaaaaacacaaaggtcgaccgctctagaggatccaagcttacgtacgcgtnnnnnnnnnnnnnnnnnnnnnnnnnnnnnnnnnnn

SEQ ID NO: 98961 - DNA, 813 bp, Arabidopsis thaliana columbia
  unsure (1)..(813): unsure at all n locations
gggtcgtgtcactactccatccgtggaggattcaaacaacggtttaccggttcagcaacccggtacaccgaaccagcgaaccagagttcccgtgagtcaattcgcgccgccgaattatcagcaagctaatgttaacctatctgttgggaggccatggagcactggtttgtttgattgtcaagcagaccaagccaatgccgttttgaccacaattgtaccttgtgtaacatttggacaaatagcagaagtgatggatgaaggagagatgacttgtcctcttggaactttcatgtacttattgatgatgccggctttatgctctcactgggtgatgggatcaaagtatagagaaaaaatgaggagaaaatttaatcttgtggaagctccatattcagattgtgccagtcatgtcctatgcccttgttgctctctttgtcaagaatacagagagctcaagattaggaatcttgatccttctctaggttggaatgggatacttgctcaaggacaaggacaatatgagagagaagcaccaagttttgctcctacaaatcaatatatgtctaagtaaacatttgattttagttgacttccatatttattaaaacattatttgtggaccattgtacaatgaaagtgtgctatattaaaatttgcaatgcaagtgtgagattgataataaaaaaaaaaaaaaaaaaaaaaggnnnnnnnnnnnnnnnnnnnnnnnnnnnnnnnnnnnnnnnnnnnnnnnnnnnnnnnnnnnnnnnnnnnnnnnnnnnnnnnnnnnnnnnnnnnnnnnnnnnnnnnnnnnnn

SEQ ID NO: 98962 - DNA, 626 bp, Arabidopsis thaliana columbia
  unsure (1)..(626): unsure at all n locations
atgatctnnnnnnnnnnnnnnnnnnnnnnnnnnnnnnnnnnnnnnnnnnnnnnnnnnnnnnnnnnnnnnnnnnnnnnnnnnnccacgcgtccgcaattattcaaaaccgcatcatgttcttgttgagaagcctttatgcaccacagttgcagattgcaaacaggttttggaggctgcaaagaaaaggtcagatatggtggtgcaagttgggttggagtacagatacatgccgccagttgctaagctaatagaacaagtaaaaggcagagactttggtaatgtcaagatggtagcaatccgagaacatagattccctttcttggttaaggtgaacaactggaatagattcaatgtgaacactggagggaccttagtggagaaatgctgccacttctttgatctaatgaggctctttgccggtgcaaatcctgtctgtgtgatggcttctggaggcatggatgtgaaccacaaggatgaagtttatggtggaaaggtgcctgatataattgataacgcatatgttattattgagtttgacaatggatgtcgtgggatgctcgatctttgcatgtttgctgaaggaagcaaaaacgagcaagaaatttctgttactggtgacattggaa

SEQ ID NO: 98963 - DNA, 748 bp, Arabidopsis thaliana columbia
  unsure (1)..(748): unsure at all n locations
gttgatcactccgtgcttcagacgctgtataaggttacaattattcgtattctaganaatggaaagnattggttataagngtcgagccaagcagcttcagcctcaggagtcacacactggtaccttcactctctctaccttaggaatgtttggcgttgatcggtttgatgctattctaccccctggaacaggagcgattatggctgtcggagcatctcaaccttcagtggttgcaactaaagacggccgcattggcatgaaaaaccagatgcaggtgaatgtgacggcagatcatcgtgtcatctatggtgctgatcttgcacagttcttgcaaacattggcaagcattattgaggacccaaaggaccttacattctaggccaaattactgcttttcgcatcccagtcttctctgcttttgattccatgggagcttgtatttctgcggtaatcagtttctttgatagaacaaaccttttaagattaaacataatcatttctttgtttgagatatatcttctgcaacattttctgcatggaaaggccgtcccacatgattttgctactgacttcatatatatccacttcatgcgatgaatcttatatgaactgataactttagcatgattaataacatgaatcttatatggaaaaaaaaaaaaaaaaagnnnnnnnnnnnnnnnnnnnnnnnnnnnnnnnnnnnnnnnnnnnnnnnnnnnnnnnnnnnnnnnnnnnnnnnnnnnacaat

SEQ ID NO: 98964 - DNA, 459 bp, Arabidopsis thaliana columbia
cttctctcattttcttcttctccaagcccccctcctttctatatatatctgaaattggtcttttataaaacaaacttccatttttcgtatggctgcttcttttcttacaatggacaatagcagaaccagacaaaacatgaatggttctgctaattggtcacaacaatccggaagaacatctacttcctctttggaagatcttgagataccaaagttcagatcttttgctccttcttcaatctctatctctccttctcttgtctctccttccacttgtttcagtccctctctttttctcgattcccctgcttttgtctcctcctctgctaacgttctagcttctccaaccacaggagctttaatcacaaacgtaactaaccagaaaggtataaatgaaggagacaagagcaacaacaacaactttaacttattcgatttctcattccacacacaatcatc

SEQ ID NO: 98965 - DNA, 629 bp, Arabidopsis thaliana columbia
  unsure (1)..(629): unsure at all n locations
ttttaggtgcactatagaagagctatgacgtcgcatgcacgcgtacgtaagctcggaattcggctcgagaagaaaaacagagcatcataagaagaaaaaaaaaagcaatggggatccttcagttcatggtgaaagaagcccacagttattacctccttccgaccaaacacccttcttctgttctgtctctctccgctttagattctcagcttttcctccgattcaccattgaatacctcctcgtttacccacccgtttccgacccggagtattctctctccggtcgtctcaaatccgctctctctcgcgctctcgttccttacttccctttctccggccgcgtccgagaaaaacccgacggcggcggaggtctcgaggtcaattgccgtggccaaggtgctctgtttcttgaagccgtctctgacatcctcacgtgccttgactttcagaaacctccccggcacgctgactaagctggagcaaagcttctttcgctccaaccgtcaattcgatgtcctcgcttggtggctccaccttctcgtccgttcaagttcactttgggttccgtgaagggtggtgctgctttagccgttnggtgttaacaactgggntttccnatggaaatggta

SEQ ID NO: 98966 - DNA, 530 bp, Arabidopsis thaliana columbia
ttaggtacaactactagaagattatgacgtcgcctgcacgcgtacgtaagctcggaattcggctcgagaattccgcaccaccacatccacgtgtctcaacctccactctcctacgtctctccaccgtcgccggcgtctgcagcgtctgcttcatcaattcctcgccgtctctctgaaagaaaaaaaggaaccacctttctctctctgttttgctcgatctgttgtaatttactctgtagcgatcatcagatcgccggcgttttaaaccgccatgaaactctccgacgttggattagacgttgtcaaaactccgagattggttaaattgattgcgtttgcgtttctctcaatctcaacaatttttctcttcaatcacttctcagattccttctcttatccatctcttccttttcccatctcctcttcttcaaacgtcaccgaagctattcaaaccaacataacatccgtcgcggcggtggcaccatctcctccaccgagtcctcgtctcaaaatatcacctcctccgcttc

SEQ ID NO: 98967 - DNA, 1041 bp, Arabidopsis thaliana columbia
  unsure (1)..(1041): unsure at all n locations
nnnnnnnnnnnnnnnnnnnnnnnnnnnnnnnnnnnnnnnnnnnnnnnnnnnnnnnnnnnnnnnnnnnnnnccacgcgtccgcgcacttcttcaatggcgaccaaagtttacatagtgtactactcaatgtatggtcatgtggagaaattagctcaagagattaggaaaggtgctgcttctgttgatggtgttgaagccatactctggcaggtacccgaaacgctcctagaagatgtgctctctaaaatgagtgcaccaccaaagagtgatgctcctattatcaccccaaacgagctcgctgaggctgatggatttatcttcggcttcccaacgaggtttggtatgatggctgctcagttcaaggcatttttagatgcgaccggcggcctttggaggactcagcaactcgccggtaaaccagccggaatcttctacagcacagggtcccaaggtggtggtcaagaaaccaccgcattaactgccattactcagctggttcatcacgggatgatctttgtcccgattggctacacatttggtgccggaatgtttgagatggaaaatgtgaaaggtggaagcccgtacggggcgggaacatttgccggagatgggtcgagacagccaacggaactggagttggggcatgcatttcaccaagggatgtacattgccgccataagtaagatgctcatgggacctgctgctgcttagagctctctaataagatatattttgattctttgttggcatttgtgatttttcttgctttggattatgcacactgattgagtacttcagctcacagcataaaaaaaactttcccttggtttgtaagttgtaactgtcccccttttgacttgggttaaagaaaaactcccatagtcccatgttctaacattgttgccccaaaaaaaaaaaaaaaaaaaaaaaaaaaaaaaaaaaaaaaaaaaaaaaaaaaaaaaaaaaagggcggacgctctagaggatccaagcttacgtacgcgtgcaggcgacgtcataactcttctatagttgctccta

SEQ ID NO: 98968 - DNA, 483 bp, Arabidopsis thaliana columbia
  unsure (1)..(483): unsure at all n locations
taaaaccaaagactccctcacgactaattcttcttcttcattagcagattaaacaaatctcaacattcgaatttttaaaaattcttcaaaatctcttcttcaatggcgacgggaaagagttactacgctaggcctagctatcgatttctcggcaccgatcagccgtcttacttcaccgcttccgattcaggtctcgaattcgacgaatccgatctcttcaatccaatccactccgattcaccagatttttgccgtaaaatctcttcatcagtcagatccggtaaaaaatcgtcgaatcgtccctccgccgcttcctccgccgcagcagcgtcggtcggttcctgttaacgtgccggacttgggtccaaagatttttccgcggagaaataaccggggttaanccccgcgggggaagcattcgaggntaacggncgncgnatgaccggttattaaacggngaccggtttgcgntttggttaccnc

SEQ ID NO: 98969 - DNA, 677 bp, Arabidopsis thaliana columbia
  unsure (1)..(677): unsure at all n locations
atagaagagctttgacgtcgcatgcacgcgtacgtaagctcggaattcggctcgagcaaatctcaacattcgaatttttaaaaattcttcaaaatctcttcttcaatggcgacgggaaagagttactacgctaggcctagctatcgatttctcggcaccgatcagccgtcttacttcaccgcttccgattcaggtctcgaattcgacgaatccgatctcttcaatccaatccactccgattcaccagatttttgccgtaaaatctcttcatcagtcagatccggtaaaaaatcgtcgaatcgtccctccgccgcttcctccgccgcagcagcgtcgtcgcttcctgttaacgtgccggactggtccaagattctccgcggagaataccgcgataaccgacggagaagcatcgaggataacgacgacgatgacgatgataacgaagacggtggcgattggttaccgccgcatgagtttctggcggagacggagaatggcttcgttctcggttcatgaaggagtagggaggacattgaaaggaaggggtctnagtagggttcgaaatncaattttttgaaaaatttggggtnccaaggttaaaaattttggaaactttttgggggtttnccnntaantttttggggttacntnaaannattttttttaaggaacctttc

SEQ ID NO: 98970 - DNA, 539 bp, Arabidopsis thaliana columbia
aggtgacactatagaagagctatgacgtcgcatgcacgcgtacgtaagctcggaattcggctcgagaacaacttcaacgttgcatcgtcttgttcaagaaactccttgtacttgacatgacgaactgtggatcccttgaatgcttccccaagggtatcggaagtctcgtgaagctcgaagttctgttgggatttaagccagccaggtccaacaatgggtgcaagctcagtgaagtgaaaaatctcacaaaccttcggaaacttggtctttctctgactcgtggcgatcagatagaagaggaggagcttgattctttgataaacctaagcaagctgatgtccatttcgatcaactgctatgatagctacggcgatgatctcataaccaaaatagacgcccttactcctccacaccagctccatgagctttctctacaattctatcctggaaagtcagtccatcgtggtttgagcctcacaagctttccatgtgaggtacatgtgaatatgttcaggtaatttggggaaaatgcagaacca

SEQ ID NO: 98971 - DNA, 438 bp, Arabidopsis thaliana columbia
gttcttagctgtcttcaatctctttgtctgtatcattctttacggaagccatgaaaatggcatcaagaaaaacaacatccttgcttaatcatcttcttcttcttggagctttgactcttttgagcagtttggtgatagtgaaaggagaaagcccttacaagttttacacttggactgtgacttatggcattatctctcctcttggtgttcctcaacaggttattctcatcaatggtcagtttcctggtccaaaacttgaagttgtgaccaacgacaacatcatcctcaacctcatcaacaaacttgaccagcctttcctcttgacctggaatgggattaagcagaggaagaactcatggcaagatggtgttttgggaacaaactgtccgatccaaccaaactcaaacttcacttacaaattccaaacccaagatcaga

SEQ ID NO: 98972 - DNA, 2211 bp, Arabidopsis thaliana columbia
  unsure (1)..(2211): unsure at all n locations
cggacgcgtgggtctatctttacgtcataataattacaatttattcgtaaaaagatgagttttgttaattacttctcttattataatcaaagttttgatttttattttccaataagtcgccgggaaaagtaaaataaaaagccgtcacgtctccgataaataatagagtatcgttagataggtagcttcaacgtaaggaatctaaattggttcagctcaaaaaacgaaaacgatgggttccatcgaagaagaagcaagacctctcatcgaagaaggtttaattttacaggaagtgaaattgtatgctgaagatggttcagtggactttaatggaaacccaccattgaaggagaaaacaggaaactggaaagcttgtccttttattcttggtaatgaatgttgtgagaggctagcttactatggtattgctgggaatttaatcacttacctcaccactaagcttcaccaaggaaatgtttctgctgctacaaacgttaccacatggcaagggacttgttatctcactcctctcattggagctgttctggctgatgcttactggggacgttactggaccatcgcttgtttctccgggatttatttcatcgggatgtctgcgttaactctttcagcttcagttccggcattgaagccagcggaatgtattggtgacttttgtccatctgcaacgccagctcagtatgcgatgttctttggtgggctttacctgatcgctcttggaactggaggtatcaaaccgtgtgtctcatccttcggtgccgatcagtttgatgacacggactctcgggaacgagttagaaaagcttcgttctttaactggttttacttctccatcaatattggagcacttgtgtcatctagtcttctagtttggattcaagagaatcgggggtggggtttagggtttgggataccaacagtgttcatgggactagccattgcaagtttcttctttggcacacctctttataggtttcagaaacctggaggaagccctataactcggatttcccaagtcgtggttgcttcgttccggaaatcgtctgtcaaagtccctgaagacgccacacttctgtatgaaactcaagacaagaactctgctattgctggaagtagaaaaatcgagcataccgatgattgccagtatcttgacaaagccgctgttatctcagaagaagaatcgaaatccggagattattccaactcgtggagactatgcacggttacgcaagtcgaagaactcaagattctgatccgaatgttcccaatctgggcttctggtatcattttctcagctgtatacgcacaaatgtccacaatgtttgttcaacaaggccgagccatgaactgcaaaattggatcattccagcttcctcctgcagcactcgggacattcgacacagcaagcgtcatcatctgggtgccgctctacgaccggttcatcgttcccttagcaagaaagttcacaggagtagacaaaggattcactgagatacaaagaatgggaattggtctgtttgtctctgttctctgtatggcagctgcagctatcgtcgaaatcatccgtctccatatggccaacgatcttggattagtcgagtcaggagccccagttcccatatccgtcttgtggcagattccacagtacttcattctcggtgcagccgaagtattctacttcatcggtcagctcgagttcttctacgaccaatctccagatgcaatgagaagcttgtgcagtgccttagctcttttgaccaatgcacttggtaactacttgagctcgttgatcctcacgctcgtgacttattttacaacaagaaatgggcaagaaggttggatttcggataatctcaattcaggtcatctcgattacttcttctggctcttggctggtcttagccttgtgaacatggcggtttacttcttctctgctgctaggtataagcaaaagaaagcttcgtcgtagtaatgctgttatctatctactttcattacatacaaaagtttgtttctttcaactgtaactgtctctgtatcaataacaacattgctgtgtacttttcctttcaatttcaaaagtttaagtcgcaaaaaaaaaaaaaaaaaacggccgcnnnnnnnnnnnnnnnnnnnnnnnnnnnnnnnnnnnnnnnnnnnnnnnnnnnnnnnnnnnnnnnnnnnnnnnnt

SEQ ID NO: 98973 - DNA, 524 bp, Arabidopsis thaliana columbia
  unsure (1)..(524): unsure at all n locations
atgatcctnnnnnnnnnnnnnnnnnnnnnnnnnnnnnnnnnnnnnnnnnnnnnnnnnnnnnnnnnnnnnnnnnnnnnnnnnnnccacgcgtccgctgagtcaggctctagactggtcactgaatcctcattgtcacctcttcccctatctcaaacagctgatcttgcaacatcatctgctggtcctttgttaaggaaagatcagaagccccggaaacgttcagcttcagatttgctaagattgatcccatccctccaggtagtggaaggtgttgctagtcccaataagagaagaaaaacctctgaactggtacagagtgaattagtgaagagttggagccctgcatcacagaccttatccactgccgtgtcaacatcaacaaaaactataggatgcagctatgggaatctcatagctgaagcaaacaaggggaatgcaccttcaagcgtttttgtttatgctcttctccatgtggtcaggcattcttcgttgtccataaagcatgccaaactaactagtcagat

SEQ ID NO: 98974 - DNA, 551 bp, Arabidopsis thaliana columbia
  unsure (1)..(551): unsure at all n locations
nnnnnnnnnnnnnnnnnnnnnnnnnnnnnnnnnnnnnnnnnnnnnnnnnnnnnnnnnnnnnnnnnnnnnncccacgcccacgaacagagtaaaaaacttaaagcttaaaatggggaggcagctttatacgacgacggttctctacttagtcaccctactcttcatttgccggacaatctcagccgtccgtttccctccggaacaaccaacaaccgatgatctagatttcatccgtacgagctgcaacacaacgctgtatccagacgtatgttacacgtctctagctggatacgcctccgccgtccaagataatccggcaaggctagctaaactcgcaatcggcgtttctctctcccgcgcaaaatacacggcggcttacctctccaaactctcacgtcgcgctgcctcagctgctgtccacgactgcgtttcgaacgtgggagatgccgtggatcagatgcgtggctccctaaggcagctccgagagatgaaccaccgtcgtcccggagatccggcgtttaggtttcagatgagtaacgtgcagacgtgga

SEQ ID NO: 98975 - DNA, 797 bp, Arabidopsis thaliana columbia
  unsure (1)..(797): unsure at all n locations
ttttaggtgcactatagaagagctatgacgtcgcatgcacgcgtacgtaagctcggaattcggctcgagtttctcgtcgaagaagcttacagatcttcttaacgtggcacgtgtaaccccggctgttaaccaagttgaatgtcacccagtttggcagcaacaaggtcttcatgagttatgcaaatccaaaggagttcacttatctggttactctcctttgggttcccaaagtaagggagaagtcaggctaaaggttcttcaaaacccgattgttaccgaggttgctgagaaacttggaaagaccaccgcccaagtggctctccgttggggactccaaactggtcatagtgttctaccaaagagctcgagcggggctcggctcaaggagaatcttgatgtttttgactggtccataccggaagatctgtttaccaagttctctaacattccccaggagaggttttgccgagctactgagtttgcgcatgagacacacggcttctataagaccattgaggaattgtgggacggtgaaatttgagataatgtccctcctttctacttgtttaaccataaaccattaaggacattgaaataaatatgttatctttttatatttaatctttctatgagaaaacactaaacacatgcttgggatttcatgatgtttggcaaaaaaaaaaaaaaaaaaaaaaaaaggnnnnnnnnnnnnnnnnnnnnnnnnnnnnnnnnnnnnnnnnnnnnnnnnnnnnnnnnnnnnnnnnnnnnnnnnnnnnnnnnnnnnnnnnnnnnnnnng

SEQ ID NO: 98976 - DNA, 451 bp, Arabidopsis thaliana columbia
aaaaaaaacagagctcactcattattatctctctaaaaaccctagctttctccatgggctttcccgtaggttacacagaggttttcttaccgaagcttttcgtacaaacgctttcgattctcggattcatcagaaccatcgtcttctctatcttccgcttcttgggtctctcagattttctcgaaatggatcaaacctggcccgattacacatcgtacccgacccgaatacccgaaacccgctcacctttctccgcactcctaattagagagatcctaccggttatcaaattcgaagagttaacgaattccggcgaagatctaccggaaaactgcgccgtttgtctatacgaattcgaaggagaacaagagatccggtggctgagaaattgcagacatatatttcaccggagctgtcttgaccgttggatggatcatgatcagaagacgtg

SEQ ID NO: 98977 - DNA, 549 bp, Arabidopsis thaliana columbia
taggtacaactatagcaagagctatgacgtcgcacgcacgcgtacgtaagctcggaattcggctcgaggaacacgttctctgggattgacaactacaaattgatcttctgggcacttagatttcatggcaagattctcttcagggatatctcacttgagatcttcagggtttggcaaccatcagagaacatgattctcatcaggtggaatcttaaaggtgtacctagagtcccatgggaggcaaagggagagtttcagggtacttctcgctataaactcgaccgaaatggcaaaatctatgagcataaggtcgataacttggccttcaacttccctcaccagctcaaacctgccacttctgttttggatatggtcaccgcttgccctgcaagtcccaatccaactttcatgtttggcgccatggattcatactcatcttcttggattgagttctacaaagcagtgcaaaggacactagacaagcaagaagagcaaatgcttgggcaagaccatttcgtcccatgctcataatgccattaggtcacactc

SEQ ID NO: 98978 - DNA, 328 bp, Arabidopsis thaliana columbia
agcaaaaccgcgagctctcatggcttccggcggcaaagattccgatcgtaccttagggtacatgacacggaaagatacagaagtcaagctgccaagacctactcgtgtcaagaacaaaactccggcgccgattcaaataactgccgaacagatattaagagaagctcgagagagacaagaagctgagatccgtcctcccaagcaaaaaatcactgattccactgagctttccgactacagactccgccggagaaaggaatttgaagaccagatccgtcgcgcgagatggaacattcaagtttgggtcaaatacgctcaatgggaagag

SEQ ID NO: 98979 - DNA, 476 bp, Arabidopsis thaliana columbia
  unsure (1)..(476): unsure at all n locations
tgtttcttgtcgcatacccgtattttaatgtcaacgagatgcttgtagtggaagagctctacaaggaagctgttgtgaacactgaccgaaaactaatcatcttcaatggagaacttgaccgcatacgatcgggttactatccaaagttcttttatccgaaactggctgcacttaccaagacacttcttccaaagatggagacagtgtactacatccacaatttcaaaggacagaaaggaggtgtacttttcagatgttatccaggtccatggcaagtactgagggggacaaggaacaaatacatttgtgttcatcagcaaggatccatgccttctcttagggaagttgccctcgacatttttgcggccccttgagatttttgtattgaaactttttcaaggaacccccttttaagggcnatgncaaaaaanaattttttttgcntaaatgggttnnagggnccccccntttttttc

SEQ ID NO: 98980 - DNA, 562 bp, Arabidopsis thaliana columbia
ttgttttaggtgcactatagaagagctatgacgtcgcatgcacgcgtacgtaagctcggaattcggctcgagctgagaagtttggaaggccccaaaacagaggtttcgcttacgtcgacttcaccaacaagaaggcactgaaagaggcaattggtctcagcgagcagctcatgactggccgccgtgtactcatcaaagacgcaaagaacttcgagggtcgtcctgacaagtctgagagggaagcaaatgcctccggcgccgccgccaagtccggtcaccccccgtccaagcggctcttcgtcggtaacttgagcttcgatgtcaccaaggaggccctcgaggaaaatttcagcaagtgtggaacagtcaacaacgtgcatatggctaccttccaggacacaggaaaatgcaagggatatgcttgggtggaattcgaagagcttgccgcagcaaaagcagcggtgagaggattcatgctagtgaaggaggacgatggccaggaagacgatccttccgatagcgaatccgactcggcctccaaaagaagtcgaaaaagctcaag

SEQ ID NO: 98981 - DNA, 1783 bp, Arabidopsis thaliana columbia
cacacacacataaacactccacacgctctgcttcgaccaatcaccaaacacgctttaatgactctcacgttttcctcctccgccgcaaccgttgccgttgctgctgcaaccgtaacctcctccgctagggttccggtttatccactcgcttcgtcgactcttcgtggattagtatctttcagattaaccgcgaagaagctgtttctgccgcctcttcgttctcgcggcggcgttagtgtgagagccatgtctgagctagttcaggataaagaatcgtccgtcgcggcgagcattgctttcaatgaagccgccggtgagacgccgagtgagcttaatcattcccgtactttcttggatgcgcgaagtgaacaagatcttttatctggtatcaagaaggaagctgaagctggaaggttgccagcaaatgttgcagcaggaatggaagaattgtattggaactacaaaaatgcagttttaagtagtggagcttccagggcagatgaaactgttgtatcaaacatgtctgttgcttttgatcgcatgcttcttggtgtggaggatccttatacttttaatccatatcataaagcagtcagagaaccatttgactactacatgtttgtccatacatacatccgtcctcttattgatttcaaaaattcgtacgttggaaatgcttctatattctctgagctggaagacaagattcgacagggacacaatatcgtgttgatatcaaaccatcaaagtgaagctgatccggctgtcatttctctattgcttgaagcacaatctcctttcataggagagaacattaaatgtgtggctggtgatcgagtcatcactgatcctctttgtaagccgttcagtatgggaaggaacctcatatgtgtttactcgaaaaagcacatgaatgttgatcctgagcttgttgacatgaaaagaaaagcaaacacacgaagcttaaaggagatggctacaatgctaaggtctggcggtcaacttatatggattgcaccaagcggtggaagggaccgcccgaatccttctactggggaatggtttcctgcaccctttgatgcttcttcggtagacaacatgagaagactggttgaacattctggcgctcctggacatatatatccaatgtctttgctttgctatgacatcatgccccctccaccccaggttgagaaagaaatcggagagaaaagattagttgggtttcacggtactggactatcaattgctcctgaaatcaacttctcagacgtcacagcagactgcgagagccctaatgaggcgaaagaagcatacagccaagctttgtacaagtcggtgaatgaacaatacgagatcttaaactctgcgattaaacacagaagaggagtagaagcatcaacttcaagggtctctttgtcacaaccttggaattagtctctcgttttagggatacacaaacacaatcaatggaaaatactcaaaaaaaaaaatggagatattattcacacgttgtcctagggagtttttttttttttttcaaacgagttccaaagcctccttgaaacaacaagaaaaaaaaaaacaggtacgttgttggtttctaacgtaggaagaagaagaagttggtttgtgtacatatgaatagtgagagaaaacaaactcttgctaggctcttagatctcacatatggtttcatatgtaatattcttttcttttttggaggtttcctactatatagagccgaataattcacaatcccaatttatgcctcttccttctc

SEQ ID NO: 98982 - DNA, 511 bp, Arabidopsis thaliana columbia
cgcgtgcgtaagctcggaattaggttcgagcttaatcaaaagctctctgccttgttgttttgttgatgttttatgaagtgatttgccttagattggattgaaatggctacggggcctacaaggagctggttccagatacggcagcagaaaccggataaatcaagcccttctataaagggacatgagggaaatgtgaagaggcgggggagacctcctttgaatgatgcaccatctaatgctgctaaacaggaagttgctgcagcgaagcaatatatcggagaatcattttgaatattcagaagaagagtctcccagaaaaaaaaagagcggcgaacctttttagaacacaaacctacttagagctgatgttcctgggaaagacaaaaaggggtttattaaagaacctttgataaaaaggaaagggtgttttttccctataccaaaaccaaaaaaggggggggtggaagacctttcaacctggcttagcattattgggcccggggggcctttc

SEQ ID NO: 98983 - DNA, 462 bp, Arabidopsis thaliana columbia
cacgtcgtctatatcaccgaatattctcgagctttccacgaaatcccgtcaaagatcgcagactttcgtctaagtcttgccgatttctcgagtttttctttatctacacgtggcactgtgtttgctgtaagagctctgagtacagtcgcggtagaagagtcgtccgagaagaagatggtgaaagggattagggtttatgagcatggcggtcctgaggttctgaaatgggaagatgtggaagtaggggaaccaaaggagggtgagatacgtgtgaagaacaaggctatcgggcttaactttattgatgtttacttcaggaaaggtgtttacaagccagcttctatgcccttcacaccaggtatggaggctgttggagaggtggtagctgttgggtcgggattgactggcagaatgatcggtgatctcgttgcttatgctggaaatccgatgggtgcgtatgct

SEQ ID NO: 98984 - DNA, 1142 bp, Arabidopsis thaliana columbia
  unsure (1)..(1142): unsure at all n locations
actcgttttctcatccatttatatgattgctttcttctccacctcaccaatcactcctcctctaaacttttcttcactctcttgtctcttcaaacttcggttactccgttttagtcgacaacaatggcctctgtttcaaggaggttactgaggagagagacgatcccctgtttcagccacaccgtgaggaaactcttctccaccgttggatctccttcttttgctcagagactcagagatctccccaaagacttcccctctaccaacgccaaacgtgacgcctctctgcttattgggaaaacgcctcttgtgttcctcaacaaagtcactgaaggttgtgaagcgtatgttgcagccaaacaagaacatttccagccaacttgtagcattaaagacagaccagctatagccatgattgcagatgcagagaagaaaaaactaatcatccctggaaaaacaacactgatagagcctacttcaggaaacatgggaatcagtttggctttcatggctgctatgaaagggtacaggattataatgacgatgccttcgtacactagcttggagaggagagtgacgatgagatcctttggtgctgagcttgttctcactgatccagccaaaggaatgggtggaactgttaagaaagcttatgacctccttgatagtactcctgatgctttcatgtgtcaacagtttgctaatcctgcaaacactcagattcattttgatacaactggtcctgagatttgggaagatacacttggaaatgttgatatatttgtgatgggaattggcagtggaggcacagtctctggtgttggccgataccttaaatctaaaaaccccaatgtcaagatatatggagtggagcctgctgaaagcaacatactcaacggtggcaaaccaggtccacatgctatcacaggcaatggtgttggattcaaaccagaaatcttggatatggatgttatggagagtgtccttgaggttagtaagtgagggtgccaataaagatggctagagaatttggccattggaaanaaggccccatgggtnggganancggccggngncaanaccgtgggagcaattngacctggcgaaatnccnggggataagngacccnttggncaatnttc

SEQ ID NO: 98985 - DNA, 715 bp, Arabidopsis thaliana columbia
  unsure (1)..(715): unsure at all n locations
gaanccnntttcccnnggttnccccacncctaganttccccccnccnnaggggccaaaacgtgggccccccccccggtccnncccntctngacntggtggccccccgggnntccagganttcccgccccnttaacnntaaaccccccaattgncaaggttttttggngttggcgccttctgaaaccaccttcctcaacggtggcaaaccaggtccacatgctatcacaggcaatggtgttggattcaaaccagaaatcttggatatggatgttatggagagtgttcttgaggttagtagtgaggatgctataaagatggctagagaattggcattgaaagaaggtctcatggttgggatatcgtcgggagctaacaccgtggcagcaattagactggcgaaaatgccagagaataaaggcaaactcattgtgacaattcatgcgagcttcggagaaagatatctgtcgtctgttctgtttgatgagctgaggaaagaagcagaggagatgaagccagtttcagtggattgatgaaggaagactgacactttaccaaaaatctcgggagcaaaagattataaaaagaaagatgtaagagtaataagtttgtgtttatattgttctattgttgatgtataatataatcacagtattgttgatgttgatcttggatattcgaagatccacctaaataangttcatcatnttctgtttc

SEQ ID NO: 98986 - DNA, 679 bp, Arabidopsis thaliana columbia
  unsure (1)..(679): unsure at all n locations
aatacgactcacttagggaaagcacggtacgcctgcaggtaccggtccggaattcccgggtcgacccacgcgtccgaatgagaccataaactcatcgagggaagcaaatgagtcaaatctctcggattctgcagttacaagtatggattactttctaagttcgtcggcttattctcctggtggcatggtcatgcctatcaagtggaatgcagcagcaatggatattggctgctgcaaacttaatatatgatcagcagataggggacaagacatgatttggttcaccagtcttttgtcttgtcccttatctttcagccaaacggaaagagaacttgtgtcttggaaaaaagacattgagtttccttggtttataagattggtccttttaccatccgtttggctgtaaacaggcaaatcatctttggctcatgcttcatcaagttcttatcttcgtctgttttcttctacgcatcttcataagatctctgaactagtgaataacatttcctagcatcatgtttcaactagtgtgtgttggaagaaactctgccttatttccagatgatgtattgtgtgtaacgtgttatgaacaaacgtaagactntcaagttaaaaanaaaanaaaaaaaaanaaanaaaaaaaaaaaaaaaaggggcggcggtcataaagaccaagcta

SEQ ID NO: 98987 - DNA, 436 bp, Arabidopsis thaliana columbia
ggcgtttggagaccgaagaagtctctctcgttatcatgtcgtccttcagcctcggtttcagctgcttcttccgccgtcgacgtcaatgaggctgtgacttcagagaaaccaaccaaaacgcgtccgtttcgaatcggtcatggtttcgatctacatcgtttagagccagggtatcctctgatcatcggtgggattgttattcctcatgatagaggctgcgaacctcactccgatggcgatgtgttacttcattgtgtagtggatgcaattttgggagcactaggccttccagatataggtcagattttccctgactctgatcctaaatggaaaggagctgcttcttctgtattcatcaaagaagctgtgagactcatggacgaggcagggtatgagataggaaacctagacgcgacgttgattctccagagaccaa

SEQ ID NO: 98988 - DNA, 664 bp, Arabidopsis thaliana columbia
cccaagcgtccgctcttggctccacagctgtgttactgtggatctcctcctcctctcgccctggatctcgtacctttgagcaccggtgaagatggccaaatctagtaccatgcttgttcattatgacacagggactccagcagttgctaatgagattaaagaagctctcgaaggaaatgatgttgaagctaaagttgatgccatgaagaatgcaattatgcttttgctgaatggtgaaaccattcctcagcttttcataaccattataagatatgtgctaccttctgaggaccacacaatccacaagcttctgttgctgtacctggagctgattgagaagactgactctaaggggaaggtgttacctgaaatgattttgatatgccagaatcttcgtaataaccttcagcatcctaatgagtacatccgtggagtgacactgaggtttctctgccggatgaaggagactgaaattgtggagcctttaactccatcagtgttacaaaatctggagcatcgccatccatttgttcgcaggaatgccattctggccatcatgtcgatatataagcttccacaaggcgaccaactctttgtggatgcgcctgaaatgatcgagaaagttctatcaaccgaacaagatccttctgccaagagaaatgca

SEQ ID NO: 98989 - DNA, 458 bp, Arabidopsis thaliana columbia
aggacgcgtgagatgaaacataaagtttctgcatcagctaatatgttagatcagagctctaactgtatcgaagaccaggaagatgggatcgtgtctgctgatcgagccaaacagttgaagtcaggttgttctaataacgagattggcagtaaggatttagctgatggttcagctctcaattctgatccaattccgggtggatctacgaaagatgaagtgaaattacaatctttgcagaatccatcatccaaccatgatgacagagtcagttctgagaagggaaatttcaaggaaaaatcaagacccgggggtaacaaagagagacaggaaccttcagttgaaggatctacgcgttcaagagagaacaagaaggatggtaagtcaagtaagagctcttcgtccaactcatcagctgtgtctgagagcgagagtgatgattctgaaatggtcgaacatga

SEQ ID NO: 98990 - DNA, 576 bp, Arabidopsis thaliana columbia
actgtgacgacgcatgcacgcgtacgtaagctcggaattcgtttcgaggacgctggatgggaactatattccgcacgcaataacaagaaccaaacacctctccacttagctttcgttagcattttcatggaagctgccaaattcatcgttgaaaagacgaattcagtcgaccttgatgaactcaatttcgccttatcaagtggatctacttgtattgttgggattatactggagagatttccagagctagctaggaaaaatgcttgggaggttgaagacggctcgcgatcaacgttactgcattatgcgtgtgacaaaggtgaccttgaactgacaagtatattgttaggactcaatcaaggactagaagaagctcttaacagcaaaggtttaataacctttgcatctaacaatccaaagaggcttcattataattcctggaggatttattggacaagccttcattggctttttgggtaagggcccctcaaaaaagacagtctttcttcttccgggacaaaacaaaattccgatcctttggtttcaggggggaaatttgggaactagcacccaatt

SEQ ID NO: 98991 - DNA, 559 bp, Arabidopsis thaliana columbia
tgtctccagcaacatacgactcactttagggaaagctcgtacgcctgcaggtaccggtccggaattcccgggtcgacccacgcgtccgcacagtcgctttacgtcaccggagagaaaaacactcagaagaataaggttttcttcgatggcttctaatggcgtggacgagcagattaagttggtggaaggacctgctggttatgtactcgaagatgttcctcatttgagcgattacattctcgatctccccacttatccaaacccgttgcaatcaaatgctgcttattcagtagtaaggcagtattttgttgatgaggatgatacagtccaggaaaagattgttgttcacaaggattctcctagagggacacattttagacgtgcaggcccgcgccaaaaggtgtacttcaagccatctgatgtgcgtgcctgtattgtcacttgtggtggcctatgccccgggcttaatacagttatcagggagatcgtgtgtggtcttcattttatgtatggtgttacagaagtgattggtgtggattgcgggtttcgcgggttctat

SEQ ID NO: 98992 - DNA, 585 bp, Arabidopsis thaliana columbia
  unsure (1)..(585): unsure at all n locations
ggaaccgtgaccgggactgaaggctttggaactggcggaggagctaggcaccacggccaagagcaactccacaaggaaagtggtggtggcttgggaggaatgcttcaccgctccggatctggatccagctctagctcggaggatgatggacaaggagggaggaggaagaagggaataacacaaaagatcaaggagaagttgccaggtcatcatgatcagtctggtcaagctcaagcgatgggcggcatgggatccggatatgatgctggtggctacggtggtgagcaccacgagaaagaaggggattcgatggacaagatcaagggaaaagcttcccggtggtggccgttcaagcttcgaacaatcgtgtattcatattaaattaaaaaataatgtggggttttttaaccgcatccgcatttccggtccgttgtaattgtgcctttttatgggattggtcccgccctccggatgtgtcggttggttactttcatgggagtgtgtaatgggccatcttggctcctttttaatggtcctgagnatgnttngnggtaatggaaatttccncaccnnttntnaaatctt

SEQ ID NO: 98993 - DNA, 531 bp, Arabidopsis thaliana columbia
  unsure (1)..(531): unsure at all n locations
aggatacggaacaggtggccaagggtacggatcaggtggccaagggtacggaaccggtggccaaggatacggaaccgggaccgggactgaaggctttggaactggcggaggagctaggcaccacggccaagagcaactccacaaggaaagtggtggtggcttgggaggaatgcttcaccgctccggatctggatccagctctagctcggaggatgatggacaaggagggaggaggaagaagggaataacacaaaagatcaaggagaagttgccaggtcatcatgatcagtctggtcaagctcaagcgatgggcggcatgggatccggatatgatgctggtggctacggtggtgagcaccacgagaagaaggggatgatggacaagatcaaggaaaagcttcccggtggtggccgttaagcttcgaacaatcgtgtatcctattaaataaaatattgagggtttaaccctccgattcggcgtggattgccttttaggtgaccccccatatggttttcctccctnggaaantc

SEQ ID NO: 98994 - DNA, 769 bp, Arabidopsis thaliana columbia
gctggtacgcctgcaggtaccggtccggaattcccgggtcgacccacgcgtccgaggatacggaacaggtggccaagggtacggatcaggtggccaagggtacggaaccggtggccaaggatacggaaccgggaccggcccctgaaggctttggagctggcgcaggagctaggccccgcggccaagagctacctccacaaggaaagtggtggtggcttgggaggaatgcttctccccctccggatctggatccacctctagctcggaggatcatggacaagcagggagcacgaagaagggaataacacaaaagttcaagcacaagttgccaggtcatcatgatcagtctggtcaagctctagcgatgggcggcatgggatccggatatgatgctggtggctccggtggtgagccccccgagaagaaggggatgatggtcaagatcaagggaaaagctttcccggtggtggccgttaagcttcgaaccatcgtgtatacagattaaatcaaagtaatgaggggttgtaacgcagtcgcattcgggcgttggattgtgctttttacgtatgtacggcctgccatgtgtgttgtttactttcatgagtgtgtaatgagcatctggctcattttatgttctcagatgtttgtgttatgtaattccccttctatattaatttacttttttctgaaaaaaaaaaaaaaaaaaaaaaagggcggccgctctagaggatccaagcttacgtacgcgtgcatgcgacgtcatagcttc

SEQ ID NO: 98995 - DNA, 1076 bp, Arabidopsis thaliana columbia
  unsure (1)..(1076): unsure at all n locations
ccgnnnnnnnnnnnnnnnnnnnnnnnnnnnnnnnnnnnnnnnnnnnnnnnnnnnnnnnnnnnnnnnnnnnnnnccacgcgtccgcccacgcgtccgcccacgcgtccgcccacgcgtccggcgttaacgaatcttcatcgatcaaactcatcaaagtctaatatcacaaagaaagagtttttttaactagcttagctcaaagtgtttgcttaagacaagaagaacatggcgtcttaccagaaccgtccaggaggtcaggccactgacgagtacggaaacccgatccagcagcagtatgacgagtacggaaatccgatgggaggaggaggatacggaactggtggtggtggaggagctacaggtggccaaggatacggaacaggtggccaagggtacggatcaggtggccaagggtacggaaccggtggccaaggatacggaaccgggaccgggactgaaggctttggaactggcggaggagctaggcaccacggccaagagcaactccacaaggaaagtggtggtggcttgggaggaatgcttcaccgctccggatctggatccagctctagctcggaggatgatggacaaggagggaggaggaagaagggaataacacaaaagatcaaggagaagttgccaggtcatcatgatcagtctggtcaagctcaagcgatgggcggcatgggatccggatatgatgctggtggctacggtggtgagcaccacgagaagaaggggatgatggacaagatcaaggaaaagcttcccggtggtggccgttaagcttcgaacaatcgtgtatacatattaaataaaaataatgagggtttgtaacgcagtcgcattcggtcgttgtattgtgctttttatgtatgtacgtcctgcgatgtgtgttgtttacttacatgagtgtgtaatgagcatctggctctttttatgttctgagatgtttgtgttatgtaatttcacatctatataaatctacttttttttggtaaaaaaaaaaaaaaagggcgggcgctttagtgtacagggctcacgacgcgggcgcgggcgtcaagctctagatagtt

SEQ ID NO: 98996 - DNA, 1171 bp, Arabidopsis thaliana columbia
acgaccacacaaagtaattacaatggaacacagaaaggtaagagggaacggcatagacattcacgtagcaatccaaggtccctccgatggtcctatagtcctcctcctccatggtttccctgagctttggtactcatggcgccaccagatccctggactcgccgctcgtggctaccgtgccgtcgctcctgacctacgtggttacggtgactccgatgctcccgctgagatctcttcctacacatgcttcaacatcgttggtgacttaatcgccgtcatatccgccttaaccgcctcagaggatgagaaggtctttgtggttggacatgattggggagctctcatcgcttggtatttatgtctcttccgaccagatagagtcaaagctctggtcaacctcagtgttccgttctctttccggccaaccgatccatcggtgaagcccgttgatcgcatgcgtgctttctacggcgatgattactatatctgcaggtttcaggaatttggagatgtagaagctgagattgcagaggttggaacagagagagtcatgaagagactactcacttatagaactcctggaccggtaattatcccgaaggacaaaagtttttggggatccaaaggcgaaactataccactcccgtcttggctaacggaggaagatgttgcttacttcgtcagcaagtttgaagagaaaggcttctctggtccagtcaattactaccgtaacttcaacaggaacaatgagttgttgggtccatgggtgggaagcaaaatccaggttcctacaaagtttgtgataggggagcttgatctggtctactatatgcctggtgtgaaggaatatatacatggtccccagtttaaggaagatgtgcctttgcttgaagagcctgtggtcatggaaggagtggctcacttcattaaccaagaaaagcctcaggagattctccaaattatccttgatttcatctccaaattctaatgttgctttcccttaaattactcttttaatcaagttccataataagttgaattatgaggatatacatcctcatgtatggttgtatcatcctataacctatataatctatgtatggatgcgtgcatattatttgacattcttttaagttataataatgtaatgtgactcatgtgaaaaaaaaaa

SEQ ID NO: 98997 - DNA, 533 bp, Arabidopsis thaliana columbia
  unsure (1)..(533): unsure at all n locations
taggtgcactatagaagagctatgacgtcgcatgcacgcgtacgtaagctcggaattcggctcgagcaatgataaaacagaaagttgattcagccacagagagaaccaccgattgaaaccgttaagagaatccatctcggttcctatctttggtctgttgacttcatttgtggaggcttaagctatcggatggggatcattaatcatctttgagtgaggcagagatttctctctaggagctctctttcgttttatttatatgtcgacattatataatgtgtttttctctgggagagaagcagatttggagttagagaagtactattttcatttgttcttttaataactttgttgcaatttgttgaagttttgtttcccttgagttctttctgttgtaacaatttacaataaccagccattacattgcaaaaaaaaaaaaaaagggnnnnnnnnnnnnnnnnnnnnnnnnnnnnnnnnnnnnnnnnnnnnnnnnnnnnnnnnnnnnnnnnnnnnnnnnnnnnnnnnnnnnnnnn

SEQ ID NO: 98998 - DNA, 494 bp, Arabidopsis thaliana columbia
ctcatcgaaatgtcgtctcaagaaacgaaatcagatcaatgtgttggagcagagatctgcaatggcgaatcaaactgcaaacagaaagccaaagagattttatcaaccatgaatctacccaaaggtcttcttccactagacaacatgacagagatcggtcacaacaaatcaaccggttatgtctggatcaagatcaagaacaaggttcaacatcgggttaaagccattggacgaaacgtatcgtacgattcggaggttactgcgatccttgagaatcgtcggatgagtcagctcacgggaatcaagagcaaagagattctgatttgggttacgatctctgagatctttgttaatcatcaagatccgactcaaatcacttttgctaatcctacgggactatcacgtactttccccgtcactgcttttgaagaagacgaatgattcatttgtcaacgctcaccatcatgatactttgcttagctaaattatctttt

SEQ ID NO: 98999 - DNA, 816 bp, Arabidopsis thaliana columbia
tccaaaaaagagaaaggaatagcaaaaaagtttttttagccaaatgtggtgataatttcagaaaattggaaaaaccaaggatatagccccaaaaagagagattattttagttcaaaacccaaagagaattcttacccccaaaaagggtagttttttttcccattaagaccagacattgccaagaggtatcgggtcaccaacaaaaatcaacccggtaatgtgtgggatcaaggatcaaagaacaaggttcaacatcggtttaaagccattgcacaaaaacgtatcgtacaattcgaaggtaaaagcgatccttaaaaatcgtcggatgagtcagctcacgggaatcaagagcaaagagattttgatttgggttacgatctctgagatctttgttaatcatcaagatccgactcaaaatcacttttgctaatcctacgggactatcacgaactttccccgtctctgcttttgaagaagacgaatgattcatttgtcaacgctcaccatcatgatactttgcttagataaattatcttttgttttttccttataattccttttgtttagctaagttctattttcaacattttgtatttctgcatcttttccattagagattttataaaaataataatatagaaagacaaaatgtataattaaaaaacaaacaaattcctttggaaaatttgagatagtggttatgcatgtttgctacaacttataaaccaaaaatagtaagaaaatgagaaaattaaatataaataaaaaggaagagggcggccgctctagaggatccaagcttacgtacgagtgcat

SEQ ID NO: 99000 - DNA, 645 bp, Arabidopsis thaliana columbia
cccccctcgattacgacggtataccataagcttgatatcgaattcgcggccgcctcatctctctcacaaatcattttctcagacttctctctttctcttaaaccatgcctgaggcaccaaagaaagaatctttagaggttttcgatctgacgcttgaccaaaaaaacaagcaaaagcttcagttgatcgaagaactcacctctaacgccgaccaagtccaaagacaagtcttggaggagatcttgacccgcaatgctgacgtggagtatctcaggcgacacgacctcaacggtcgcactgaccgtgagactttcaaaaacatcatgcccgttatcacctacgaagatattgagcctgagatcaacaggatcgctaatggtgataaatcacctatcctctcttgccaaacccatctctgagttcctcacaagctctgggacatctggtggggagaggaagctaatgccaacaatcgaagaggagctagacaggagatcactcctctacagtctcttgatgcctgtgatgagccagttcgttcctgggctcgaaaacggcaaaggattgcttttcgtcttcatcaagtccgaatccaagactccaggaggcctccctgctcgtactgtcttaaccagttactacaaa

SEQ ID NO: 99001 - DNA, 408 bp, Arabidopsis thaliana columbia
cggacgcttccgcccacgcgtccggagactcataggatcataaccaggacgtgcaatttcagcagcgataatacttggagcaacgatgagtgcaatgaggccgtagcagaagttctcaagcagtatcacgagatagatatctatagcatctatacctcagtttgcataggagattctgcgcgatcgtcttactttgattcagcgcaattcaaaacaaattctcgcattagctccaagaggatgccaccgaggctcatgggtggatatgatccatgcttagatgattacgcgagagtattttacaacagagcagatgttcagaagtctcttcatgcgagtgatggagttaatctcaagaactggagcatttgcaacatggagatctttaataattggactggttcaaac

SEQ ID NO: 99002 - DNA, 551 bp, Arabidopsis thaliana columbia
  unsure (1)..(551): unsure at all n locations
nnnnnnnnnnnnnnnnnnnnnnnnnnnnnnnnnnnnnnnnnnnnnnnnnnnnnnnnnnnnnnnnnnnnnnnnnnnnntccctttttttgtgtttttctttaccgcctaaaaagtaattgaatttattttagtcaattctcaactctacatttacaatacatagcagattgctattccaaaatcaggatatcaaatgggctcttgaattcagaatgtattatctacaaattctgtttaagaaactcctctttaagtctcttgtgaaggtaaatcccatatgagaaggttaagctagctcatgagaagcaatgcttcacgagttcggcccaaaagactcaaagcggttgctgctatgtgatgtccagttagccctgcaagagcaagctgctccctaggcgatgcttcttctatgtagccatccggtaacacaatgggtctccacttgatattcccatcgagctggccatcgagggctatgaactgcgccacatgagaaccaaaccctccaacacagccttcttcgacagtgataaggaatttgtggttctgac

SEQ ID NO: 99003 - DNA, 1887 bp, Arabidopsis thaliana columbia
acccacgcgaccacttagctttaaagggcacacacacacagtcgcgagtttctctctggtgcgctctttgtggcggctcgtcttcttcttcttcttccacgggactctctctgaatcggtgattttcgatcttcctagggtttcgatctgaaaccttgcgatctacttgaaagagagattcagaaatttccaagtaataataatgtttgcgcctgcgactcaaccgcaacagcaacatgagcagaagaagcaatcagagactgtttcatctgctgaagaagatgctttgaagtggaacaccgattgcgtttactttctcgcttctcctttaacctgcaagaagggacctgaatgcgagtatcgccacagtgagtatgcgcgtatgaacccgagggattgctattattggttgaatggaaactgtttgaatcccaaatgtggatttcggcatcctcctttggagggattgttgggaaatcaaggaggtgctcctgctgtttctgtacagccaatacatgcaaccgcgcagcatactagtgttgcaaaacagcctgttccatgtctgttctttcaaaaaggcatgtgtatgaaccgcgcgttctgttcgttcttgcacacgccgaatcctgctgcgtataaaaaacagcatcctgtagaagctaagcctgctactgatcctcagtgttctaaaaagccaattgaaaataacactgaggagaagaaacttcctgatgttaatctctcaaaggtggttaaaggacatactgacatatcggctgcaccaagagtcgcttctactggactaagggatagtagaagtgtagagggatacattccaaaccatgtgggatatgagcctgttgtgcagagaaagggtccaggattcccttcttttactgaaggaggccattctactcagttgcttcagaaatatggatctgatgataataacagtttccacaatggtaaggatgcagatgacgttttaagagagtcgtctcctgggtttgatgttcttgtggataatgaggctggagattctgagtattatcatgttgaagatcgatatggacgtagaagtcaggagagagggaactcagagtatgaccctgatttcagtgcaattgctgatggtgataaagaagcattacgtgaacaacgttttgattcatatgatcggagggaagacaggggatggggccatcgtcgagtttcttctgagagagaggatcgtttggacagaagggtttacgcagaagatgagagatcagagaacatactggaatcggatctgagatatcgtttggctaagcagagaaaaggcaatggtatgagattatcagtaggaggccatgactatgctgctcctgactcttcgatggacagaggatatagagagtctcgtagggatacaccgagggaaaactccattagcagtagtcgtcttcagggtagaattaagcttcgtgagagaagcaatggcgaagagggtcaccactttgacaggagaagtgagaggggaagggacagaagcgagttaccttctcagggtagactccgagatagaattaagggtaggttagaggaaaaccatagtggtaatcaggaaagaggtttcggggctccatgggcgagaagaagagaaatggaagacgaaagaaaatcagctcctaaaagcagcagagaggaaagtaagccagagccatctcttgggaagaggaaaagctttgaagaggatcatcatagtcataagcgatcaagggattcatttgcagctccattgcctttcagtgagattctcaagagaaaaagagcggccgctctagaggatccaagcttacgtacgcgtgcatgcggcgtcatagctcatctataggtcgtctcaat

SEQ ID NO: 99004 - DNA, 544 bp, Arabidopsis thaliana columbia
atagaagagctttgacgtcgcatgcacgcgtacgtaagcttggatcctctagagcggccgtcctttttttttttttttcttttttttttaaaacaaacaaaaatctattattgtctgataaaaaatatattaaaaagggacattaaataaagatcaccaagtgacgaggaatggtcaaaagagatgggagacctcctttagagttgcatcgatcatcttgttggaggtttttatagcatcatgtattctcccagccttcacataagcatcgatcattgttttataagtgttaacatcaatatatccaaaatcatcagcaagtgaatcaacaaaaacagactctgcttctgacaacatcctgttttcgcaaaaccttgtaataatgtatttgtcactgaggtagtcgttcttgggtctcgcctttttgtaggtctccatagcctcactaaaccaacccatatcaaagcactcgtccaccattatcttaatggtatcagagtccaagcaacccttaccggttccatttttatctaagagttcatgg

SEQ ID NO: 99005 - DNA, 559 bp, Arabidopsis thaliana columbia
  unsure (1)..(559): unsure at all n locations
nnnnnnnnnnnnnnnnnnnnnnnnnnnnnnnnnnnnnnnnnnnnnnnnnnnnnnnnnnnnnnnnnnnnnccacgcgtccgcggacgcgtgggcggacgcgtgggctattgttctctctctcttcatgcccgaacgcatcgggtctcaaaaaccattgatacagacatcgatccttgtcaactagtactgatctataaatcttataaaaatctgtagagatatggccgccgcagccgtttcctctaaccctcgcaccgttgaagagatcttcaaagattattccgctcgtcgtgccgctcttcttcgtgctctcactaaagatgttgatgatttttactctcaatgcgatccggaaaaggagaatttgtgtttgtacggacaccctaatgagtcatgggaagtgaatctaccagcagaggaagtgcctccggagctacctgagcctgctctgggtatcaatttcgctagagatggtatgcagaggaaagattggctttctcttgttgctgttcacaggggttgtgggttgctctctgatgctttctactttggagcccgt

SEQ ID NO: 99006 - DNA, 614 bp, Arabidopsis thaliana columbia
  unsure (1)..(614): unsure at all n locations
ctcctcatctctcttgtccgtgcgcatcggattttggaaaccattgatgcagacctcaatccatctctaacaccactgatctatctacttaggtcttctctaacaatacttgtaattttctttctttttgcttcttccgtcactacatctatggccgctgagtcttctaaccctcgcaccgtcgaagagatcttcaaggattttagcggtcgtcgctccggttttcttcgagctctctccgtagatgttgacaagttctactctttatgcgatccggaaatggagaatctgtgtttgtacggacacccgaatgggacatgggaagtgaatcttccagctgaggaagtgcctccggagctacctgagccagctcttggaatcaatttcgctagagatggtatgcagcgtaaagattggctctctttagttgctgtccacagtgattggtggttactctctgtttcttcttacttcggcgctcgtcttaatcgcaatgagaggaaacgtctatttagtctgatcaacgatctccccacctctcntttnaaggnagtgacgggaggaaacccntccaaaagacgggaaaaccaagcannggttctcggangnaaaaa

SEQ ID NO: 99007 - DNA, 539 bp, Arabidopsis thaliana columbia
atagaagagctttgacgtcgcatgcacgcgtacgtaagcttggatcctctagagcggccgtcctttttttttttttttagagtgatcagaaaaatattttctatttctttcactttgacctctataacatccaaaccgactaataaaaccatcccaaataagcaaacaacaatcaagctaaggaaacagcaattggactcctcacaacatggactttatctgtccaactaaaccatccaaattggtattgacccttttcagtcgcattcatcacctggttcttcagtggtttaataacgattttaaaccgctgcttctgaccaatccggttaaaggacaatatattcggtatagccttaaccgaaatacccgatggcggtttaacgctgaataagtatgtgcttgttgagttaccagttccaacatttgtaactgttcttttaacggtcaccgtcttcttgagattcgggaccgcgattgacgggtaattgtgattataaccgggcggaattttactaggacatttgaatgtcgggtca

SEQ ID NO: 99008 - DNA, 541 bp, Arabidopsis thaliana columbia
tgacctatagaagagctttgacgtcgcatgcacgcgtacgtaagcttggatcctctagagcggccgtccttttttttgtttttttcttttaagataatgaggatttgatatatatacaaggagagtaggttaacacttaacacttagtcatgacatcaactaaaactcttttgtctttttttccctacccaaagttggatcctagaccaagaatttaagattatatctggcgatagatttacagattcttctcaagtttaaagcagttaaaacctagatgagattgaaacctcacagctaagtgaagttgttcttcaagagtaggaacggaccaagccaaagttgacaaaagatttcgacttgaagagacccccaaagagaaatcttgtcggtgattcgtgagaaggcgatttctgtctttgttgttgttcttgagggttgttcttgactttgagaatagtttggcctatggtttgtcttatggaatctatggtcttagcatcgattgagtaaccagatgcatcactgacatagaatgtgt

SEQ ID NO: 99009 - DNA, 488 bp, Arabidopsis thaliana columbia
gtgatctaagaaccgaccttttgcttagtttctttcaagtctccaatcaaacaaccatgagagaaattgtgacgattcaagttggagaattcgcaaactttgttggctctcacttttggaatttccaggatgaattgctcggattggctagtgaccctgaaagcgatccaatctttagaaaccataatctcgacatggatgttctctaccgctccggtgagacccagcagggggttgctacatacactcctcgtttggtttcagtcaacttaaaaggggcactagggaccatgagctcacgcggtacactttacaacgaaggttcttcatcaagatcagattcttcagcaacctggtttgcagatgttgatactcagagatctgaacctcgaaagaggaacttgtttctgcaaagtttgtacgaggaagaacatgtagtggggaaagaaaaggcgaaagagattgaggacaaagatattgttggatgc

SEQ ID NO: 99010 - DNA, 507 bp, Arabidopsis thaliana columbia
gcgaaaatcccaaacaaaaaaaataaaagaatggcgtctctgtgcctttctctccaccaaaccctaactaatcccctgtcggctcccagatgcagaccactcagcctctccttccccggatcctcaaccttctcgatccgcccctctagcagacgcgcaaccgccttgacgacccgcgcctcctacaccccgacgccggcgactgagcgcgtgatttcgatagcgtcgtacgcgctgccgttcttcaattctctgcagtacgggcggttcctgttcgcgcagtacccaaggctgggattgctgttcgagccaatcttcccaatcctgaacctgtacagatcggtgccgtacgcgagcttcctggcattcttcgggctgtacctgggagtggtgaggaacacgagtttcagtaggtacgtgaggttcaacgcgatgcatgcggtgacgctggatgtgctcctggcggttccggtgctgctgacccgaatactggatccgggtcaagga

SEQ ID NO: 99011 - DNA, 821 bp, Arabidopsis thaliana columbia
ttaggacaactatagaagagtcttgacgtcgcatgcacgcgtacgtaagcttggatcctctagagcggccgccctttgtttttttttttttacacaaagcaatccacaatattcatatcatgattgttctcaagttactttaaccacttttgcattcaaacatcgtcaagttagaagattagagtttgagaaaacaatttacacagctcaacgttctcaaggctttctaacatttacaaaacccaaaccttaatatacccaaaaaatcgcttccttcaactacggccggtctctaagcttctctatttggcagcataccagttttgagcacattttgcatcaacagataaatcgactgagagaatattccttccgttaaagggcttagacatacagtccacaactatgtcctttgcgatctccgctgattcaattggtccttccaagattacttcatcatgaatctgtagaagcaatctccaaccaagcttcttcaactgttgatttatcgatatttccaacattgcacacatggcaacatcagctgcacttccctggactggagtgttgattgctgctctttggatatgatttctctgagcacgtgactttgacgccggaaatctacgagacctttctagtaaagtgagtacatacccatcttctatagcttctttcttagcatttcttgcatttccttactctgcctgcattgaccgagatcgactgttctgactttttagtgaaaccttcatctctaaaagccgaccgggttccatacgcatgaaagtaagctctggctttttctttgaccaagcatc

SEQ ID NO: 99012 - DNA, 658 bp, Arabidopsis thaliana columbia
  unsure (1)..(658): unsure at all n locations
tccnttnnnnnnnnnnnnnnnnnnnnnnnnnnnnnnnnnnnnnnnnnnnnnnnnnnnnnnnnnnnnnnnnnnncttttttttttttttttcactggaacttattaattgcgattaattatgcaatttttattcttttggtttgaatgcaattttatcctacaaaaatataagaaactcaacaatgaaaactgaaaaatcgaaaagactatcattccttctatacattgaaaacattctctacccatgagagtccatttggacccaaacctaacaattccttcacacataaattgttcttgtctaaacactactaaacaacaacacacaaaatctcacaataaaacaatcaaccaaaccgctacaaacgctttaaatcaatttcttaccacattcaatgatttcacaagattagtttacatcactcactcagagctatttgagttctcctctctactatcatcatcatgatcactctgttgctgcttctcttgatgctccaccgcattgttcgcttgttccgcattcgcgtttgcgtttccgcctcttgaataagccgagttcaaagcggctaacatcccgagattcgagtccggcatacttagtcctaagttctgagtcggctgcggctgagctaaaaaagaacctaactgaagtggc

SEQ ID NO: 99013 - DNA, 692 bp, Arabidopsis thaliana columbia
ggtacagcttcacgaacaatctctctctcgatagattcttcttacctctgaatttctcgttgttggaacaatggcgtcgaatctcctgaaagccctaatccgatctcagattcttccatcttccaggaggaatttcagtgtggcgaccacacagcttggcattccaacagacgatctagtcggcaatcacaccgccaaatggatgcaggatagaagcaagaaatcacctatggaactgattagtgaggttccacctatcaaagttgatggaaggattgttgcttgtgaaggagacaccaatccggccctaggtcatccaatcgagttcatatgcctcgacctaaatgagcctgcgatctgcaagtactgcggccttcgttatgttcaagatcatcaccattgaggcaaattctgaaagtgaactgctggtctctctcccctttttattgcatttttaagtttgtgtattgtttttttctggtgtgcctactacatcttcagctatattatctaataaaggattcgatcaaagtcgggtaagtttgatttttgtttgacctcacttcagcacttgtcatggtgtacctttcaatctctgtatacactgtcttttacatgccattgagctcaaaaaacagcaaggcctttttctgctaccaagatcatatgaaagttaaattttaaacaaaaaa

SEQ ID NO: 99014 - DNA, 754 bp, Arabidopsis thaliana columbia
  unsure (1)..(754): unsure at all n locations
nnnnnnnngnnnnnnnnnnnnnnnnnnnnnnnnnnnnnnnnnnnnnnnnnnnnnnnnnnnnnnnnnnnnnnnnnnnnnnnnnnnnnnnctttttcggccgctttgatttgaacaaatctataataacataacatattacagtgtgttattaacacattttcgtgtagacaagtaacagatatgtctatctatacagacttatttttgagacttgtacacacaacatttgaagatccctcatgtatgttaggttgtagtaatcgtcactctatatacatcttccgcatcctatacatcctcttcctttctaaacatctctctactacttccccatatggttcacatcacccagtaccttgctcagtttctgcgatttcattcatagtcttgaacggaaaaagcgtttcttaaaaccaagatttgagttcttacgggaggaggacgtggcatatggttgaccgttgagacaacccgcaaatctgatatcccatccttcgatgttctttggaacacatgagtcgaataggaattgcccgagtacgctgtgagcgtttatgctcgttggttggagtgggcggaaggacgatctttctctctgttcttcttgtgaagatgatggatcgctgttgttgctgttgctttgatacggtgctgagctaggtaagaaaaagtggtcacatggcccagtggctactcttcttaggctttggttagagttcacagcaactttctgaaggtcgcatattaactcaga

SEQ ID NO: 99015 - DNA, 754 bp, Arabidopsis thaliana columbia
  unsure (1)..(754): unsure at all n locations
gtcctcccatatctctttaggaatcggtgaaacagaagggacgaagcatgatctgcatcaggcgatcctaagggacgaagctgtagcaagattacacgagcttggacaggtgagtgatgcagctacccacttagagaggacttttatgagtccagcatccataagagcaatacctcttatccgtggatggatggaagatgccggtttatcaacatgggttgattacatgggaaatgtacatggtcgagtggaacctaagaatggaagttcacaggctcttctaattggttcccatatggacactgtgattgatgctggtaaatatgatggctcattaggcatcatttctgcaatctctgcattgaaggttctgaaaatagatgggagattgggagaactaaagcggcctgttgaggtgattgcntttagtgatgaggaaggagtgaggtttcagtctactttcctaggcagtgctgctttggctggaatcatnccagtttctcggttggaggttactgataaaagtggtatttctgtgcaagatgctcttaaagagaactctatagacataacagntgaaaacttgatgcagttgaagtatgatcctncatctgtttggggatatgtagaggttcacattgngcaagggccggtgcntnantnggttggttatncctttnagnngtagtaaaaggaatttcagggcagncaaggctcaaaggttacctgtaaaaagggntctcaacggacatnc

SEQ ID NO: 99016 - DNA, 870 bp, Arabidopsis thaliana columbia
ctcttgttctttctcgtatcaaagctctcaagaagatggatgaattattggaagtggtggaagaagctgaatttagaatgcaattccctgaacctgataagattgatggagcaatcatcacttgtgataaagtgaaattcggttatgataaagataatattctattacaagatgttacacttaatattgatatggattcacgtgttggtgtgttgggggccaatggggttggtaaatctacattacttcatcttttgattggtaagattcaaccattagaaggtacagtgatacgaaattctagtgcacggattgcaacttttgcacaacatcatatggaacaattaaatttacaacaatctgcccttgatctcttcattgaactctttcctaaaaatcaccctcaacttctgcgtcgtcatttaggtcaatttggtattactggagatctagcattacaaaatattggaacattatcaggaggtcaaaaatctcgtgttgcattcgccatcgtaacattcaagaaaccacatttgattattatggatgaacctacaaaccatttggatctggaaaccatcgatgctctgatcttggctgtccaaaattggggtggaggtgtgttacttgtatctcacgatcaacatttcttatctgctgtcgggaatgagttttggggtgtttcagctggaaaggtgaaacgtttcgacaactttgaagcctccagaaaattctcttacagtatgtagatttccatagcccatcatgattggatgagatgtactaagtgatatcgttgtcatcccatcatttcgttcatgtacatagcttgtatgccaatataaaacaacaacatcattattgcggagg

SEQ ID NO: 99017 - DNA, 563 bp, Arabidopsis thaliana columbia
tatagaagagctttgacgtcgcatgaccgcgtacgtaagcttggatcctctagagcggccgtcctttttttttttttttcattcatcagagaaaatccattacataacagtttacaaaataacatccatctcttcctttctgcatttaatttcttttcaatgaaaccccctgattttatctatcatttacagaaatcgaacctacaaaataaaaccattcaattctatcccccaaagtttttttcacatcgaaatgttaagatcaatcttaggcttcttcatggcaggcaaaggaacaaacgaatgacacctcgggcatttcggattgttctttgccacaaacacgtacgataagcaccctggacatccagccgccacctgagacgccgcgacggtggcagaagcggttccatcgtaaacgccgtcatcttcaggagattggcgtttctttgtatctttctccgccctttccaaagccaatttcaccttatctagtgtgcaaacactcgatagatacgagagagactgatttggagaaaaagaagacagaggaggaggaagag

SEQ ID NO: 99018 - DNA, 560 bp, Arabidopsis thaliana columbia
  unsure (1)..(560): unsure at all n locations
nnnnnnnnnnnnnnnnnnnnnnnnnnnnnnnnnnnnnnnnnnnnnnnnnnnnnnnnnnnnnnnnnnnnnnnnnnnnnnnnnnnccacgcgtccgatcgtttctgcttttcacaatcttcgtcgcggttattgtgacttctctgctactgattggggacggtccattggacttcccaacgtacgatgatgttgtgtattctctcatttagtgtatcatcatcaagacatcaaactatataataaggcttgtgtttgtgtgtgtttatgtagtggaaaagatgaatttgagtattggtcaaaaaaaattacatcactactaaaaaaaaaaaaaaaaagggcggacgatctaaaggatccaagcttacgtacgcgtgcatgcgacgacatagctcttcgggggggcccccttaaaggaaccaagtttacgtccccgtgcatggaaagactgggttttctatgggggcacccaaattaaattccttggccccatttttacaatcgccagattgggaaaaccctgggaggccccaacttaatgcccttgcgaaaaattccccttt

SEQ ID NO: 99019 - DNA, 567 bp, Arabidopsis thaliana columbia
atagaagagctttgacgtcgcatgcacgcgtacgtaagcttggatcctctagagcggccgcccttttttttttttttttctactaagacacatgtatttgttattcatcaacttcgaactgaaccagggaagagagagacaacaacagtttatcaagcatcgtgaagtttgcagatggaaatttttgataaccaaatcgacctaaaacatcccaacagtagagacaaaagaaagtgctttggatctcttaccattggaatacaccacgagaatggaatagaaactaagaaattactgcagaacttgcaatgtgattcgttggttgagaaggaagttcctgttctttgtaatgtatgcgttcattgcctgggtttgtgatgtgaaacgcaccaatgctaccctctttgaagttccaagtccttgaactgtgaggaactggatggatccaggataatagagacagccagataagaacctatctatgtcatctgttatagcattcaccggaatcccatgtagtgcaaccactttcccttcttaggacggaaggcttggttcgagcccgga

SEQ ID NO: 99020 - DNA, 598 bp, Arabidopsis thaliana columbia
  unsure (1)..(598): unsure at all n locations
atagaagagcttgacgtcgcatgcacgcgtacgtaagcttggatcctctagagcggccgcccttttttttttttttttttttttttttttttttttttttttttagggaaatgctagtattaacttcaaatatccggcaaaattttcaattattttcagggttctcataatctaagcccttaatgttacaacaacaaaacaaccagaaagacgttgtgaaagaaaagaccaaacatcaaaccacagtttctggttatgaaaacaacagtcaagtggtagagattctgatgccactcagaacatagcctccaaaagaactcatctgcatgtgagggtgagatcttgaaggaagcacctgatattcgcgtagccatggttctgttatttgcagattgatcgccattttaccctgttgaagcttgtgcatacatgtcgccagcggctgtaaatacggatgatatattgcaaaaggagcagagtaggacagtagtggcaatacatccttagctacgatccatgggtcttggtctgccgcaatggattagcgcgaaaccgtttctggcaatcccatggtctttgagctggccagnttngggtt

SEQ ID NO: 99021 - DNA, 858 bp, Arabidopsis thaliana columbia
  unsure (1)..(858): unsure at all n locations
ttccttacatcactacactaggatgcacgcgtacgtaagcttggatcctctagagcggccgccctttttttttttttttaaaattagattgtaaatgctagtattaacttcaaatatccgtcaaaattttcaattattttcagtgttctcataatctaagcccttaatgttacaacaacaaaacaaccagaaagacgttgtgaaagaaaagaccaaacatcaaaccacagtttctggttatgaaaacaacagtcaagtggtagagattctgatgccactcagaacatagcctccaaaagaactcatctgcatgtgagggtgagatcttgaaggaagcacctgatattcgcgtagccatggttctgttatttgcagattgatcgccattttaccctgttgaagcttgtgcatacatgtcgccagcggctgtaaatactgatgatatatggcaaaaggagcagagtacggccagttaggggcaatacatccttagctacgatccatggggcttggtcttgcgcagccatgattagactcgaaaaaccgttttcttgccacatctctattgtttcttttgaagctttggctccagcttttgcggctttgataattatgctctctggtacaacaatatctactactccagcctcagttggtacagatatttcttcaaccataacatcagatgtagctgtttcattaatattgttctcagctttgcaaactccttcttgttgattgtttccttcagtagacccagttttggctgacgagagctcgtttatcgatgactgcacgatcctctttaaaaccttgtnactaaagttgaacatccttaccatctccacaggataagga

SEQ ID NO: 99022 - DNA, 542 bp, Arabidopsis thaliana columbia
  unsure (1)..(542): unsure at all n locations
nnnnnnnnnnnatagaagactatgacgtcgcatgcacgcgtacgtaagcttggatcctctagagcggccgcctttttttgttttttttatgagttattagtttttattacattaacacttctgtgtttaattacatttcttacaacactgaccttgaccttattaatcactggcctgtgtgtctggagagattgattcgggtttttgagtagtaatggagatggcttcttctatagcttgaaagaacgtagcaattttgtaagtaaagaacccaaccaacattggtatcaactccaaatgcatgaatccatactcaggaacaagtattgcgttccatctattgaatatcataaccaacacaacggggactagtaaccgtggctggttagctgcacctttggcaactcctctggctccatctgccatggcatctacagagttaccaagcatcctcatatatgcaagtgaacccaacaagccagcaccaaaactaagtgctatctctggggtgtatgagatataagctgagactaaaccaacac

SEQ ID NO: 99023 - DNA, 649 bp, Arabidopsis thaliana columbia
  unsure (1)..(649): unsure at all n locations
nnnnnnnnnnnnnnnnnnnnnnnnnnnnnnnnnnnnnnnnnnnnnnnnnnnnnnnnnnnnnnnnnnnnnnnnnnnnnnnnnnnnnnnnnnnnnnnnnnnnnnnnnnnnnnnnnnnnnnnnnnnnnnnnnnnnnnnnccaaccccttcccaattttatttaacgcaacatgaaactttggaggttaaagggaggggcatagtttagtagagagactttttttgtcatatcacccacccaaattacaaattttttcccgatcaagattatttcaggacccaatctctacctgcgaagtctttcttgatgtaacaaaagattttactaataagcgatttcttcaagaacttggagggtttttgggggaacccattctagatgttgggctgttatcccggaggcattacccgagtatatacttcccagtccctttgggacagtttctagaaacattcctggtcttactggtaacggttttcttcctgtaacgcttccccttccttttaacccactgggttttcttccttcggtagaagaatcggattctttgctaagattatctgcgccttcatctttcccttgcattacattctggatcatctgctgcacagtctttccaggtttcagagctaccaatttggctaagaaatt

SEQ ID NO: 99024 - DNA, 559 bp, Arabidopsis thaliana columbia
  unsure (1)..(559): unsure at all n locations
nnnnnnnnnnnnnnnnnnnnnnnnnnnnnnnnnnnnnnnnnnnnnnnnnnnnnnnnnnnnnnnnnnnnnnnnnnnnnnnnnnnnnnnnnnnnnnggggttcctaactttatattataccacaaaaacataaatacagctcacaaaaagatcatcccattcccaatatgtcactctagacaagcttaaattattagtattgtctactgaggaaaaagctttttggtaaaatacacaagagctatataatacacatatactttctatattacatagagagaagagagaggaggctcatgaagtggcttgagcttcctcagagctactagcagagacttgtccagtaccagtagcagtgtggccctcttcttcttcttcttcttcttcatcgcagaagatgctctcctcgcttgtgtccgagaacgcatcttcctcgtcttcttcgctaacttcttcttcgnttctcttctttctcaacactttaatgccttttctttgaatagaaagccttctccgttttcttgctttcctttttcctttgggaaactcttctccttgaga

SEQ ID NO: 99025 - DNA, 728 bp, Arabidopsis thaliana columbia
  unsure (1)..(728): unsure at all n locations
gaatgnnnnnnnnnnnnnntgacgtcgtttgccgcgtacgtacgcttggatcctctagagcggccgccctttttttttttctttttttttttttttcagcgcacaaaaagatcatcccattcccaatatgtcactctagacaagcttaaattattagtattgtctactgaggaaaaagctttttggtaaaatacacaagagctatataatacacatatactttctatattacatagagagaagagagaggaggctcatgaagtggcttgagcttcctcagagctactagcagagacttggccagtaccagtagcagtgtggccctcttcctcttcttcttcttcttcatcgcagaagatgctctcctcgcttgtgtccgagaacgcatcttcctcgtcttcttcgctaacttcttcttcgtttctcttctttctcaacactttaatgccttttctttgaatagaaagccttctccggtttctcgctttcctttttcctctgggaaactcttctccttgagagtgatgttcatgcagacggttccttcctcccttactgctttcgttctcatatgaatcctactctgctgcattgagcttacgtttctttatcccggaattagtcttggggccacgatcaaccagacgagcccactcatgcctattcctcacgcaatcaagaacagcccgtgaatggcttgaatatgcatattgttccccgctgggttt

SEQ ID NO: 99026 - DNA, 545 bp, Arabidopsis thaliana columbia
  unsure (1)..(545): unsure at all n locations
nnnnnnnnnnnnnnnnnnnnnnnnnnnnnnnnnnnnnnnnnnnnnnnnnnnnnnnnnnnnnnnnnnnnnnnnnnnnnnnnnnnnnnnnnnnaaaataatccgaaagtaaaatagttatttcggatatttacctatattagaaacaaacattcaacacaagctcagttcgtgaattggagaggtctctgactcaatgggagagatcacggactctttaataagttggagtcttttctttacaaatacaaaagatctattagatttcatcgttctgtgagttctctctctcaccacttgtcaaatgcatttccctgcgtgcagttaaaaatctcccatagttttaatcaaaagccatatagtttcacagaaggccaagcgtcttcagctgctggacatgctcagttggtaaagccgggggagaccattctgaccccggcatttcgccatctacatcctcgaccacatactcctttgttagcattcttttggcgagaatgtggtaatggcgctgccaaatgcgctgtccaaccatggttgcaaccaat

SEQ ID NO: 99027 - DNA, 872 bp, Arabidopsis thaliana columbia
  unsure (1)..(872): unsure at all n locations
nnnnnnnnnnnnnnnnnnnnnnnnnnnnnnnnnnnnnnnnnnnnnnnnnnnnnnnnnnnnnnnnnnnnnnnctttttttttttttttttcaaactcaaatgataatctctcttttcttttgtatatctttagagagattacacttcttgtcctatattatatatatcatatcatatcatattacatcatcttgtgtggtccatcatcacataacacattaaaactagagaaatggtacaacaatcttccttctttctcttctcctatctcttacatcaaatttcctgctttttattttttacacctctgcatctttttggttattaagggtctctctattttatcagtttttttcttttcttacttcacttcctgtttatatcccaacacgacaggttggtccacccctaccgggtaacattccaatcgccggtaaccttggcatttggtagttgaaagagttgaaggagtcggagagtgtagaaggagtagaattatcatcattatcagaagaaggcgaccacagatccgatccgttattgtcagcagaatcagcaaacagaagcaaatgatgagcgggcgatgcaaacggactatctggcaagctatcctccaacctctctggtagattcattgtatcatcatcagatccttctttagaacttcctttccctttctctcctccatcatactctctcttgatcacggacaatgggcgtggagatataagtgattggctgaaaggattcggagagtgaatgttggtaggggaattgagttggaaatgcntcttgacgtcaagaagctgnagattcatcagccttctgctctgaagttcnagaatctcttcttcaaacttactcctccacaac

SEQ ID NO: 99028 - DNA, 549 bp, Arabidopsis thaliana columbia
atgattcttcagcgtctctacgactcactatttggaaagctggtcacgcctgcaggtaccggtccggaattcccgggtcgacccacgcgtccggaggatagagcacatccctggccgatatctttccttcgcggtgcaatataacggctcgtaccatctctgactgcatttggatcttgcatctaccttgactctcaacgttggctgatgagatggacaacttccgaaggattgatgaccacttctcttgcacatgtccttcgcaattgcatggagatggaactggaggaggcaaagcctgaacagggaacagtcgtggatggagggagactagcagggagccagatgagctggccctatatctgctagttgctctcatctgattttacaaccatgcttgtgctgtgtacttttgccatattatgacaataacttgtaagatgcctattgatatagcacacacaggcatgtgtgcgcaatctatgtgcgtgtgaaggagacactgtttaagtttcaatgacgaggcgttcgtcatcaagaacttaccta

SEQ ID NO: 99029 - DNA, 608 bp, Arabidopsis thaliana columbia
  unsure (1)..(608): unsure at all n locations
atgatctnnnnnnnnnnnnatcgactcaccttagggaaagctcgtacgcctgcaggtaccggtccggaattcccgggtcgacccacgcgtccggctcactaaccctaaaaaaagtaactctctcactcactcttcttcatcataccgaaaaaaatccaatggcttctttggaaaatccagcaatcgattcttcaagcgaatttgagagttcttctgaagagatctcttcttctaaagaaagcaaacccaaagaagctcccgtcactgttccgtcaacaaaaaccctaaactctccttccgccgccgtggcagtttctgatgactcagagtcagagaagcagtcattcgtcttaaccaggcggaagaagaaagaaggtgctgctgaatcaccggcagtgaagtcagggaagaaagaaggtgctgctgaatcaccggcagtgaagtcagggaataacgaaggtgctactgaatcaccggcggtgaagtcagggaagaagcgagctagcgaaggaaccacgtcaagggacatgcatgtcaaaagaattaagaaagagggcgataacaaaaaggggcatgctcagagagtatggagtgaagaagacgagatc

SEQ ID NO: 99030 - DNA, 670 bp, Arabidopsis thaliana columbia
  unsure (1)..(670): unsure at all n locations
atacgactcaccttagggagaagcacgtacgcctgcaggtaccggtccggaattcccgggtcgacccacgcgtccgagaagctgtacgagtcagtgaagcaattgcgctgggcactgttgttgatacatacaattcccttcctgagtttctgagatctcttgtcttcaatggaaatgggaatggccctcttacaatgagtaccgcggaacttcaaagtacgcttgagcttcgggatcaggtctccagaatctggggccttcttcaatcttcagaaagctttgatcctgctattttgcaaccaatactacaggtgttacaacaaccagaggcacgaagacttggaggacgtgttgcaggcggtgtaggccaacgtcttgcagctcggtttctgcaacaacttcttcgagccacaacaccatcttctgcaccatccccataggtcctcttttcttctcagtgaaatggtaaattgtatattaaggcgagacactcgcaaaccacagaattgtttcatgttacagtaatatagtatcattctttctctttgtaaaaaaaaaaaaaaagggcgaccgctctagaggatccaagctnnnnnnnnnnnnnnnnnnnnnnnnnnnnnnnnnnnnnnnnnnnnnnnnnnnnnnnnnnnnnnnnngtagctggatatca

SEQ ID NO: 99031 - DNA, 745 bp, Arabidopsis thaliana columbia
  unsure (1)..(745): unsure at all n locations
aggtttggcactctacgcagatccaaatttcaaagtactagctgcttcatacccatattntgcaaaaaggcttctcactgatccaaacccgtatctaagagatgcccttatcgagctactattcaaagacggaaaatttaggtggaatagactcgagaaccttctacaacagggaagtaaagatagagacttctcagcaaaggatgctctacaaccagttttgaagcttttgctgggtccaaatggcgaagaccttcgattgttaggtatttaaagaagctgtacgagtcagtgaagcaattgcgctgggcactgttgttgatacatacaattcccttcctgagtttctgagatctcttgtcttcaatggaaatgggaatggccctcttacaatgagtaccgcggaacttcaaagtacgcttgagcttcgggatcaggtctccagaatctggggccttcttcaatcttcagaaagctttgatcctgctattttgcaaccaatactacaggtgttacaacaaccagaggcacgaagacttggaggacgtgttgcaggcggtgtaggccaacgtcttgcagctcggtttctgcaacaacttcttcgagccacaacaccatcttctgcaccatccccataggtcctcttttcttctcagtgaaatggtaaattgtatattaaggcgagacactcgcggccgcgaattcgatatcaagcttatcgatacagtcgacctcgagggggggc

SEQ ID NO: 99032 - DNA, 544 bp, Arabidopsis thaliana columbia
  unsure (1)..(544): unsure at all n locations
nnnnnnnnnnnnnnnnnnnnnnnnnnnnnnnnnnnnnnnnnnnnnnnnnnnnnnnnnnnnnnnnnnnnnnnctttttttgtttttttgatgatcacaaaatcccataccataggcaaataaagtcacacaccaaagatttgacaaacgcagacacacacttttgagctcacacacacaaaactctcgccacacgaatgaaactattaacaaaagacattttgagacatttttttcataagctctctttctttaccctaatcaaaatgcctaacggctcttggtgtcgccgccaccaccgtagctcctcctcctcctcctctaaccgttgtatccctattccggtatacttcagtaaacgattgtctcggcgatgacgaaagagacttggaaactctcggagacgaaactgattctctctgtgacggacttcgccaaaatccagctccgtaaaacctattccacatctctttctctaatgctaacaccgcctcatcatcttcatcagtctcctcctccgtcgtaaaccccgtcgctaccgatttt

SEQ ID NO: 99033 - DNA, 403 bp, Arabidopsis thaliana columbia
agcctacctaatctaagcagggccgtccgctcccaccaaaggacaaatctctctcccgcactcatctctgttcattggttcctcccaaaaaatatcaatcaaatcggaataaactatacgaatcctccaatataaagctccaccctttctctttctatctctctctctccattgttgactgtctctcttccctcgtaaacatcgctgtctctaaagatggcctctctctcaggcctatactcttcttctccatctctcaaacctgccaaaaaccattcctttaaagcattgccggcgcaatctcgagattccttctctttcccacatacctccaaacccaccaatctaccggtgactctctcctcggctcgttctgtggcacgcgacatttctcatgcggatt

SEQ ID NO: 99034 - DNA, 607 bp, Arabidopsis thaliana columbia
gccggacctaatacgacttacttagggaaagctggtacgcctgcaggtaccggtccggaattcccgggtcgacccacgcgtccgcccacgcgtccgcccacgcgtccgcggacgcgtggggaatcctccaatataaagctccaccctttctctttctatctctctctctccattgttgactgtctctcttccctcgtaaacatcgctgtctctaaagatggcctctctctcaggcctatactcttcttctccatctctcaaacctgccaaaaaccattcctttaaagcattgccggcgcaatctcgagattccttctctttcccacatacctccaaacccaccaatctaccgttgactctctcctcggctcgttctgtggcacgcgacatttctcatgcggattcgaagaaagagcttcttaaggatccggatgcgttgtggaagcgatacctcgattggttttatcagcagaaagagcttgggttgtatctggatattagtcgggtcggatttaccgatgagtttgtggctgaaatggagccaaggtttcaagctgcgtttaaggctatggaggatcttgaaaaagggtctatagcgaatcctgat

SEQ ID NO: 99035 - DNA, 866 bp, Arabidopsis thaliana columbia
  unsure (1)..(866): unsure at all n locations
caacagtttttgtctcattcccgatctgaatacaacgacgacgagccaaggcttcaactttcagcggcgatgaaactgctcctttcttcggattccttggcgctgccgccgctctcgttttctcctgtatgggagcagcgtacgggacagcgaagagcggggttggtgtagcgtcgatgggtgtgatgagaccagagcttgtgatgaaatcgattgttcctgttgttatggctggagttttaggtatttatggtttgatcattgctgttatcatcagtaccggaatcaaccctaaggccaagtcttactatctattcgatggctatgctcatctctcttccggtcttgcttgtggtctcgctggtctctccgccggtatggctattggaattgtcggcgatgccggtgttagagcgaatgcacaacaacctaagttgtttgtgggaatgattctgattctcatctttgctgaagcacttgccctgtacggtctcattgttggtatcatcctctcttctcgagctggtcagtctagagccgagtgaaatccagagtatctctctctcttatcggctacagtccttgtaatgttttggtatattttactctgttttcttttgtggtatgtttttgagtttctcatgaaaacaagcaacatgggtgaaatttatttgacttttgtttcaaaacccatttcttttctttttcatttgcacactatatatggatacatcaataagtaataaaatatgacggttccatggaaaaaaaaaaaaaaaaaaaaaaaaaaagggcggccgctctagaggatccaagctacgtacgcgtgcagtgcgacgtcatagatctnctatagtgcgacctaa

SEQ ID NO: 99036 - DNA, 565 bp, Arabidopsis thaliana columbia
  unsure (1)..(565): unsure at all n locations
ttaggtgccactatangaagatcttgacgtcgcctgcacgcgtacgtaagcttggatcctctagagcggccgccctttggtttttttttttttttttttttttatttcaaacatttatttcctctttatggttcaaaattattaggagtatcacaatatatttatgtatttaatttctctccttatgttttggcaaacacaaaaaaaaaaatatcttgtataaactgatacaaacccgtttcttatttctctctcgttttctccaaaagacttatcaagccgcaccatcacaaagcttgagagaaaacgaaagactcgttaatcaagaaaactctcagccaaaaccttcaaagtcaatttgattaaactaaacacatcaatcaaatcccctcgtttctcaaaacccatatctccttttcttctctcaccttgttttagccgtaaagtaatcaccttttcaacttctcaaaagccctctgtttctctcatctccctctctctgacgatgaaagagtattggacatctttggcttctctactcggcgttttagccttttgccaaagc

SEQ ID NO: 99037 - DNA, 565 bp, Arabidopsis thaliana columbia
atagaagagctttgacgtcgcatgcacgcgtacgtaagcttggatcctctagagcggccgtccttttttttttttttttcttttaataactttaattacgatttgtttttaaaatttattacaaacgataaacagcttgatagctctttcgatatggttatggccttatgggtagaaccggggtaactagatatggaaaatatggagaaatctttagatttttactgccaaagggttgtctgattaaaatgaatccgggaatccgtttttacattcctaaaatgatgagaagaataccaaatcgaatttccgacagaaccaacgcagcactaaggtgacaaaacgagatatataacttactccctttcagcttccatgggcacaccacactctgcaagttttgatgattggttgggttgattcaggaggaagtacattgtcgtcgctggttggtttctcaggggatctcctctctggtaagtcgcactggtttgttttgtagatacacaatctctctgtctgctacatttatgagatgctgctctgatccttcttcatctgacac

SEQ ID NO: 99038 - DNA, 785 bp, Arabidopsis thaliana columbia
cgacggccagtgaattgatttagggtgcccctataaaaaagctatgacttggcatgcacgcgtaagaaagcttggatcctctaaagcggccgcccttttagagaggtttagagaatatgctttttttttatccgggtgaataagttttcatacaaaagatagtttgatcaacaagtattttgatatatacggtttgacctgattgatttggatctgtgttccaaaaggtcacaagacaacgaggaataacataaactcattcatacgtcccattttcaagttcctctgagaaatggaacaaattcggtgtgatatgttttgattgactccacagcagcaacagcattagcttcttcttcgggataataagcgatcggatcagatagatgcggttctggaatcttcagcaccccttcgagcatggcgtggaggcagtaagctgcatatgttacatgatacccgccttcttgcaccataagcaaccttccatggctgtgctcctctgcaactcccctcattatctgcccaatccttctgtatccattcattgtcaggctttgtctcccgtttggatcaaaagcgctagagtcttgaccaacaacgagaacaaccatatcgggtccaaaccttctaactgcaggaaccaccagctcattcatggcatattcatatccccggtcacccgtgccattcggtaaagggacattcagacggacgcgtgggtcgacccgggaattccggaccggtacctgcaggcgtaccagctttccctatagtgaggcgga

SEQ ID NO: 99039 - DNA, 863 bp, Arabidopsis thaliana columbia
  unsure (1)..(863): unsure at all n locations
nnnnnnnnnnnnnnnnnnnnnnnnnnnnnnnnnnnnnncgtacgtaagcttggatcctctagagcggccgtcctttgttttttttatgtactcaaatctttattcaatgtaaaaacaaaatcctgaaaacagcaaagtttttcttgtctctttaaagcattacagccaatacacatataagagagtattacttttttctcttcctttctataaatggcaaaacaaaagcaggaaggagaagaactaggaggaacaagaaagcatgcagacgcctggcctgtaagcccaggcaggaggcaaccgagcatatttctccatccccggctgttcctcataaggacgtttcattagacggatcaaattgttgacttctgagaaatcgccttgttcagctgcatctattgcactttggcacagatagttcctcagaatgtactttgggttcactgaatccattcttgcttttctttcttcatctgatacctcactaccacccacctcttgtatatagcttctcatccatttgatccatgcttcttttctctcctttccgatgtccagagcacagctttcaaggggttcaataactcattttcgggtgtgctgggattgtgcttttacatttgcaagaagccggaagaagttggtgtaatcaactttatcaacagacatattgttcaaaagtttgctaatgacctccttgttatacttggtaagaccaagcttcttagacattatggcttgataccatccatgaatttatcaccgtacctctccatggcgtaattcgccnccttttgatttatcagttgagcaaccgccagagtcttagaaaattgagcaatattccacaagccgatgtc

SEQ ID NO: 99040 - DNA, 683 bp, Arabidopsis thaliana columbia
tgatactccagctccctacgactcactatagggaaagctggcacgcctgcaggtaccggtccggaattcccgggtccggagatatgaatctcttctttctctggatttgaaagttcgataaaaatctactgatacatcgacttctggaagcgatctcgatctctctagaattgtttcgacgacgaagatgaagaagattcaaattggtgcggtggcgctattggtgtttctatctgtggcctctctctttgaaatcggattggcttctccgaacacagttcctgctttcctctggtctccgcatctccagtctgctaatggtgaattggatgaggctgtaaattatcaggtcatgtctgcaaaggatctagttggttctgttttcactcaaggaggttggtcaaactttctgtgctcagagaagaagcttgagcaacctgttgatgttgcacttgtgttcataggcagagagttactgtcttctgatgtttcttcaaaaaggaacctcagatcctgcccttgttaacacattgaataatctttttacaggttccaacttctcattggcattcccatatattgctgctccagaggaagaaaggatggagaatttgctactttcaaggcttaaagaagcttgtcccaacaattgaggagtcagcaatatcgtgttctcagattcg

SEQ ID NO: 99041 - DNA, 409 bp, Arabidopsis thaliana columbia
gggagcaacagtcatcaaagagccaatggcttcttcaggtttcagcggcgatgaaactgcgcctttcttcggattcctcggcgccgccgctgcgctcgttttctcctgtatgggagcagcgtacgggacggcgaagagtggagttggagttgcgtcgatgggaatgattctgattctcatctttgcggaagcgcttgcactgtatggtctcattgttggtatcatcctctcatctcgagctggtcagtctagagctgagtgaaagaagtggagacttattgttattatcatcatgtctcatatgagaagtctcatgtgatgtgtaacttctcctttcagttctttttcgtgagtttgagttctgttattattagacacacttgtgtaacttgggtgaaattatatgact

SEQ ID NO: 99042 - DNA, 707 bp, Arabidopsis thaliana columbia
gggtcgacgcaagcctctagactacatcggagcaacagtcatcaaagagccaatggcttcttcaggtttcagcggcgatgaaactgcgcctttcttcggattcctcggcgccgccgctgcgctcgttttctcctgtatgggagcagcgtacgggacggcgaagagtggagttggagttgcgtcgatgggagtgatgagacctgaacttgttatgaaatcgattgttcctgttgtcatggctggtgtgttaggtatttatggtttgatcatcgctgttatcatcagtactgggattaaccccaaggccaagtcttattacctattcgatggctatgctcatctctcttctgggctagcttgtggtcttgctggtctctctgctggtatggctattggaatcgtcggtgatgctggtgttagagcgaatgcgcaacaaccgaagctgtttgtgggaatgattctgattctcatctttgcggaagcgcttgcactgtatggtctcattgttggtatcatcctctcatctcgagctggtcagtctagagctgagtgaaagaagtggagacttattgttattatcatcatgtctcatatgagaagtttcatgtgatgtgtagcttctcctttcagttctttttcgtgagtttgagttctgttattattagacacacttgtgtaacttgggtgaaattatatgactcggtatc

SEQ ID NO: 99043 - DNA, 530 bp, Arabidopsis thaliana columbia
  unsure (1)..(530): unsure at all n locations
cagctannnnnnnnnnnnnnnnnnnnnnnnnnnnnnnnnnnnnnnnnnnnnnnnnnnnnnnnnnnnnnnnnnnccacgcgtgcgcgaatcttcaagaacaaagagagagagagagagaaaatttaatggcgttagcgaataacttaacggcgatactcaacttactagcgttactctgttccataccaataacggcgtcaggtatatggctagcttcaaagccagacaacgagtgtgtcaatctcctccgttggcccgttgtcgtcctcggcgttctcatcctcgtcgtctccgccacaggcttcatcggcgcctacaagtacaaggaaactctactggcggtttacttgtgctgtatggcgatattgatcggacttttgctggtggttcttatatttgcattcgtcgtgacccggcccgatggatcgtatcgggttccgggtagaggttataaagagtataggcttgaagggttctcgaattggcttaaggagaacgttgtggattccaagaactggggaaggctaagg

SEQ ID NO: 99044 - DNA, 650 bp, Arabidopsis thaliana columbia
  unsure (1)..(650): unsure at all n locations
nnnnnnnnnnnnnnnnnnnnnnnnnnnnnnnnnnnnnnnnnnnnnnnnnnnnnnnnnnnnnnnnnnnnnnnctttttttttttttttgttgtaccaatctttattaatcaactttcaaaccagttttaagatgcagatcatcactcagatattacaaaagctttgaatgcaagaatgaattttgctatacgaaaacaaaagacaaaacagaaaaagaaaaaaagaaaaaaagtattcccctgaaagacaaaatgggtataagagtttgtaagaaaaaaacagagaaatattttcagttggtcaatttctcaacgatcttggaaagagctgaatatgagccaatgactgaagatattgctcctactatgatgattaagacacacaacatcatctgggtcggggtaacttttctccttacaatgctcaagaaacaagctggaggaagtattagagtgacgagcatagtcaaccaacggtcccaatccaatggccatggcaaggcccaaaggagggggatagccgagaccaccaagcagagttgaggagacccattaggggtctaatgccgatggnggtncccatggtgncctggaatgccttggtggnncaacccccccaggcncttgntnctggggnatgggcaancttga

SEQ ID NO: 99045 - DNA, 641 bp, Arabidopsis thaliana columbia
  unsure (1)..(641): unsure at all n locations
cactatagnaatagctatgacgtcgcatgcacgcgtacgtaagcttggatcctctagagcggccgccctttttttttttttttgataaaaaaaagtagatgtttctatttcttcatttgttcataaacaaaatacatatatatatagccatcccaggctcatcatggacttatctattaattagtatttttttattaataatatataagttataactccttcctctgtagccaatcaatgagctttaagcagagtttacagtatatggaatcaatagagctttccactggcgaaatctgatatcagcttcacaatgtgtttaggattctcaacatgtggaagatgaccggaatctggtacttcccgcaaaaccgcatttgctagctcacacaacaatttaactgagagctggttgctaactatctgatcgttctcactgcataccacgagcgtcttatggtcaatatgtttgatgtgtgacgcgacgttatagcccccgctaatcataaaatcgaccatagcatcctcccaccacggcatttgacaatgtaaccgaccaatattagtccaatctatgttctcggataagggcgaggaacaaaaggctaggacattggccaaaaggcgcagagggaatgact

SEQ ID NO: 99046 - DNA, 962 bp, Arabidopsis thaliana columbia
ttgttgagagaaggcaaaagagaatgatcaagaatcgggaatccgctgctagatcaagggctcgaaaacaggcttataccttggaactggaagctgagattgaaagtctcaagctagtgaatcaagatttgcagaagaaacaggctgaaataatgaaaacccataatagtgagctaaaggaattttcgaagcagcctccattgctggccaaaagacaatgcttgagaagaacccttaccggtccgtggtaagaaggtgaagtcaaagcaagaagaacctgctaatgtaatacaggaccactcaaaaggaagacactgggagagtaatatgtaatagaagatagtgctactgtacaggagaaattacagagacgcttacaatgtagaaatcttttgagctgaatttaactaagagtgcagtctgtgtagagtatgagagctttcaatatgaattcataattttcataaacatatgtaaaactttcagatttagctatagagaagatgtgactaactcagaaagaaaatccgttaattggagagtgaggtaaactccggctgtaatgtgacctggaagtagtactagacgatggaccaaagatccgggaatcacctctttgaattctcaaattgcttctcttcctactatcccagcctatctcttcttcaaccgctttagcaaatgcgctatgcaccggatcacagctttcacacaacagcctcaagacttgcttaattgatggcctagaccggccttctttctcggtacacaatctcacaaccgtcacaactgcatcaagttgttttcctccagcatcattaatagagtctttgattctcgggtctaccaactcgaggtgttttgatttcgccaacaaaaaccgctgagacatttccacaaggttcctaccttcatcaactgctcttctcccggttatgagctcagcaacacaactccgtagt

SEQ ID NO: 99047 - DNA, 594 bp, Arabidopsis thaliana columbia
cactatagctgagctatgacgccgcatgcacgcgtacgtaagcattggatcctctagagcggccgccctttctttttttttttttgaaaatggaagagaaactttctcatttgaagaatcactaaattcgcttctggttttcacatccagaggcaagcaagcccaaagccgtacagaatcatcagttagaaaagagataagttggattggatccccagactccattggaaaaagataggctcctaggaactccgggctctgtccctggacgtcccaagatgaccttacctcaactttgtaggtgaaacgcatctctattcgagagcttgggctctctctttacggattgtccctgcataaggccaacccagagctgggactgtatatatgtgtgctcaactatgaggaacctacaagggaagggaatgcctatcttcagatgtgatatcagctgccaacttctgacaaaacggatgtgctggcccatcagcctaagtaagaacacacaccgagcgacatgggaaatgctgaagaatgaacccgaggggattgatcatgacagtaatattccatggctatgcagtggaacgaagt

SEQ ID NO: 99048 - DNA, 424 bp, Arabidopsis thaliana columbia
ctttctctttcattttatatacccttttcctctctttctccaaatctctgaaaattttcaccagaatctctgttctttttttcaccagaatctctctgtttaaaataataggtgatgatgatggatgagtttatggatcttagaccagtgaagtacacagagcacaagactgttatcagaaagtacactaaaaagtcgtctatggagaggaagaccagtgttcgtgactcggccaggttggttcgggtctcaatgacggatcgtgacgccactgattcatcaagcgacgaggaagagtttctgttccctcgaagacgtgtcaagagattgattaacgagatcagagtcgagcctagcagctcttccaccggcgacgtctcggcttctccgacgaaggaccggaaaagaatcaacgttgattcta

SEQ ID NO: 99049 - DNA, 614 bp, Arabidopsis thaliana columbia
  unsure (1)..(614): unsure at all n locations
gannnnnnnnnnnnnnnnnnnnnnnnnnnnnnnnnnnnnnnnnnnnnnnnnnnnnnnnnnnnnnnnncttttttttttttttttagaaacacacacataagaatgtatttgttttgaacaagcacacacaaataagagaatccaaagtcttacaacacaaattagtaaaaagactaaagagttttcaaacacatcagtaaataaaacttaaacattggaactgtgcatagtgttttttttttgtcttgagcatcttcgtttcaaacccgctctttgttcttcgatttctccactgcacctggagctaagccaatagaatcagaacccttcatgatcttcagtttctggcatgtttcagtaaatatctcccatggaacatcgccaacaagcatccaatcaccgtctttatcttcataagtaagcacaaattctgatccatgaagaagatccttcagtttaatctcgctcattctttccctcccttgagcaccatgaagaccacattgaccaagggtgaagcagctgaacattttctcaagtgcagaagacaactgttgataggaagtgtaagttctcaagtcgacctttctcagatacggagcaccatccatgct

SEQ ID NO: 99050 - DNA, 700 bp, Arabidopsis thaliana columbia
cgacagaaggggggggaagacaattccgagaaaatagagagtagagagatcctaaagagtcaaaagaggtcaggtgattgattaacccgttgaataatctccttctcccgttgaatcgggtcgaaatagttgaactttaagccaaaccctagcttgaggaggaagaggaatggtcggcgtgatgaacagattgaggaatctggacgcttaccctaaaatcaatgaagatttctacaggcgtactctttctggtggtgttatcaccctcgcctcttctattgtcatgctaattctcttcttctccgagcttcagctgtacattcacccggttactgagactcagcttcgtgttgatacatcaagaggagagaagctacggattaattttgatgttacattccctgcgcttcaatgttcgattattagtcttgattccatggatatcagtggggagaggcaccttgatgtgcgacatgacattattaaaaggagattagactcttctggcaatgtcatcgaggcaaaacaagacggaattggtcatactaagattgataaacctttacaaaaacatggtggaaggttggaacacaatgaaacatactgtggttcctgttttggagcagaagcgtcagatgatgcttgttgtaattcatgtgacgaagttcgcgaagcttaccgaaagaaaggttgggccctc

SEQ ID NO: 99051 - DNA, 595 bp, Arabidopsis thaliana columbia
tgaatgaactgcactatagtaagagctatgacctcgcctgcacgcgtacgtaagcttggatcctctagagcggccgccctttttttttttttttcttaatgccctcgtcatcttcatcctcatgcttcatgactttcagctttcctttcagctcctgaatctccatttgaagtttctgcttgctgtctaactccttctcaagctgaaggatcttgttcaacgtctcctcttttttcctcttgtgttcatccacaagtcttaggacacgatcatctgtctttttctgctccagggaagccaactggagggagctgttcatgacatcgctcttcttcttgtcttcatcaagcttttgtctctccagttcagttaatgcttgcttcttgtccaattgtttggaccaaatcttcagattattcatcttagcctccagttcattggttagcctctctttttctctaaagatcctgtttattttctcccgcgataactcctgcattttttttgtttcttgtttataaactcggtccagctcgtctttctctatgagaaccctccgcagagagagcgttttctcattgttcatgtactggag

SEQ ID NO: 99052 - DNA, 396 bp, Arabidopsis thaliana columbia
ctccattcggcacaccaccaaacccgaatatgttctttactccaccaggttctgatagaggagggcctcctaactttcctgggtccaatatttctggacaaatgggacgtggaaatgccttctgataagacttcagggggatgggttcctcctcgaggtggtggacctcctggtaaagctccttctaggggagagcaaaatgactattcccagaactttgtggatactggaatgcggccccagaatttcattcgggagctggagcttaccaatgtggaagactaccccaagcttagagagctcatacagaagaaggatgagattgtatctaattctgcttctgcaccaatgtatctgaaaggcgacttgcatgaagttgagttatctcccgagtta

SEQ ID NO: 99053 - DNA, 464 bp, Arabidopsis thaliana columbia
gcccatctataaagaaaatacaaaccatggcaattccaaaagctcactactctttagcagttcttgtccttctctttgtcgtcgtttcgagtagccaaaaagtctgcaatccagaatgcaaggccaaagaacccttccactgcgataatactcatgcattcaaccgtagtggatttcccaaaaatttcacttttggtgcagctacttcggcttatcaaattgaaggtgcagcacatagagcacttaatggatgggactatttcacgcatagatatccagaaaaagtaccggatcgtagttcagcagatcttgcttgtgattcgtatgatctttataaggatgatgtcaaactgctaaaaagaatgaatgttcaagcataccgtctctcgatagcatggtcaagggtcttaccaaagggaagactgactgggggagtggacgagaatgggataacatactacaac

SEQ ID NO: 99054 - DNA, 873 bp, Arabidopsis thaliana columbia
  unsure (1)..(873): unsure at all n locations
atgatcctgccagcaacaatacgactcactttagggaaagctcgtacgcctgcaggtaccggtccggaattcccgggtcgacccacgcgtccgccctgattctcttggtaaatgtgagtctttgacccggatccgaatgggtgagaatttcctgaacgggtcaatcccaaaaggactattcggattacccaaattaactcaagtggagctccaagataattatctctccggagagttaccagtcgccggaggtgtctctgttaatcttggtcagatcagtttatcaaacaaccagctctcaggtccattacctccggcgatcgggaacttcaccggcgttcagaaacttcttcttgatggaaacaagttccaaggtcctattccttcagaggtagggaagcttcagcagctctcgaagattgatttcagccacaacttgttctccggtcgaatcgcgccggagattagtcgttgcaagctcttaacgtttgttgatctgagcagaaacgagctctccggtgaaatcccaaatgagatcactgctatgaagatattgaattacttgaacctgtcgagaaaccatctggttggatcaatccctggttcattctcgtcaatgcagagcttaacatctcttgatttctcttacaacaacctctncggtttagttccgggacaggacaattcagttacttcaactacacatcgttcttgggtaacctgatctctgtggccttatcttggtccttganagacggtgttgctaaaggaggcaccagaatcatagtanaggaccttatcnagctctatgaagtattgcttggtcttgactacttgtttgtcgattgcgttcgnggagtagccatatcaagc

SEQ ID NO: 99055 - DNA, 628 bp, Arabidopsis thaliana columbia
gacactatagatgtagcttgacgccgcatgcacgcgtacgtaagcttggatcctctagagcggccgcccttttctttttttttttttttttaaacccctagaaaccaatcaccatgtaaatgttcaataacccaattggtttgtgtacaaaggcatttttcctagacgacagaaatctatgggtacattacaactgaaaaagaaccattgtctctatccccaaactaaatcaatcaaattcgtcactcaaaactatgtagagagaatttctattccagctgtatttacatggaaacctaaaatgaaaaaaaaagaggttagaaaggcattgttgatgacgatggtataccagatggggtgtttatggaccggtttttctttctttctttctcagctgcggggatcatcattcaatggcaagagacatggaagtggccgtctcccaaaaaggaatcattgtcaattaaatcggctttcttcgttggaattgccagcttcctctgggtggtttttcaatgccgagctagaaaaagcctcgttctaacggaagcctttaacgacagtcattagtctacggtattgagcccgtgcctctggatattgagccatagacttcactcgggttaga

SEQ ID NO: 99056 - DNA, 625 bp, Arabidopsis thaliana columbia
  unsure (1)..(625): unsure at all n locations
nnnnnnnnnnnnnnnnnnnnnnnnnnnnnnnnnnnnnnnnnnnnnnnnnnnnnnnnnnnnnnnnnnnnnnnnnnnnnnnnnnnnnnnnnnnnnnggacaaacaagaaaatgtttattcatttatcgattgatcttattcatcaacatcttcgacatatttcttccataaccaatgctgtctccaaagaagataaacctcttcaatcggaacctgtttcgtctccggcaacagaaagtaaacgaagcttcccacccccaatataagtccggcgaataaaaggaatattccgtacttgagatggcacagcgacaccaggaaacactgcccgattagagccgtgaagaaaaggttcacgcacaccacaacgctctgaccggctgatcgagtctttagagggaaaagctcgctcggaactaaccatcccattggaccccagaatcgaccttcccccaatccaattagacggataaggcccacaggattcagaccgagcgattttggtagctccttaccttcccaaacttcaaggctagggttactcctactacaaccatgtaacaaaacatctccacgctagcttaaagaagaagaaaccttcttccaaatttatcagctgaatacata

SEQ ID NO: 99057 - DNA, 550 bp, Arabidopsis thaliana columbia
  unsure (1)..(550): unsure at all n locations
gctatcaaannggtaacagattttgatttttaacngttacgattttattttattttttgaggtcaaaacacagattttttatgcaaaccatttttgcccatccaaaagatacacataacaatggttttaccatacacaacaaagaacaaactatggacaataaagacaaagacaacacctaatcttaagaagacgagagaaacatacttggactgggtaaacaacagaggctacttgatagtgatgtagcggtttgtcccgtgcctagcccaatagtctttaagatcaacaggacacgagagatcatatccttctgctggataaacgggtgaggtaatctcgagaaaacggttccggctcattttccgaccgcccatccgagaaggcctcttgtttcggcacccgcgggaatgggtacgggggnaangggggttttgccacaaaacggnttgcaagcggcatttncccctttgtaaccggcgggtaannctgtgcccgaaaanggggaaggccggaccnngggtaccngggatcggcgnaccgagggttt

SEQ ID NO: 99058 - DNA, 692 bp, Arabidopsis thaliana columbia
  unsure (1)..(692): unsure at all n locations
ttttnnggggccntttccctttggggggccnccntnggnccngcccccnggtcccccaaccgggggggtttttttttnncgcctttgccnccttnaaccccnttgnccgnngtncaaaaatgnttgggttggttgcccccnctttggtggtaccgaaaggcccaaaggtcntgtcatcatgnantccctnccccaacaaaggatttggaaggtcacttgnccctgggggnccaaaaacctttggtaaaaggttccccattaccaatggttttcccatacacaaccaaaggacaagctttggccaatcaaggcaaagccaacacctaatcttaagaagccgagagaaacatacttggcctgtgtaaacaacagaggctacttgatagtgatgtagcggtttgtcccgtgcctagcccaatagtctttaagatcaacaggacacgagagatcatatccttctgctgataaacggctgagtaatctcgagaaaacgtttccgctcattttcctaccgcccatccgagaatgcctcttgtttggcatctgcggtaatggatactgggataaggtggttgtgcagcaacacgattgccagccgccatttccccatttgtaacaatgacgcgtagagcctgtgcacgaacacatgggtacaggcattgtcgtctcatcgaaggtgactaagttcaaag

SEQ ID NO: 99059 - DNA, 622 bp, Arabidopsis thaliana columbia
  unsure (1)..(622): unsure at all n locations
ntttaggacgnnnnnnnnnnnnnnnnnnnnnnnnnnnnnnnnnnnnnnnnnnnnnnnnnnnnnnnnnnnnnnnnnncttttttttttttttttggtctaaacttatttttattgagagactaaagacagaaagatacaacagtcgatacataaagtgtggacatcacaaccaaattgttcgtaaacacagaaactcccacatttttcttcctaatttcacagtatctctcagttactatactgaagatgaaaatataagagaaagtgagaaagagagaagacggtatagctaaactatagagagaagagctaaattaaagagctccatcattcatttgcagaggacgatccatattccaagcattgagactctctatggtcacagtttgtgttccattgttaaagacatacaaatgtgcattctcttttactgctttcactggatacactcttgatgttatcaccgttttacctaatgctccaaagctctcttactactgaatgatcaatcaaactccttagagagatccttccatcagccatatcaacatccacaaaaccagcaaacgatggtttatacatcctatcttttgcgagtaaacccgtgtcttgctttaacgac

SEQ ID NO: 99060 - DNA, 689 bp, Arabidopsis thaliana columbia
  unsure (1)..(689): unsure at all n locations
tncaacnccnncngctctacctggngtcctggncaaccccaggatnccncggngctggttttcagngcncgcaaagnccctggnccnaagggttcagngccnccaccaggcagctgtgattggagncncaatggggnccccatggaggatacttcaggaccttcattgaacatcctcatcaagctcatggctgttgagtctcttgtctttgctcccttcttcgccactcacggtggtatccttttcaagtacttctaaactcaatccgagggaagaagatgacgatgatgaagaagaagaagatgatgatggcgatcgattctaaactttcttttttaccattcttattttcgtttaccgtaggtggttaaaaaaccctttttttgttgatgaggctcatttaaagaaccaaccaaatgatgtttctttctctcactctctgtctttctgttttctttttgttctgtttagaatttagaaatccaccaagtattcggtcgagacttgttttagccgttactttctgctgcttatatttcctaaattggttgtcttcttcgagacataattggaatttattgttactgttaaaaaaaaaaaaaaaagggcggccgctctagaggatccaagcttacgtacgcgtgcatgggacgtcatagtaattctatagtgtcgtcctaaataaatcg

SEQ ID NO: 99061 - DNA, 583 bp, Arabidopsis thaliana columbia
  unsure (1)..(583): unsure at all n locations
gcccnncnanttctttttngccgctnatggncctggcctgnaatncctgggctacccacngngccgggtgttcagatcgccatatcagcatctaacacctggtggtgcctgggacaacgccaagaaatacatcgaggctggtgtatcagagcacgcaaggagccttggaccaaagggttcagagccacacaaggcagctgtgattggagacacaattggagacccattgaaggatacttcaggaccttcattgaacatcctcatcaagctcatggctgttgagtctcttgtctttgctcccttcttcgccactcacggtggtatccttttcaagtacttctaaactcaatccgagggaagaagatgacgatgatgaagaagaagaagatgatgatggcgatcgattctaaactttcttttttaccatccttattttcggttaaccgtagggggttaaaaaaccttttttgggtgatgaggcccattttaagaaccaaccaaatggtggttccttcccccaaaccccgggcttccggttcccctttggccccggttagaatttagaatcccccaagaatccggc

SEQ ID NO: 99062 - DNA, 853 bp, Arabidopsis thaliana columbia
tcctacgactcactatagggaacagctggtacgcctgcaggtaccggtccggaattcccgggtcgacccacgcgtccgccagactacgccacatgtgtcaagatctccaccgatgcttccatcaaggaaatgatacctcctggttgccttgtcatgctcacacctctcattgttggtgtcctctttggagttgagacccttctctggtgtcctcgccggattctcttgtatccggtgttcagatcgccatatcagcatctaacactggtggggcctgggacaacgccaagaaatacatcgaggctggtgtatcagagcacgcatagagccttggaccaaagggttcagagccacacaaggcagctgtgattggagacacaattggagacccattgaaggatacttcaggaccttcattgaacatcctcatcaagctcatggctgttgagtctcttgtctttgctcccttcttcgccactcacggtggtatccttttcaagtacttctaaactcaatccgagggaagaagatgacgatgatgaagaagaagaagatgatgatggcgatcgattctaaactttcttttttaccattcttattttcgtttcccccccccgggttaaaaaaccttttttgttgatgaggctcatttaaagaaccaaccaaatgatgtttcgttctctcactctcggtccttctgttttctttttgttctgtttagaatttagaaatccaccaagtattcggtcgaaaaaaaaaaaaaaaaacaccaaccccaagggcggccgctctagaggatccaagcttacgtacgcgtgcaggcgacgtcataactcttctatagtggtaccta

SEQ ID NO: 99063 - DNA, 2871 bp, Arabidopsis thaliana columbia
cttagatttatctttgagtcccgaaacatcgaggaacgccttcgaatccctctctctctgtgtgtgttctctgtgttctctctctcgcgcgaagcggttctctttcttttgtttatttgtttttatttgtttttctcttatacggaggagagaagatggtggcgcctgctttgttaccggagctctggacggagatccttgtaccgatttgtgcggtgattggtatcgccttttcgcttttccaatggtacgttgtatctcgcgtgaaactcacctctgacctcggcgcatcgtcttccggtggagctaacaatgggaagaatggatacggtgattatctaatcgaggaagaggaaggtgttaatgaccagagtgttgtcgctaagtgcgctgagattcagactgctatttccgaaggtgcaacttcattcctattcacggagtacaaatatgttggtgtcttcatgattttctttgctgctgttatctttgttttcctcggctctgttgagggattcagcactgataacaagccttgtacttacgacaccaccagaacctgcaagcctgcattggctactgcagctttcagtaccattgctttcgtgcttggtgctgttacctctgttctatctggtttccttgggatgaagattgctacatacgctaatgctaggaccactttggaggcgaggaaaggtgttggaaaggcgttcattgttgcattcaggtctggtgctgtgatgggtttccttcttgcagcgagtggtctattggtgctttacattactatcaatgtgttcaagatctattacggagatgactgggaaggtctttttgaggctattactggttatggtcttggtgggtcttccatggctctctttggccgtgttggtggtgggatctacactaaggctgctgatgtcggcgctgaccttgtcggtaaaattgagaggaatattccagaggatgatccaagaaacccagctgtcattgctgataatgtcggtgacaatgttggtgacattgctggtatgggatctgatctctttggatcatatgctgaagcatcatgcgctgctcttgttgttgcctcgatctcatctttcggaatcaaccacgacttcactgccatgtgctacccattgctcatcagttcaatgggaatcttggtttgtttgatcacaactctctttgccactgacttctttgagattaagcttgtcaaggagattgaaccagcattgaagaaccagctcattatctcaactgttattatgactgttggtattgctattgtgtcatgggttggcttaccgacctcctttaccatcttcaactttggaacacaaaaagttgtcaagaactggcagctattcctttgtgtttgtgttggtctttgggctggactcattattggtttcgtcactgagtactacactagtaacgcctacagccctgtgcaagatgttgcagattcatgcagaactggtgcagctaccaatgttatcttcggccttgctcttggttacaaatccgtcattattccaatctttgctattgctatcagtatattcgttagcttcagctttgctgctatgtatggtgttgctgttgctgctcttggtatgctcagtaccattgccactggtttggcaattgatgcttatggtcccatcagtgacaatgctggtggtattgctgaaatggctggaatgagccaccgcatccgtgaaagaactgatgctcttgatgccgctggaaacaccactgctgctattggaaagggatttgccattggctctgctgccctagtctccttggctctctttggtgcctttgtgagccgtgcagggatccacaccgtagatgttttgacccctaaagttatcattgggctccttgttggtgccatgcttccttactggttctctgccatgacaatgaagagtgtgggaagtgcagctcttaagatggttgaagaagttcgcaggcagttcaacaccatccctggacttatggaaggaaccgcaaaaccagactacgccacatgtgtcaagatctccaccgatgcttccatcaaggaaatgatacctcctggttgccttgtcatgctcacacctctcattgttggtttcttctttggagttgagaccctctctggtgtcctcgccggatctcttgtatccggtgttcagatcgccatatcagcatctaacactggtggtgcctgggacaacgccaagaaatacatcgaggctggtgtatcagagcacgcaaagagccttggaccaaagggttcagagccacacaaggcagctgtgattggagacacaattggagacccattgaaggatacttcaggaccttcattgaacatcctcatcaagctcatggctgttgagtctcttgtctttgctcccttcttcgccactcacggtggtatccttttcaagtacttctaaactcaatccgagggaagaagatgacgatgatgaagaagaagaagatgatgatggcgatcgattctaaactttcttttttaccattcttattttcgtttaccgtaggtggttaaaaaaccttttttgttgatgaggctcatttaaagaaccaaccaaatgatgtttctttctctcactctctgtctttctgttttctttttgttctgtttagaatttagaaatccaccaagtattcggtcgagacttgttttagccgttactttctgctgcttatatttcctaaattggttgtcttcttcgagacataattggaatttattgttactgttagtctaaaaaaaaaaaaaaaataaattaatatatttattatattttataaatattttataatttttaataatat

SEQ ID NO: 99064 - DNA, 1230 bp, Arabidopsis thaliana columbia
atcgactcacttagggaaagctggtacgcctgcaggtaccggtccggaattcccgggtcgacccacgcgtccggcctttcctatttacatttcgttaacacctaggttcttgtttcctaacaaaggctctactttttctttagttaactactatggctcatttcctcgagacacaggagcccctcgtattctccgggaagaaacgaaacgatcgcgatgacgaagacggtgacgccttggttgcgaagaaatcagcactggcggtgtgtgatgccgaccctgcagcggccatagcgaatatccgacatgagtttggggagcacgggggagtaaacatgtccatcgaagcctccgccaccttcaccgtcatggaaccggataccatgaggcggatgttcaccggagaactgggaccggacaacgacttctacgtatacagccgacacttcaaccccaccgtgctcaacctcagccgccagatggctgctctcgaaggcacccaagctgcctactgtacctctagcggtatgtcggcgatatcgtcagtgatgctgcaactgtgcagcagcggaggacacgtggtttcggcaagcacgctctacggagggacacacgctttgctctctcatttcttgccacggacatgtaacataaccacctccttcgttgacataacggaccatggcgccgtggcaaacgcgatcgttgagggtaggacacaggttctctactttgagtcggtggcaaacccgacgctgactgtggctgacatacctgagctgagccgtatggcacacgagaagggcgtgacggtggtggtggacaacacattcgcccccatggtgctgtctccggccaagcttggagcagatgtggtggttcacagtatctccaagttcatcagtggtggggctgacatcatcgcaggggccgtgtgtgggagtgagaatttggtgaaagagatgatggatcttcgtggcggatctctgatgcttctaggtcccaccatgaacgccaaggtggcttttcgagctctccccgcgaatattccccctcacttggggcctacgcatggagagagcacagccacagagcccaagtgtatgcggagagaatgagggatttgggcatgaaagtcatatatccagggctcgagacccacccgcagcacaagctattcaaagggatggtgaatagagactatggatacggaggattgctgtcgataga

SEQ ID NO: 99065 - DNA, 477 bp, Arabidopsis thaliana columbia
  unsure (1)..(477): unsure at all n locations
tacgacnctctataggggaacctggtacgcctgcaggtaccggtccggaatttccgggtcgacccacgcgcccggaaaccgaggaagcaagagaaaactccgccaatggatgatgatcccaactatgagtccaatccacatccattgttccttctcggtaatgccaatctctcctctcctgcaaatctttgggttccatatgttctaaaaaagaaagaagaagtggcccactcttacaccctgtgccttggagctttttataggatgttgtttttatgggctcatccaaactacgtttggatcagggggttggtgcccctcattcttttcttcttttaaagcgggagaaagctttggattcattgatttcacccgaacgccagacatatagattggttttgcttgctctgggtaaatatgtctaaaaaacccggttccagttttttttattttctaatatcccataatatatttatt

SEQ ID NO: 99066 - DNA, 408 bp, Arabidopsis thaliana columbia
accgtgcgataacctaaatttcaacgttgattccactttggcaagtttgtatctttcccactttgattccgatttgttaaagatttgcagattaaaagttttctttttgaagaaatccatgagtgcccaaatggaagaaccagagactctcggcaaaagaaaagaatctgaaagttcaaaacttcgttctgatgaaactccgacgccagaaccaagaacgaagcgtagaagtcttaaacgtgcttgtgtacatgaagttgctgttcctaatgattacacaccaacgaaagaagagacgattcatgggacgcttgataatcctgtcttcaatggagacatggccaagacttatccttttaagcttgacccttttcaaagtgtatctgtagcttgtttagagagaaaaga

SEQ ID NO: 99067 - DNA, 1004 bp, Arabidopsis thaliana columbia
  unsure (1)..(1004): unsure at all n locations
gattgtttaggacacactatagaagagtctatgacgtcgcctgcacgcgtacgtaagctcggaattcggctcgagcggctcgagcggctcgagcggctcgagcttctccaagaacctctctctctttctgcttctctatattttaacactttcttccgaatttgcccctcaagttttattttaattgctaaaatggctggaaccctagttaactccgccgggagattctcaccgggaaattgtattcttcctcaacagagaacagccagattctacagcggaaccgcgagatttcccaccggagctccgtcgtttaaggcttcagctcagacgcttaacgccgagccagctgtaacggaatccgttcgtcggagagtttctagcctctacgaattactgaaagtgaatgaaacggcgtccttgacggagatcaagacggcgtaccggagcttagctaaagtatatcatccagatgcgtcggaatcggacggtcgagattttatggagattcacaaagcttacgcgacacttgcggatccgactacaagagcgatttacgactcgacgcttagagtaccacggagacgggtacacgccggagcgatgggtcggtcggggcgggtttacgctacgacccggagatgggagacggatcagtgttggtgattttaggcttcctatgattttgcagcagcgaaagggcactttttgacttactttcccctttgattacgtttttttttttccttgtcatatctttggaaaattaaggggaaattaagtttaatccgctcctttttttttgtttttcttttaacttaagcagttaacaatgtataaagaagttatgagtagagaaatgtatatgattttagttttctcctttataatttttcttctaaacaaaaaaaaaaaaaaaagnnnnnnnnnnnnnnnnnnnnnnnnnnnnnnnnnnnnnnnnnnnnnnnnnnnnnnnnnnnnnnnnnnnnnnnnnnnnnaaattc

SEQ ID NO: 99068 - DNA, 616 bp, Arabidopsis thaliana columbia
  unsure (1)..(616): unsure at all n locations
nnnnnnnnnnnnnnnnnnnnnnnnnnnnnnnnnnnnnnnnnnnnnnnnnnnnnnnnnnnnnnnnnnnnnnnnnnnncttttttttttttttttaattgaactgtagaatttcctaatcaaggagcagtaataaaaaccacaaagagtatttattgttcaaggacattcttaaatcaaagtagattaattaaaagcttgtaagagttttctttcttctacttcttgttgatgctgaggatcttgtctctaagaagcctcctcatgattttaccagagagagatttagggattgaatccacaaaatggacggctctaaccttcttgtaatgagccacatttgctgcaacaaagttgagaatgtcttcttccttttctgtcgctttcggatttatcaccacgcaagccgccggaatctccccggcttcctcgtccggtaacggcacgacggcaacgtcttcaacggatggatgagtgagtagaatagcttcaagctcggccggagcaacctgaaaacctttgtatttaataagttctttgatacgatcaacgatgaagatgtctccatcatcatcgatgtaacctatgtctcctgtgtgaagccaaccttgttcatcaa

SEQ ID NO: 99069 - DNA, 801 bp, Arabidopsis thaliana columbia
  unsure (1)..(801): unsure at all n locations
ggtttcggaanttcccgggtgcgacccgcacgcgnntccggtctcattcnntccctcttcaatcccaatccagagtgtaagatagagacaannnctccatanntcttccgtcagagaggtgctcaaaaaaccgcaccaggtgtgtgtctccctttcttctgtccctcatcctcacataggtggcatgagacattgtattccaccagagggaaaatgcatatgatcacatactctgcttttgatttcaagttgtatatgatccgcaaagccgaatctgtaaatgcggctctcgacgtttctgtaccgctccgagaacccctcactgtccaggaagccgtgcggtactcattgctagcgggcggaaaacctgtgaggcctctgctctgcattgctgtctgcgagcttgtgggaggcgacgaggctactgccatgtcagctgcttgcgcggtcgagatgatccacacaagctctctcattcatgacgatcttccgtgcatggacaatgccgacctccgtagaggcaagcccaccaatcacaaggtatttggagaagacatggcggttttggccggtgatgcgcttcttgctttggcgtttgagcacatgacggttgtgtcgagtgggttggtcgcttccgagaggatgatccgggcagtggttgagctggcaagggccatagggacaaaagggttagtggcagggcaagtggttgacctaagcagcgaaagattgaatccacacgacgttggattggagcgtctagagttcatccacctccacaaaacggcggcgttgttggag

SEQ ID NO: 99070 - DNA, 740 bp, Arabidopsis thaliana columbia
  unsure (1)..(740): unsure at all n locations
atacgactcaccttagggaaagctcgtacgcctgcaggtaccggtccggaattcccgggtcgacccacgcgtccggaccgatccgccaacccgaaggttgtgccagtcaaacatgcttcaatcaggatccctcttggagagtttaggcatttcactcctggagcttggccgtgccaccatgatgcttcgtttgggacaaacacctgatgatgctgttgttgatgctggacctgcagtgttcatatcccctacagggcgaaatcccttgccgtcacactcctctcggctgggcacgagtattggaagcttacaagcaggaaccgcacattctaacccctttgcgggacaatcacttgcctctgccccaagaaatattgagataagaatacgtacaggatcttgggtgcccgccagtgggaccaaccagagagaggaaagtactacacaacaaacccctgggcagacaatcccttctacacccagcagcactactgatcctgccccctcaacgagaggtccatctgaacctnttcgaaatcctgtggccttagttatacctgtngtngctcgatatcagcagatatctnttggtggacgtagctctactggattggatggtgtacatcagcctgtnactgaatcttctaggcagccacagagcgtcgggtacttncaggaagaggagggtgatagcagtgcttntccctngggggtcgggnttttntttgnatttngggaaa

SEQ ID NO: 99071 - DNA, 678 bp, Arabidopsis thaliana columbia
  unsure (1)..(678): unsure at all n locations
ccggcannnnnnnnnnnnnnnnnnnnnnnnnnnnnnnnnnnnnnnnnnnnnnnnnnnnnnnnnnnnnnnnnnnccacgcgtccgagagattcttccggagggcgatctgccacaccaaatgctgtggaccagacgtctactcccttggcatcttcacaaccagcagcgattccagattcgttgacaaccttatctgaatatctgaatcatctcagacaagagtttgctgctaatggtagcaatgctaataacttgcaagattctgaaaattcagtgggcaatgtgcaagattctgcttctactactggagagagtcggattccaagaccatctcatttggcagaagtgctgcaatcaacaaggcaattgttgatcggtgaagtagcagattgcttatctaatctttcgaggcagctcgtggatcatgtaaatgtgaccgatccgccaacccgaaggttgtgccagtcaaacatgcttcaatcaggatccctcttggagagtttaggcatttcactcctggagcttggccgtgccaccatgatgcttcgtttgggacaaacacctgatgatgctgttgttgatgctggacctgcagtgttcatatccnctacagggcgaaatcccttgccggtctatctatntgttactttctttcaccattaccagtgtgtccacttg

SEQ ID NO: 99072 - DNA, 617 bp, Arabidopsis thaliana columbia
  unsure (1)..(617): unsure at all n locations
nnnnnnnnnnnnnnnnnnnnnnnnnnnnnnnnnnnnnnnnnnnnnnnnnnnnnnnnnnnnnnnnnnnnnnnnnnnnnnnnnnnnnnnnnnnnnnaccagatcgaagttcttttaggcttatagaaagatttacagactgcttatttccagagcgtcaaagggaacttttttacattagagacttgagatattcgtcgggaagtcgttgatcatcatcatagctggacattaaaggaactgttcttgcaatgttgagacaagcttttgagaatgatcttgagaatggacatggattcagacactccctggtcaagcgtttccatgctctagatatcttctgggcaacatgggttcttgcttcatcaacagttgatcccttgtcctcgttcaggtaacactctacatatgatccatcagttccatcttggttctcatccttggcccttccgagatcatcccaaagcctgagaattgtagctgcagatgatacaatccccgggttactctctattagttcgactttctcttttggtagttcttcgcctaccaggatataggcatgaagcatcactaaatgaacacctgaacttcacaccccattcttcatatactcttca

SEQ ID NO: 99073 - DNA, 560 bp, Arabidopsis thaliana columbia
  unsure (1)..(560): unsure at all n locations
ggccgattagggtttcttctgtttcactatatattaagtgtctccaactactgagatctctatcctctccgccctctgttcttctcattggccgccatggtgaagtactctcaagagcccgataatatcaccaaatcttgcaaggcgagaggagccgatctcagggtccacttcaagaacactagagaaacagcgcacgccataaggaagctaccattgaacaaggccaaaaggtacttggaagatgtcatagctcacaagcaagctatccccttcacccgtttctgtcgtggtgttggtcgtaccgctcaggcaaagaacaggcattcgaacggacaaggtcgctggcctgctaaatctgctcaattcgttcttgatcttctcaagaatgctgagagcaatgctgaggtcaaaggtttggatgtcgatgcccttttcatttctcacatccaagtgaaccaagcagcaaaacagaggagaaggacatatcgtgctcatggaagaatcaatccttacatgtcaaacccatgccacattgagtngattttgtcagagaaaga

SEQ ID NO: 99074 - DNA, 827 bp, Arabidopsis thaliana columbia
atagaagagctttgacgtcgcatgcacgcgtacgtaagctcggaattcggctcgaggaaacagcgcacgccataaggaagctaccattgaacaaggccaaaaggtacttggaagatgtcatagctcacaagcaagctatccccttcacccgtttctgtcgtggtgttggtcgtaccgctcaggcaaagaacaggcattcgaacggacaaggtcgctggcctgctaaatctgctcaattcgttcttgatcttctcaagaatgctgagagcaatgctgaggtcaaaggtttggatgtcgatgcccttttcatttctcacatccaagtgaaccaagcagcaaaacagaggagaaggacatatcgtgctcatggaagaatcaatccttacatgtcaaacccatgccacattgagttgattttgtcagagaaagaagagcctgtgaagaaagagccggagacacagttggcagcaaagtcaaagaaaggagcctcatcttaagctataacatagacagtctatttgtgctcacttgtgttacccttaatactttttgttagcttctctctataagaccaatactcaatttttaagtatgatgattatcggtttttggattgctgaaagaatctctctttatccaaaaaaaaaaaaaaaaaaaaaaaaaaaaaaaaaaaaaaaaaaaaaaaaaaaaaaaaaaaaaaaaaaaaaaaaaaaaaaaaaaaaaaaaaaaaaaaaaaaaagggggggccgttttaaaggatccaagtttacttccccgggcttgcaaggaaaaagtttttttttggggccccctaaattaaattaatg

SEQ ID NO: 99075 - DNA, 679 bp, Arabidopsis thaliana columbia
  unsure (1)..(679): unsure at all n locations
nnnnnnnnnnnnnnnnnnnnnnnnnnnnnnnnnnnnnnnnnnnnnnnnnnnnnnnnnnnnnnnnnnnnnnnnnnnnnnnnnnnnnnnnnnnnnngacagtaatcgaatcattggtacttaaactagagaatctattagtcgtgtaacaaaaattagaatacaagacttaaaggaagagagagtgtattgatttggtgagagaagacaaaacaagttcctgaaacatagagaagtgtctacattctcaagtggaactttctgttttctgtttcttggccttctcaatcagaggtttcaactgtttcttctcagcaagaagtttgaggaagttgaacagaaacggaatgtagttatgcttcctcctaatgttctctgttctccatttcatgaacttctcttcctccattacaatcttatcactcgcagcctcgatcccactgcctacctcagcaatcaacgcattaactgcttcctcttcgcttttgtccacacaagtattagcctgctgcaacagctgttccctctgcctttgaagctccttgagttccgcagtgtagatatccttcctgtttttaatgacagccaaaagattgaacctgatctcgctctgtgagtacctntcaatccgttcttggatcactggttgaaccatttgcagccactcgataccagtttggtc

SEQ ID NO: 99076 - DNA, 734 bp, Arabidopsis thaliana columbia
  unsure (1)..(734): unsure at all n locations
gattgagctgannnnnnnnnnnnnnnnctatgacgtcgaaggcacgcgtccgtaagctggaatcctttaaagcggcccccctttttttttttttttaactttgcagaatttccactaaaaaacttgatcaggagaacaatacacacacatagacacaactatgtataaaaggaattatgtacatcaaaaactataacaatgaaataggaataaaaaaacatacaaacaaacaacaaacaagttcatttttcttttgctgggattcgccggttgggagaaacttactcgccggtgaccacaaattaacacgccgacgaccacatcaaaagggtatcgaagaaactacaatttaggcaaagttgtgaaaagctgtgtgctataagaacatgttgattaccattagtaacaacattagagtgtttccaacaatgtccaaagatatcttctgcggtgctgcagcattctcactaaactgtcctgcgttcacatattcgcttcttccgctgctgctagtcgctgagacatttaccgacgtcgaacagtcgtagtttgcccatccgattctctgaccgaccagatcatagacaaagatcttgtctttaagaaccaaatctccaaggatcgttatcccttgattctgtatcctttgaaaaccgcggacgcgtggnnnnnnnnnnnnnnnnnnnnnnnnnnnnnnnnnnnnnnnnnnnnnnnnnnnnnnnnnnnnnnnnnnc

SEQ ID NO: 99077 - DNA, 416 bp, Arabidopsis thaliana columbia
tttttaaagggtacgagattcagtcatctccaatcccaaaattccacttctgtccacaaaacacaaagcgattctcgatctttgatcgtcccaccagatggccgggaacgattgggtaaacagttacttagaggcgattctcgacgtcggtcagggtcttgacgatgctcgctcttctccatcacttcttcttagggagagaggtcgattcactcccagccgttactttgttgaggaagttatcactggttacgatgagactgatcttcatagatcctgggttaaggctgttgctacgaggagtccacaagagaggaacacgaggttagagaatatgtgttggaggatctggaatcttgctcgtcaaaagaagcagcatgaggaaaaagaagcacagaggctggctaagcgcaggc

SEQ ID NO: 99078 - DNA, 583 bp, Arabidopsis thaliana columbia
gctaaagctggatgtcagtttataacagttctttttgttgatttcatgtccgaaaatgttcgtgccatcctagatcaagctgggtttgaaaaggttggtgtgtacaggatgtcagatgagaccattggttgttcacttgctgacgctgcttctgctcctgcttacttgaattatcttgaagctgcttctcgttctcctccttcactgcatgttgtttatataaatacatctttggagacaaaagcttttgctcatgagcttgtacctaccattacttgcacttcatctaatgttgtacagacgattctgcaggcgtttgctcaaatgccagagttaactgtttggtatggtcctgattcttacatgggagcgaatattgtaaagttattccagcagatgacattgatgactaatgaagaaatcgccaatattcaccctaaacacaagcttagattccattaaatcattgcttccccgtcttcactatttccaggaaggaacctgcattgtacatcatctattcggtcacgaggtagtggagagaataaagtacatgtactgtgacgcctttcttacagcacat

SEQ ID NO: 99079 - DNA, 1409 bp, Arabidopsis thaliana columbia
  unsure (1)..(1409): unsure at all n locations
atacgactcatatagggaaagacggtacgcctgcaggtaccggtccggaattccctgttgtcgacccacgcaaccccaaagccaaacaaagttttatagagaccttccatttctccctctcgtgacaaacgcaatttgcagagaagcaacagcaacaacaagaagaagaagaaaaagatttgagattactttgtatcgatttagctattcgagaaactcttgccgtttgaaagttttaattgttaaagatgtcgagttctatggaatgttctgagttcgtcggtagccggagatttactgggaagaagcctagcttctcacagacgtgtagtcgattgagtcagtatctaaaagagaacggtagctttggagatctgagcttaggaatggcatgcaagcctgatgtcaatggaactttaggcaactcacgtcagccgacaacaaccatgagtttattcccttgtgaagcttctaacatggattccatggttcaagatgttaaaccgacgaatctgtttcctaggcaaccaagcttttcttcctcatcttcctctcttccaaaggaagatgttttgaaaatgacacagactaccagatctgtgaaaccagagtctcaaactgcaccattgactatattctacgccgggcaagtgattgtattcaatgacttttctgctgagaaagccaaagaagtgatcaacttggcgagcaaaggcaccgctaatagcttagccaagaatcaaaccgatatcagaagcaacatcgctactatcgcaaaccaagttcctcatccaagaaaaaccacaacacaagagccaatccaatcctccccaacaccattgacagaacttcctttgctaaaaaagctttccttccccggtctgtgagaaaaaaaaggacagagttacgtcaaaggccccaatcccattattcgatccagccaaagcgtcttctaaccctctaaccccaggccaacatgtggtggctcggtttagcagctgaaatatgaatgctacccccctcaaaccgtaccaagaaattcttttggcgacgttgcttcaagacaagatataaaagctcctatcttcatgctttttgatttaagatacaaactactcaatgattaggaaacctcacaaatttgtatgtattgattagtgatcaactattgttagtattcgccacagtctgtttttctactaggtattgtcgcctgtctaaatccccctgctatgggttatctcaaaattagttttgtatgtaactaattttgtaagaacaataatttttgttgncgnnnnnnnnnnnnnnnnnnnnnnnnnnnnnnnnnnnnnnnnnnnnnnnnnnnnnnnnnnnnnnnnnnnnnnnnnnnnnnnnnnnnnnnnnnnnnnnnnnnnnnnnnnnnnnnn

SEQ ID NO: 99080 - DNA, 1062 bp, Arabidopsis thaliana columbia
cccgtgtatgtatatttggaaaggaaagaagtatcagtggaatacggaactgagatacgtcaacgttaaagcaacggggatggactaagagattgcaaaagtgaacatctgtgatcgtgccaccgtcatgtatgaagaagacatagtgcctctgttagtatagaaagagtaggtagccagtaagaggctgagaagatagtgtaaaagagtatactttgctacagaaagtagatcatatggtcgcgatatttaatgattcaatagtatgccaatagcctgagtacgtgtacgagagcatctatagaagcgtgttacttatatgaatgcaagaagggactgtcgatgggtacttgtttctatatatcctgggtgtagcttgatatatgaccgtactgcatagattccgctttgaagagcttgtaaccagtggactagctagcgctgaattaatataaagaagacagaagactaacaagatagtgatctttatgtttaccgcatgtaatactagtgaacgagagttgtattaacgaggttctcgtaaggaggtagtttagccgatccccggacacaagaagccaatccaatcctccccaacaccattgacagaacttcctattgctagaagagcttcacttcaccggttcttggagaagagaaaggacagagttacgtcaaaggcaccataccaattatgcgatccagccaaagcgtcttcaaaccctcaaaccacaggcaacatgtcgtggctcggtttagcagctgaaatatgaatgctaaccaccctcaagccgtaccaagaaattcttttgacgacgttgcttcaagacaagatataaaagctcctatcttcatgctttttgatttaagatacaaactactcaatgattaggaaacttcatatatttgtatgtattgattagtgatcaattattgttagtattcgttatagtctgtttttctactagttattgtcgcctgtctaaatccccttgctatgggttatctcaaaattagtttcgtatgtaactaattttgtaagaacaataatttttgttgtcg

SEQ ID NO: 99081 - DNA, 583 bp, Arabidopsis thaliana columbia
  unsure (1)..(583): unsure at all n locations
agcccgcgcgtccgcccacgcgtccgcccacgcgtccgcccacgcgtccgctctgtttcctctttctctctgtttcctctttctcagaactcagaagtagttgttgttttatttctgttgatcaaaaatggaatccaattcgtttttcttcgatccatctgcttcacacggcaacagcatgttcttccttgggaatctcaatcccgtcgtccaaggaggaggagcaagatcgatgatgaacatggaggaaacttcgaagcgaaggcccttctttagctcccctgaggatctctacgacgatgacttttacgacgaccagttgcctgaaaagaagcgtcgcctcactaccgaacaagtgcatctgctggagaaaagcttcgagacagagaacaagctagagcctgaacgcaagactcagcttgccaagaagctttgtctncagccaaggaaagtggctgtttggttncaaaatcgcccgagtcgtttgggaaaaaaaaanaagttttngggnggctnnnggttttttttaaggcccntttngggcccaattttttttaannnggggttccnttgtnntttggcc

SEQ ID NO: 99082 - DNA, 525 bp, Arabidopsis thaliana columbia
atgatatgccagctactaatcgactcacttagggaaagctggtacgcctgcaggtaccggtccggaattcccgggtcgacccacgcgtccgaaaaggtgcatctgctggagaaaagcttcgagacagagaacaagctagagcctgaacgcaagactcagcttgccaagaagcttggtctacagccaaggcaagtggctgtctggtttcagaatcgccgagctcgttggaaaacaaaacagcttgagagagactacgatcttctcaagtccacttacgaccaacttctttctaactacgactccatcgtcatggacaacgataagctcagatccgaggtacttatacatgggactattatttatctcaacaagattacaaattgaatgatttaccttaattggtccaaaggagaaaaataaaaaaagcatcaagtgaaaagagaatatgcttttcctatttttcaacacaagctgatggagagaatccatcatcatatatatataaattagaggagagactagaaa

SEQ ID NO: 99083 - DNA, 1504 bp, Arabidopsis thaliana columbia
  unsure (1)..(1504): unsure at all n locations
atgatactgccgggaannnnnnnnnnnnnnnnnnnnnnnnnnnnnnnnnnnnnnnnnnnnnnnnnnnnnnnccggaaattncccacgcgtgcacccacgcgtccggcaaaaacaaaaccaacaaggaacttgtctctctctctggctctctttctcttaacgtgatcataacgtgattcgaaaattggatatagataggtttcttgttggatcttgatccctctggaaaaggaggggagaatagcagttcatgatgggattttgtatctgcccgttggagtcacctgcgagattactatggagtacaagcttcttccgccataagatcatgatcttctaatccttcctacttcttcccatctttttaatcatcttctcgctatctctgcttcctctttctctctgtttcctctttctcagaactcagaagtagttgttgttttatttctgttgatcaaaaatggaatccaattcgtttttcttcgatccatctgcttcacacggcaacagcatgttcttccttgggaatctcaatcccgtcgtccaaggaggaggagcaagatcgatgatgaacatggaggaaacttcgaagcgaaggcccttctttagctcccctgaggatctctacgacgatgacttttacgacgaccagttgcctgaaaagaagcgtcgcctcactaccgaacaagtgcatctgctggagaaaagcttcgagacagagaacaagctagagcctgaacgcaagactcagcttgccaagaagcttggtctacagccaaggcaagtggctgtctggtttcagaatcgccgagctcgttggaaaacaaaacagcttgagagagactacgatcttctcaagtccacttacgaccaacttctttctaactacgactccatcgtcatggacaacgataagctcagatccgaggttacttccctgaccgaaaagcttcagggcaaacaagagacagctaatgaaccacctggtcaagtgcccgaaccaaaccaacttgatccggtttacattaatgcggcagcaatcaaaaccgaggaccggttaagttcagggagcgttgggagcgcggtactagacgacgacgcacctcaactactagacagctgtgactcttacttcccaagcatcgtacccatccaagacaacagcaacgccagtgatcatgacaatgaccggagctgtttcgccgacgtctttgtgcccaccacttcaccgtcgcacgatcatcacggtgaatcattggctttctggggatggccttagaaaaccactctgataataaatgtgtgtttatttaagttcaagagtcatcttcttgttgtttccatgttgacgataattgttgactcgtggaataattccgctgttcaacggtatttttatcagttgcattatatgcttttatgaaaaaaaaaaaaaaaagggcggccgctctagaggatccaagcttacgtacgcgtgcatgcgacgtcatagtaatctatagtg

SEQ ID NO: 99084 - DNA, 643 bp, Arabidopsis thaliana columbia
  unsure (1)..(643): unsure at all n locations
nnnnnnnnnnnnnnnnnnnnnnnnnnnnnnnnnnnnnnnnnnnnnnnnnnnnnnnnnnnnnnnnnnnnnnnnnnnnnnnnnnnnnnnnnnnnnnnnnnnnnnnnnnnnnngaatcgaacttgatttcatcgtggtattattgggttatatatgctactgaaatttgatttaagaaaaacaaaaaagacagaggaatttcgaaatttggtgtactctgtgactcgatttcagagcatgtggaagatcaacggagcaccaaactgaggatgaagtgtaagaaccgtatgaggtgcgtgagtgtacgaaggagacagctcaaaggagaatctctgcagaatcaagacaagtgccatcttagcttccatcaaagcaaaattctggccaggacagaatcttggtccccatccaaacggaagaaacgaaacttggttctttgtggcttttgagataccatctgcgaatctttcaggattgaattcatgcacatcttcaccccagagctcgggatcacgatgaaccataagaacaggaatcactacttgtgcaccacctggtagtgtcatgtcttcaccaagctttgtttctttctctacggttcgaccaagtagtatccctggtgggataacctcaaaacttcgttcaa

SEQ ID NO: 99085 - DNA, 622 bp, Arabidopsis thaliana columbia
aattgagccgcactatagatgactatgacgtcgcatgcacgcgtacgtaagcttggatcctctagagcggccgccctttttttttttttttatgaatcacaatcacaaacacttatttatcatcttacaacaatttaataaaatacactcatgcatatttttttagttcgtgaggaacatactggattaaggaaaaaaaaaccataattagaattttgtttgactaaatcaaatcatttgtttagtcctaaactaacgacatgttggataaatccatctaaatcattcactgagctcccacgttcttgaatcgcatccaacgctgctttcctcagctccacggctttgatcctctccgtttgatttccggtcacggaatcagcgaaaactcgagctaactcgtccgggtcaggcaccgtgtcaggtccttcgcaagcacgcacacctactttcaactcatcaaccaccagagacgcgtcagtgtactggtcagctctcatcggccacgtcagcatcaaaacgccggcgacaaccgcctccaccacagagttccaaccacagtgcgttaaaaacgcgccaacggctcggtgacgtagcacagctacttgtggagcccatcctt

SEQ ID NO: 99086 - DNA, 511 bp, Arabidopsis thaliana columbia
atacgactcaccttagggaaagctcgtacgcctgcaggtaccggtccggaattcccgggtcgacccacgcgtgcggatactactctcttttcctccccattttagaggggttgacttggacgaggacgaaggacaagaagtggtaaacagaataatgttatgccaaacacttgggatcttgaggaatcttgactagatggatctgaaactcttgagtcggccggattgggatcaagaatcttacccagattcttctgatttcttggtcctcatcttctttgctccattcttcctttttcttcgcttaatcctcgacagatgcatattcgagagggtcgctagaagactggtagttcctaaaggactatgtgctgattcaaacgagagaagaaagaaggtagtgaaattcaaagaatccgcttggaaatgtttgtgctctttctcggtggaagcttttgctctctacgttacttataaggggccctggcttaaaaccccacactctcatgtt

SEQ ID NO: 99087 - DNA, 526 bp, Arabidopsis thaliana columbia
  unsure (1)..(526): unsure at all n locations
tttaggacgannnnnnnnnnnnnnnnnnnnnnnnnnnnnnnnnnnnnnnnnnnnnnnnnnnnnnnnnnnnnnnccttttttttttttttttaaagttttaatactttttattattaagttttaaaagggaaatacaaatgtgtgattacaaatccaggaaccacaattgaagtttataactgaaaaacaacataagataggtaatacacccaaatttatccatccttagatcccttaaaggtttcttagtaaaaagtaacgaccaaattctccgaacgagcctcgaactctcccaccctatcagctgcagcacgtatcggaagcagttgaatatcatccaatccaattggctgatacagatccaccctctccaacatacgaccataacgaatcagatactcgagaacacgtaactcgtgcgtaccaccataaaagctccacacctccactttcttaagtgttttcttcaaacattcatgactggtattctgcccccaataagcctctggattcgatctgaggcacc

SEQ ID NO: 99088 - DNA, 569 bp, Arabidopsis thaliana columbia
tatttaggacgcactatagaagatctatgacgtcgcatgcacgcgtacgtaagcttggatcctctagagcgtccgcgccttttttttttctttttgaatataagatatgtaactttttattgatgaaaatgttgagaaaaaaaaagagtagaattgaaatgacaagatggttcactatcttcttggtttcactaagccctaaaagtaaaaattgaaaatgaagaagaatccaaatcttcctctttgcccttttagtagccccttcttcttcactcacatcccaacttctcttatgtacacacagagtaatctccaaccagtaacatctctcagtacctaacaacaagtgaagctaaaggaagaaggagccaatgcaatctcaatctgtagggaaaaatgaatggagggaatgaagacaatagaacagaaaatacagagacagagatcacagggcaatgaagaggtgaatgaatgaacaaatcataaagacctgattgatactctacactaatgggttcccttgtaatgaagcatcttatgaagtaaaagtgggattattaagcttaagg

SEQ ID NO: 99089 - DNA, 521 bp, Arabidopsis thaliana columbia
  unsure (1)..(521): unsure at all n locations
nnnnnnnnnnnnnnnnnnnnnnnnnnnnnnnnnnnnnnnnnnnnnnnnnnnnnnnnnnnnnnnnnnnnnnnnnnnctttttttttttttttcattgtatcaatatgagagagtaggctttctctttcactagttaaagtggtcttgtcatcattcagcaggtggcatgattcttctaggcttttcaatttcgacttgagttcttcaagttctacattggcattaaaaagagaattctccagtaccatgttttcctcagagagtttcttgctgttttctgtagcactctgcagacgggaaatcaacatgtccttctcagaatgaaggcctgatttctcttcagcaagtgacatagaagcttcctccaatgttttcagctttcctctgattgtttccagctcagcattcaaatctgatatggagttctccagaagaaggtttttctgaacaagcttttccatcatttctaacttctcaatcagggccgtcttttcaatactttctctttcccggatttccttt

SEQ ID NO: 99090 - DNA, 518 bp, Arabidopsis thaliana columbia
atcgttgagttggtgagatcatcttcttctcaacttcatcgatcttatcgtctcgaaaattgtcaccttttcttctcagctacttcaggcggagaaacactttccgtggtttagtgttgaggacgatcactgtttgtaattcgatggcgaggaagaagatcagagaatatgactccaagagacttctcaaggagcatttgaagcgtcttgctaatattgacctgcagattcgctctgctcaggtgacagaatctacggatttcactgagttaaccaaccaggagtcatggctatcgtccacaaagctagttgtgaaaccggatatgctatttgggaaacgcgggaaaagtggtttggtagctctaaagctggatcttgctgaagttgcagactttgtcaaagcccgcctcggcactgaggtcgagatggagggatgtaaagcacctatcactacattcattgtggagccttttgtgcctcatgatcaagaatactacctctctatagtatctgataga

SEQ ID NO: 99091 - DNA, 519 bp, Arabidopsis thaliana columbia
  unsure (1)..(519): unsure at all n locations
nnnnnnnnnnnnnnnnnnnnnnnnnnnnnnnnnnnnnnnnnnnnnnnnnnnnnnnnnnnnnnnnnnnnnnnnnnnncttttttttttttttttcgaaaacaaatctaatactggtactggttcgggccaaaatcaatcaaaaaccacattgatgatacacggagggcttaatacattagattactctatacaacagacacagacatatagaggttctagctcaacaaagagcaatggtactatgagacccatctgttctcggaccggttgagagagaacgatgaagattgaacctcgctcaactggaaaggatccggttcgattccatagtccgttaatggtctatgctcgagcacattgtcatggttcttcacaaagtcgggaatttccacctcgcctttctttatgtcctcccaaaggtactgcaacctgctcacgtacttaatcttgcagtacagtcctccacttaaaagaaggcggccaagagtggcaatgacaagtcttgaacgaagaccaggg

SEQ ID NO: 99092 - DNA, 530 bp, Arabidopsis thaliana columbia
  unsure (1)..(530): unsure at all n locations
nnnnnnnnnnnnnnnnnnnnnnnnnnnnnnnnnnnnnnnnnnnnnnnnnnnnnnnnnnnnnnnnnnnnnnnnnnnnnnnnnnnnnnnnnnnnnnnnnnnnctctgtttcaactccaaatgttgctccctttcttcaagtttcttttcctttaactcaagaaacttgttcttcacttcagtctctctggctgctgcttcatgtttcagttgaaagttgacttctttcttctccagctccatcgatttcccttggatggtctcattaagcaacctaagctcattctccctggcttcaagttgcttaagagatgtttccatcagctcagtctcttttctcattctctcagactctgttgtttgcttaagatcaaagtctttgactttcatgtctaaatcacaagtcttggcatcgatcgtcttagaaatcaaagcaacctcatttttccttgcttcaagctctgtcattagctcttcatgcttcttcatcatcgaatcatggagcgaaccagaaagttctctgggcgttgagc

SEQ ID NO: 99093 - DNA, 525 bp, Arabidopsis thaliana columbia
  unsure (1)..(525): unsure at all n locations
nnnnnnnnnnnnnnnnnnnnnnnnnnnnnnnnnnnnnnnnnnnnnnnnnnnnnnnnnnnnnnnnnnnnnnnnnnnctttttttttttttttgttttgttttgttttgtctcatctctaaaccctacgtcaaactcacaatgacaaaacatatatatctcgttcttacattcccatgcatcactcatagataaaaattaataaattgtatcacccaaatggcgagtttcttccttgtattaatccaccattagggttcatcataggactcaatggtgatctcctaggcgatggcctttccagtaatttcccaccattattcccttcatcacctgataaacctgatttcctttcgtagatctccgacaaagaatccaaatccgtggagacatgtgtagccatctgtatctgaattctatgctcatcatcgatcgattggtttgcggaaagatcgtgatcttgatcagaccacatcaatagtcctttccttacatcgttaccaaaattaggattaggtcgcttcttcc

SEQ ID NO: 99094 - DNA, 529 bp, Arabidopsis thaliana columbia
  unsure (1)..(529): unsure at all n locations
nnnnnnnnnnnnnnnnnnnnnnnnnnnnnnnnnnnnnnnnnnnnnnnnnnnnnnnaaaaaccaaattttataaccctgcgtcttggttttatgtaaaagaatggtataccgtttgcaactaagatacaaccatcatatacctatataaaaaaaacagagataatcatcgcagtatcatcacttttatacgtttaaagaacacttacacaacaaacacaccaaatgcaatccacaactttcattttcttttgtatggcatttctcgtgacagaattatttggaactatgaacatttggtttctccaactgtaggagctttgtagtagtatgcaggtacagttgctgggaaaaacatctgcccaactccttccgcttttattatcggaaatattatccccgatgctcccgagattaatttggctccaagccagattcgttttggggaagggaatgggattaacaaccgtatgactccataaaccgcaaccgcaaagaaatggcagacaagtgttaatggtcgagggttcaa

SEQ ID NO: 99095 - DNA, 648 bp, Arabidopsis thaliana columbia
  unsure (1)..(648): unsure at all n locations
tttaggacgnnnnnnnnnnnnnnnnnnnnnnnnnnnnnnnnnnnnnnnnnnnnnnnnnnnnnnnnnnnnnnnnnnctttttttttttttttaaacacagaacgattatagaagatagatagagaagcgaaatcatcaacaaaacataatatagcccgagattaatatgcaatttcaccaagattagagtttgtcaaaaggggtgaaattagaatccgaaagtcattagcctactcgatccggtttactgattaccggattccacaaaagacaaaataaaagcataaacctaggataatagatagttttttttgttcagaaaccgacgaagaattagatccgacgacagattctaaacctctttgttctcgtcggtgatcacggtcttcttctccgcgaagatccaagtgacaccaaaaggatccgtaacttttcctttgaatcccagttcaacttctgcctccgtaacctccactttcacagctccggcgtcaacagctttcgcaacggcggcttcagcatccttagttccgagaangaaaagtcactcccgaacctttccgatttcgcagtagaaaaaccaggggagagaggaaacgtcgcaaanaacgnagggaagagccagcgagnttaagctcagaagngagac

SEQ ID NO: 99096 - DNA, 581 bp, Arabidopsis thaliana columbia
  unsure (1)..(581): unsure at all n locations
nnnnnnnnnnnnnnnnnnnnnnnnnnnnnnnnnnnnnnnnnnnnnnnnnnnnnnnnnnnnnnnnnnnnnnnnnnnnnnnnnnnnnnnnnnnnnnnnnnnnnnnnnnnnnnnnnnnnnnnnnnnnagggaaaaccaaacttttcatgttataatatatacaggtacattacattaaatagtatgcaatcgccctgggttaatagatttttggatgattttgggtacaatgagaaaacattatgggctcagaagctttggacccatttttgaaatcatccaagaagggattgcatcaacgagctgcgcaagatctttggacatgtcagcacgaaggatcttcgagtccattcccagcgaacctccaacctctttagccatagattcccacggagtcccgacagcaatattcgctaaaaactcacttcctcgattcaccgcttctgccattcctgggggaacatccggaagagcctgttgcagagggagaccgtgatctccgcgcggcgttagacatgtctgcttgagctatgatgatcacacagcactgagctagatgagttcacttgatctctgatttcacg

SEQ ID NO: 99097 - DNA, 752 bp, Arabidopsis thaliana columbia
  unsure (1)..(752): unsure at all n locations
nnnnnnnnnnnnnnnnnnnnnnnnnnnnnnnnnnnnnnnnnnnnnnnnnnnnnnnnnnnnnnnnnnnnnnnnnnaccaaacggatgctgttcaagggcctatggcctaaagaaagagattatatataagttcaagggaaatgcattaactaaaactgaaaaactttaaaatcatacattttgcattggttatcggtccaaatcataatcaacttatttgataatcaaaatcataagttcatattccaaatccgaaaactgcacggatcctatggaatataagatctctccatcctctctcagtgttttccaccacagtcgcattcccgtatctgtcctcttcaggaacgtcagtgtgagtaagattgacaatggtgactcctggttgaggctcctcgaaaacgatcttcaccgttgaatcaagaccatcaggccagctcccaaatctccacttctgaacaatcaatttgccttcttcaagctcaagattcattccagtaacagacccatcaaagacactaatcggaccattcacatctttactaatcttagcattactctgcgtaaaacccttccaacgattcttatccattaaaatctcatacaaatcccctactttgcaattaaacttctcggtcataagaattggcttaaacccttccttaatcttcgccttctttttttccttaactaccttacttttcccccggagaagcaacacccccgggggcagaccaaattttttccccgccc

SEQ ID NO: 99098 - DNA, 511 bp, Arabidopsis thaliana columbia
  unsure (1)..(511): unsure at all n locations
gnnnnnnnnnnnnnnnnnnnnnnnnnnnnnnnnnnnnnnnnnnnnnnnnnnnnnnnnnnnnnnnnnnctttttttttttttttaacacaaacataatttatttcattttattcataaacacaaacacaaacataacagcagaaaaatatataaaacaagaaataacataattgaagcaaaacaagaacatgagaacaagtttcaaagattgattcaagaagaaaatttaagaccagaacctttaaacttctcttcaatggttctatcaatttcctctgccaatgactcactcaaagtatctctccatcctccaatctctccttttctaaagaaagttttagtctctattccatttggcaatttcccttctttgttaacttccaaattacttaaactctcaaagctacacaacttcacaatctctctcacttcttcttcttcaataaagccacattccaagaactccgcgatccgcttcatctcaacttcggtctgcttctttagctcctcg

SEQ ID NO: 99099 - DNA, 677 bp, Arabidopsis thaliana columbia
aatacgactcactaagggaaagctcggtacgcctgcaggtaccggtccggaattcccggttcgacccacgcgtccgcggacgcgtgggcggacgcgtgggctcaagcttcctggacaagcaccatcatctcgatgtggtcatacagttacatctggaggacattatcttctgttatttgggggacatggaactggtggatggctgagtcgttatgatgtttactataatgatactataattttggacagagtaactgctcagtggaagcgcttaccaataggcaatgagcctcctcctcctcgagcttaccataccatgacttgtattggagctcgtcatctcttaattcgtggttttgatggaaaattgaccttcggtgatctctggtggttagttcccgaagatgatccgatagccaagaggtcttctgtgcctcaagttgtaaaccctcctgaaattaaagagtcagagagagagttggacaaggaaaggggacaagatggattcagtattgttgacttgcaacagaaaatgggaatatctggttgcatcagggttgcgccttcaaattcccgaggaggcagaagatcaagagtttgttcgatgaggaacagaataatctgagggagatgtttgtatgaacgggcccgtatgattgaaaatgggcggtgaggcc

SEQ ID NO: 99100 - DNA, 506 bp, Arabidopsis thaliana columbia
  unsure (1)..(506): unsure at all n locations
nnnnnnnnnnnnnnnnnnnnnnnnnnnnnnnnnnnnnnnnnnnnnnnnnnnnnnnnnnnnnnnnnnnnnnnnnnctttttttttttttttcgtataagccatgtaacaatggaaaaggattgtaccaatacaaatgttaatctcgtataagctacatccaacaactacatatataattctacatttcgtatacattatcattttccgctgtttggtttttacagtttttttcctctcaccaaaaatagacctaaacaaatctaccaaccttttaaaccgttatagattcgaagaaagatccttgaagtaaagcttgagtgtctcgtaggtcatgaagcaaatccctacaccaggtaccactttgtagtactctggaagaattcctctgtacaggcctctcgctccttccgtttgaacaatacgctttaatgtgcctaacaaacctgtcttgtacactaccgctcgcccgcctattccttccagctgcttccttcttctcaccagat

SEQ ID NO: 99101 - DNA, 1544 bp, Arabidopsis thaliana columbia
  unsure (1)..(1544): unsure at all n locations
gaattcaggaaacaacaaatttgacttttatccaaaagttcattgctgcaacattgaaacgaatacacagaaggagaacagattacaataatgatgtaagaaagattggagatggcctttcctcaacatggcttcatgtttcagcaactccatgaagacaatgctcatcacttaccttccccaacctctctcccctcttgtcctcctcatctcttctatggaggaggaggaaactacatgatgaacagatcaatgtcgttcacgggagtatcagatcattatcatctaactcaaaaaagcccgacaacaacgaacaacatgaatgatcaagaccaggtaggcgaggaagacaacctatcagacgatgggtcacatatgatgttaggagagaagaagaagaggctgaatttagagcaagttagggcattagagaagagcttcgagctagggaacaagctggagccagagaggaagatgcagcttgctaaggctttaggattgcagcctaggcagattgcaatatggtttcagaacaggagagctaggtggaagacaaagcagctcgagagagactatgattctctcaaaaaacagttcgatgttttgaaatcggacaatgattctcttcttgcccacaacaagaaactacatgctgagttagtggcattgaagaaacacgaccgtaaagaatcagcaaagatcaagagagaattcgcagaagcttcatggagcaacaatgggagcacagaaaataatcataacaataatagttcagacgctaatcatgtgagcatgatcaaagatcttttcccttcttcgatccgatccgcgaccgcgaccacggcctctacccatattgatcatgagattgttcaagatcaagatcaagggttttgcaatatgttcaatggtattgatgaaacgacgtcggctagttattgggcatggcctgaccagcagcaacaacatcacaatcatcatcagttcaattgatcatattgtctaagaacaacatcatactcatcttgatatcattattatcatcaaaagaaaattccgtagatttttttaataagtattttcaaattatttggcacgtttaaaattaattaaattgggttattatgtttacttgatctgtttcatactaaaaccaaaactcatgtttgttcactccaaacacaaacacagcagtaatcaaaaatcgtcttataacaaaaaggaaatgcaacaaaacagaagaaacaactaagtagtaggcaagattcttcttcactcgtcttcttggctacggagcctagcaagcctgttggtaacaacaacgtctagctgagaagctctctcaanaattgcctttctcttcttagtggagacgttgtgagcaatctcagnacagtaagtcctgttgtgcatcatcaacaactcgagctnacttgtgttgtgaacaacgaatttcttgaatccattgggaagatagtgacgagtcttcttgtnagatccgtaaccaacattgggnattaaagtcacacctttgaactttcttc

SEQ ID NO: 99102 - DNA, 778 bp, Arabidopsis thaliana columbia
  unsure (1)..(778): unsure at all n locations
nnnnnnnnnnnnnnnnnnnnnnnnnnnnnnnnnnnnnnnnnnnnnnnnnnnnnnnnnnnnnnnnnnnnnnnnnnnnnnnnnnnnnnnncggccgcataaaaacgagaacccaagttgtaatatccttcagccactctccaaaaccgcaaaaaaaaaaaaaaaggaggataatccggaatggtttacgccagttaaaaggaaacccctagatgatatcttttagggctttcactcgtcttcctggctacgcaacctaccaagcttgttggaaacaacaacgtctagctgagaagctctctccactatggcctttctcttctttgttgagatattgtgagcaatctctgcacagtaagtcctgttgtgcatcatgagtagctcgagctcagaggtgttgtgaacaatgaacttcttgaatccatttgggaggtagtggcgggtcttcttatcagatccgtaaccaacattgggcatcaaggtgacacccttgaactttcttctcacccgggagtcaatacccttaggcctcctccagctttccttgacggtgattctgcgatcactctggggtctgatgaatttggcagacctcttcttcaccaccttcttcgtaagcaacgggaccgccatatttccttctcttcctcgtaagatcgatatctcaaaagcgactccgtccccttctgtcgtcttctagccgtacgcacgcgtggnnnnnnnnnnnnnnnnnnnnnnnnnnnnnnnnnnnnnnnnnnnnnnnnnnnnnnnnnnnnnnnna

SEQ ID NO: 99103 - DNA, 759 bp, Arabidopsis thaliana columbia
  unsure (1)..(759): unsure at all n locations
ntcccntccaaggcccttnaccaatttgcctcagcagttccgacacccaagaatagcatgtgaatgattaatcccatcaaaccctgtgaccccgtgtttatttagttgtatcatgttgaaagagaagactggtttggcctcgtcttagaagtgtgtgtacatagtttcaaaagtcttggcaagnccatacaagagaagagtcaagaatcgaagacagtagattgtgtttgttgttgttgttgttgcattgtgttgctagtgattgtagttccagactatgatttcatttctctggggtgtgggttgttcgtttttttttaacaaaagggcttaacttgatctgtttcatactaaaaccaaaactcatgtttgttcactccaaacacaaacacagcagtaatcaaaaatcgtcttataacaaaaaggaactgccacaaaacagaagaaacttctaagggggggggaagattcttcttcactcgttttcttggctacggaccctaccaagcctgttggtaacaacaacgtctagctgaaaagctctttaaacaattgcctttttttttttaagagaacacgttgggaaccattctcaacacaagaaaggccttggcgaccataataaacaactggagcttatttggggtggagaacaacaaattttcttaactccttggggaaaaatagggcccaccctttttttataaaccccaaccaaatatggggaaaaaagccccgcctttaaatttttttctcccc

SEQ ID NO: 99104 - DNA, 455 bp, Arabidopsis thaliana columbia
cggacgcgtgggatttaatttcaattttaatttcccaagtgtcctatacaaattgaatcaaaagaaaaatcagcatatgccctaaaagcttaaatggtataaagggtgggtcctatacaaacctcccatgaactgatctcttccttcttctccttcttcttctcttctcactaattttccttcagaaaacttcaacgatcttgtgatattgatatctaaacaagttcttgatctaagctacgaaagttgatctgctcagaattcataataagagttgatcatttgtgggctttgagggtgtgtagacatacatagtaattatatatatgtatatgtatgaggaggaaaggaacaatatcaatagtaagcaagaaggactgagattggagatggcctttcctcaacatggcttcatgtttcagcaactccatgaagacaatgctcataacttacct

SEQ ID NO: 99105 - DNA, 717 bp, Arabidopsis thaliana columbia
taggtacaactatagcaagagttatgacgtcgcacgcacgcgtacgtaagcttggatcctctagagcggtcgccctttgggggtggtttttttttttttttttgtcctaagattacaaggctcaatcgggtttcgaattcagggaaacaacaaatttgacttttatcccaaaagttcattgctgcaacattgaaacgaatacacagaaggagaacagattacaataatgatgtaagaaagatatataggtcttaggttctcttgacagggtcaaagttggagacgccgacgacgacaccaatgatgacagtgaggacgaggccaccagaagcaatgctgagcaagaaattcttgagggaaggagagattccagaaccagcagcttcagctatctccggaatcaccatcgaagcagtaagagcagccgcggagataccggtcaaagccttgtccatcttgagggccttaacttgaagcctctgtgctctgcctccagttgcaaccaaagccttggatggtttcagaggtaatggcttaaggaaaggagacgaacgggtctggttaagtggtgtgaccaatgacatcgcggaggtagaagccatctcttccgatctctttttggtctctctagattgatctttctgagattccgcgtgccgaattccgagcttacgtacgcgtgcatgcgacgtcaaagctcttctataagtcacctaa

SEQ ID NO: 99106 - DNA, 817 bp, Arabidopsis thaliana columbia
attaaagtttgggggaaacgcccaggggtttttccccagtacaccgaagtttgtaaaaacgacgggcccagtaaattgaaatttaaggtggcaactataaaaaaactaataccgttcgcaagccacgcggacgaaaagcttggatcctttaaaacgggccgccccaaaatttttattaccctataaataacaaaaggtcttaacttgatctgtttcataataaagccaaaactcatgtttgttcactccaaacacaaacacagcagtaatcaaaaatcgtctaataacaaaaaggaaatgcaacaaaacagaagaaacaactaagtagtaggcaagattcttcttcactcgtcttcttggctacggagcctagcaagcctgttggtaacaacaacgtctagctgagaagctctctcaacaattgcctttctcttcttagtggagacgttgtgagcaatctcagcacagtaagtcctgttgtgcatcatcaacaactcgagctcacttgtgttgtgaacaacgaatttcttgaatccattgggaagatagtgacgagtcttcttgtcagatccgtaaccaacattgggcatcaaagtcacacctttgaactttcttctcacccttgaatcaataccctttggcctcctccagctttccttgacggtgattctacggtcactctggggtctgatgaacttagcagacctcttcttcacaaccttcttggtaagcaatgggaccgccatatttgcttcttcgtaagatcgatatctccggacgcgtgggtcgacccggtaattccggaagtgcgctgcga

SEQ ID NO: 99107 - DNA, 484 bp, Arabidopsis thaliana columbia
cagtattcttgcctctcttcatcttccattgacgtttccttctatcctcgttgccttcatttttcactcgcacgctaatcttcgcctactttgttagattttcggttttgggtttttgtcttttgggccgatttcccctgttcccagaatctccgattaagctgcttccttaatctcttgtctgaataaactttttccggcgtgtaatttagataggtggttaaaattacgagtagtgagaggagtgttgttgctgttttgcttattcggtaaaacgaaatcggaagttctttgctgtcgtttgattccttttgagaaaaagagatgttgggagctggatttaacttcactcagcttcagagagctcaaattgacgtctcttatggctgcagatcgagtcacactaaggatcgtgagaacggctctgcattgttgaaacaccatgtttctgaggcattcgctagtaatgtgggacggtttttgg

SEQ ID NO: 99108 - DNA, 628 bp, Arabidopsis thaliana columbia
  unsure (1)..(628): unsure at all n locations
tnnnnnnnnnnnnnnnnnnnnnnnnnnnnnnnnnnnnnnnnnnnnnnnnnnnnnnnnnnnnnnnnnnnnnnnnnnnncttttttttttttttttttttaggattgaattgtatatatatattgatagtaattatttttcaatacaacaaaattacatcgtcggttattatgttcttttggttgcaagatttctctgacgtgtaaggcctgccattctcattgttcctccacctcctccatttttgtcagatcttttacggctacgccaaagaagccgaattggagtcccagcaaagcctgcatcagtgcgtagtgtttctccatataccttctgtacgtatccgaaaacagctttgcgtcgtttacaaagaaaacaaacgtcggtggccttattgctgcctgggtgcaatagtaaacgcgacctcgcttgcctccacgggtccttggaggggatttaaatgcaactgcttccccttatcacttgggtcaatatagccggactaagtcctccttgatcccccctttgaaccgagcagcagaaccncaaaattgcaacgcatggccagtaattnnggtganaanaaagggccattngggangggttnccgaaangccccaatnggagntt

SEQ ID NO: 99109 - DNA, 783 bp, Arabidopsis thaliana columbia
ggcaccccccccgaggtcgacggtatcgataagcttgatatcgaattcgcggccgccaagatttggtgttttaactatcagatccattatgagcatacgcctctgccaatgaaatccgagtcttctagaagagatggtgttacggacttcgcggtcgatgctatatatatatgtaaaaagcttaatatggactggacacagaaattccataacaacttttttcgttttttttttttcactggaagattaattttcattgatgagtactaggtgaaatacaaggagtcgacgatcaatacatgatcccgaaaactaacccgaaggataacaagatatcctaggaaactaagtccaagaaaatggggagcaaataacaacactacaaaagaaacaagtcaaaacactgacggctaagaaagcaaacatcagagggaattaaaactcataactcagaatctagcaccaaacatcttgcaaattatcaatccaaaaacgagaaacgcttgaattagtggctagccaatggagacgagaaaatccacgacaccggatagcgactcttcctataccaaatgaagactacctcacaaataaagagaaccaaagcatccataccagcaagaatgggagacgactagaaatcccacacaactttctggaaacggcgaaatcgaagcaaaccaaaccaagattggttcacgcctagtaagacaccaatgcaaaaggagagacctcgatcaaagtctaaacccgtagaagacaaggaccggagccccattacaa

SEQ ID NO: 99110 - DNA, 507 bp, Arabidopsis thaliana columbia
  unsure (1)..(507): unsure at all n locations
nnnnnnnnnnnnnnnnnnnnnnnnnnnnnnnnnnnnnnnnnnnnnnnnnnnnnnnnnnnnnnnnnnnnnnnnnnnnnnnnnnnnnnnnnnnnnnnnnnaattataacccgttcattacatttcgttaaccaacagacccaagacaattcatacaacaaaaactattctcttctttggtttttgtttgagagaaaaaaaatcaaacccccagggaatacccaaacctggtaacccacaaaccaagaatatgtaagaaaaccaacgaatatcaaaagatgatctttaattccaatcaaagaaaaaaaagaagaatatttgttgtcttttgggttctctcttcaagggctatgaagatgctctatcactcgccttttctccttcggtagtcgccgaagacatgtagctcacggccagagacgtgctctcatcggtacaatgcgtctgaggaggaggaggaaccaaagcagccggagcttgaaaatgttgcttgcaattgtggcaagttat

SEQ ID NO: 99111 - DNA, 433 bp, Arabidopsis thaliana columbia
cccacgcgtccggaccattttgttcatcgactttctcaactctaaaacaaaatgctcagattagcgattcctttgtttctttttgcattatgctctttcacattattttcttctgcaagatccttcatcaccacaaaacctcttccgattgattcatttattcctaaaccaaagctagagaatgcggctgcgtgttcttacacggtgatcattaagacaagctgttcctctgtgtcttacactagagataagatcagtatatcgtttggtgatgtctacggcaacgaggtgtatgtgaagagactagacgatccatcgtcgaggacgttcgaaaagtgttcatcagacacatacaagatatcgggaccgtgtatgcgcgacgtttgttatctctacctcctcaggcaaggatccgactgctggaaaccagaga

SEQ ID NO: 99112 - DNA, 439 bp, Arabidopsis thaliana columbia
  unsure (1)..(439): unsure at all n locations
tcgcggacgcgtccgcccacgcgtccgcccacgcgtccgattattttcttctgcaagatccttcatcaccacaaaacctcttccgattgattcatttattcctaaaccaaagctagagaatgcggctgcgtgttcttacacggtgatcattaagacaagctgttcctctgtgtcttacactagagataagatcagtatatcgtttggtgatgtctacggcaacgaggtgtatgtgaagagactagacgatccatcgtcgaggacgttcgaaaagtgttcatcagacacatacaagatatcgggaccgtgtatgcgcgacgtttgttatctctacctcctcaggcaaggatccgacggctggaaaccagagaatgttaagatctacggctcatncattcagatcagtcacnttttntacttacaaaccttttttttgcct

SEQ ID NO: 99113 - DNA, 872 bp, Arabidopsis thaliana columbia
  unsure (1)..(872): unsure at all n locations
nnnnnnnnnnnnnnnnnnnnnnnnnnnnnnnnnnnnnnnnnnnnnnnnngggagggtctatatcattgtccaatttgctgantcatacaaatgctttcatatgattcattgaacaaaacacgcatttacttataaagcgcatttatatgttcacatgatttgtacaaaactcatgagactgcatcaagcagaaagtatttatttatctttacatgtcaaagctttgagaattaagcaatgacgaataccctaagttcacctctgtccccgcgagttatgcgcatggtatcatcaacataggtaacttcgaaatccccagttccagggtttgacaatggtctgaaactgtcgggaaccctcgggatatcaaacggaggaatctgcgacaagttgcccgatttcttcacagttgtttcctcaaatgttatcttgatcttgcaagtgcctaaaaattcaaacttgtgtgccaatgtcgcagtggcttctaatggcggaaatggccaaggggcncctaattccacctctgctatnttntcaaaatctttgctaaacacatcaanccgttaaaacacctgncccaaaataacngggatcaaacgtccagtaggtaaaccaanaaggctacccctaaaaaccgaaaaaaaaacgccctnctatacaacagcctccatttcccttgaagcttatcaaaatcatcggttaaatcaaccggtcccccnncaatttcattttctttacaccacttcngctctttctaaatcacaacnnccccacaantctctntttatcccaaacacccnanttatttganttgaataagcattnctttccncccccccgatcaaaaaaaaagtgggggtccttcnccccat

SEQ ID NO: 99114 - DNA, 1240 bp, Arabidopsis thaliana columbia
tgttacgccattttcgtgagtaagaagaagaaacccgaaaacctcaaaccatggccgagggactcgtattgaagggcattatgcgcgcccacaccgacattgtcacggccatcgctacgccgatcgacaattccgacatcatcgtcacagcgtcgcgtgacaaatccatcatcctctggaaactcacaaaggacgataagtcttacggtgttgctcagcgtaggctcacaggtcactctcacttcgtggaagatgttgttctctcatcggacggtcagtttgcactctccggaagctgggacggtgagctccgtctctgggatcttgccacgggagaaacaactcgtcgattcgttggtcatacgaaagatgtgctctctgttgcattctctactgataaccggcagatcgtgtctgcttctcgtgatcgtacgattaagctttggaacacacttggtgagtgtaagtataccatctctgaaggtgatggtcacaaggaatgggttagttgtgttaggtttagtcctaatactcttgtaccaactattgtatctgcttcttgggataaaactgtgaaagtttggaatcttcagaactgtaagctgaggaactctcttgctggtcactctggttacctcaacactgtggctgtgtcacctgatggttcgttgtgtgccagtggtggcaaagatggtgtgatcttgctttgggatttggctgaagggaagaagttgtattctcttgaagctggctctattattcattcactttgcttcagtcccaataggtacctggttgtgtgcagcaacaagagaatagcattaggatttgggatctcgagagtaagtctgttgttgaggatttgaaggttgatcttaaggctgaggctgaaaagactgatggttctactggaatcggaaacaagaccaaggtgatctactgcacaagcttgaactggagtgcagatggaaacactttgttcagtggatacactgatggagttatcagggtttggggtattggtcgttactagagagacaagaagtttctttattctctccaaatttttccatcgactctaaagtcttctcttctgaattagtgttttgaggatttattttttgttcttttctattttcagaatccacaaatgtgatattttgatacattgattttgtttcatatttgttttcttaccctgagtctgagtacacggcgtacaatctgatttgaagttgtt

SEQ ID NO: 99115 - DNA, 1102 bp, Arabidopsis thaliana columbia
  unsure (1)..(1102): unsure at all n locations
atgatctnnnnnnnnnnnnnnnnnnnnnnnnnnnnnnnnnnnnnnnnnnnnnnnnnnnnnnnnnnnnnnnnnnnnnnnnnnnccacgcgtccgcggacgcgtccgcccacgcgtccggtcgattcgttggtcatacgaaagatgtgctctctgttgcattctctactgataaccggcagatcgtgtctgcttctcgtgatcgtacgattaagctttggaacacacttggtgagtgtaagtataccatctctgaaggtgatggtcacaaggaatgggttagttgtgttaggtttagtcctaatactcttgtaccaactattgtatctgcttcttgggataaaactgtgaaagtttggaatctccagaactgtaagctgaggaactctcttgttggtcactctggttacctcaacactgttgctgtctcgcctgatggttcgctatgcgccagtggtgggaaagatggtgttatcttgttgtgggatttggctgaaggaaagaagctttactcgcttgaggcgggttcgattattcactcgctttgcttcagtcctaacagatactggttgtgtgctgctactgagaatagcattaggatttgggatcttgaagagcaagtctgttgttgaggacttgaaggttgatctcaagtctgaggcagagaagaatgaaggtggtgttggaactggtaaccagaagaaggttatctactgcacaagcttgaactggagtgcagatggaagcacattgttcagtggttacactgatggagttgtcagggtctggggtattggtcgttactagagaccacaacaagatgaagaagaagtcccgaaatctccggaaaaaagtttagctgcttttaatttttccagactgcgtcagtattgtattagtctctcgcaaacctctattttggcaatttttgtttaatttccagaagagaaaaaaacaatccattgattatcatatccctatatatcaaaaggtcacgattttgattacaaaaaaaaaaaaaaaaaaaaaaaaaaaaaaagggcggccgctctagaggatccaagcttacgtacgcgtgcaggcgacgtcatagactcttctatag

SEQ ID NO: 99116 - DNA, 534 bp, Arabidopsis thaliana columbia
tttaggacgacactatagaagatctatgacgtcgcatgcacgcgtacgtaagcttggatcctctagagctgtcgccctttttttttttcttttttgataaaattataacttgacaatccaaacaacacgtaaggatcgcagaggttttcttataatgatcgaaattatacacatacctgccacatacataatacattaccacatattggcgttcaatttattaatgagtagctgctagctgacttattccacaaaaggaaacgacgactatactttcaaaacacaatgtaacgtagattacaagtttcaaacacaatgtatcgtggaatacaaaattacgatcatatcatatattttgtatttggccacgttacttaaagccaatcatttttctagattaaccattgtaatcagaagtgggtgtgtcagtattcagaataaaagcgcccaatgcccaatctagaggaatgttatcttttcctgctttactcgcatacttgattctttcatcatcaagagcaacaccaagactat

SEQ ID NO: 99117 - DNA, 520 bp, Arabidopsis thaliana columbia
  unsure (1)..(520): unsure at all n locations
tttaggacgnnnnnnnnnnnnnnnnngacgtcgcatgcacgcgtacgtaagcttggatcctctagagcggtcgccctttggttttttttttagatagattgatagatagatagattgatagatatatgatagatagatagatagaattaaacttaaggtgagtatatcacctaaaatgaaaatgagaaaatgagaaaacatctttagcaaagcaatctcctacaccagaaattaattccaaccattcatgagcatccatgtatcatccatgggttcataacattttgtaaaatcataaccccatgtcaacactgcttgctccggaacataaacggacgttgtaccgtgcagattcagattcatcacctcggcaacaatattctcacatctggtactatcaatttccgagtttgcagttatagaatcaacttctctgttcataagggcattgttgttgattgtgatagaccttatgtaattttcaagggcattgttgcgaggggaaaaagcatcacttctc

SEQ ID NO: 99118 - DNA, 406 bp, Arabidopsis thaliana columbia
aaatatggaagctgctaaatgtctttgttcttgatatgtcatgaagacaagatttttgatttcccgattggtgagtacaaaaacacaccgatcgaggattaaaattaaaggttacataaaaccaaatgatggcaagatggtttacatgaagatctgttgaatcatcatctctaaccagctttcattgctttgggagaagtaaaagtggaatcatcttctcctggcagctggttgcacttgtgcccctcctgcctgtccacccgcgggttcttcagccatgtttgatgcttgtgtaacggcattcatcactacgagtcccagcggtatcaaatacatccaatatttcgcccaaaatgatcatctctggtggtggttcaacttctccctctacattctcactgcctag

SEQ ID NO: 99119 - DNA, 520 bp, Arabidopsis thaliana columbia
  unsure (1)..(520): unsure at all n locations
ccgnnnnnnnnnnnnnnnnnnnnnnnnnnnnnnnnnnnnnnnnnnnnnnnnnnnnnnnnnnnnnnnnnnnnnnnccacgcgtccgcagtaaaatggccaaaaactctgtcgaattcgatcgttacatcgagcgcaaagctttcgacaatacaaaagaaggtgttaaagggctcatcgatgctaaaatcaccgagatccctcgaattttccacgtccctcaagataccttaccagacaagaaacgctctgtttcagacctagagatccctaccatcgactttgcaagcgtcaacgtggacacaccctcacgtgaagccatcgtggagaaagtcaaatatgcggtggagaattggggattcttccaggtgattaatcatggtgttcctttaaacgttcttgaagagattaaagatggggttcgtaggtttcacgaggaagaagatcctgaggtcaagaaatcatactactcgcttgatttcaccaagaacaaatttgcatacagtagtaatttcgatctata

SEQ ID NO: 99120 - DNA, 523 bp, Arabidopsis thaliana columbia
  unsure (1)..(523): unsure at all n locations
ttaggacgnnnnnnnnnnnnnnnnnnnnnnnnnnnnnnnnnnnnnnnnnnnnnnnnnnnnnnnnnnnnnnnnnnctttttttttttttttttttttttatcgaaactatacgattgtgacttcttattgaaactttgtttgaaaagtatcacatctcacaatttcatgtaacttcgacacgtatagtttggccatgtgttagtgttacactactcttttctttcaaacaacatgacaacatacattattttattttcgataatgagattaaaatataaatacgagtctatctcaccttacataattaaacaagaaactttaacacaattataccccccaaatgaacctgcatttacaattaacattatacacatatgcatatgactactctatattgaatcacacaagcaaatggtaacagcaatgctagaccattcatgcaggagcaggactaactagtagtagagaatgttctacttctttttgtttattaaaagttggagatttcgggagaaatatttct

SEQ ID NO: 99121 - DNA, 792 bp, Arabidopsis thaliana columbia
acccttggcgggctatgacgtcagcatgcacgcgtacgtaagcttggatcctctagagcggccgccctttttttttttttttttagaataaaacgcgagagtaataatcaagaagcgtcacattaagagtacaagagcttaaccagaaaagaagaaaaataaacaaggcagagtctagtaagactaggactaaccaaacaaatggtttttcattaaatcagaagtcgagcttaaccggatatcggtcgatgcagtgttcccacggactactaaccgaaggcttgacattgtttagagccacccaaactgcactgttacacttaaacccacttccaaaagcaatctgccaaacccggtttcctttcttcatcctacctttagcctctatgtaagccagttcataccaaatcgagctcgaagaagtgtttccaaatctgtgcagtgtcattctggatgcctcgacatgagtctgcgaaagctgcagattcttctcaagctcatcaatcacagctctaccaccagcatggatacagaaatgatcaaacgcaagcttgaaatccggaatatacggcttcagcttcgagttaaacagtttcttcgtaaccaaagtcatgaaaaacagaatctgctcacttataggaagaaccaaaggacctaaagtagtgatattcgccttaagagcttccccagctatagccataagatctttcgacaacgaaaccccggtctttttccaattaattaacgggacccccttggggtatgaccccggggaaatttcccgggacccgg

SEQ ID NO: 99122 - DNA, 846 bp, Arabidopsis thaliana columbia
  unsure (1)..(846): unsure at all n locations
nnnnnnnnnnnnnnnnnnnnnnnnnnnnnnnnnnnnnnnnnnnnnnnnnnnnnnnnnnnnnnnnnnnnnnnnnnnnnnnnnnnnnnnnnnnnnnnnnnnnnnnnnnnnnnnnnnnnnnnnnnnnnaaggaaaaagtttaattttatttaatgacattaataaacccaaagttgagtgtgagagtagcaaaggacataattagttcaagcagaagcagccaaaagtccattgtgtctgatcagaggctctggggaaggttctcgtcctctgaactccacagacacttttagaggagcttttcctgctcccagagcaagtatagcgtttctgaatctctgtcctgtttctttgacagccttaatgtcatccaacccagcatcttcaaaagctgaaaacgcatctgcagacaaaacctccgcccacttgtaactgtagtatccagctgcataaccacctgcaaatatatgactgaagctacagaggaatttatcttcaggaagtggagggatcacttgtgtgtttatggacaccctttgatcaacttcggagatggtctctgcccacctggcatggattttgtgtgcagcgtcagatcaactgagcaacttcaactggggaagactaagggaccctgcccggattgtttttgcaaccggtagcttctagaatacattgtcgggaagagttcttcctgttagataatgcctagcaatgctattaaaggtttcctgggggagaacagttttcgtaaactggaacgggaattaactgattccactgatttccggatccagccctagcccctattctctttggtagactatctgagagcatggcaattatgga

SEQ ID NO: 99123 - DNA, 529 bp, Arabidopsis thaliana columbia
  unsure (1)..(529): unsure at all n locations
nnnnnnnnnnnnnnnnnnnnnnnnnnnnnnnnnnnnnnnnnnnnnnnnnnnnnnnnnnnnnnnnnnnnnnnnnnnnnnnnnnnnnnnnnnnnnnnnnnnnnnagaaaaaagttcattttattatccaatccaagatcatattggaatctttttttttgtatacatcattacagcttatgaacaagagggggttttctttttctttctctcatcttgggagttatatacagagccacaattttcatctctttttctccaaaattttctagttgttttttgtttctttcgaatcctaattgtaaaagattcgcttcttcctatctctcaaaagaaaatctgagtgcttataatcttcaataagactgcataacagaacatgcaactgcttgtgcccaatgtctcaacctctgcttcatttgttgaggatcgtcccctgggcataagattttaacagaatctgaatcagttttctttggactacaaggtatactgtatgagaaagttgacgcagatgcactgctgctacggg

SEQ ID NO: 99124 - DNA, 528 bp, Arabidopsis thaliana columbia
  unsure (1)..(528): unsure at all n locations
tttaggacgcactatangagatctatgacgtcgcatgcacgcgtacgtaagcttggatcctctagagcggccgccctttttttttttttttacaattacattttcttttatttttatttgcttatgaaaaccccacattgtccccctatcttaacattttttatttatatatcccaaggaaaaaataattaaatcacagtttattttaattttgttttaacatattaaatctctcttcagtataacttaaaaatcaaagatgaaaaaaaaacaaaaagaaaaaaccctccaatatttaaattctcatgttctgtatcaaaacttaaaaaaagattactaatctttcaccaccaaaccggttcgaactcgaatcatcatcattacagattattcgtcgctcttgttgttgttgttattgctaggcacaaagctgccaaactcgacctgccttccgctatgcttcattctcctcttcctcatcttcatcgacgtactcttcatctgtacctttttcatcatcaaagttct

SEQ ID NO: 99125 - DNA, 767 bp, Arabidopsis thaliana columbia
gaaataccgccccaggggtggtttttttccacccaggtcacctcggacggttggttaaacaaaaatcggggcccaagtgaattttgaattgtagggggacccccataaaaaaaggctaggcgttcgcaagcaggcgtccgtaagctggggtcctctagagcggccgcccttttttttttttttgtaaaaaaaaaaaccctccaatatttaaatcctcatgttctgtagcaaaacttaaaaaaggattactaatctttcaccaccaaaccggttcgaactcgaatcatcatcattacagattattcggcgcccttgttgctgttgttattgctaggcacaagctcgaactcacctccttcctcttcttaattctcctcttcctcatcttcatcgccgtactcttcatctgcaccttcttcatcatcaaagttctgctccgacggctgagattgctgatcaggctgagccgctgcgggagtagttgtcgcagtcgttacagccggaggccattgctgctctggttggaccatcaagggaacagaattatccggtttaacaagaccggaagatgaacaagaagctgcaatgttgttgttgctgtggaatttgttcctctctccatataaagcatcaagctggtgaaagtaagggcaagtcttggaatcttcgggacgtttcttgttgctctctttgactttcttgaagtatctgtttatgttttcccatgtccggacgcgtgggtcgacccgggaagtccggtccggaac

SEQ ID NO: 99126 - DNA, 878 bp, Arabidopsis thaliana columbia
  unsure (1)..(878): unsure at all n locations
gtcntttgtcaaggacggtataactttaccttgtaatagcaagcaagggccagctatattagtttgcctttcnttgcataatcatgttgacaagattttcgatgtcncctatatgttgcaggtatctctctaagcctggaacagtggaacgatcttcggaaccatgaggaggatatcgataaggccctctctgagctttctgaggtttaaaagcttgtgtaatcgggtattggaaggtggctttggttgttttggtttgtttttcagaacaacaccatgttctgcaagtgttagctgcttcgagttagttcatgtgttgaatctattatttgatgttgattactcttttatttgatgttggatttacaacttgagatacgttgcaggaatacaagcattcattttgattagttataaataatatatataggtgatctaaatgataacatagctcttgccaaagtttacttaaatgatccggacattgtgctagagagctgggacactgagcgatcccacgtcaagaactctgtgcaatatctcaccaaccctagcattgattttcaatggaacaatgtcatcagctcttgtttcgcctatatttacaattgcggtcatagcaccagcctcatgagccgctctgcaaaggcgaaaagcagacattgtcattaaggatganccaacacgaggatgcatcgctctggtttgcaacttccatggctgagtagcccttcctcnggatgttgcnccaagaaaatacacagggttaggccccttgnactccccaacnggaaatggaanccctccnaactttcgcatccggatncacaggcttgtcagcaagctccggccgggccnnggaaattcnaagtcgccnt

SEQ ID NO: 99127 - DNA, 861 bp, Arabidopsis thaliana columbia
gattgatttaggacgcactatagaagagctatcacgtcgcatgcacgcgtacgtaagcttggatcctatagagcggccgaccttttcttttttttttgtgttgaatttattatttgatgttgattactcttttattcgatgttggatttacaacttgagatacgttgcaggaatacaagcattcattttgattagttataaataatatatataggtgatctaaatgataacatagctcttgccaaagtttacttaaatgatccggacattgtgctagagagctgggacactgagcgatcccacgtcaagaactctgtgcaatatctcaccaaccctagcattgattttcaatggaacaatgtcatcagctcttgtttcgcctatatttacaattgcggtcatagcaccagcctcatgagccgctctgcaaaggcgaaaagcgaacattgtcattaaggatgaacccaacacgatgaatgcatcgctctgttttgcaacttccattgcttgagtagctatttccttcgggatgttgtctccaaagaaaattacattaggctttacgactcctttgcactactaacatactggtatattaaaacccttttaccaaaaatttttcttaatatatatttcaccatcatggcttttgtttaatgcccaaagttatactcttgatccctggaatttcccttttacaaaaaacttattctattggcttttcggcccccaccttgtggggatatagaatttggccttttataaatcttggaatcgcttggataaaacaaatttatttcggggggaaaaaaaataataaaaaaccctcttaatcttcttataaaaccacacatataaaac

SEQ ID NO: 99128 - DNA, 633 bp, Arabidopsis thaliana columbia
ataaagtccacaactctctccttgtagagagagagattttatggcggtggagctcatgactcggaattacatctccggcgtcggagctgatagcttcgccgttcaagaagcagctgcttcaggactcaaaagtatcgaaaatttcatcggtttaatgtctcgtgatagctttaactctgatcagccatcttcttcttccgcctccgcctccgcctccgcctccgcctccgcctccgccgccgcagatcttgaatcagctcgtaacacaacggcggacgcggctgtttcaaagtttaaaagagtcatatctctcttagatcgaactcgaaccggacacgcccggtttagacgtgctccggttcatgttatttctccgggtcttttacaagaagaaccaaaaacgacgccgtttcagtctcctcttcctcctccgccgcaaatgatccgaaaaggttcgttttcttcatcgatgaaaacgattgatttctcatctctctcctctgtaacaaacgggatcaaggcaaaccagaagaagattcatcatcatcaacgtccctctgaaacggcgccgtttgcgtctcaaactcaaagcctctccacgacggtctcgtctttctcaaaatcaacaaagag

SEQ ID NO: 99129 - DNA, 955 bp, Arabidopsis thaliana columbia
  unsure (1)..(955): unsure at all n locations
acgactcactttagggaaagctcggtacgcctgcaggtaccggtccggaattcccgggtcgacccacgcgtccggagattttatggcggtggagctcatgactcggaattacatctccggcgtcggagctgatagcttcgccgttcaagaagcagctgcttcaggactcaaaagtatcgaaaatttcatcggtttaatgtctcgtgatagctttaactctgatcagccatcttcttcttccgcctccgcctccgcctccgccgccgcagatcttgaatcagctcgtaacacaacggcggacgcggctgtttcaaagtttaaaagagtcatatctctcttagatcgaactcgaaccggacacgcccggtttagacgtgctccggttcatgttatttctccggttcttttacaagaagaaccaaaaacgacgccgtttcagtctcctcttcctcctccgccgcaaatgatccgaaaaggttcgttttcttcatcgatgaaaacgattgatttctcatctctctcctctgtacccacggaatcagacaaccagaagaagattcatcatcatcaacgtccctctgaaacggcgccgtttgcgtctaaactcaagcctctcacgacggctcgtcttttcaaatcacaaagagaaatgtactctgaaatctttaccggaaatgccttcgctcttcctcggcgtgtattgtcaagaaagaaataacagagagataatagggtccggcatagtcaaaatgccgtgtacaccgacatattctggaggatcngacaaaccattaaggtctccatcagagattatatgggtacgtagagtgccccataactgtatagacgcggatcgcattngtgtctataaggaataacatcttcccgtaccgcggcccgtgtgacttttagctctgaagacaatttaggtttgaattactttagaggcaccccg

SEQ ID NO: 99130 - DNA, 697 bp, Arabidopsis thaliana columbia
  unsure (1)..(697): unsure at all n locations
tttaggacgnnnnnnnnnnnnnnnnnnnnnnnnnnnnnnnnnnnnnnnnnnnnnnnnnnnnnnnnnnnnnnnnnnctttttttttttttttttctgaaactggaataaagcatagaaacgtttcaagtgtttacaaatactactgtatatgacttttggagcattgctcaagaaaaatcacatacagatgcatgtaaataagaaataagagtttcattttcttattctgaacaataatcataagtaatgtggctgtgctctgtacagctaacaacccggaagagaatgcttacttgagatgttcaacgtcctgcaaaaatcaaacttccccaggaagcatagtatctaccggaccaagatcacagtaggcaatgccctctccagtgaggtgtgcaacacatctcttctcagccaacagttccgcttccgacttggcgattcgttggcgaaggtagtcatcaatttctacatccttgacaagttcataatctccatctcccttcgaccggcatggcatactgaagacaaggcctcttcaataccataaggatttccatccggggacaccccaggcggaaaccaatcaccctcaggggtgggggttacaagagctttttggtcacaatgggccgcagtgagccnngaggtggccnttttggataaaacccncctttntggaannccaggggccccnnna

SEQ ID NO: 99131 - DNA, 729 bp, Arabidopsis thaliana columbia
  unsure (1)..(729): unsure at all n locations
nnnnnnnnnnnnnnnnnnnnnnnnnnnnnnnnnnnnnnnnnnnnnnnnnnnnnnnnnnnnnnnnnnnnccacgcgtccgcggacgcgtgggctttctctttctctcagcactctctgcctatctccgccgcggagatccatcgtgttttctacttctgttggtatccatggattctctcgttgaatccggttggaagtaccttgttacgcatttcagtgactttcaactggcgtgtattgggagttttatacttcatgaaagcgtgtttttcttgtctggactcccttacattttcctagaaaggactggttttctgagcaactacaaaattcagaccaaaagtaatactcctgaagcccagggaaaatgcattgctcgactattactttaccattgctgcgtaaacttgcccctcatgatggcgtcgtatcctgtattcagattcatgggcatggaaagcagttttcctctgccgtcctggaaagtggtgtctgcccagatcttattctacttcatcattgaggattttgtattctattggggtcacagggatcttgcatactaaatggctctacaagaacgtgcacagtgtgcatcatgagtacgcgacaccgtttggtttgacatcagaatatgctcatcccgctgaaattctgttccttggttttgctaccattgttgggccggctctcaccgggcctaacctgatcaccctttggttttggatg

SEQ ID NO: 99132 - DNA, 802 bp, Arabidopsis thaliana columbia
ttaggacgcactatagaagagtctatgacgtcgcatgcacgcgtacgtaagcttggatcctctagagcgtccgcccttttttttttttttttttttttttttttttttttttttttttttggggaggatttggatcaccctcttctttgctcttctttttcatcagaaaaccattgtctactaataatagtaataataagcaccgtcacaaattcaccatcattgtttgatgataatctattttacatggtagaagaattgcagacacccataaataaaagactcagtatatgttttctttattcccattcgatggttgaaggaggctttgatgtaatgtctagaaccacacggtttactccttgaacgctgttacagattttccgggaaacatcgtccagaaacttgtgctcaaaattgaaccaatctgcggtcattccatcttggcttgtaactgcacgaagagcaacaacatgagaattgttctcttgtcaccttggactccaactgatcttacaggcaagaacactgcgaaagcttgccagatcgaatcatagagacccgcatctctgattgattggatgaatatctcatcaacctgacgaagaacctcgagggcgtttccttgggtgacatctcccaagactctaactgcaagtcctggaccagggaatgggtgacgcttcaagaaccctacaggaacgttcaagattcttccaagctcacgaacctcatctttgaagagaagcttgagtggttcgatgagcttaatttcatgtctttagggagtcctccgacgtta

SEQ ID NO: 99133 - DNA, 505 bp, Arabidopsis thaliana columbia
  unsure (1)..(505): unsure at all n locations
nnnnnnnnnnnnnnnnnnnnnnnnnnnnnnnnnnnnnnnnnnnnnnnnnnnnnnnnnnnnnnnnnnnnnnnnnnnnnnnnnnnnnnnnnnnnnnnnnnnnnnnnnnnnnctctgagttatcgaatattctatatatgtaaatggccagtttgacaattacctaaaatcatatgatagacataaataattctacaaatttttaaaataaatttaaactaaaggacaataaaattaccattatgttcacatttagtaaatatttcatggacgaatttctccacgtcgattttcgaaatctcataattttccggcgccggaatatacgggggtcgtgataccttaggcaccaaatcccaatccaaccctttaaagaaatcatgtccctggattccttcaacattaatcctacggctaggatctttctccaacagttttcttaccaagtctcttaacgatgtcgtttctccgaccaaactcggcggttcagttaatatctttaaaaaag

SEQ ID NO: 99134 - DNA, 522 bp, Arabidopsis thaliana columbia
  unsure (1)..(522): unsure at all n locations
nnnnnnnnnnnnnnnnnnnnnnnnnnnnnnnnnnnnnnnnnnnnnnnnnnnnnnnnnnnnnnnnnnnnnnnnnnnnccacgcgtccgggttgccggtttgaaccatcgaggctcgcgaaaccgggtatggtgaaaaccatgttcttccgctggatccgtctcgagatgttatcggctttgatagcaaagacacctcttctcgagatcttgaacatcaaaaactgttgggagattggtcttgatgcgataaccggatataacgaccggttaatgaagttggttttcaagtattgttccttctccgcgcagcaaaccacactggacgtgcccaatattcagatcttcaagtactttgggaaagtctatcgctttgagttcgcgagtgcgaacaagttaatggaggaggcatatctggactaccgtgaagagagccgttacaacgtgagtgcaggagcaataatcagtggatttctctacagtatgttgtctgctaagacattcacaatctgtccgtatgtcctt

SEQ ID NO: 99135 - DNA, 470 bp, Arabidopsis thaliana columbia
ccacgcgtccgcacacgcgtcagctctgtctgtgttcaaaacaagttcattcgatctatagagacgaaacaaaaagagagatcgtacgcaaaagtttccgatatggctcgctcgtttggagctaacagtaccgttgtgttggcgatcatcttcttcggatgtttatttgcgttgtcctctgcaatagaagaggctacgaagttaggatcagtgatagggatagatcttggtactacttactcttgtgttggtgtttacaagaatggtcatgtcgaaattattgccaatgaccaaggaaaccgtattacaccttcatgggttggttttactgactctgaaagactcattggtgaggctgctaagaatcaagcagctgttaatccagagaggactgtcttcgacgttaagagattgatcgggcgaaaatttgaggataaggaggttcaaaaggataggaaacttgtacctta

SEQ ID NO: 99136 - DNA, 994 bp, Arabidopsis thaliana columbia
  unsure (1)..(994): unsure at all n locations
caggctctattccaactcattttagggaaggctggtccgcctgcaggcaccggcccggaattcccgggtcgacccacgcgtccgaggaaacacggttattccaaccaagaaatctcaggttttcacaacgtaccaagaccagcagaccaccgtctccattcaggtctttgaaggtgaaagaagtctcaccaaggactgcaggctactcgggaaattcgacctcactggagtcccaccggccccaagaggaacccctcaaatcgaggtcacatttgaagtggacgccaacggtattcttaatgtgaaagcagaggacaaggcgagtggtaaatcagagaagattacaatcacaaacgagaagggtcgtctgagccaagaagagattgaccggatggtgaaggaggcacaggagtttgcagaggaagccaagaaggtgacggagaagatcgacgccaggaatgccctggagacatacgtgtacaacatgaagaaccaagtgagcgacaaggacaagcttgcagacaaattggaaggagatgagaaggagaagatagaagcagcgacgaaagaggccttggagtggctcgacgagaaccaaaactcagagaaagaagagtacgacgagaagctcaaggaggtagaggcagtgtgtaacccaatcatcacagcagtttaccagagatcaggcggagcaccaggtgcaggaggagaatcatcgactgaggaggaagatgagtctcacgatgagctctagatgtcttctgttattggttaatttattaaaccatagagacaaggttttgaggatgaaacgtcgtttttgttttttgtatttggtttcctttttcttatggatttttaggaaaggggagagattaagtagcgtcccttctttagtctccctggacgttctctttatgcggccccgaattcgatatccagcctatccataccctcgacctcgagggggggcccggtacncaatcgcctatag

SEQ ID NO: 99137 - DNA, 650 bp, Arabidopsis thaliana columbia
  unsure (1)..(650): unsure at all n locations
tcaggncagggttncnggaancangagtnagngaatcgcccccaggatccctgggcatccgttccacntgaggnccaagtgncgccaaggncaagcttcagccaaattggaaggagatgagaaggagaagattccaagcagcgtcgaaagagcccttggagtggctccacgagacgccccaactcagagacaggtagagtacgacgagatagctcaaggaggtagagccagtgtgtaacccaatcatcacagcagtttaccagaggtcacgcggagcaccaggtgcaggaggactatcctcgactgaggaggaaggtgagtctctcgatcagctctagatgtcttactgtcagtgttaatgtattatcccatagacccaagtgttgaggatgaaactgtcgtttttgttttctgtaggtggtttcctttttcttatgcagttttaggaaaggggagagacctaagtagcgtcccttctttagtctccctggacgttctctttatgttcatctgataactggacttcttcataacaaataccttttttttaaaaaaaaaaaaaaaaaagnnnnnnnnnnnnnnnnnnnnnnnnnnnnnnnnnnnnnnnnnnnnnnnnnnnnnnnnnnnnnnnnnnnnnnnnnntagaatcg

SEQ ID NO: 99138 - DNA, 2452 bp, Arabidopsis thaliana columbia
  unsure (1)..(2452): unsure at all n locations
cacacgcgtccgcccacgcgtccgcccacgcgtccgatttaagcatcctaacttcttcttcaaagcttaaaaaccagaaaacaaaaggaagctctctgttcaaatcaaaaagagagatcgtacgcaaaagtttccgatatggctcgctcgtttggagcaaacagcactgttgtgcttgcgatcatcttcttcggatgtttatttgcgttttccactgcaaaagaagaggctacgaagttaggatcagttattgggatagatcttggtaccacttactcttgtgttggtgtttacaagaatggtcatgttgaaattattgccaatgaccaaggaaaccgtattacaccttcatgggttggttttactgactctgaaaggctcattggtgaggctgctaagaatcaagcagctgttaatccagagaggactgtcttcgacgttaagagattgatcgggcgaaaatttgaggacaaggaggttcaaaaggacaggaaacttgtaccttaccagattgtgaacaaggatggtaagccatacattcaagtcaagatcaaggatggtgagactaaggttttcagtcctgaggagatcagtgccatgattctgactaagatgaaggagacagccgaagcctaccttggaaagaaaatcaaggacgctgttgtcactgttccagcttacttcaatgatgctcaaaggcaagctaccaaggatgccggtgttattgctgggctcaatgttgctagaatcatcaacgaacctactgctgctgctattgcctacggtcttgataagaagggtggtgagaagaacatccttgtatttgaccttggtggtggtacttttgatgtcagtgtcttgaccattgataacggagtgtttgaggttctctccacaaatggtgacactcacttgggaggtgaggactttgaccacaggatcatggagtacttcatcaagttaattaagaagaagcaccagaaggacatcagcaaggacaacaaggctcttggtaagctccgaagggaatgtgagagggcaaagagagctctaagcagtcagcaccaagtccgtgtagagattgagtcactctttgatggtgttgatttatctgagccactcaccagagctcgtttcgaggagcttaacaatgatttgttcaggaagaccatgggacctgtgaagaaggccatggatgatgccggtctacagaagagccagatcgatgagattgtccttgttggtggaagcaccaggatcccaaaggttcagcaactgttgaaggacttctttgaaggtaaagagccaaacaagggtgtgaaccccgacgaggctgttgcctatggtgctgctgttcagggtggtattttgagcggagaaggcggtgatgagaccaaagatatccttcttcttgatgttgcgccactcactttaggtatcgagactgtaggaggagtgatgacaaagttgatcccaagaaacacggttattccaaccaagaaatctcaggttttcacaacgtaccaagaccagcagaccaccgtctccattcaggtctttgaaggtgaaagaagtctcaccaaggactgcaggctactcgggaaattcgacctcactggagtcccaccggccccaagaggaacccctcaaatcgaggtcacatttgaagtggacgccaacggtattcttaatgtgaaagcagaggacaaggcgagtggtaaatcagagaagattacaatcacaaacgagaagggtcgtctgagccaagaagagattgaccggatggtgaaggaggcagaggagtttgcagaggaagacaagaaggtgaaggagaagatcgacgccaggaatgccctggagacatacgtgtacaacatgaagaaccaagtgaacgacaaggacaagcttgcagacaaattggaaggagatgagaaggagaagatagaagcagcgacgaaagaggccttggagtggctcgacgagaaccaaaactcagagaaagaagagtacgacgagaagctcaaggaggtagaggcagtgtgtaacccaatcatcacagcagtttaccagagatcaggcggagcaccaggtgcaggaggagaatcatcgactgaggaggaagatgagtctcacgatgagctctagatgtcttctgttattgttaatttattaaaccatagagacaagttttgaggatgaaacgtcgtttttgttttttgtatttggtttcctttttcttatggatttttaggaaaggggagagattaagtagcgtcccttctttagtctccctggacgttctctttatgttcatctgataactttacttcttcataacaaataccttttttcctattcaaaaaaaaaaagggcgaccgctctagaggatccaagcttacgtacgcgtgcgtgcgacgtcataactctnnnnnnnnnnnnnnnnnnnnnnnnn

SEQ ID NO: 99139 - DNA, 644 bp, Arabidopsis thaliana columbia
aaatccttgggcagaggaaaaagtttatagcgactcttttcctctaaaagggtctgtctcttccttcttctctcttcagatctccatttcacggatcaatcctgtgtttgaaacaatgggtgttgaagttgtaaactctggtggatttgaggttgctccggctcctttcgaggggaaacctgagaagaacgggaagctggaccaaggaaaaggagatgatgcccccatcaattttggttcagtcggtgagctaccaaagaatgccgaagagaataataacaaagtggtcaactctgatgcacccaaaaatgcagcagaagagtggcctgtggctaagcagatccactctttctaccttgttaaataccgttcttacgctgaccccaaaattaaagctaagcttgatctagctgataaagagcttgaaaagttgaacaaagctcggactggagttttggacaagttgagagctaagagggccgagagatcagagttatttgatctgctggacccggtgaagtcagagcgtaagggattcaacacaatgtttgatgagaaaagaaaggaaatggaaccattgcagcaagcactgggaaagataaggagcaatgatggtgggagtgctcgtggccctgctatctgtt

SEQ ID NO: 99140 - DNA, 516 bp, Arabidopsis thaliana columbia
  unsure (1)..(516): unsure at all n locations
ggctggatcaaccgcaaaatcatagaagacttcactgcttatgcagatgtatgtttcagagagtttggggaggatgtgaagttatggactacaataaacgaagctacaattttcgccattggttcttatgaccaaggaatctcgccccctggacattgttctcctaacaaattcatcaattgtactagtggaaattcttctacagaaccatatcttgcaggccataacatattgctagctcatgcctctgcttcaaagttgtataaactaaagtacaagagtacgcagaaaggatccatagggcttagtatatttgcattcgggttaactccttatacaaactccaaggacgatgaaaatcgcaactcaaagagctaaatgcatttcctctatggatggtgagaaacaaaactttatttcttaacttgaggacaaaatctaaagactaaattgataataaaggatgttgaagcctttggtannnggggactatccggatgaaatgaagagaacctt

SEQ ID NO: 99141 - DNA, 903 bp, Arabidopsis thaliana columbia
acagaagggggagccggtacttctgcttatcagtgggaaggagctgctaatgaagacggaagaactcctagcgtctgggatacaacctcccactgttataatggaagtaatggagatatagcatgtgatgggtatcacaaatacaagatgttaagttgatggcagaaatgggcttagaatcattcagattctctatctcctggtcaagacttatacctaatggaagaggacgcattaacccaaaaggtttattgttttacaagaatctcatcaaagagctacgaagccatgtctcttgaagatgagtatggaggatggatcaaccacaaaatcatagaagacttcactgcttttgcagatgtatgcttcagagagtttggggaggatgtgaagttatggactaaaatcaacgaagctactttattcgccattggttcttatggcgacggaatgaggtatggacattgtcctcctatgaattactctaccgcaaatgtttgtacggaaacatatattgcaggccataacatgttgctagctcactcctctgcttcaaatttgtataaactgaagtacaagactaagcaaagaggatccgtaggccttagtatatatgcttatgggctatctccttatacggactccaaggacgatgaaaccgcaactgaaagagctgaagctttcctctttggctggatgttaaagcctttggtagttggggattatccggatataatgaagagaaccttggggtcgagattaccggttttctcagaagaagagtcaaaacaagtgaaaggatcatctgactttgtaggagttgtacactacaacacattctatgtcacaaaccgacccgcaccttctctcgttaccagcattaacaaactcttctttgcagac

SEQ ID NO: 99142 - DNA, 809 bp, Arabidopsis thaliana columbia
  unsure (1)..(809): unsure at all n locations
ccnnnnnnnnnnnnnnnnnnnnnnnnnnnnnnnnnnnnnnnnnnnnnnnnnnnnnnnnnnnnnnnnnnnnnnnccacgcgtccgaaaaatgaaacatttctctctacttttcatttttctggtcatcctcttggcaacaagctacagtgatgcctttaccagaaacagttttccaaaggatttcctcttcggagccgccacttctgcttatcagtgggaaggagctgctaatgaagacggaagaactcctagcgtctgggatacaacctcccactgttataatggaagtaatggagatatagcatgtgatgggtatcacaaatacaaggaagatgttaagttgatggcagaaatgggcttagaatcattcagattctctatctcctggtcaagacttatacctaatggaagaggacgcattaacccaaaaggtttattgttttacaagaatctcatcaaagagctacgaagccatggaatcgaacctcacgttacactttaccactacgatcttcctcagtctcttgaagatgagtatggaggatggatcaaccacaaaaatcatagaagcctttacaagcttttgcagatgtatgcttcagagagttttggggaggatgtgaagttatgggctccaaatcaacggggctcaaatnttnggcctttgcttttttntgcaaagccgtnggtttggaaattntccccaggnanttttttnttgnacaantttttnaggcntacatgttntngccatnccctntcaaattgtnaccaggcnaggtgaaanggccctgcctggtttttctttt

SEQ ID NO: 99143 - DNA, 554 bp, Arabidopsis thaliana columbia
  unsure (1)..(554): unsure at all n locations
accacgcgtccgcttccttcttaaacaaacccaattcgatttcaacgaacgcctcttctctctcactctctttcgatttgttctttgccggagctcgtagtgtaagcgtgatccgcggcggagagatggctcctaatgatcctaaaaaagccgttggtggcggcggaagtggtttcttcgcctctcttgcttcgtcgatctccaatttgggatctgctatgaccaaatcagttaatggtttggttccctatgagggacttgaagttatcaatcctgaaggaagtacagatgatgctgaggaggaagcaagcagaggaagatggaagcaagaggatcgagatggctattggaagatgatgcagaagtacataggatctgatgttacatcaatggtgacccttcctgtgattatttttgaaccaatgacaatgcttcagaaaattggcggagtttgatgggatactcgcatcttgctaggacatggcaggcaaaaaccggggacccttatttccgcatggtgttttcatcaaccgggggntatntccngggtttat

SEQ ID NO: 99144 - DNA, 1410 bp, Arabidopsis thaliana columbia
  unsure (1)..(1410): unsure at all n locations
nnnnnnnnnnnnnnnnnnnnnnnnnnnnnntctatcttctccacgttactaccacctaacctctcatccaccttttctcctttaagcatatttcatttcatctccgaaaggaattgtatcgttcctcacacacgcctctcatctcttatccattcttgtccttttttcagctcaacaagaatggataattgtactggagaaaatcccatggcttctcagttgaacattctccgatgcccgttcttgaggaacatcaatgagcccactaacctctctttctcttcatccttgccttttcccatccctgcaagagctgggaaaggacctatatttgaagatggtcccaattttgatacggcgtttaggcttttccatggccaagatggagttgtccctctctctgacaccgctcgaactgaagcccagaagcctgtgcctgtattccatccacttgctgctaaggcggccactattagtctctcatcctttggatctggagggccttttggatttgatgcattttctgacatgtttaaaaatcaaaagaagaagtcagattcatccaaaaataagggaggaaaccacgaagccatgggcgacgaatggcttaaaacaggaaactgcccaatagcaaaatcatatcgagctgtaagtggtgtggcaccacttgtggcaaagatcctgcaaccccctccaggcatgaaatttaaatgccctcaagcaatagtcacagctcgagcagcgatatcaaaaacacctttcgccaagaacctccgtccacaacctttaccagctaaagtactagtgatcgggatgctgggcatggcgttaaatgtgcctttaggggtctggagagagcacactgaaaagttttcggcatcttggtttatagctcttcacgcagcggttccattcataggaatactgagaaagtcaagtgttgatgcctaaaaacagctatggtattcaccatagcagcatcagttgttgggacaggtggattgggttcaagaggcagagagggcggagactccaagtctgtacctgagaagaagttgacattggaggtaccaaatccgtcttctgttgaagcagatcagatgcaatttgccggagtttcatcagatggaagatgccggtgataaagtggtgatgaagtggaatcccatgatgcttgatgttgcaagccctgtgtcttccggagcagctactgttgtctgctaaaaggattttgtaattctcttcgaggatttatatatataattgtttttcttgtatttttttcggctgattgtatttaaaaagtttcttaatgtttgagaaaaacaagaataaagccattttttaaactgttaattgtattttaatgtaaaagacttgtttgattgaataaaaggaaagagaagttgg

SEQ ID NO: 99145 - DNA, 514 bp, Arabidopsis thaliana columbia
cccagatctgtttatctcgttgattactcttgttatcttcctccggagagtcttcaggttaagtatcagaagtttatggatcattctaagttgattgaagatttcaatgagtcatctttagagtttcagaggaagattcttgaacgttctggtttaggagaagagacttatctccctgaagctttacattgtatccctccgaggcctacgatgatggcggctcgtgaggaatctgagcaggtaatgtttgggtgctcttgataagcttttcgagaataccaagattaaccctagggatattggtgtgttggttgtgaattgtagcttgtttaatcctacaccttcgttgtcagctatgattgttaacaagtataagcttagagggaatgttaagagttttaaccttggtggaatggggtgtagtgctggtgttatctctatcgatttagctaaagatatgttgcaagttcataggaatacttatgctgttgtggttagtactgagaacattact

SEQ ID NO: 99146 - DNA, 736 bp, Arabidopsis thaliana columbia
  unsure (1)..(736): unsure at all n locations
gttttcaccaagatcggaatcataaatgtncctgagtggtacgatnctgggaaagagcagtattttgcatcgtngtcgacattgttcgtgatcgagttcatattgtttcattacgttgagatcagacggtggcaagacatcaagaacccaggaagtgtgaaccaagaccctatctttaagcaatacagcttacctaagggtgaagttggttacccnggtggaatctttaacccgcttaactttgctcctacgcaagaggccaaggagaaagagctagccaaacgggaggttggcgatgttggcattcttaggggtttgtgggttcaacacaattgtgtctcggaaaaaggacccatttgaggaatcctgtttgcaagccactttgtctgacccccttgggcacaaacacttctttgtccccacacccttcacacttaaaggggtgtaacgacaggacttatgatctcatacctatctatcttccatcactttcatgtctggctgtgagtgtgtttcatcttagagttcttggtttttccccccaacaagtaggtaacccgttgtggctccatgaacaaatttggaatcttcaatgtacagaggaactaagttaatcaccattgttgtactctttaatatctattattcatgtggcaacagttatatataagcacgccataacttagattcaaaaaaaacacacaagggcggcagctctagaggatccaagcttacg

SEQ ID NO: 99147 - DNA, 708 bp, Arabidopsis thaliana columbia
cacgcgtccagagatcagacggtggcaagacatcaacgtaatgaaacaatatgaactcgatcacgaacaatgtcgacgacgatgttcgtgatcgagttcatattgtttcattacgttgagatcagacggtggcaagacatcaagaacccaggaagtgtgaaccaagaccctatctttaagcaatacagcttacctaagggtgaagttggttaccctggtggaatctttaacccgcttaactttgcgcttcctacgcaagaggccaaggagaaagagctagcaaacgggaggttggccgatgttggcattcttagggtttgtggttcaacacaatgtgactggaaaaggaccatttgagaatcttggttgcagcacttgtctgacccatggcacaacactattgtccaaaccttcaactaaagagtgaagacagacttatgatctcatacctatctatcttccatcactttcaagtctgtcagagagtgtggttcatcttagaggtcttggtttttgagcttgaattattggtgaaccgttgtagctccatgaaccaatttggaattttccatggccagaggaacttagttaatccaaaaaaaaaaaaaaaaagggcggcccccggctagtgagcttgtcggcccaggaatttaatccgggccgggtccttccgggggtcccaccttcccaaaaatgggtggagaaaaa

SEQ ID NO: 99148 - DNA, 701 bp, Arabidopsis thaliana columbia
  unsure (1)..(701): unsure at all n locations
anttccccnncaaagggacaaacctgggncccncccggtnggnccccnaaaacctnnnggccccccggnttcagaatnccggncccccngtccatntggtccatnccgttgggnntcanccgntgccaggcatcaaggccccaggaagtgtgacccaagcccctatctttaagncaatacagncttaccttaagggttgaagttggttcccctggtggaatcttttaacccgcttaactttgctcctacgcaagaggccaaggagaaagagctagcaaaccgggaggttggcgatgttggcattcttagggtttgtggttcaacacaatgtgactggaaaaggaccatttgagaatctgttgcagcacttgtctgacccatggcacaacactattgtccaaaccttcaactaaagagtgaagacagacttatgatctcatacctatctatcttccatcactttcatgtctgtctgtgagtgtgtttcatcttagagttcttggtttttgagcttgaattattggttgaaccgttgtagctccatgaaccaatttgggattcttcaatgtacagaggaactaagttaatcaacattgttgtactctttaatatctaaaaaaaaaaaaaaaaagggcggccgctctagaggatccaagcttacgtacgcgtgcatgcgacgtcataaatcttnctatagtgtg

SEQ ID NO: 99149 - DNA, 416 bp, Arabidopsis thaliana columbia
cccacgcgtccgcccacgcgtccgcggacgcgtgggttccaatccattcttcttcaagtgccgggttctcgggtcggttcttctaagtctagctagggataatggctactgtcactactcatgcctcggcctcgattttccgaccttgtacttcaaagccaagattcctcaccggttcttccggtaggttgaaccgcgacttgtcgtttacatcgatcggttcatcggccaaaacgtcgtcgttcaaggttgaagctaagaaaggagaatggttgcccggtttggcatcgcctgattatctcaccggcagtcttgccggtgacaatgggtttgacccgttgggtctagcagaggatccagcatgctagtgaagggtactgcagccggttatcatcaacctactattggctatgctc

SEQ ID NO: 99150 - DNA, 603 bp, Arabidopsis thaliana columbia
  unsure (1)..(603): unsure at all n locations
gtacgcctgcaggtaccggtctggaattcccgggtcgacccacgcctccccattcttcttcaagtgccgggttctcgggtcggatcttctaagtctagctagggataatggctactgtcactactcatgcctcggcctcgattttccgaccttgtacttcaaagccaagattcctcaccggttcttccggtaggttgaaccgcgacttgtcgtttacatcgatcggttcatcggccaaaacgtcgtcgttcaaggttgaagctaagaaaggagaatggttgcccggtttggcatcgcctgattatctcaccggcagtcttgccggtgacaaatgggtttcgacccgttgggtctagcagaggatcccagagaacttgaaatggttcgtccaggcagagcttggtcaacggacggatgggctatgctcgggtgtcgctgggatgcttttgccggaaggtttcaccaagatcggaatcataaatgttcctgaagtggtacgatgctgggaaaggagcagtattttgaatggcggnngaaattttncggnaccgggtnaaatngtttaatacggttaganaaacggtgnaagnataagacccnnng

SEQ ID NO: 99151 - DNA, 1080 bp, Arabidopsis thaliana columbia
  unsure (1)..(1080): unsure at all n locations
gtgcgcctgcaggtaccggttcggaattcccgggtcgacccacgcgtccgcgattttccgaccttgtacttcaaagccaagattcctcaccggttcttccggtaggttgaaccgcgacttgtcgtttacatcgatcggttcatcggccaaaacgtcgtcgttcaaggttgaagctaagaaaggagaatggttgcccggtttggcatcgcctgattatctcaccggcagtcttgccggtgacaatgggtttgacccgttgggtctagcagaggatccagagaacttgaaatggttcgtccaggcagagctggtcaacggacgatgggctatgctcggtgtcgctgggatgcttttgcccggaagttttcaccaagatcggaatcataaatgttcctgagtggtaccgatgctgggaaagagcagtattttgcatcgtcgtcgacattgttcgtgatcgagttcatattgtttcattacgttgagatcagacggtggcaagacatcaagaacccaggaagtgtgaaccaagaccctatctttaagcaatacagcttacctaagggtgaagttggttaccctggtggaatctttaacccgcttaactttgctcctacgcaagaggccaaggagaaagagctaccaaacgggaggttggcgatgttggcattcttaggggtttgtggttcaacccaatggtgactggaaaaggaccatttgagaatctgttgcagcacttgtctgacccatggcacaacactattgtccaaaccttcaactaaagagtgaagccagacttatgttttcatacctatctatcttccatcactttcatgtctgtctgtgagtgtgtttcatcttaagagttcttggtttttgagcttgaattattgttgaaccgttgtagctccatgaacaaatttggaatcttcaatgtccaaaggaattaagttaatcaacattgttgtactctttaatatctaaaaaaaaaaaaaaaaaaaaagaaagaagggcggccgctctagaggatcccggccgacgtcagcgacgtcaagcttgaaatagtgnnnnnnnnntcaatcg

SEQ ID NO: 99152 - DNA, 871 bp, Arabidopsis thaliana columbia
ccgtctgcggtaccggtccggaattcccgggtcgacccacgcgtccgatcgcctgattatctcaccggcagtcttgccggtgactattgggtttgacccgttgggtctagcagaggatccagagaacttgaaatggttcgtccaggcagagctggtcaacggacgatgggtctatgctcggtgtcgctgggatgcttttgccggaagttttcaccaagatcggaatcataaatgttcctgagtggtacgatgctgggaaagagcagtattttgcatcgtcgtcgacattgttcgtgatcgagttcatattgtttcattacgttgagatcagacggtggcaagacatcaagaacccaggaagtgtgaaccaagaccctatctttaagcaatacagcttacctaagggtgaagttggttaccctggtggaatctttaacccgcttaactttgctcctacgcaagaggccaaggagaaagagctagcaaacgggaggttggcgatgttggcattcttagggtttgtggttcaacacaatgtgactggaaaaggaccatttgagaatctgttgcagcacttgtctgacccatggcacaacactattgtccaaaccttcaactaaagagtgaagacagacttatgatctcatacctatctatcttccatcactttcatgtctgtctgggagtgtgtttcatccttagagttcttgggttttgagcttgaattatggtggaacccgtgtagctcctggaacaaatttggaatcttcaatggtcagaggaactaagttaatccaaaaaaaaaaaaaaaaagggcggccgctctagaggatccaagcttacggacgcgtgcaatcgaagtcatagttgt

SEQ ID NO: 99153 - DNA, 1234 bp, Arabidopsis thaliana columbia
  unsure (1)..(1234): unsure at all n locations
nnnnnnnnnngccagcggtaccgaatctcgcagttccgagcccacgcgtccgccgacgcgtccgcggaacgcctcatctttcaatctctcttgattccaatccattcttcttcaagtgccgggttctcgggtcggatcttctaagtctagctagggataatggctactgtcactactcatgcctcggcctcgattttccgaccttgtacttcaaagccaagattcctcaccggttcttccggtaggttgaaccgcgacttgtcgtttacatcgatcggttcatcggccaaaacgtcgtcgttcaaggttgaagctaagaaaggagaatggttgcccggtttggcatcgcctgattatctcaccggcagtcttgccggtgacaatgggtttgacccgttgggtctagcagaggatccagagaacttgaaatggttcgtccaggcagagctggtcaacggacgatgggctatgctcggtgtcgctgggatgcttttgccggaagttttcaccaagatcggaatcataaatgttcctgagtggtacgatgctgggaaagagcagtattttgcatcgtcgtcgacattgttcgtgatcgagttcatattgtttcattacgttgagatcagacggtggcaagacatcaagaacccaggaagtgtgaaccaagaccctatctttaagcaatacagcttacctaagggtgaagttggttaccctggtggaatctttaacccgcttaactttgctcctacgcaagaggccaaggagaaagagctagcaaacgggaggttggcgatgttggcattcttagggtttgtggttcaacacaatgtgactggaaaaggaccatttgagaatctgttgcagcacttgtctgacccatggcacaacactattgtccaaaccttcaactaaagagtgaagacagacttatgatctcatacctatctatcttccatcactttcatgtctgtctgtgagtgtgtttcatcttagagttcttggtttttgagcttgaattattgttgaaccgttgtagctccatgaacaaatttggaatcttcaatgtacagaggaactaagttaatcaacattgttgtactctttaatatctattattcatgtggcaacagttatataaaaaaaaaaaaaaaaaaagagcggccgctttaaaggatcccagctgacgtgcaggcgacgtcatagctcgtaggatagtgtnnnnnnnnnnnnn

SEQ ID NO: 99154 - DNA, 645 bp, Arabidopsis thaliana columbia
cggcactatacgactcacttagggaaagctggtacgcctgcaggtaccggtccggaattcccgggtcgacccacgcgtccgcattcctctgactaggacgacccctttagaacttaatacattcagcctgtggttcacagttctccactctcttatatttagatgttatttttctgttctaccttctcttcataggaactaaagtgaattgagtcagagaaaaagagaaagagagaaggtaacatggatgcttgttttcttacctcaagatcaatctctggtgttaaagagcttgtcccgttcatcaaagcgagaatctttacttgccccaagagaaattctggccaatttgttaccaggaaggttgcttctccgatctctgtaaattgttctctttcggattcatggaagccactggaagatgatgctgatctcttcaaggattgtgtcaacaattctacatcagatgctgattggagggagttcagggcaaggcttgttgcaggggaacaagctgcaacttccgagaaggatcagccctcgtggtctaacccggacatggtggtggactatcagccatcatcgtcctcactgatcacaattggaagcaaatgggcacacaagatccatgagccagagacaggc

SEQ ID NO: 99155 - DNA, 542 bp, Arabidopsis thaliana columbia
cgattgaattaggtgaactatagaagagctatgacgtcgcatgcccgccgtccgtaagctcggaattcggcttcgaggcattatgaagaattgtgagcgatttgctaatctcgctctcgcaggtttgacattggctccactcgttgtgagagtaaatccaaatttgaatgttattctcacagcatgtatcactgtttatgtgggttgctttcgttcggtcaaggatactcctccaacggagtcgtatgccgggtgaacatgccatgcgtttcccattggttgggagtgctatgcttctctcacttttcttattgttcaagttttctctcaaaggacttggtttatgctgtgctaacagcttacttctttggtcttgggattgtcgcttctttcagcgacattgttcccacccttcagaagatttattaccaattccttgggatgacaatcttattcctctggcgttgtccttatttcaaagttctttggaggtggaggtcccaaaggccccagttcgtatccggaaatccttgtaacctgat

SEQ ID NO: 99156 - DNA, 673 bp, Arabidopsis thaliana columbia
atgatctgccagcactaatcgactcactatagggaaagctggtacgcctgcaggtaccggccggaattccgggtcgacccacgcgtcgatctggtggaaattttatcttttgaccccaccactggatctctctatatacacattcatctgagtaatagagtaaaaacgaaacacaagaagcaattatgaagaattgtgagagatttgctaatctcgctctcgcaggtttgacattggcaccactcgttgtgagagtaaatccaaatttgaatgttattctcacagcatgtatcactgtttatgtgggttgctttcgttcggtcaaggatactcctccaacggagacgatgtcaaaagaacatgccatgcgtttcccattggttgggagtgctatgcttctctcacttttcttattgttcaagtttctctcaaaggacttggttaatgctgtgctaacagcttacttctttgttcttgggattgtcgctctttcagcgacattgttaccagccatcagaagatttttaccaaatccttggaatgacaatcttatcgtctggcgttttccttatttcaagtctttggaggtagagttcacaaagtcccaagttgttgcgggaatccctgaacattcttctgtgcgtggtatgcgtggaaaaacattggctggcta

SEQ ID NO: 99157 - DNA, 431 bp, Arabidopsis thaliana columbia
cagctacaggttccttcagtttgattttaaggcaattgaggcagcaacgaattgctttttgccaattaacaagctaggtcaaggtggtttcggcgaagtttacaagggtacattgagtagtggactacaagttgcggtgaagagactatcgaagacatcaggacaaggtgaaaaagagtttgaaaacgaagttgttgttgttgcaaagctccaacatagaaatttggtaaagctgcttggttattgtttggaaggagaagaaaaaatacttgtctacgagtttgtgcccaacaagagccttgatcacttcctctttgactctacgatgaaaatgaagctagactggacaagaaggtacaagatcataggaggaattgctagaggaattctttatcttcatcaagattcacgactcacaattatacatcgag

SEQ ID NO: 99158 - DNA, 620 bp, Arabidopsis thaliana columbia
gtttatgagcaccatatcgaattcgcggccgcaaataattaaggaaagagatgtgtgcatttgatggcacataaagctaaacaaaacaataccaggtatgacgaaaccaaaatttgccaaataagcagctattgtctagttataacatcataacatcaccagtcaccagtcgatacattaaatttaaagttgcaactagaaatatattgaaaaacagaagcagtcacgagcgaaatcgctcatgctaccaccttctgagatttgatccagcgaccacccggtgaatctgaacccctctttctaccgaatctccctgctcttcttcctccccttcctccacgggcacccttgtcaaaccgatctttgcttcgtaggagagtccaatactccttgtcagcttcgccaataacaggttctaggacagcaataaaattcttcacggctagtccaccttcattggctaatactgctgctgcacgggctttctgggatgcttcaggttaatcaaacctaagataacccggctcaaatcccatcttgaaatcaacaaactcgacatcatcaaatgttccgaaaacagccttaagaacttcacgtaagacaacatccgttattaattt

SEQ ID NO: 99159 - DNA, 750 bp, Arabidopsis thaliana columbia
acactatagaagagttatgacgtcacatgcacgcgtacgtaagcttggatcctctagagcttccgcccttttttttttcttttttatgactaaaccaaaatttgccaaataagcagctatttctagttataacatcacgagtcaccagtcgatacattaaatttaaagttgcaactagaaatatattgaaaaacagaagcagtcacgagcgaaatctctcatgcttccaccttctgagatttgttccagcgaccacccggtgaatctgatcccctctttctcccgaatctccctcctcttcttcctccccttcctccacggccacccttgtcaaaccgatctttgcttcgtaggagagtccaatactccttttcagcttcgccaataacaggttctaggacagcaataaaattcttcacggctagtccaccttcattggctaatactgctgctgcacgggctttctgggatgcttcaggttcatcaaacctaagataacccgtctcagatcccatcttgaaatcaacaaacttgacatcaccaaattttccgaaaacagccttaagatcttcacgtaagacaacatccttattatctttatgggtggctagagcacccttttcttctttctcatcatcttcatcctctgctccctcggcctgaacctcaccagtgttttctttatcagcatcaggagtatctgctggctttgtttcactttcttccattgtcttatcagttggatcctca

SEQ ID NO: 99160 - DNA, 523 bp, Arabidopsis thaliana columbia
  unsure (1)..(523): unsure at all n locations
nnnnnnnnnnnnnnnnnnnnnnnnnnnnnnnnnnnnnnnnnnnnnnnnnnnnnnnnnnnnnnnnnnnnnnnnnnnnnnnnnnnccacgcgtccgagcattcacatgagaccttggattggatttcagtcatggcgtgctgctggtaggaaggtctcgttatcatctaaagctgaagagtctctggaaaacattataaagcaagaaacaaagggggagattatttacttctggacaagattagacatcgatggtgatgcgtatggaagtaaaaatgctcttacattctggtctatgtgcgatatccttaaccaaggaaactgcagaaccacttttgaagatgcattccggcatatgtatgggttaccagaacacattgaagcgcttcctcccatgcctgaagatggtcatcactggtcttctctccacaattgggtgatgccaactccgtctttcctcgagtttgtcatgttctcaaggatgttctcagagtctctagatgcactgcacaacaatcttaacgac

SEQ ID NO: 99161 - DNA, 381 bp, Arabidopsis thaliana columbia
tcttcctcttcatcggccattataaagctctgttttttattaccctgttttataaacagaggaagccctaaatttggattctctattctaaagttttctcatttcgctaattttggagaaaaacgattgttttttttaatcgtttcttcatttctgattcatttttcttggtttatgatctgttcaagtaaaggaacaatcttaatcgctagaggtaaaaattcaaatacaatccctagattacccctaaaagggtcatccacaaattacgcgaatcgaattcaaattcgaaacccaatcagtgtcaaaactttccggcgatcatcttcatcgtcaatggcggtggaaacaatgtcgatgggatcagattcatcaactttg

SEQ ID NO: 99162 - DNA, 678 bp, Arabidopsis thaliana columbia
  unsure (1)..(678): unsure at all n locations
gacnnnnnnnnnnnnnnnnnnnnnnnnnnnnnnnnnnnnaagaaaaatgattatattcttacaagttatacttttttttttacaaaattcgtttttaattgtataatttttttgtcagagaaatatatatttattttctaaaatcactcttttgcagttttatttcacttattcaacaactcatcacggcgcaattatacacgaaattaaccgactgtttcttgcctagtaaatgccattccggtgttgtaacacttggtacccatgagttaagctcaatgaatccttcacctggagcctttggtccaccaatcactataatccgatccccacaagctctaaaagctaaaccccaaccggtcatcgaacccgcttgctcaggcaagttcccaactttattccaaacacgtttctccttatcataccttctaaccgccataccagcgtgatcagctgcataaagcgggtcattcacaaccgctacaggcggtggagccatcgcagctgcagacattccgttcccctggttagaccgcggtggtgacatctcagggatctctgtccatttcctagtcttcaatcaaactctccccacaagtaaaacctttggctattctcttcncaacaccaatcccaccaatgacataaaacttcccatccataaacacaccggaacac

SEQ ID NO: 99163 - DNA, 642 bp, Arabidopsis thaliana columbia
aatacgactcactttagggaaagctcgtacgcctgcaggtaccggtccggaattcccgggtcgacccacgcgtccgcccacgcgtccgagactctcagaggaacgtgtgcttttggatggttcaccagagagcccattggagacaataactgttcagctaagcaatgtggagtccaaattcgccagttccctgtctgaatcaggagaggttaaagtggaaggaaaggttaaagacggagtcccgcatttgacaaaggttggatcttttgaggtcgatgtaactcttgaaggtagtatcatactgtgcaggcaggtggatcaacctggtatgatcgggactgtcggaagcatccttggagagtctaatgtcaatgttaacttcatgagcgttgggagaattgcaccgaggaagcaagcgattatggcgattggagtagatgacataccaagcaaagagacactgaagaagattggggaaattccagcggttgaggagttcgttttcctcaagctctagtttggtgtgttgttgattcttgaatcttaaatctcaccggtgaagatttgatgttgtttgttggtttaggcgcggccgcgaattcgatatcaagcttagcgataccgtcgacatcgagggggggc

SEQ ID NO: 99164 - DNA, 1344 bp, Arabidopsis thaliana columbia
  unsure (1)..(1344): unsure at all n locations
cannnnnnnnnnnnnnnnnnnnnnnnnnnnnnnnnnnnnnnnnnnnnnnnnnnnnnnnnnnnnnnnnnnccacgcgtccgcccacgcgtccgaacgacgaaacctttgccaaaatgaagaagggagttcgaattgttaatgttgctcgtggaggtgtcatagacgaagatgcgttagtgagagctctggatgctggtattgttgcgcaggctgcacttgatgttttcaccaaagagcctccggctaaagatagcaagctcgtgcagcacgagagggtcactgtgacacctcatcttggagctagtaccatggaggctcaggaaggagttgccatcgaaattgctgaagctgttgttggagctctgaatggagagcttgctgctactgcagtcaatgcacctatggtttctgctgaggttctgaccgagctgaaaccatatgtggtgctagccgagaaactaggaagactggcagtgcaactggtggccggaggaagcggtgtgaaaaacgcgaaaatcacatacgcctcagcaagagccactgatgatcttgacaccagacttctccgagccatgatcaccaagggaatcatcgagccaatctctgacgtatatgtcaatttggtcaacgctgatttcacagccaagcagagaggtctcagactctcagaggaacgtgtgcttttggatggttcaccagagagcccattggagacaataactgttcagctaagcaatgtggagtccaaattcgccagttccctgtctgaatcaggagaggttaaagtggaaggaaaggttaaagccggagtcccgcatttgacaaaggttggatcttttgaggtcgatgtaactcttgaaggtagtatcatactgtgcaggcaggtggatcaacctggtatgatcgggactgtcggaagcatccttggagagtctaatgtcaatgttaacttcatgagcgttgggagaattgcaccgaggaagcaagcgattatggcgattggagtagatgacataccaagcaaagagacactgaagaagattggggaaattccagcggttgaggagttcgttttcctcaagctctagtttggtgtgttgttgattcttgaatcttaaatctcaccggtgaagatttgatgttgtttgttggtttaggcaataatgttattttggctttcatacagttttggtaacgttgagagtagtgtctctttgatgtttcaactttatggtttctattacttgagtgcttaaaaaaaaaaaaaaaaaaaaaaagggcggccgctctagaggatccaagcttacgtacgcgtgcaggcgacgtcatagactcttctatagt

SEQ ID NO: 99165 - DNA, 871 bp, Arabidopsis thaliana columbia
aagcttccgtacgcagcaagcctatggtttgtgaggttagcccacttaaccatagtgtgctgccaaaactagaagctggcagtcacctgtggcgaggaacggtgtaaaacgcaaaatcacaacgcccagcaagagccctgatgatcttacccaagactctccgagccatatcaccagggaatctcgagccaatctctgacgtatagtcaattggtcaacgctatttcacaggcaagcagagaggtctcagactctcagaggaacgtgtgcttttggatggttccccagagagcccattggagacaataactgttcagctaagcaatgtggagtccaaattcgccagttccctgtctgaatcaggagaggttaaagtggaaggaaaggttaaagacggagtcccgcatttgacaaaggttggatcttttgaggtcgatgtaactcttgaaggtagtatcatactgtgcaggcaggtggatcaacctggtatgatcgggactgtcggaagcatccttggagagtctaatgtcaatgttaacttcatgagcgttgggagaattgcaccgaggaagcaagcgattatggcgattggagtagatgacataccaagcaaagagacactgaagaagattggggaaattccagcggttgaggagttcgttttcctcaagctctagtttggtgtgttgttgattcttgaatcttaaatctcaccggtgaagatttgatgttgtttgttggtttaggcaataatgttattttggctttcatacaaaaaaaaaaaaaaaaaaaagggcggcacgctctagaggatccaagcttacgtacgcgtgcaggcgacgtcatagaatcttctatagtgtgttcctaa

SEQ ID NO: 99166 - DNA, 650 bp, Arabidopsis thaliana columbia
cactatagaagagtcttgacgtcgcatgcacgcgtacgtaagcttggatcctctagagcggccgccctttttttttttttttttttttttttttttttttttttttttttttttctgggaagaggaaaaatattcaaaatccctttaagggggctatacacttctggatattaacatacaagagggcttagcctatctttattttttacatagtttttttaacttgcttacgtcggtttataggtataccgatcttagttttatttaaaaccaaaaacaaaatctctacttagctactaaatataatattttggggcgggactagtttggctttcttgctgggttatggctcattgatgtagctttggctttgtactcagtttttcatggccatctttgcacttccctgggaggaagaagaagaccaagatgaagatgaagatgaagatgaacttgaagaagccgccgtctcaacgaattgggttgtgacttgttcccacttggggattggctgcttaagctctgtctgttgggttgatgtcactggcttgccactcacgattggactggttgatgtcttggagttccttgagactctcattcacttcttgtgggcagaagcctgggagggttgggctctggggttgggt

SEQ ID NO: 99167 - DNA, 576 bp, Arabidopsis thaliana columbia
actatagaagagttatgacgtcgcctgcacgcgtacgtaagcttggatcctctagagcggccgccctttttttttttttttttttttttttttttttttttttttttttttttgaggaacaaaaacctatcggagaaccaaagcactgaatcatttgccagagttggatattgggataatgcgggaaaagctaaatgacactaaccacaaacaagtgtggtatgatggaatactaatgaaagtggggtctttggccgagtctttaatcaagagttgcttttgctactccatatacaattacagaagcttttctaatcgatttaaaccttatcactattgaccttgtttcttgaagctaaaatttacatcttcattcatcgatttctcaaatgttttggctttatcttcgctaaacccgaaactttccaaaatctgggggggctggtggatccttttgagaccaaacacccaaaagccagtaggccgtggctaattccccatccacaataaatatatttcttttattctaggcccaggcattgggcttttgagccggcttagatagagagagatgct

SEQ ID NO: 99168 - DNA, 837 bp, Arabidopsis thaliana columbia
  unsure (1)..(837): unsure at all n locations
nnnnnnnnnnnnnnnnnnnnnnnnnnnnnnnnnnnnnnnnnnnnnnnnnnnnnnnnnnnnnnnnnnnnnnnccacgcgtccgctgccttcttcttcactttaccaaaatcatcgaatccatttttagggtttttgttttctctctaaatttttattgttatcttcttcgcgataccttggaatcgcatctctgagatagataaataattctgattcgtatctttaaatcttgggttcttcttcttctcgcgattcgtttaaaagagcagcatcaatgaatcagaatcttcatgtattatcaatggattcgttaccagttggattaagattccgtccaacagacgaggagctaatccgttactatctccgtaggaaaatcaacggtcacgatgacgacgtcaaagctatccgtgagatcgatatttgcaaatgggaaccttgggatttacctgatttttctgtgatcaaaactaaagactcagagtggctctacttctgtccattggatcggaagtatccgagtggaagtagacagaaccgggcaacagttgcagggtactggaaagccacaggaaaaagaccggaagataaaatcccgtaagactaacattattggtgtgaagagaactctagttttccacgcgggtagagctcctagggngacacgaaccaattggattattcatgagtatcgngccacggaggatgatcttagtggtaccattcctgccagagtccgtttgtatatgcanatgntcaagatagagaactggtttaggggaagagattcgagtcgatgaggtgaagacctgctgctcgtctcactggcaaggacta

SEQ ID NO: 99169 - DNA, 653 bp, Arabidopsis thaliana columbia
  unsure (1)..(653): unsure at all n locations
nnnnnnnnnnnnnnnnnnnnnnnnnnnnnnnnnnnnnnnnnnnnnnnnnnnnnnnnnnnnnnnnnnnnnnnnnnnnnnnnnnnnnnnnnnnnnnnnnnnnaaatttgaaatttgtattgaaatttggaaattatctctggcaaatgtctagagacattgcagacgccttacacttgtaacattacgtttttgaaaaggaaaacttctttagaaaaatactcttaccattcgttaaacatacgcaccattgcataaacaatgatccattaataatttcatctctctttatgatttcattatcattaacagcgacggcctcgccgacaactcaaagtgcctgctgtcgtggtgatggaacccacaagtgacgatggcctcgcactcaggcttgaagctcttgcataagtagacggagcttcagcaccggactcgcggaaataagctccgttcaacaacatatcgccttccgatctccaattccaatctctccatttgctttcgggtgcatcttcatgttttggatcctctttattaaagcgggtgttaggagcaagaaatctattcccttggctgtatatnagttggagaagcacttacaccgattgcatacatttcccagtgagtataatcattgttcactacatggaaatatc

SEQ ID NO: 99170 - DNA, 477 bp, Arabidopsis thaliana columbia
  unsure (1)..(477): unsure at all n locations
nnnnnnnnnnnnnnnnnnnnnnnnnnnnnnnnnnnnnnnnnnnnnnnnnnnnnnnnnnnnnnnnnnnnnnnnnnnnnnnnnnnnnnnnnnnnnnnnnnnnnnnnnnnnnnnnnnnnnnnngggagagcaaaatgactcgtttaaatcacagtcaaattacatatacagctgcataaatattgcaccgtccaaaaaaaaaaaaaaggtacgcattcgtcactatttttctttttcttgttttcttctataaatatgaaggagacgagagatgagtatagataatggggtcatttattagccttgatgatgatcacaaggaagtatacaaagctcttatgccaaagctctcgggaacacctctgatgaagcttctttccgtgacaaagaatctgatgtagtttatctggtttattcctctgttgatctatgacacattcttcacctacatattcttacaaaccatatatngccgatcag

SEQ ID NO: 99171 - DNA, 643 bp, Arabidopsis thaliana columbia
  unsure (1)..(643): unsure at all n locations
nnnnnnnnnnnnnnnnnnnnnnnnnnnnnnnnnnnnnnnnnnnnnnnnnnnnnnnnnnnnnnnnnnnnnnnnnnnncttttttttttttttttttttatgcaatttgctcttttattaaatcgaaagaaatgcaaatagtgaaggagacggataaaaaaaggtttgagagtagtaaagatcctcaagaacaaaggatatacataaaagtcttgttagcttaaatagatttgtggcaatgcgacattattctcctctcccaatatgttgttggtcgactcattcaagaaggcgcttgtacttgcaccacccgatggcaccaacgtagaggcatatactgccgatagaacctccaatcacagtccaaatgaatctacttggaccatgtttattatccgtgaacaactctatggttatattcataccaaatacaccagcaactgcgataaaggcgctcatcaccagagtagctgttgttagcatcacacccatctgcagaagatgattctgcttgtcatctagcattatggtgatgtaggcctccatgtcatgcccatattgccttagtggtgatagttggtggcggtgccatcgagctgggcgaatttgcttgcaaaagcttgggggcgtgggcgtgggattggg

SEQ ID NO: 99172 - DNA, 736 bp, Arabidopsis thaliana columbia
  unsure (1)..(736): unsure at all n locations
nngaatttnnnnnnnnnnnnnnnnnnnnnnnnnnnnnnnnnnnnnnnnnnnnnnnnnnnnnnnnnnnnnnnnnnnnnnnnnncctttttttttttttttctgttaataatttattgcacctatcaattcaaatatagtcaaagttctcttcttctgacaaaatcaatcataattgtacatcaaaaccaaattgctcatacaaaaacagaacatgccaatcatacatacattacctatatgctaatcaacgagtgatgtattgaatctcggctcggtcttttaaccattcaagcacttttgctccttctaaaatctcttgtacctgatctttcacacgctcctcgtcgaactcttgtttatgtttcttgaattctgagatcgagttttcgacctctttaactagttcatctgttgagaactctaagttttcgcgcttgaagatatctccaacagctatattctgcttgattatgttggtgatgctctctctttgagtttctagaaactcatttactgctttttgacttgaaagagaagccaactggtcttcgttaagcttcatgtttccctgaatctctagaagcctagctccataaaactgtcttccttgttcctcaaataaagattgaggaatctctacttcaaccatctttcgaatctgctcaagaatggcgttgtctgtcgcttgctccttggcttcctgctccatctcttgacatcttttagccagagtttc

SEQ ID NO: 99173 - DNA, 463 bp, Arabidopsis thaliana columbia
caattttcttctccactacgaaaacggatttgagagcagcagcgacgagcttcatcggccggcgtctccgacctcactcgcgatctccgattacaaaaattagatcctcgattaagaattcgaaacatcaaaatttcatcaacaaaaaaaaatcagttactggatttacgtttcgtttgcgtcacagatcagatctccatgatcccttatccgctttcgttgcggttccttaaaccttgatgcaacggtctaatgctcgttccaggtcgaatatcaattcagatatggtagatcctcccgaggttcagacttcacctggcaaccaccgatcatcgccgtccaccgccgccaaacccaagtcgaaacgaacaaaatcgattatcttcgtaatcgtcgcttgtgtaactattgccttgggtttattattcattggctattcaattttacgcttcggaaggaatcg

SEQ ID NO: 99174 - DNA, 736 bp, Arabidopsis thaliana columbia
  unsure (1)..(736): unsure at all n locations
nnnnnnnnnnnnnnnnnnnnnnnnnnnnnnnnnnnnnnnnnnnnnnnnnnnnnnnnnnnnnnnnnnnnnnnnnnnnnnnnnnnnnnnnnnnnnnnnnnnnnnnnngggagaagaaaggatttactatttcaaaataaacatattttctcatgaattacatcattacaagaaatctcaacaaaagaggatgaaaatgttaaagcgaagatgagttttcacttccagagttcttccatggggattccacgctcttgtgcaacatcgcggaactgtctcatctgttgtactgctgcaagagtggctctcgcattgttgagagcattgttgcttccaagctgtttccccaatgcattctcgactcctgccatctctagcacaatcctaaccgctcctccagcaatcacaccagtacctggtgaagcaggtctaagcatcaccttggctgctccataatcaccctctgatctgtgagggaaagtagaatacttagtcataggaacttgaacaatgtttctcctagcatcaatagcagatttctgaacagcagcaacaacttctttagcctttagcacaaccaacaccaacattcccttggttatcgccaacaacaacgattggtcttaacttcaattgcttccctcctttaacaaccnaaggcnanctcctaagttggaaantctctntcaanccactntatnttttttctttggttcccccataccgactttctttgttg

SEQ ID NO: 99175 - DNA, 662 bp, Arabidopsis thaliana columbia
tagaagagtcttgacgtcgcatgcacgcgtacgtaagcttggatcctctagagcggccgccctttttttttttttttcaaaatcaaaacaactttaaactttttaaagaaaccaaaaacatagattccagatatacaaacgatataaagtcagctagtactataacatgtgaatgggacacttctatacataatctctctctatcgagaacagagaccaagaatctcgagagaatccactttggtcatacatgagaacgcttaacttagacagaagcacctcactcgggatctctatataatgctacactgcctctctcatgagtctctacggaaatcttttattgctaaaccaacttcaagactctaagagagattacatcttcatgctgctcaacaatggctcaccagatgccagcctgtctataggactgcaaagggtagctgtgaaacggataagctctagccatatggaccggctttacggctgcaggtattgcccaacttaactctcttcttggaggtggggtgggagggtgcatattcctccttctgtccacttctatcagtgtgcacatctcctggattacctcttttaatagcttaagttgaaactccaaactccaaccaccaatctctcctgctgcctactttcgcattctg

SEQ ID NO: 99176 - DNA, 648 bp, Arabidopsis thaliana columbia
  unsure (1)..(648): unsure at all n locations
nnnnnnnnnnnnnnnnnnnnnnnnnnnnnnnnnnnnnnnnnnnnnnnnnnnnnnnnnnnnnnnnnnnnnnnnnnnnnnnnnnnnnnnnnnnnnnnnnnnnnnnnnnnnnnnnnnngggaggccaatgaatcaaccatttagaattaaacatctaaggcctgaaataacaataatatttagcttttcaaacaaacaaaaaaactaatgaaaattcggaatagtttatctgacaatgccttcatttccagcaggaaccaagtccttatccctccttgggggattagggcattcaaatcccaaaaccctagcagggtctccctgtatgaaattcgcaacttcaaagcttgacttgcctcctgcacaaggcatctctttgggcaacttctttaaaatctcaagacaataaaccggcctagggttcatgaggaagaagatagggtctaaacacttgagcccgctcgcagttgtcccatagaacatgctcactcgagcatctacagccacgggaacaatgtcttcagttaactcagcgaacaaaggactgaaccttagtagataaggctctctacatgtggttccctccggacaaaccactagatctcctttggctaatagtctctgcattgcctnaccgctttcttcctatct

SEQ ID NO: 99177 - DNA, 440 bp, Arabidopsis thaliana columbia
aaaagttgaaacagaaatcatctagagacgattaagagaaaactaagaacgataactctcgccttcgattctttttgttgattgaggcgcaagctacctgcacacaatggagaacaatcgagagggaccatactctgttctaacgagagatcaacttaaaggaaatatgaagaagcagatcgccgaaatctctgagatcttctcgttatcaaaacccgatgcgaccgtactcctcatgtttctccgatgggactctcatgaagtttctgagtttttggttgaaaacaacgaaaaagtcttgtcggaatcaggtttgaaaccagtggtagttgatccgaatcaagacttatataagatttcttcttgtgggatttgctttaagacttgtgatgatggtgattacttaatctccacgccctttttgctctcacatgttctgc

SEQ ID NO: 99178 - DNA, 861 bp, Arabidopsis thaliana columbia
  unsure (1)..(861): unsure at all n locations
nnnnnnnnnnnnnnnnnnnnnnnnnnnnnnnnnnnnnnnnnnnnnnnnnnnnnnnnnnnnnnnnnnnnnnnnnnnnnnnnnnnnnnnnnnnnnnnnnnnnnnnnnnnnnnncggggctctcaaaacgaatattataagaaaaatggaaacagacaaaatatatgatagaatcgaaattacagctggctctctatgtttcttttggggcccaaccattaaaaatttaaaattggatttgtcccccattcagggaatgccacgtgtcctcttgcatctagtgcaccttaagagctctctcatatttcatcaatgggattctcactccactttctctcttctttttttttttttttaaacaaccaaagtattacttacttatcactacaaacgccaaaataccccacttatcttacaaccaacattacatataagaagataagacatatcacatcccaacaaattacattctgtatcctttacttactcctcttctagtatatactatcgaagattcctgtgacctgcagggcttggtgctctctgtgaacttatgctcgctgttcttagaagtctcctgaactcatgcaggcttattttcccatctctgtctatgtctgcttcatccagcagtggatctattgatcctcttaaccccgtgtgcattcgaagttcctcaggcgttatgtacccgtctttgtctaggtcgaatttctcaaaagctgctcttgaccttagctgccatttctctgaatcatgttcttctagttgatgaacatgtagagctgctgctacaaactctgtgaagtccactaacccatcagtgttgctatcaatcgcttcaaggatctcagcaactcgtga

SEQ ID NO: 99179 - DNA, 456 bp, Arabidopsis thaliana columbia
cggacgcgtgggcggacgcgtgggcggacgcgtgggcggacgcgtggggcgtctttctctgttgaaatcgaaaaaattttcaaaacaaaatctaaggaaaaaagagcaacaagtttcaaatctcatttgggtttttcattttgaaaagaaaggacccatttttatctctctctttgttttgttttctcgaatctgaaggagtaaagttaaaagctttgaaggagagaatcaatggcgggttacagagcagatgatgaatacgattacctattcaaggttgttctgataggtgattcaggtgtgggcaaatccaatttgctttcacgattcacgaagaacgagtttagtctcgagtcaaaatccacgatcggggtcgagttcgcgactcggagtttgaatgttgatgataaagtcatcaaagctcagatttgggatactgctggtcaagaaaggtac

SEQ ID NO: 99180 - DNA, 520 bp, Arabidopsis thaliana columbia
  unsure (1)..(520): unsure at all n locations
tgtttgccggcannnnnnnnnnnnnnnnnnnnnnnnnnnnnnnnnnnnnnnnnnnnnnnnnnnnnnncggttctcttctccacgcgtctcaaagcgattacctcccatgggaaaaatctctgaagtgattatttagcactactttttctttgtctccttctgaatccattttttatggatcttggagttcgtgtttctggtcatgaaaccgtttcttctccgggtcaaactgaactcggatctggtttcagtaacaagcaagaaagatccggtttcgatggtgaagattgctggagaagttcaaagctctcacgaacatcaactgatggattctcttcttcccctgcctctgctaaaacgctgtcgtttcatcaaggcatccctttactgagatctaccactattaatgatcctcgtaaaggacaagaacacatgcttagcttctcttctgcttcaggcaaatcagatgtctcaccttatcttcagtactgtagaaactcaggatatggtttaggaggaa

SEQ ID NO: 99181 - DNA, 637 bp, Arabidopsis thaliana columbia
  unsure (1)..(637): unsure at all n locations
ttatgacgtcgcatgcacgcgtacgtaagcttggatcctctagagcgggccggcctttttttttttttttttttttttgggtcaaaccttttaacaataccaaacctacacatatttttgttccttcgtccttgatgatatgagagattgctctcttatacttaccatgtgatacgaaatacaaagtaggaaccagagatgtgttagattcattcaataataaatcatccgagaccacaaattacgcgttacttgagaggcaatcattgtctcccaagtgtctctttcttttttcctcacaaacactatacagagactttttaattactgcgtgaagattacgaagagcataacgagatgcgttgtttggcgagtactcgttaagctttttcataagcttaggatcagagcatatatactcttccgttgactgtgtcagatgccgcaggggatgtagaggaagtaaaacgtagcgatgttgagagagtgggggagaagagtgtggagagtgcgacggcannnnnnnnnnnnnnnnnnnnnnnnnnnnnnnnnnnnnnnnnnnnnnnnnnnnnnnnnnnnnnnnnnnnnnnnnnnnnnnnnnnnnnnnnnnnnnnnnnnnnnnnnnnnnnnnnnnnnn

SEQ ID NO: 99182 - DNA, 645 bp, Arabidopsis thaliana columbia
  unsure (1)..(645): unsure at all n locations
nnnnnnnnnnnnnnnnnnnnnnnnnnnnnnnnnnnnnnnnnnnnnnnnnnnnnnnnnnnnnnnnnnnnnnnnnnnnnnnnnnnnnnnnnnnnnnnnnnnnnnnnnngcaagggttattatatttcatccaacggaaaagatatattttacatcttgtttttgctctctttttgttacaaatagtttaaaaccaatataaggagaatacatagcttatttcgttactcattagggctctttcatcatagtaaccccataaatggttaaacagtgtagtgttgttgaatggtatcaatgtcaagccccttgagcttcactacagattcaacgtgaccctttagagtgtgaagctctctcagcctcgcaacttcggcacgccttttggcctgctctgctatttcagagagctcgttcttattgtcgttgaacattgcttctggaggtggtagaccatggagtgtacgttgagctagtgcccactgagcctccccctctccttttccattaatctttttagttgtgaacgcagttttctggttgatcatgttatcccaagccttgccagtgagagcggaaccggttgattaacttgagaatatcaagaggaatggtgggtatgatacctgtataccatataccctcagc

SEQ ID NO: 99183 - DNA, 622 bp, Arabidopsis thaliana columbia
cggacacgtggggaaagataaacaagaaccctaagtttttttataagattcgagaaaattcaacaactcaggaaggaagatccttttgctccaatttctcaatcgaaacgatttcaatttcggtttcaacgatgtcgagtttttctgccgagtgttgggacttctctggtcgtaaaccgagcttttcacaaacatgtactcgattgagtcgttacctgaaggagaagggtagttttggagatctgagcttagggatgacatgcaagcccgacgttaatggaggttcacgtcagcctacaatgatgaatctgttcccttgtgaagcttcaggaatggattcttctgctggtcaagaagacattaaaccgaagactatgtttccgagacaatcaagcttttcttcttcctcttcctctgggaccaaagaagatgtacagatgatcaaagagactactaaatctgtgaagccagagtctcaatctgctccgttgactatattctacggtggtcgagttatggtgtttgatgatttttctgctgagaaagctaaagaagtcattgatttggctaacaaaggaagtgccaaaagcttcacatgtttcacagctgaagtaaacaataa

SEQ ID NO: 99184 - DNA, 829 bp, Arabidopsis thaliana columbia
  unsure (1)..(829): unsure at all n locations
ttaggacgnnnnnnnnnnnnnnnnnnnnnnnnnnnnnnnnnnnnnnnnnnnnnnnnnnnnnnnnnnnnnnnnnnctttttttttttttttaattcagtactaatctatgtatatgcacttatgtttattattcgagtacaaactctgaaaatgttggcagtggagataaaaaaagaaaaaaatggagatcttttggctaacaccaccaataccatttgaacgaacaatcaaaagctcagaataaattaccacaagtgaaaagaaaaaaaaaaaaagactatcgttcttcaaaaagtgtgcttctccactcttcgcttttgctccaacaatctctcactctctcctctgacgttttgactctggaggtgatggtggttcaggtctccgagttgaattccctcgctctgtaccttcctcctcctctgcctctctcgaagaggcttgtctactattgctgcctctgcctgtagcagcttcacctgagcttgaggaggctacgttttgagatataaacggcatgatctgctgaagaacactcgatatgaaattcccttcatctgtcgtagttgctggctctacttgtgcatttgcaactgcttcgtttgtttctgtggacgctgtggcagagggatttgctgcaccctgagactccgtgctcccggcttggttttctcgacgagataagggcctcaaaaactgatggattctgtttctcaattcagacaaaccccgaccgccaggagaagcactgctatcaccttctcttcctggagtaccgacgctctgtggctgcctagaagattcagtaacaggctgatgtacaccatcc

SEQ ID NO: 99185 - DNA, 2557 bp, Arabidopsis thaliana columbia
  unsure (1)..(2557): unsure at all n locations
ggtatatgcaagtgtagtgctattaaactatcccttttattttcccacccaactcaatttattttctcattctttctctttactcttcttcagatctctctgtttctttctttgttgttgttatctggggatgctttctactctctgtttggtttccttcattgtgactttctattttctgggtttgtttcaagtcatgatttttccgatacccttttgatttttcttgctatttctcacctctgtataagcaagctctctgctgtttctcctcatccaagttgggtttatcagttcagctgtgtagaaattcaatcgtctgagaagtccgaggtttgatgtctgatggctttaagatcgaaaggatttggcttttatcagattagtaatgagattagattgtttttgaggttactgtaatcagatcttgatgctatttctggtgaaagagatttaagacaagttagggaatgggtaatacttgtgttggaccaagcagaaatggcttcttgcaatctgtttcagctgcaatgtggcggccaagagatggagatgattcggcttccatgagtaatggagatattgcaagtgaagctgtttcgggagagcttcgatctcgattatctgatgaagtccagaataaacctcctgaacaggtcacaatgccgaagccagggactgacgtcgagaccaaggacagagagattcgaactgaaagcaagcctgaaacgctagaggagataagccttgagtccaaaccagagactaagcaggagaccaagtcagagaccaagccggagtcaaaacctgatcctccagctaaacctaagaagcctaaacacatgaagagagtgtcaagtgcagggcttaggactgagtcagtgttgcagaggaagactgaaaacttcaaggaattctattccttgggaaggaaactcggacaagggcaatttgggacgacttttttatgtgtcgagaagactacggggaaggagtttgcctgcaagtcgattgctaagaggaagctattgactgatgaggacgttgaggatgtgagaagagaaattcagataatgcatcacttggctggtcaccctaatgtcatctccatcaaaggagcttatgaggatgttgtggcagtgcaccttgtaatggagtgttgtgcaggcggcgagctttttgacaggatcattcaacgcggtcactacacagagaggaaagcggctgagctcactagaaccattgttggggttgtagaggcttgccattctcttggtgttatgcatcgagacctcaagcccgagaattttctgtttgtcagtaaacacgaagattccctcttgaagacgattgattttggactctccatgttctttaaaccagacgatgtttttacagatgttgttggtagcccatattatgttgccccagaagttcttcgaaagcgttatggccctgaagctgatgtctggagtgctggagtgattgtgtacattttattaagcggagttcctccattctgggctgaaaccgaacaaggtattttcgaacaggtactccacggtgatcttgacttttcgtccgatccatggccaagtatatctgaaagtgcaaaggatttagtgaggaaaatgcttgtcagggatcccaagaaaaggttaactgcccaccaagtattatgtcatccatgggttcaagtcgacggtgtggctccagacaagcctttggattctgctgttctgagccgtatgaagcagttttctgcaatgaacaagttcaagaaaatggctcttagagtcattgctgagagcttatctgaagaagaaatcgccggcttgaaagaaatgtttaatatgatagatgcggacaagagtggtcagataactttcgaagaactgaaagcaggactaaaacgagtaggggcgaatctcaaagagtctgaaattctcgacttgatgcaagctgctgatgtggacaacagcggaacaatagattacaaagagttcatagctgcaacattacatctaaacaaaatagagagagaggaccatttgtttgcagcctttacatactttgacaaagatgggagcggctatatcaccccagacgagcttcaacaagcttgtgaggagtttggtgttgaggatgtccgcatagaagaactgatgcgcgatgttgatcaagacaatgacgggcgaatagactacaacgagtttgtggcgatgatgcagaaaggaagcatcacaggaggacctgtgaaaatgggtctagagaaaagctttagcattgctcttaaactctagtttctcagtctatttaaaagtacaaaactaaagccaagaagacaaaagagttttctgataatatataccattttgattatgttgaagacatatgcacacagccaagattctctcttgccctcttttggattctctcaatcttttggatgaggttttgtcttagacttgttttggaaactttgttgtattgtgttacttcttgagcatatatagtcttctaacattacaaaccaaaaaaannaaaaaaaaaagga

SEQ ID NO: 99186 - DNA, 565 bp, Arabidopsis thaliana columbia
  unsure (1)..(565): unsure at all n locations
nnnnnnnnnnnnnnnnnnnnnnnnnnnnnnnnnnnnnnnnnnnnnnnnnnnnnnnnnnnnnnnnnnnnnnnnnnnnnnnnnnnnnnnnnnnnnnnnnnntttttttgctaaggaaagagactcttgattactttttaagactaaactgagagagtatgtaaactctgaacttcttttgaatttgtctatcaccataatctataagcaatactacaaaactgaaaatacgcataaaccaaaaaaagatccttcatagggagttcttcttcttcaagcagatttcaacttgtttgatgctgatgcaagttgagatagtgttctgtgtcccacgaacaacagaaacactcccaacaaagaaagtgccttgagagtcgtgaatagatccaacttcaaccagaatagcacatatagaagcaaaacagctccaattccgcagtgggaaagtaaagcggatattgcagaaccagtcagcgatgggaagctctttatggtcattcccacaccggtgagcccaatgaggaagctcgtaatgggaggtacgatatccgccatcaaagcttgaggg

SEQ ID NO: 99187 - DNA, 1124 bp, Arabidopsis thaliana columbia
aattcttgcaacaaatctatctaaccttaggaagagccatgggtgaagaagctatagttctgtatcctgcaccaccaataggtcacttagtgtccatggttgagttaggtaaaaccatcctctccaaaaacccatctctctccatccacattatcttagttccaccgccttatcagccggaatcaacagccacttacatctcctccgtttcctcctccttcccctcaataaccttccaccatcttcccgccgtcacaccgtactcctcctcctccacctctcgccaccaccacgaatctctcctcctagagatcctctgttttagcaacccaagtggtccaccgaactcttttctcactctctcggaatttcaatgtccgagcaatgatcatcgatttcttctgcaccgccgttttagacatcaccgctgacttcacgttcccggtttacttcttctacacctctggagccgcatgtctcgccttttccttctatctcccgaccatcgacgaaacaacccccggaaaaaacctcaaagacattcctacagttcatatccccggcgttcctccgatgaagggctccgatatgcctaaggcggtgctcgaacgagacgatgaggtctacgatgtttttataatgttcggtaaacagctctcgaagtcgtcagggattattatcaatacgtttgatgctttagagaacagagccatcaaggccataacagaggagctctgttttcgcaatatttatccaattggaccgctcattgtaaacggaagaatcgaagatagaaacgacaacaaggcagtttcttgtctcaattggctggattcgcagccggaaaagagtgttgtgtttctctgttttggaagcttaggtttgttctcaaaagaacaggtgatagagattgctgttggtttagagaaaagtgggcagagattcttgtgggtggtccgtaatccacccgagttagaaaagacagaactggatttgaaatcactcttaccagaaggattcttaagccgaaccgaagacaaagggatggtcgtgaaatcatgggctccgcaagttccggttctgaatcataaagcagtccggggattcgtcactcattgcggttg

SEQ ID NO: 99188 - DNA, 391 bp, Arabidopsis thaliana columbia
attctaatcttaattcttcataaaccctaactttattaatcccttttttagtttcatctttaaaaacatttgttttcttgaaaatgtcggaagaattcgacgaatctgagatcattttctctgacaattactttccgattcgccggcgagaagacggtaacgagaaagagaataaccgtccggtggatttccgggaaaattctgagagagtgtggaacaagtcatctagacggagtaaaacgacgccgttgccttcagcggtgacggcgttttctagttcgcttccggttaacataccgatgaggaggtattcgacggaggaggaatattccgatgacgacggaggaaggaaaatgattccgccgcatttgatagttggacggaggatgga

SEQ ID NO: 99189 - DNA, 800 bp, Arabidopsis thaliana columbia
actatagacgagttatgacttcgcatgcacgcgtacgtaagcttggatcctctagagcggccgccctacacttttgtttttgcttcaaacattgcatttgcagagattgagcaaatcaaagttacaaacttacaacaatacaaatgtgtatgtaaaacaaacaaaaggaacaatctttaagcattccttggatcactttctctttttcttttatacaaatcattacataaacattaaccaaactacactgtataaatgtaaaatcatctgtccacttcttggctctctatgaggtatttgaatgatgcagagaggttgttggatccagtggttgcggcggttgtgacagagtcaaagcatggttcagctgttgctctagccttctggctcgccatcttcgtctccatctcacaaactcaaccatcactgaacttccgcatatgcatacaccaaatccagcaaatgttgacagaagaactgacagaactggttgcaacttcaccacagagtaaaatatatgggcgaagagaacgaccaacgcaaactggacagatgcgtaaatccagacaaatcttctcattaccatggttgatgcggtcatggatgccagatgaccatgaatacaagaaaacggcagtgatttagcgatgggacctgtacccatattctcaaccaggagctgctcgaggaagcagaagtaagcgagcttgctgatgattactagaaccggttcctcctggcacaccctttagccagagacatctagctgaggaacacccaaatttcgaaagcttcggacg

SEQ ID NO: 99190 - DNA, 503 bp, Arabidopsis thaliana columbia
  unsure (1)..(503): unsure at all n locations
ccggcannnnnnnnnnnnnnnnnnnnnnnnnnnnnnnnnnnnnnnnnnnnnnnnnnnnnnnnnnnnnnnnnnccacgcgtccgaaaaatccctaaatctcaacaaaaccctaatttcaaggaagacgaagaaagaatgagttacagagtcgctaaagcatcgcagtatcttgcgatcaccggtggtgggatcacagacatcaagcttgcaaagaagtcttgggtgtttccatggcagtcttgcaccgtcttcgacgtttctccggtgaactacacgttcgaggttcaagctatgagttccgagaaacttccctttgttattcctgctgttttcacaatcggtcctcgcgttgatgatcctcacgctctcttgttgtatgccatgcttatgtctcaacacgataagcactcgaatcacgtcaatgagcttgttcagggtgttatcgaaggagagactcgtgttcttgttgcttccatgactatggaagaggtcttcaaaggaac

SEQ ID NO: 99191 - DNA, 681 bp, Arabidopsis thaliana columbia
  unsure (1)..(681): unsure at all n locations
accctttttnatntncccgttttngggaacantcgnganaaancgggtttttttaaaaatgaacnnaccccttcctngncctcctccttaaagnattaaatnnccnnagccaaatcccttcctgcttactttaaaaanaaggtatctgtaganaaaccatccagtgtacccgagaccgacaaagttccataactttcggaaagcagaggaaccagagttgatggcaccaacaacaatggaagataaccaaacagcaacaatggctcctcctccatatataagtacagtagatttgttctcaagaccatcccacttttccttcaaatctgtgatgagttcgttggtatcaatggacgaggtctcttctgaagaagctcttgtcttcaacaattcaactttttgcaatccattccctgaaacaagcttcaacggaacggtgaaagaggatcggccaaaggagcgaggaggaagataagggacggcggagcaacgggtggatacggcgggaacacgtggaaccatcacggccatagaggacgaagctgctactgatatcgccattgaagcacgccgagaacttcttcttcttcttctttgtctgcctacttcttctctactcgatttttttttgcagctgcgctttttactaaacaagattcgtgtagtaacacgtggaaacaa

SEQ ID NO: 99192 - DNA, 729 bp, Arabidopsis thaliana columbia
  unsure (1)..(729): unsure at all n locations
atntnaaaagcttnttanncccgttttgggaacttcggggaaacgngtttttttnaanaacctacccctccctngnacttctcttaaggnttaanncccnaagcaaatcctttctctttnctttaaanaaaaggttctgaaaaaaccatccagttgtccccaagcccganaagttccattactttcgaaacaggggaacagagttgatggcaccaacaccaatggaagattcccaacccagcaacaatggctcctcctccatatataagtacagtagatttgttctcaagaccatcccacttttccttcaaatctgtgatgagttcgttggtatcaatggacgaggtctcttctgaagaagctcttgtcttcaacaattcaactttttgcaatccattccctgaaacaagcttcaacggaacggtgaaagaggatcggccaaaggagcgaggaggaagataagggacggcggagcaacgggtgcccccgcgcgggaacacgtggaaccatctcggccatagaggacgaagctgctactgatatcgccattgaagcacgccgagaagttcttcttcttcttatcaatccccaccaagcattcaccatcacaccttgcacaccagctcctttctgtagtcttctcgcagcggacgcgtgggtcgacccgggaattccggaccggtacctgcaggcgtgccagctttccctatagtgagtcgtagagagctg

SEQ ID NO: 99193 - DNA, 731 bp, Arabidopsis thaliana columbia
aaacacgacgttaaaaaaaaaaactcattaagtaaagacaaaggaagagaagaaagacgatttctcgaagaagctatggcggatcaactcactgacgaacagatctccgaattcaaggaagcttttagcctcttcgacaaagatggcgatggttgcatcacaacaaaagagctgggaacagttatgcgttcactaggacaaaacccaacagaggctgagctccaagacatgatcaacgaggttgatgcagatggaaacggcactatcgacttccccgagttcctgaacctgatggctaagaagatgaaagacactgactccgaggaagagctaaaagaagccttcagggttttcgacaaagaccagaacggtttcatctccgctgctgagctacgccatgtgatgaccaatcttggtgagaagctaactgatgaagaagtggaagagatgatccgtgaggctgatgttgatggagatggtcagattaactatgaagagtttgtcaagattatgatggctaagtgatttgataaaggtgatgatgatgatgatgatgacctttttatgcttctaggagtttaaccaaaaacatttgcatgattggtggagatatgcttttaaacagacataatttgtttttcgttcttttgattttctggtttgtgacttttgtgtgtaatggaaaatcaagtaagttggattgaaaccgatgggttgggtttttacttttt

SEQ ID NO: 99194 - DNA, 1452 bp, Arabidopsis thaliana columbia
  unsure (1)..(1452): unsure at all n locations
nnnnnnnggtttttttttttttttttttggatccaagataatagtttcagatgcaacagatacaatgttgaaacagagacattgtataatataacacgatattacaggaaaacatacagagagaaagctggttttatttgaaaatgaatctattcgcttcctgcgatcttcttcttcaaggattcaatatcctcagccaattcctttctgcttgacttgaagagaaggtatctgtagacaaaccatccagtgtacccgagaccgacaagttccataactttcggaagcagaggaacagagttgatggcaccaacaacaatggaagataaccaaacagcaacaatggctcctcctccatatataagtacagtagatttgttctcaagaccatcccacttttccttcaaatctgtgatgagttcgttggtatcaatggacgaggtctcttctgaagaagctcttgtcttcaacaattcaactttttgcaatccattccctgaaacaagcttcaacggaacggtgaaagaggatcggccaaaggagcgaggaggaagataagggacggcggagcaacgggtggatacggcgggaacacgtggaaccatcacggccatagaggacgaagctgctactgatatcgccattgaagcacgccgagaacttcttcttcttcttctttgtctgcctacttcttctctctttctcatctaaaccaaaaaatggcagatcagctcaccgatgatcagatctctgagttcaaggaagcttttagccttttcgacaaagacggagatggttgcatcacaacgaaagagctaggaacagtgatgagatcattaggtcaaaatccaacagaagcagagttacaagatatgataaacgaagtagatgctgatggtaacggaaccatagacttccctgagtttctgaacctaatggctaggaagatgaaggacactgactctgaagaagagctcaaagaagctttcagggttttcgataaggaccagaacggtttcatctcggcagctgagttaagacatgtaatgacaaatcttggtgagaagttaactgatgaagaagttgatgagatgatcaaagaagctgatgttgatggagatggtcagatcaattatgaagagtttgtcaaagttatgatggcaaagtgaggaaactattctcatatcttttctctctttttctttctttctttttttgaattgaacaactctgattattgctttattctatgtttgactgttcattattatgcattcgtcccaaatttcatgttatgaactattttgtgactttgggttaaattatttgtttggaagtttttagtttattttatattatgtgaagtaccattgtaatggtcgttgaaaaaaaaaaaaaactctaatagtacttttttaaaaaaaaaaaaaaaaaaaaaaaaagacagcccgt

SEQ ID NO: 99195 - DNA, 887 bp, Arabidopsis thaliana columbia
atctccaggtctcatcgactcacttagggaaagctggtacgcctgcaggtaccggtccggaattcccgggtcgacccacgcgtccgcccacgcgtgcgctcacttggcaccgttgcagagagagaaccaaacatggtaaacaaagacgaccggattagaccggttcatgaagccgacggtgaaccgctttttgagactaggagaagaaccggtagagtgattgcgtaccggtttttctcagcctcggttttcgtgtgtatctgtttgatttggttctacagaattggtgagattggtgataaccgtaccgttttagatcgattaatctggtttgttatgtttattgtggagatttggttcggtttatattgggtagtcacacaatcttcccggtggaatccggtttggcgatttcccttctccgatagactctctcggagatacggaagcgaccttccgaggctcgacgtcttcgtttgcacggcggatccggtgattgagccgccgttgttggtggtaaacacagtcttatctgtgacggctcttgactacccaccggagaaactcgccgtttatctctcagatgacggtggttctgagctgacgttctatgctctcacggaggcagctgagtttgctaaaacttgggttcccttctgcaagaagttcaacgttgagccaacatctcccgctgcttacttgtcttccaaggcaaactgtcttgattctgcggctgaggaggtggctaagctgtatagagaaatggcggcgaggattgaaacggcggcgagactgggacgaataccggaggaggcgcgggtgaagtacggtgacgggttttcacagtgggatgctgacgctactcgaagaaaccatggaaccattct

SEQ ID NO: 99196 - DNA, 482 bp, Arabidopsis thaliana columbia
tctcttcaattgaaaaaaaaaaaaaaattcaacccaaagctctgcttcgttgagctaaaacaatggcggaaacaactcccaaagtgaaaggccacgtcgtaatcttaccatacccagttcaaggccacctaaacccaatggttcaattcgctaaacgtctagtctccaaaaacgtcaaagtcacaatcgccaccactacctacaccgcctcctcaatcacaacaccatcactctccgtcgaaccaatctccgatggattcgatttcatccccataggtatccccggtttcagcgtcgatacttactcagaatccttcaagctcaacggatccgaaaccctaactctcctaatcgagaaattcaaatccacagattcaccaatcgattgcttaatctacgaattcgttcttccttggggacttgaagttgctagatctatggaactttcagctgcttctttcttactaataatctcactgttt

SEQ ID NO: 99197 - DNA, 591 bp, Arabidopsis thaliana columbia
tctttttcataagctgaagattgaattataccacattgctctatatcatctcgagaaattaaaggaagctcgtgacaaggctgcggattctgatgaagttcaaaaatgcgacagtgaaatcgaggatctgcaaaacttgctgaacaatgatgttttgatcagtggagtcaacctagaaagtcttcaaccaggatcttctggcatgactgaactttataaggctctccaggagccaaagtttcgagaacttgattcagaagatctcctgacagagagattgttatcagcagagaaggactggaaatcaacaatcgaactactcaaacacgccacactgaccctgaagatcataaacttgggttctcttgagcaacagtcgaaatacgcttcaacttggtttgaaatttcttcgacctgtgctcaagaattgcgacatgctgcatccatttggaagcaggtgattaaaaatgatgtccaagaagaaatcctatctaaacctcaagggaagagctatgctctctcagtgggagaaatttacagagtagtaaaaattctgagagcatcaaccagattatataaaccgtggatttt

SEQ ID NO: 99198 - DNA, 375 bp, Arabidopsis thaliana columbia
tttcacgcgtccggaagaaacgaagcatcagtgatcttatcctctcatagctaccaccgaactaactctctccatcaccaccataaccattgattctactgtggaaaaaatagaaagttccaagctttttctcaaatggttctgatttaagtaagagtgaagaaaagtaaaaatagagtcagaaatggagaaacagaggagagaagaaagcagctttcaacaacctccatggattcctcagacacccatgaagccattttcaccgatctgcccatacacgggggaggatcaatatcatagcagtcaattggaggaaaggagatttgttgggaacaaggatatgagtggacttgatcacttgtcttttggggattt

SEQ ID NO: 99199 - DNA, 907 bp, Arabidopsis thaliana columbia
  unsure (1)..(907): unsure at all n locations
nnnnnnnnnnnnnnnnnnnnnnnnnnnnnnnnnnnnnnnnnnnnnnnnnnnnnnnnnnnnnnnnnnnnnnnnnnnnccacgcgtccgctccatcacacacaacaacaagaacaaggacaagcttctacatttctcttaacataacagacagtttttgatctgggttttcaagtccggtgttgatcccattgagtttcggatctaaaagatccgaatattcagacggatcaacaagagaacaagaaaaaaaaaatgaatcttgagaatgttttggaattcaccagctttgattactggtttaattggagagtgttactatgtgctatatgggtaatagttccaatgattgtttctttattagtcttatggaagtatgaagatagttcagttcaaactcaaccatcacttaatggtaatgatgttttgtgcattgatgatgtttggagaccttgttttgaacgaatccatccgggttggttgttgggttttcgggttctcgggttttgtttccttcttgctaacaatattgcccggtttgctaatcgtggatggcgtatttactactattatactcagtggacattcactttgatagcaatctacttcgggatgggatcattgctttcaatttatggatgtttacaatacaagaagcaagggaacactggacttatcgctgatcaagtaggaatcgatgcagagaacgggtttcgttcgcctcttatagatggtgacaacatggtttcgttcgagaagagaaaaacttctggttcggaagcactaaagtcatatgttcatctcttccagattatatatcagatgggtgctggagcagctgtgcttacagacagtatatattggaccgtgattttcccgtttctgtatatacaggcctattggacgagga

SEQ ID NO: 99200 - DNA, 553 bp, Arabidopsis thaliana columbia
  unsure (1)..(553): unsure at all n locations
nnnnnnnnnnnnnnnnnnnnnnnnnnnnnnnnnnnnnnnnnnnnnnnnnnnnnnnnnnnnnnnnnnccacgcgtccgctttttccggtgtggctggggctggtctttgcactgactactggtttttgttcaagcagggaccattttttcacgacggaatgaaagagtggagctgctgcaagcaaagaagtcatgatttcagtttgttcttggaaattccaggatgtaaaacaggtaaacacacaactgagaaaccagttctggccaaatcggttccaaaacatcctgttgcggctcctacttcatctccagatgccaatgcagcaacaaaagactcttgctccagatgccggcaaggcttcttctgctcagaccatggatcccaacccaaagaacagatcaagcagaccctgaacacaccgggacaagcagaagaagaaaaaattgaacccttagcgcctccagtacaaaaggctgtgatagacattaatcaaccgcaagtctgcaaaaacaaaggatgtggccaaacattcaaagagagagacaatcatgag

SEQ ID NO: 99201 - DNA, 1265 bp, Arabidopsis thaliana columbia
  unsure (1)..(1265): unsure at all n locations
tgatcctgccagctannnnnnnnnnnnnnnnnnnnnnnnnnnnnnnnnnnnnnnnnnnnnnnnnnnnnnnnnnnnnnnnnnnccacgcgtccgcccacgcgtccgagctccaatcaatctttcggatcgtctccatcaagttcttcgatgggcgcttgggtcggttgagattttcttgagtaggcattgtcctatttggtatggttatggaggtgggttgaaatggcttgagcggttgtcctacattaactctgtggtttacccgtggacctctctaccgctcatcgtttactgttctctccctgccatctgtcttctcactggaaaattcatcgttcccgagattagcaactatgcgagtatcctcttcatggcgctcttctcgtcgattgcaataacgggtattctcgagatgcaatggggcaaagttgggatcgatgattggtggagaaacgaacagttttgggtcattggaggtgtttctgcgcatctgtttgctctcttccaaggtctcctcaaggttcttgctggtgtcgacactaacttcacagtcacatcaaaagcagctgatgatggagagttctctgacctttacctcttcaaatggacttcacttctcatccctccaatgactctactcatcataaacgtcattggagtcatagtcggagtctctgatgccatcagcaatggatacgactcgtggggaccgcttttcggaagactgttctttgcactttgggtcatcattcatctttacccgttccttaaaggtttgcttgggaaacaagatagaatgccaaccattattgtcgtctggtccatcctcctggcctcgattcttacacttctttgggtccgggttaatccgtttgtggcgaaaggcggtcctattctcgagatctgtggtttagactgcttgtgattcgattgaccggtggatgggttggtgaaaaaggtttaattcccacggatcaaagagaggtaagagagatattgttttacctctaaaagactccttcattgtgttcattagatgatgaaaaatgaaaagaaaaagaaggtttaattttgtttcgagaattgttatttttgcaagaatgtgttgtagatatagagatgaagaagaaaggtgttgtcaatttgttttgttctttggtggggagagaaaaaagatttgtcaaattattctttaattgaaaatttctggtctcttttgaatattacagaagagcattttcaatcggggatcttttatgattaaa

SEQ ID NO: 99202 - DNA, 506 bp, Arabidopsis thaliana columbia
  unsure (1)..(506): unsure at all n locations
nnnnnnnnnnnnnnnnnnnnnnnnnnnnnnnnnnnnnnnnnnnnnnnnnnnnnnnnnnnnnnnnnnnnnnnnnnnctttttttttttttttgcaaaaactaaaaacgcttgagaatgttccaatctttgagattttttaaaggatccaaggaaatctgatgatgttattttgtttataagaagtgtacaaacaggcagctaaggttttgaagttcttagcttatgattctttctgaatctttcttcctttgcctcatcagctttgtccagaggtcgaagttgaaacttctgcactgcatacggggcaaaccttgtttatcttcaaccagttgtttatgcactccgagtggtaagaatgtttgcatgggagcagtatcaggtcttcgtcatcctcatagtctaaacgacatataacacatgactcattggttccgttctgattgtctccttctttatatctttttgaaggcaaagatgcaattgtatcagcagacaatcctctactt

SEQ ID NO: 99203 - DNA, 756 bp, Arabidopsis thaliana columbia
  unsure (1)..(756): unsure at all n locations
ccgcattgtctctctccagacgaaaaatgggtgctttcaggtttcaccagtaccaggttgtgggaagagctctcccgacagagaaggatgtgcagcctaagatttacaggatgaagctctgggctacgaacgaggttcgtgccaagtccaagttctggtatttcttgaggaagctcaagaaggtgaagaagagtaatggacagatgctcgccatcaacgagatctatgagaagaacccaacaacgatcaanaacttcggtatttggttgaagtaccaaaattaaaactgggtaccacnacatgttacaaggagttccgtgacaccactcctttaacggagcttctgcgaaccaaatgttcccttggagatggcttccccgtcccccgggtcaagaatccccttgcaattcagatcatcaagacagccactgtcccagccaagctgtgcaagagagagagcactaaacagttccacaacagcaagatcaagttcccattggtgttccgcaaggttagaccaccaagcaggaagctgaagacgacttacaaggccaacaagcccaacttgttcatgtaaaacgtctctgattgactcttttttggggtggaatcgatgttgaagctgtgctctctcccgttttggattttatcggttatttttgtttttcaatatgttaggcgtactcatgaatgtgaactcgactttgtctggattttatgcttcttgtttcctacttatgaaaaaacctttccctt

SEQ ID NO: 99204 - DNA, 919 bp, Arabidopsis thaliana columbia
aatacgactcactttagggaaagctcggtacgcctgcaggtaccggtccggaattcccgggtcgacccacgcgtccggttttgctcttggctgattcgttggagcttgatctctccgtggaaatgggtggtttccggtttcaccagtatcaggtggttgggagagccctcccgacagagaacgatgagcaccctaagatctacaggatgaagctttggggtagaaatgaagtatgcgccaagtccaagttctggtacttcatgaggaaactgaagaaggtgaagaaaagcaacggacagatgcttgccatcaatgagattttcgagaagaacccaacgaccatcaagaactacgggatctggttgcgttatcagagccgaactgggtaccacaacatgtacaaggagtaccgtgacacaacactcaatggtggagtggagcagatgtacactgagatggcttctcgtcatagagtgaggttcccttgcattcagatcatcaagactgcgactgtccctgcaaagctttgcaagagagagatcaccaagcagttccataactcgaagatcaagttccctcttgttttcaggaaggtcagaccaccaagcaggaagcttaagactacatacaaggcatcaaaacctaaccttttcatgtagaagcaaccgacatgattctcatcagaataggcttcatgttcctagtctgaacaaaacactggagttatcttcttttgaacatttttcaactttttttttgttctagatatgatacaatattaaggtgactcatctccaattttcgtcagtttccaaagttttgctgctttagtgtaaaaaaaaaaaaaaaaagggcgaacgctctagaggatccaagcttacgtacgcgtgcaggcgacgtcataactcttctatagtgt

SEQ ID NO: 99205 - DNA, 717 bp, Arabidopsis thaliana columbia
  unsure (1)..(717): unsure at all n locations
tacggctgcgagaagacgacagaagggaggtttccaccgcattgtctctctccagacgaaaaatgggtgctttcaggtttcaccagtaccaggttgtgggaagagctctcccgacagagaaggatgtgcagcctaagatttacaggatgaagctctgggctacgaacgaggttcgtgccaagtccaagttctggtatttcttgaggaagctcaagaaggtgaagaagagtaatggacagatgctcgccatcaacgagatctatgagaagaacccaacaacgatcaagaacttcggtatttggttgaggtaccagagtagaactgggtaccacaacatgtacaaggagtaccgtgacaccactcttaacggagctgttgagcagatgtacactgagatggcatcccgtcaccgtgtcagattcccttgcattcagatcatcaagacagccactgtcccagccaagctgtgcaagagagagagcactaaacagttccacaacagcaagatcaagttcccattggtgttccgcaaggttatgaccaccaaggcaggaagctgaagacggcttacaaggccaacaagcccaacttgttcatgtaaaacgtctctgattgactcttttttggggggtggaatcgatgttgaagctgtgctctctcggtttttgggatttggttcaaatnttggggcccgatgggnccgctttccnggtttgc

SEQ ID NO: 99206 - DNA, 515 bp, Arabidopsis thaliana columbia
tttaggacgcactatagaagagtcttgacgtcgcatgcacgcgtacgtaagcttggatcctctagagcggccgctttttttttttttttttttttttttttttctttagaacgttttggtgctagttttcttatggttcagacaaaacgaagtagcaaagctgctttatacaccgtgaaacacacacataaagaaagaaaaaggtcagagacaagacacttttgtaacagactcgagagtgtttgctactgcttagtggaggctgcgcatgataccgtgtatgtatcctccggtcataatgaaagacatgatcgacacaactccagcaggaaatatcttcttcgaacgcatgtatcgggttcccattacgtacattaacgcacccgccatcactacaccaacggttgatgcaagaacaggttttgttgggagctgactgaagacatacagcagaacagcagctgacagtccacctgcaagcaacgatttctggctaccgctcttcagataaccca

SEQ ID NO: 99207 - DNA, 967 bp, Arabidopsis thaliana columbia
  unsure (1)..(967): unsure at all n locations
cgaaaaaaaattgtttgaagagggtggagactgggatttgaatttaccggctaaaggtctatgaagggttgggctgcatgtccaccagagattgtaagaacgctgccagcttattcctggattctatatcaaccttcacaacatatgaaatttttccatatgagaccttcatattctacaccgtcctgacaagcatcataactttggacagagcttcccttaagcaaaaggtcgttgatgcacctgagatcttaaccgagcttgggaagattccattcctttctgagtttctgaactccttgtatgagtgccagtacaaggcgtttttctcagcatttgctggaatgccggtgcacataaagtatgaccgttacttgtacccgcatttccggttctacatgagggaagtcagaacagtggtgtactctcagtttttggaatcttacaaaagtgtgacagttgaagcaatggcaaaggcctttggcgtttctgtcgatttcatagaccaggagttgtcgcgcttcattgctgctgggaagcttcactgtaagatagacaaggttgcaggtgttttggagacaaaccgtcctgatgcaaagaatgcactttaccaggcaacaatcaagcaaggggatttcttgctaaaccgaatccagaagctgtctcgtgtgatcgatctgtgagcatgctacatgtttctgtttcactctttcgtcaagctttgcaacttggaaactccgaacggtagaatcttaaggtctgagaaacgatatgaactttggattttgagatgaatggctgtagtttctttcatcaactctagttggtttgtcagtggtgaatttcccaagaacaaagagcaagtttaatctcaatgtcatttaaaaaaaaaaaaaaannnnnnnnnnnnnnnnnnnnnnnnnnnnnnnnnnnnnnnnnnnnnnnnnnnnnnnnnnnnnnnnnnnnn

SEQ ID NO: 99208 - DNA, 697 bp, Arabidopsis thaliana columbia
cactatacacgagctatgacgtcgcatgcacgcgtacgtgagcttggatcctctagagcggccgcccttttttttttttttttttttttttttggctcgaaatatctttttttctaatgctcgaaatatctttagtgaacagagaaaaacacagatgatctattctgatatgagaagagaagtctccaaactctactaagtaccaaaatcaaaacttgtactgacagacagacccagaaacagaaacacagtcatggaatcctctactggaaacttgttattaccagtgacctcttccttgtcctcttcctcgaccacctccacgtcttccccaacctcggtttccgcctctaccagctccataggatgatatcccctcaaaggccttgcttcacaagctgggttttgcaataggacccgacccacgtcccttcttttgtgcaacattggtacccacttccattgttgctattagcaggccgctttccttccattgtggtggaggtgaggcttaccggtttggggcttcttttccagaacaggtgagaatagtgtctcccaataaaggggggccttttggatgcaatgggttttgtcatcccccaaaatgttattaccaggggccttaaatccccagttggggggaatttcctggcctcttttgtgttttaaaataacctccgccttttccctcctt

SEQ ID NO: 99209 - DNA, 571 bp, Arabidopsis thaliana columbia
atgatacttcagctctctacgactcactattgggaaagctggtccgcctgcaggtaccggtccggaattcccgggtcgatccacgcgtccgctttcactctctccgtggagcaccgctcatctttcccggagctgtagtcagtgaggtgaccggactaaatctccgccatggaatctcgaaacgacgaggaggcgccgttgatctctgcctctggtgaggatcggaaagtcagagctggaaagtgctacacaagggatgttcatatcctcagcatctcctttctgctaatcttcctcgcttacggtgctgctcagaacctcgaaactaccgtaaataaggatttgggaacaatctctctggggatattgtatgtgtccttcatgttttgctccatggttgcatctttggttgtccggttaatgggatcaaagaatgctctggttttaggaactactgggtattggctctttgttgctgctaatctgaagccatcatggtttactatggtaccagcctctttataccttggatttgcagcttcaataatatgggttggtcagggaacatacc

SEQ ID NO: 99210 - DNA, 757 bp, Arabidopsis thaliana columbia
  unsure (1)..(757): unsure at all n locations
cagcttcactacttagggaagctggtaccctgcgccggtccggattcccggtgacccgtcgtgaagccatcatggtttactatggtaccagcctctttataccttggatttgcagcttcaataatatgggttggtcagggaacataccttacatcaattgcgagaagccatgctacagatcatggcctgcatgaaggttcggtaataggtgtcttcaatggggaattttgggctatgtttgcctgccaccagctgtttgggaatctcatcacacttgcattactgaaagatggaaaggaaggaagcaccagtggcactaccttattgatgttggtgtttctcttcagtatgacattaggaacaatacttatgttcttcattcggaaaattgatggagaagatggaaaaggacctgtgggttctcctgtgggcttagttgattccttggcatctcttccaaggatgataattactcctttgctcgacatacggatgctactgattgtcccactccttgcatattcaggattgcaacaagcatttgtttgggctgagtttacaaaggaaattgttacgccggcgattgggtctcaagtgttggtggngcgatggcagtctacggagctctggatgcagttngttcaatgactggctggaagtttacctctggtttgtcatcgatcacctcatagtttctggtggagctgttgctaagcttctgngtttctctgcttcttctcgggacaagcaaacagcg

SEQ ID NO: 99211 - DNA, 522 bp, Arabidopsis thaliana columbia
  unsure (1)..(522): unsure at all n locations
nnnnnnnnnnnnnnnnnnnnnnnnnnnnnnnnnnnnnnnnnnnnnnnnnnnnnnnnnnnnnnnnnnnnnnnnnnnnnnnnnnnnnnnnnnnnnnnnnnnnnnnnnnnnnnnnggagcacaatttggaactgcagacactgatacacaaaccatcatacattgatacttcacaaaagtacatcttgatatgtcagatactatgagagttcttttggtaattcgcattgctactaccaatgtaactctacaatgctaaaaaagagaatgaaaaagaagaagaagaaaaaaagcatcgcgctataacttaagaaaacctaaagatcaataataataacatcttctccaaatcgtatgagctttagatccaaccattgctccttgcttcacatcagtaactcctccacaatctacaatcctacaacttcttacctgaagcagctcttcgtttcccaagtttagatttctcaagctccaattgcatctccatcaacatattcattcgttggaactcaagctcctttg

SEQ ID NO: 99212 - DNA, 447 bp, Arabidopsis thaliana columbia
  unsure (1)..(447): unsure at all n locations
nnnnnnnnnnnnnnnnnnnnnnnnnnnnnnnnnnnnnnnnnnnnnnnnnnnnnnnnnnnnnnnnnnnnnnnnnnnnnnnnnnnnnttttttcttaacaactacaatattacaatcttattgagatatcagttcaaaggattattcaaagaacatgaacaagaaaatttaagggcctcttctacttccaggtcgctcgatcaggggattattcaaagaatatgaccaagataaaattaagaaaaacacaaaaaactaatattacatgtagaggttgttttagtcgtcacctctttttgttttgcctcctccggcttgctcgatttggaccaaacttggagcgtaattgagaataacttgcgaaattccttcaagtgaatctgtagcctctccctctccagaacctacttcatcgactttattatcctccccgagaatgtatatcttgt

SEQ ID NO: 99213 - DNA, 662 bp, Arabidopsis thaliana columbia
agactactatgacgtcccatgcatcgcgtacgtaagcttggatcctctatagcggccgccctttttttttttttttttaaagtaaaaaagtttgattgttgttgttttggtttctttttctccatccccatcaaattgtaagcttcaaaagagtcaagttccaaaaaaatacatcttttctttaacatgttactttatgaaacagaccagcgaaccattttgatctcactatcagatcaaatttataagcagagaaagaacaaatataaagcttcctcacacaatttcactgcagctattagtttcttggttctagtcgagaattttttctccggttgcgaacaagttccagaccagagttccaattagatacagtgcaactgctactttgaacacatcatcccatgaacctcgttggaggatgtaaccagtagctgcagtgccaaagacaccagctaggactcctgctgtgtttgatagtcctaagagtacaccagcgtatcgtgggccaatgtcttgatgattagagtagagacccgactgagagaatgcatcagagccctgactgcatgccatgcagagaactgccattgctggagttttgacatggctcagctgactcaggaagaaggcagggcctagaaaacaattgattgcataat

SEQ ID NO: 99214 - DNA, 557 bp, Arabidopsis thaliana columbia
cgtgggtcgacgcaagaccctatagtgagtcgtattaacgacagaaggggaccatagaaatgaatctgatcatggatctaaacatgaaaagagtaatgttacacgagcttgtgagtatttttgaagaagaaggagctcaagtaatgagtgctaatcttcagaacttgaatgataggaccacttacacaatcatagcccaggctatcattagtcggattggcattgatccatcaaggatagaagagagagtacggaaaatcatctatggatatatatattttgaagcatgaaatcccaaatgataagtctacgctaacgctagtgtgttttttcacacatgtgttagttctttaaatatgagatgagtaattgcttttgagttcgattatgataaatatgttgaccgtcaacataagaaaccttaaaacgttgtcgtttcgtttttattcatccgggtttaattcaagaaaaaaaaaaacaaaacgaacccatagagcgaccgctctagaggatccaagcttacgtacgcggcgatgcgacgtcataatcttctaagt

SEQ ID NO: 99215 - DNA, 382 bp, Arabidopsis thaliana columbia
  unsure (1)..(382): unsure at all n locations
cggtattctncggaccatcgttccgncngcggggaaaagagagagagggatgtgaaacaggccccgtcgtcgtgcgtggtggaggcgtattaccctcataagagttatgaggaagacctgtggaggaggaatagaggaagatcattcggcgcgtacacggaaaacgaagcgcgtggatatgtgaaacgcaatgataggcctcagcatcttagcttcttggatcatatccgtattttcgtatcttctccatgtgattgatttttatttctttcgtggtctctcccgctcgtcgcttttctatgtttgtttgttttttctcgggacaaagaacaaaaaacacaacacaactagtttacactgtaggtcactgtgctgctgcgtc

SEQ ID NO: 99216 - DNA, 1057 bp, Arabidopsis thaliana columbia
  unsure (1)..(1057): unsure at all n locations
aaaaatcagagattccattttctcttatctctctctctctctttctctttttccgattctgattctattttttcttcaccaaccacacaaaacaattctacgtttgatctcttcttctttctccgtccaaattaatctctacgtttaatttctcttgttcaatcatgggacacgaaacaatgacgccggcaacaacaacgctcgtgttcacgtacggaactctaaagagaggattctcaaatcatgtcctgatgcaagatctgatccgatctggtgacgcttctttcaaaggtgtttaccaaactctagacaaatatcctctcgtctgtggaccttaccgagtccctttcctcctcaacaaacctggatcgggctatcacgtcaacggcgagctttacgcggtttctcctcgcgggtctctctcgtctcgacgagctcgaaggaatcagtcgcgggcattacatccggcaaccggtacgtttcgcggcggcggaggaggaggagaaggaggggggagatctggaaacaaaggcgccgtcgtcgtgcgtggtggaggcgtattacgctcataagagttatgaggaagagctgtggaggaggaatagaggaagatcattcggcgcgtacacggaaaacgaagcgcgtggatatgtgaaacgcaatgataggcctcagcatcttagcttcttggatcatatccggattttcgtatcttctccatgtgattgatttttatttctttcgtggtctctcccgctcgtcgcttttctaaggttgtttgtttttttctcggggccaaagaaacaaaaaaaaaaaccccaaccccaactagttttacaacttgtaagggtccccccagtccgtccgtccgttgtttccgtatcgatttgattaaaaagattgttgggtgtaaaacttatgattcccctcttaaataagttttaggttgtttttgnnnnnnnnnnnnnnnnnnnnnnnnnnnnnnnnnnnnnnnnnnnnnnnnnnnnnnnnnnnnnnnnnnnnnnnnnnnnnnnnnnnnnnnnnnnnnnnnnnnnnn

SEQ ID NO: 99217 - DNA, 788 bp, Arabidopsis thaliana columbia
  unsure (1)..(788): unsure at all n locations
cgattctannnnnnnnnnnnnnnnnnactatgacgccgcatgcacgcgtacgtaagcttggatcctctagagccgccgccctttgggtttttctttttttttttttttttttttttgcagggaataaaaaatattttaggtaaaaagctaataatgtagatatatctgagatgttttaaactaaataggggactacatagatctctctcctcacactcacttgatcagggaaacgtaagcttcatttacagagacagagtaagaagaggcccaaattattcttttaccttgggttgttccatgtatgctttatcagcttctgccacgcgattctggaacatcgtccattcgtttctgcatctctccctcaccccttgccatggagatttcccctcctccgactcaccctgacttccaagggaaggaatcacttgatggataatccactgtgaatctaccacaccaatcttctcatgagcaggctcaacgcatcgtctgagagcaaaatcgagaccccatccatgaacaagatcattctgaatcatatgccatacacannnncatgcttttttaaaaaatccagggccataatctaaacaacccagcaattggaggaaatggtggtcaccgcccctccctgtttttcctaatttcttgggaaatctggggccctctccttttggatttccaagaaggccgttttgggtttaaccgggtgaaaaattcaacctgcttttaactactaacgcccttttggtggaaggccaccccaatcctctccctttaat

SEQ ID NO: 99218 - DNA, 640 bp, Arabidopsis thaliana columbia
  unsure (1)..(640): unsure at all n locations
ttaggacgannnnnnnnnnnnnnnnnnnnnnnnnnnnnnnnnnnnnnnnnnnnnnnnnnnnnnnnnnnnnnnnncttttttttttttttttttttttttcccaaatgtgtttattctatatttctagcaaatgtcgtgagaatacatgagaatcattgtaatttgtaaactaaagattgtaacaattattacaattacaagaaaattcaggctcaatatgaatttagaaccgcatgatcatccatttatgaggttcagttccgggaactgctgccgttaaggttctggaaaagctcgggaagatgggcattggtgagtttggttctcttgctgatctcttggttccttcttcttcttatcctttggtttattccgatatgccatgcgtctgtgcagcagctctcctctctgcagtgtttgtcgccggcttcaaaccgattttcagcagctccttctccacgtccagcatgtcgttcgggatgtttatgtcacggaatagagctttaaattcgtcatcaaccttaatctcacacttgaaatnatttgggtatgcaatgtcctcttgtgaatttgatagcaagtagatgtcccctgaagcactcagagccttcaaatcctccattacattagggtaagcctc

SEQ ID NO: 99219 - DNA, 705 bp, Arabidopsis thaliana columbia
  unsure (1)..(705): unsure at all n locations
ttaggacnnnnnnnnnnnnnnnnnnnnnnnnnnnnnnnnnnnnnnnnnnnnnnnnnnnnnnnnnnnnnnnnngtggctttttttttttttttctttttagagtaaaatacacgttgaagaaataagagaagtcggagacaatgcagtgatgcttgcgggtacaaaatattagatccttctctctaaggagcttcttctaactaattctccgattcggaatcaaacctagaagtgatcataaatctttctgattacttagtgatggattcaacacaagccttcttatttcctacgctttccataatcatccattgacagctgctttcgtttcttcagaagagatgaagggctctcatttgcttgcctacccgaaggtcgttttgatggcgttgcactctttgaaagcttcttctcttttcgggcttgcctctctctctcatcaaattctggattctctttctcaatcaacctgattagtgtgtcacatctccttgcaagttcctgagtgtgggggatttacaaccagtcaacctaacaggggatgncgaacgcggcnttagcccanccagttccaaaccagntaggacagcaacagaacggcgacnctcatggaaagtccctggcngacaatggaactcagtccagcagggtcgaggnncagtcntcccaaggtcagatcactccangactggnccccccaaactg

SEQ ID NO: 99220 - DNA, 691 bp, Arabidopsis thaliana columbia
ctcaattcttccttccatttctatctctctcactctctttctctctcgatcttcttcttcttcaactcttctgtcgataggctcagtatcggatttttcgtcaacactataaaacccatttttctatctctctgtctaaaagtctttactttaaaacaaacagtgacatgaaaaatcaaagcttcgatacaatctcaggatggatttgagtatcgcttaatgaagttttgatctttgggtttagttctacaacagagtatttcgaggattgtatatattgagggtttttgttggttaggtgataatgataccggaaccggggagaagaccgatgcatagagggaacgaagattcatcttttggggatgattatgagaaagagattggagtattacttggtgagcagcagagaaggcaagtagaagctgatgagcttgagagagagcttaatttgtataggagtggctctgctccaccgactgttgatggttctgttagtgctgctggagggctttttagcggcggaggtggggctccttttttggagtttggtggaggcaacaagggtaatgggtttggtggcgatgatgaggagtttaggaaagatccggcttacttgtcttattactatgctaatatgaagttgaatccgaggttgccaccgcctttgatgtctatggaggatttgagg

SEQ ID NO: 99221 - DNA, 600 bp, Arabidopsis thaliana columbia
  unsure (1)..(600): unsure at all n locations
nnnnnnnnnnnnnnnnnnnnnnnnnnnnnnnnnnnnnnnnnnnnnnnnnnnnnnnnnnnnnnnnnnnnnnnnnnnnnnnnnnnccacgcgtccgcgagaaatagcgtcagattacaaagagccaaagaaggagggcttcttcttccaatttgtgatcggtgctgatcgatttctccatggataatctcagttttcacgatggtaacatcttcaatctcctccacacaaggtcccaggacccaagtcatgaggttgatcaaagaatgcagtttcactcttccttggttcggagactttctcaggagcaagaattggagggacatcaaggctgtgttaatgctttagcgtggaactctaatggttcacttttgatatctggatcagatgatttaaggatcaatatttggaattactccagtcggaagcttttgcattctatagatacagggcatactgccaacatcttctgtacgaagtttgtccctgaaacctctgacgagcttgtggtatctggtgctggagatgctgaggttaggctatttaatacatcccggntaaagcgtagagcagaagatgacaatgctattattccatcagcat

SEQ ID NO: 99222 - DNA, 623 bp, Arabidopsis thaliana columbia
  unsure (1)..(623): unsure at all n locations
ttgggtaccgcgccccccctctgagtcgacggtatcgataagcttgatatcgaattcgcggccgctcagttttcacgatggtaacatcttcaatctcctccacacaaggtcccaggacccaagtcatgaggttgatcaaagaatgcagtttcactcttccttggttcggagactttctcaggagcaagaattggagggacatcaaggctgtgttaatgctttagcgtggaactctaatggttcacttttgatatctggatcagatgatttaaggatcaatatttgggattactccagtcggaagcttttgcattctatagatacagggcatactgccaacatcttctgtacgaagtttgtccctgaaacctctgacgagcttgtggtatctggtgctggagatgctgaggttaggctattcaatacatcccggttaagcggtagagcagaagatgacaatgctattattccatcagcattggaccaatgtcacacacgaagagtgaaaaacctagctggcgaacctggtaaccccaatggtggatggggtncnngtgaantngggctttaanggagcatgnttccgggatcacccctggccccggtgnacggccncaaatggc

SEQ ID NO: 99223 - DNA, 592 bp, Arabidopsis thaliana columbia
  unsure (1)..(592): unsure at all n locations
actatagaagagtctatgacgtcacctgcacgcgtacgtaagcttggatcctctagagcggccgcccttttttttttttttttttcttttttttttttttttttctccgaaaaagaaacacgatatttcataaagagaacaaatcgagatagatcttctgtatatctatttgacaaagaattgtctgattctctaattgcaagtagaaaaaaatgaagcctcaaaaccgaatgatcaacaaaagaattgtaccggactttgcaaagcttcttcaagaacaactttcttctgaggagctcttagtagagacccaaaaatttccaccagaaagtcccaactactccccagattatcgcattaatcgtcgccatcacgaatccaatcttgaatacatcaggcagatcaacataacccgctccatagtagacagcggcttgaccgctactgtaatgagtcaaagcaccaaaaagattggtgttgtatgctaaagcaagggcagctagaattccngggaaaccggngggnaatgcctagcaagggaanctggnaaaggggcccacgggncgggtgggttccnaaggngngataaagt

SEQ ID NO: 99224 - DNA, 448 bp, Arabidopsis thaliana columbia
cggacgcgtgggacatcagatcagaagattttggtttcaagctcttcttctacgattccccgaagcttctggattgagatctctctctcaagcaatggcagctacaagtgagaaacagaacaccacaaagcctcctccttctccttctcctctccgcaattccaagttttgtcagcccaatatgaggatcttgatctctggaggagctggcttcattggttctcacttggttgataagcttatggaaaatgagaagaatgaggtggttgttgctgataactatttcactggctcaaaagaaaacctcaagaagtggatcggtcaccccaggtttgaacttattcgtcacgatgttaccgagcctttgttgatcgaggttgatcggatttaccatcttgcttgtcctgcctctcctatcttctacaaatacaaccctgttaagacaatc

SEQ ID NO: 99225 - DNA, 517 bp, Arabidopsis thaliana columbia
  unsure (1)..(517): unsure at all n locations
ttaggacgnnnnnnnnnnnnnnnnnnnnnnnnnnnnnnnnnnnnnnnnnnnnnnnnnnnnnnnnnnnnnnnnnncttttttttttttttttgtaataagaaatcatgctcatttatgttatatgtatcttcaaatctgtacacagatgttcaatatttaacggcttctacgtgatcatcctcttctcgcaaacaactgcgctttgaggagaaaaatgtggaacaaacttgtagatcaatattttgttaatctttggtgatccatctgcggcccctgacttcaaatccaccataagcttgatcactactgctctctcccccgctctctgcgctagtgtatcccgatttacgcctgtgctttttggttcttgtaactccactatcgctaaaactcccatttagaagcggatcatcaatccctcgaatcactctccgactgggtgatgatgacatgcaactatcgtccttcactcttctcttttccttgtcgtgtttcttaatgttctgggagatcttgt

SEQ ID NO: 99226 - DNA, 522 bp, Arabidopsis thaliana columbia
  unsure (1)..(522): unsure at all n locations
ttaggacnnnnnnnnnnnnnnnnnnnnnnnnnnnnnnnnnnnnnnnnnnnnnnnnnnnnnnnnnnnnnnnnnnnctttttttttttttttcgtccgtcttcgccttatcatccttcccttcttcgcctttggattctccttctcccttttcttcttccttcttctctccttccgctgccgcagccgcctcctcaggtggtggtggaggcggtgggtcgattttcatgatcgcagcatgttttccggttcgcttataaacgtattctacaagcttttgtggttcaaaaactcctttcaccgtcacttgagaactctttaagtcggattcagcagattccactcctttcattctcatgatccgtttcttgatctctgtcgcacaagcttcacagtgcatgtgaaccttaagaaccaccgtcacaaccaccggaggctccactttcttctcttccacaatgggtttatcctcctctgctttcttctccggcggcggaggcggaggaggaatcggagacagaagct

SEQ ID NO: 99227 - DNA, 539 bp, Arabidopsis thaliana columbia
  unsure (1)..(539): unsure at all n locations
gattctgccagctannnnnnnnnnnnnnnnnnnnnnnnnnnnnnnnnnnnnnnnnnnnnnnnnnnnnnnnnnnnnnnnnnnccacgggtgcgagaagtaaaagaaacatcaaagccaaagattttgcttgtggaagataataagatcaacatcatggttgcaaagtcgatgatgaagcagttaggccataccatggatattgctaataatggagttgaagccataaccgcgattaatagctctagctacgatctggtactcatggatgtgtgcatgccggtgctcgatggtttaaaagctacaagactgatccgttcgtatgaagaaactgggaactggaatgctgcaatagaagccggagtagatatatcgacatcggagaatgaacaagtttgtatgcgtcccacaaaccggctgcctataatcgcgatgacggcaaatactttagcagagagttcagaagaatgttatgcaaatggtatggactcgtttatttcgaaacctggaacggtgcaaaaactgagagagtgtttgcaaca

SEQ ID NO: 99228 - DNA, 520 bp, Arabidopsis thaliana columbia
accaaaatgaacatcttctctgtcacttcactcctccttcgtaccttccttcgctgatctctccgaccgaggtttgatcagtaagaactctccgaccagtgtttccatttccaaggttccaacttgggagaagaagcagatctcaaatcggaactctttcaagctgaattgcgtgatggagaaaagtgtcgatgctatgaatatcaaagaagaagctagcgtctctacattattggtgaacttggataataaatttgatccctttgatgcaatgagcactccgctttaccaaactgctacttttaagcagccttctgctattgaaaatgggccttattgattatacaagaagtggcaatcctacacgggatgcattggaaagcctccttgcgaagcttgacaaggcagatagagcattttgctttactagcggaatggctgctcttagtgctgttacacatcttatcaaaaatggcgaagaaattgttgctggagatgatgtatatggtggctctgacag

SEQ ID NO: 99229 - DNA, 1803 bp, Arabidopsis thaliana columbia
tctaatacgactttatatagggaaagctggtacgcctgcaggtaccggtccggaattcccgggtcgagccacgcgtccgcggacgcctgctctcacttgagcacgagaactgtctccgtcgccgttattatctcgtcggctaatatctcagacgagaaatcgacgccggagaaaaagcaatttagttctctttcatctaccaaaatgacatcttctctgtcacttcactcctccttcgtaccttccttcgctgatctctccgaccgaggtttgatcagtaagaactctccgaccagtgtttccatttccaaggttccaacttgggagaagaagcagatctcaaatcggaactctttcaagctgaattgcgtgatggagaaaagtgtcgatggtcaaactcattctaccgttaacaataccactgatagcttaaatactatgaatatcaaagaagaagctagcgtctctacattattggtgaacttggataataaatttgatccctttgatgcaatgagcactccgctttaccaaactgctacttttaagcagccttctgctattgaaaatggaccttatgattatacaagaagtggcaatcctacacgggatgcattggaaagcctccttgcgaagcttgacaaggcagatagagcattttgctttactagcggaatggctgctcttagtgctgttacacatcttatcaaaaatggcgaagaaattgttgctggagatgatgtatatggtggctctgacagattactatcccaagttgttccaagatctggcgttgtggtaaaacgagtaaacacaactaagttagacgaggttgctgctgcaattggtccccaaacaaagcttgtgtggcttgagtctccaacaaacccaagacaacaaatttctgatatacgaaaaatatctgagatggctcatgctcaaggtgctcttgtgttggtggacaacagtattatgtcaccagtgctctctcggccattagaacttggagctgacatcgtgatgcactcggctactaagtttatagccggacacagtgacgtgatggcaggtgtgcttgctgtaaaaggcgaaaaattggcaaaggaggtgtatttcctccaaaactcagaaggttctggattagctcctttcgactgttggctttgccttcgaggaatcaagacaatggctttacggatagaaaagcaacaggaaaacgcacggaaaattgcaatgtacttgtcttctcatccaagagtaaagaaagtgtactatgctggtctaccagatcatcctggtcaccatctccacttctctcaggcgaagggtgcaggatcagtttttagctttataactggatcagttgcgctttcaaagcatctcgtagaaaccaccaaatacttcagcatagctgtcagttttgggagtgttaagtcactgataagcatgccatgcttcatgtcacatgcaagcatacctgcagaagttcgtgaggccagaggtttgacggaagatcttgtccgtatatctgcaggaattgaagatgttgatgatttgatatctgatcttgacattgccttcaaaaccttccctctctagttttggtttgttcttgtctcagcttttgtagtttcataggttcttgaaataaggatctatgtaacaaaccataaaacataatttggtgtttgaaaacacatcaagcaataaattcattattgttagatttgttaaaaacaaagggcggccgctctagaggatccaagcttacgtacgcgtgcatgcgacgtcatagatacttct

SEQ ID NO: 99230 - DNA, 821 bp, Arabidopsis thaliana columbia
  unsure (1)..(821): unsure at all n locations
nnnnnnnnnnnnnnnnnnnnnnnnnnnnnnnnnnnnnnnnnnnnnnnnnnnnnnnnnnnnnnnnnnnnnnnnnncttttgtttttttttttttttttttggattaaacaaaataattcaacaaactaaaaagagagagagagagaaataggttacaaattaaaatttggagtctaaagaaaacatgatcccataactaaacatgtcatgaagatgaacaacactaaagaatattcaattcggacaccatcgcttggaaatctgccgcctggaactacgggaacttgttgtcctccacctctagtgtttccactacttccgctatccccaccaccatctccaccaccgtcaccatcatcgccaccacgactgcccccaccttttccagccttatttcctccagagccaccgctgccaccacggtttgagcttcctcctccactttttccaccgcctccacttccacgacttcctccaccactgcttcctccacctgaagaaccacctcgagagcctccgcctccccctcctccacctgaagaaccacctccaccggcaagctgcctacgcacaaaatcacccgaaaacggcatcgtttctaccgttaaatgatgacgttttacatcaatagatgacacagaagcttgatcaagtgaaccaacggcttggatttgcgtatgaatcagaagggatagaaatagatgaaacattatgctacgcatttggatttccattttgcggacgcgtggnnnnnnnnnnnnnnnnnnnnnnnnnnnnnnnnnnnnnnnnnnnnnnnnnnnnnnnnnnnnnnnnnnnnnnnnn

SEQ ID NO: 99231 - DNA, 741 bp, Arabidopsis thaliana columbia
  unsure (1)..(741): unsure at all n locations
nnnnnnnnnnnnnnnnnnnnnnnnnnnnnnnnnnnnnnnnnnnnnnnnnnnnnnnnnnnnnnnnnnnnnnnnncttttgttttttttttgataaccaccaaatcacatatcattaaggactgttgttgagttttacaactgccatagacccaccaagaaagatgaaacacaaaaggacaaagacataaacatgtgttttgagctacaaggaatgaaaaaaacaatccttgcaatatctcacaagacccctttttctttaagagaaggaagatctcacaaacactatctttctctatcttcctctctcttttactatatatgatttatatataaattttgaaaagcattgaacttagaggagaaagaggatgagcactttcactcttctttaattttttgaagagtcttcactttgtctcttcacacctttcttcaactcttcttcaaccctcttttttaatattcaccagagaaacccaaaagtaaaaatgaagataaaagactaaaccttttaacgttcttgncgaaccagaggnaanaaccaacgnctttccttccttctcacgnccctataacacaactgggatctccctttgatggttgttggttgttggccngatcaaggccaaaggggtagctggntaccgngncattttgcanggngttggtgagtgaatggtaggcgnactcnnnggggttttccggntggnaatggagtgnatccncggggggaaccggacg

SEQ ID NO: 99232 - DNA, 617 bp, Arabidopsis thaliana columbia
  unsure (1)..(617): unsure at all n locations
gggccaaaacggttatattactttttagttaaatttaaaaagaaaactaaaagggtaacattagtagaattcttgacaaaacaaaaagaggcaactttggttttttttttttagtcattagaatttggatttctcaaaattgtaacggttcacataaccaataactttgggttattaatcaccaaaacaaaaaaacccaaatttgttagcttaaagaaaagccctgatttttaaaaaagcccaaattgtctaaagtcaagacgatgaccttctccggcgagtcgacggcgtcgatttatcaccgacggtagtaactgagccaggactttcagatgtatctgagctactaacatctccaacgccatctttatctttacctgtccaaagcttcgagaaaatccgagacattacaactccttttggctttcggcttctcagaactactcgtcttggtctctcgtcgtagttggcgtctcctccgtgggcggggactggactcacactcttcttctggtgtcggtcctgagccccgtgcgagccgcncgnnggaaaaaagggtcgnggngggacgaantgnccgaganagggttnganacggncgaagggaacccccgttg

SEQ ID NO: 99233 - DNA, 576 bp, Arabidopsis thaliana columbia
  unsure (1)..(576): unsure at all n locations
taggtagcannnnnnnnnnnnnnnnnnnnnnnnnnnnnnnnnnnnnnnnnnnnnnnnnnnnnnnnnnnnnnnnnctttggtttttttttttttttttttttttttgaaccggggacactaataccatacaacaacatttaacattgtacatgtgaatgtgaaccattccacatccatctaggaactgaaactcaactgtctcagaacccttttaacagagactaactcataaaatgacaaaaccttttttttatatcatcgtgaagaaagtaaaaatgaaaggtagaacctaattgatatcaacaagaagcatcacttattcttcctctatttcattttccttcagtttttgcatcaccaccgccatgtctagcggctgagccaccttgcccatcagctccactctggctcatattggtcccatccggtttacctcctccactagcatcgttaggacccgcattgtttgcggcaagagcagtttcatggtggtgcatttgatgttgcagtccgttgttattattcaaacccattggtctaatccccatgtgcccttgcatagcttgttgatgtaac

SEQ ID NO: 99234 - DNA, 513 bp, Arabidopsis thaliana columbia
  unsure (1)..(513): unsure at all n locations
nnnnnnnactatangaagcttatgacgtcgcctgcacgcgtacgtaagcttggatcctctagagcggtcgccctttgctttttttttttatttaaaaaaatctctttctctatgcatatatctaaacaagtatacacgtttacttatatagacataggaatgcgtgtgttacatgtataaaaaatgaaagaacatcttcaaaatgaagattaagcagtgattaggttccttgcaacttcctgagaatcgaatttccggcacaaatccaggctcctgttaatatctgtcctgcatgagctctgatttccatattcgatgcggattgcttcaacgaggtcttctttgcttgatatctttgggtctagaggggaagatttagattcatacacttggcaatttatctttctgctgtgattttctttgactatcctagtttttaaggaatcaatgggcttttttagtgttctggacttagtagcatcattctcttgtacgacatcggttttagcattt

SEQ ID NO: 99235 - DNA, 524 bp, Arabidopsis thaliana columbia
  unsure (1)..(524): unsure at all n locations
nnnnnnnnnnnnnnaatacgactcaccttagggaaagctcgtacgcctgcaggtaccggtccggaattcccgggtcgacccacccgcccgcccgcgcctccggaaaagttagagctcttctctcatctccaatttctctctctctctctccttcgctcttatcctctggcgattttttccagagattctccgattctcgaggaggaggaggaggaggaggaggagggagagaaggagaaggacattttcgattcgattgatgtgaaacgctcctacttgattcccgtcgtctgagatcggagttatcatcgaggattgataatggttcccgaatcatcatcgaggataatgagtttttctggcgatgatttcgaattcgatattgatttcgaattcgatgcaccgaggttctatgatttctctagacctgagctttattccgagactgaagaaatcgaaatctggtttcaatcctctggaaactatcctccttcaccttttagcccaaagttcaatgggaaatt

SEQ ID NO: 99236 - DNA, 771 bp, Arabidopsis thaliana columbia
  unsure (1)..(771): unsure at all n locations
ttaggtcnnnnnnnntgacttcgtatgcacgcgtccgtaagcttggatcctctagagcggccgccctttttttcttttttttttttttttttttttcatcaagttttgtgtcaaattttatttcttttcaattgtgcagagcatctttaccggtacacttgaggctaatttaagacaagatcgaatataaaacattagctcttcttcaacaccacatcatttctcttccaagaacttcaatcaagcgcagtcaaattttgagacatgatctcaaccgcacgttcgatttcctcctctgatataaccaacggaggaacaatcctgacgacatttcctttccccgctgtcaagatcagaagacccgaatctcggcaagcatcaaccagtgagcttgccggcacatcgagctccactcctatgataagcccttcgcctctcacttccttcacgtgcgagtttcctccaagttttttcaccaacaggtctctaaagtatcgacctttatttgagacactggacaagaaagagggtttcgatactttatccataactgccaaggctgcactgcacacaagagggctgcctgcaaatgtacttccatgaatctccgtagattatggtctttgcaaccttttcagtcaccagcaccgctccaaaggtaaaccccccgctaaaggctttgcaacccgcattattgcaggagtcacaccgaaagttttataagcccacatgaaaacccgttcgacccaaaccacattgaaccttattgaa

SEQ ID NO: 99237 - DNA, 569 bp, Arabidopsis thaliana columbia
aaaagactcatcaataatctgtaaaaaacttatgttttaaatcccataaacacatcaattcaaattcctgaagaagaaaaagcctgaggttaaacactgcacctgggaatcaatttccttaaatctttactcaaaagatgaggctcctcttcagcttctgcttcttcttcttcatgatcatctttaccgcaactgcttatgatccattagatcctagtggtaacattacaatcaaatgggatattatgtcctggacggcagatggctatgtggctacggtaactatgaacaacttccaaatctaccggcacatacaaaaccctggttggacattaggttggacatgggcaaagaaagaggtgatttggtcaatggttggtgcacaaacaacagaacaaggagactgttccaagtttaagggaaatgtacctcattgctgtaagaaaacccctacagttgttgatctcttgccaggtgtgccttataatcaacagttctcaaactgttgcaaaggaggtgtaattggagcttggggtcaagatccatcagccgctgtatcccagtttcag

SEQ ID NO: 99238 - DNA, 518 bp, Arabidopsis thaliana columbia
  unsure (1)..(518): unsure at all n locations
nnnnnnnnnnnnnnnnnnnnnnnnnnnnnnnnnnnnnnnnnnnnnnnnnnnnnnnnnnnnnnnnnnnnnnnnnnctttttgtttttttttgaacgcgaatacgtgaaatacatacatttttgctttttttctcatgacctacaagcaattggggcgttaaccgcagaagctaatgtgttcttaggttacactcattcataatctctctcctttatttgctccccacaaacaataatttcgtactttgccctgctgagacagaacatggagtttcctcattgctgacaagttaccagaagcgatactccattataagctgtcatcaagaatcgtagagctcaatagctctcgaacaaactcactgcgtttcaacttctgcttgtgatcctcagctgaaagagaagtttttttcgcattctgttcgggtaaacactgaatagttgttttcttgacaggacccgtttctgcagatatgcatgactccgtggtgaagaacccatcagcaataggagaaatga

SEQ ID NO: 99239 - DNA, 680 bp, Arabidopsis thaliana columbia
  unsure (1)..(680): unsure at all n locations
nnnnnnnttgtnnnnnnnnnnnnnnnnnnnnnnnnnnnnnnnnnnnnnnnnnnnnnnnnnnnnnnnnnnnnnnnnnnnnnnnnnnctttttttttttttttttttctctggttacttgcaattttattctacaaatatacaagtctagattacaccaaagtcacataggaacccagttacagaaatagacaaataactacaatacctatttgttaattctgtctctctttttcatacaacagagattaggtctcgttatgtatactttattctaaaccagttgcagaaagatcgagagtagcctttcccattcacataatttacagatcaattaccatccatgtttaacaatcaacaccaaactctctttgactcacctctccatagccattttgatgtatcaaatatcttccaggcaaccgtactccaactgagcttcttcatgagtgagtttcatccttctgtaatcctgttgagccttcttagacctgaacatggcttgtactcgcactacagatctctcgagcctctcctctgcttgtctctggcttgacttgtagaaatcttcctgtgcctcaccaggagaatcctcctctgctgaacctggagtcctctaaacccttttctcttttgtctccacctcaaaactgccttctccaatactcctaccgaccacaata

SEQ ID NO: 99240 - DNA, 502 bp, Arabidopsis thaliana columbia
  unsure (1)..(502): unsure at all n locations
nnnnnnnnnnnnnnnnnnnnnnnnnnnnnnnnnnnnnnnnnnnnnnnnnnnnnnnnnnnnnnnnnnnnnnnnnnnnnnnnnnnnnnnnnnnnnnnnnnnnnnnnnnnnnnnnnnnnnnnnnnnnngggcaaacaaaatttgtattcattccatcaaatcccctaagggcaagtttacaaagtcttcaaagatgaaacagattacaaaaattttagaaaagcctaagcttgcaacatagggggataacttaaaaggataggccaatgagagtcggagacagaggcaaagaagccacataccacaaacgacttcaaagggggtcaatgacacttccactagcatgtcggggaaatacaaagtagtcactttcaaacaatgataatgaccttgagaaaaagtcctttgcctcatggttcggcgatgcgaaacgcaaagagggcgttgggacaacaaggggaatatcctgaaagatacagataaattcgggtttgatcttgggttc

SEQ ID NO: 99241 - DNA, 518 bp, Arabidopsis thaliana columbia
  unsure (1)..(518): unsure at all n locations
nnnnnnnnnnnnnnnnnnnnnnnnnnnnnnnnnnnnnnnnnnnnnnnnnnnnnnnnnnnnnnnnnnnnnnnnnnnnnnnnnnnccacgcgtccgacaagacaaaggatcaagaacactacttgttctttgtctgagacttcaaacacaagaaaccaaaaatagaaaaagatatgagagagctttttatgtatctatttcttcttttcttagttctatgtgtcaaatctgtttattctactccgacaagagaacaattccaaaattgcttgtccacaaaacaattcaattctaccctcaaaaaccctataaatctcaccactcatacactagattcccgagttcacaccgacttttccgagtcttcatctccaaattctagtttcctcaacttgaatttcacaagcttgaagccgattctcatcgttaagccaaaatccgaatccgaaataaaacaatcgattttatgcagcaggaaacttggagtgcaagtaagaacaatgagtggtggtcatgacta

SEQ ID NO: 99242 - DNA, 514 bp, Arabidopsis thaliana columbia
  unsure (1)..(514): unsure at all n locations
nnnnnnnnnnnnnnnnnnnnnnnnnnnnnnnnnnnnnnnnnnnnnnnnnnnnnnnnnnnnnnnnnnnnnnnnnnnnnnnnnnnnnnnnnnnnnnnnnnnnnnnnnaaacaaattattttttaaaaaacaaacaggaaaccaatgatttacagaacacgagttaaacgaaccccattgctacccgcaaattcttaagagtcacacaaaactcaaaacagatggcacaaagacaaaaacacaatggttaaaattgactttttgtttttcgggtcttggttggggggtttttcccaataaagaaaacataattatgaaattactaataaggattgtaacggcttcgtcctctaccggtgtcactacttcgtttgctgccgctgctgctgctcgaaccgctgcctcccctatacggtggagaatgccttggggggggttgcggcatagctgctagtccaggctgttgcaagacgtatccgattctcccatcgggtaacatgattggcatcatcgacat

SEQ ID NO: 99243 - DNA, 501 bp, Arabidopsis thaliana columbia
cccacgcgtcagcagagatttttatagtttggtttctttgaccggagaatctcgattaggttacgatggtgtttctctcgattccaaacgggaagactttatcgatcgacgtgaaccctaattcaaccaccatctccgccttcgaacaattggcccaccaacgtagtgatgttccacaatctttccttcgttactctctccgtatgcgaaaccctagccgcgtgtttgtagattcaaaggattccgattcgatcttattgtccgatctcggtgtttctcgtttctctactgtgattatccatgtcctgcttttgggtggtatgcaagcggctccgccgaagcctcgtcttgatttcctcaattctaagcctccgtcaaattatgtagcgggtttgggtcgtggtgctactgggtttactactcgatctgatattggtcctgctcgtgctgctccggatcttcctgatcggtctgctttggctacagcggctgctccaggag

SEQ ID NO: 99244 - DNA, 666 bp, Arabidopsis thaliana columbia
tatcactacccaaaaaccagtctcttcaacttatccccatttctctgaaaaccctaacaaatcctcctcttgttccgccactgccgccgccgctactcaacggtggtgaattttctatacggtcagttcgatcctctttttatcgacaatcctacacaaatccataatcatggccgccactgcttcctccgaagcttctgaaggaccagtgatgggtctcatcaacaagcgtctccgtgctctccgtaagaaatacaaccgaatcactcaaatggaagaatcgatttctcaaggcaaaaccctaaacaaggagcaagaagaagtcctccgctctaaacctgccgtcgtcatcctaatcgacgagcttgaaaagatccgtgctcctctctccgccgctgtgacagaggaaatcagcctcgctactcagcttaaccgtgcttcatccgatcaaaccaccgcatctgagcaaaaggaagtcactgatatcccgcaggaagttagcggcggcgatgatggcgctaagttggaggatctggtgaatttcctctactttggttcactcttcgacgtcaagtcacagaacgagttcacttcgataatgttgaccaggactcatgagagaagttgctgcttgtcttacgattacgttaccgatgatgccactga

SEQ ID NO: 99245 - DNA, 526 bp, Arabidopsis thaliana columbia
  unsure (1)..(526): unsure at all n locations
nnnnnnnnnnnnnnnnnnnnnnnnnnnnnnnnnnnnnnnnnnnnnnnnnnnnnnnnnnnnnnnnnnntttccgcccttttgttttttttttttacgtgatatacaatcccgagtacattcattacactctagtttgatggactaggaaattgtacaaatttttttacagtcatacatcttgtgagagtactcttatcgatcagttttctttttctttttaccctaaaaaaatcagaaaattgcaacaatctgtacataagactttccctatatattcaaccttgtagcaagaatcacatgcctttgcctcttcttctccctcatatatcggtaaggctttcaatattagtaggaattacttagagttgtaacgccaaatccggatgctgcgatgaacctgcctggtggttagagcctggtgagtttggtgaggaaagcctagcattgagatctggtggcaaccgctgaaattcctgttttatgttgccttgctgcgagccagctgtttccagcatttggtttggtt

SEQ ID NO: 99246 - DNA, 519 bp, Arabidopsis thaliana columbia
  unsure (1)..(519): unsure at all n locations
nnnnnnnnnnnnnnnnnnnnnnnnnnnnnnnnnnnnnnnnnnnnnnnnnnnnnnnnnnnnnnnnnnnnnnnnnctttgggtttttttttttttttcaagtctcaagatacttgatttgtgctttcatgtctgaacatagtccactgagaaaaatgaaaatttagataccagtcaatgatggagagtcttgtacttgttattacagtgaaatgtaaacacgaaacctttggttttctaaggttcttcgcatagatatatgcattaagattatacttttcgaccctgaaagaccttgaaaccaaatgggaaattttgcacaccaagtttttgactatctttagttcatgtttccaacttggctgcagcagatgcatagctgacactgctgtctcgcattgtctggcattggcttgactgctcgtaccgcaggaaattgatcttaatcttgcttgatgaatgttttagcatatggagaaaaatactgatcgggtggcgcccacaaatcgtgttttcaaattc

SEQ ID NO: 99247 - DNA, 401 bp, Arabidopsis thaliana columbia
gggtcgggccacgcgtccgagcgcacaatggctatggatcatctctgtttcgtactaccgacagaatccggcgagttaaagccaccggtgatggtcgaggagaccacagaagaagaagaggagaagaagagtcgtgattgtggacgtcaagttgtgagtttaatcggagatttattccggcgattacacggctctaagttggtgaagagcttgaatctctgtagtatcaacgagagtaaagattcgatttcaatggagatcaataaatcattcactgacatggaaggtgttcagctttccagcaaagtcggttgcgagaatccaagaatctttggatactctgagctttatatcggaactaatggtttcagcgacgaactgatcctcggaagcggcggttt

SEQ ID NO: 99248 - DNA, 516 bp, Arabidopsis thaliana columbia
  unsure (1)..(516): unsure at all n locations
nnnnnnttgtnnnnnnnnnnnnnnnnnnnnnnnnnnnnnnnnnnnnnnnnnnnnnnnnnnnnnnnnnnnnnnncttttttttttctttttttttttttttagtataatcacataatactttgtgaatttcaaacctaaataaaatacattccaaatgggaaattaaatgtgatctcaggaataaaaagaaaaagcgttgctgcttaactgctcgagctgagcatataaaataaggaaggaaaggattcagcaaacaggcaatgtaatgttgttctctaggtagttgcctgaaatctagcaattgatcaagaaagatcgaattttatactacactgagcagagtttacccctgcggtttttgcttcttttccgataactcactggagtctgcggttttgtttctgtcagagaagtccacacaaatcagatctgtgaatacaatgaagtactactaacattatcctaaaacagccaagacacttactggtgaaacatatgtcgttgcaaatcaaatag

SEQ ID NO: 99249 - DNA, 511 bp, Arabidopsis thaliana columbia
  unsure (1)..(511): unsure at all n locations
nnnnnnnnnnnnnnnnnnnnnnnnnnnnnnnnnnnnnnnnnnnnnnnnnnnnnnnnnnnnnnttatttggccgcccttttttttttttttttgtttttgatcacacaagttcagaatttttttttaaaaatagtgtttttacaaacaaaattcctaacgattattttcatacattctgaaaccacaaattagaagaatactactaattgttcatcatatatgaacaaaatcattttctgggatcccttaaagcaaaacagaagaaaaagaaatattgctagtcatttttcctaggggtgatggtgtcatacatactcaccccagcagcattggaagctcatgcgaatacggttcttctccatcgctttcgtaatcagaagcatccgtaagccttgcaatggcagcaataagcgcctgttcatgttccttgagtagcttcttggccttatcaagctcatgtggatcaggaaggtttgaatcaaaaactctctcgacctctttcacaagtgag

SEQ ID NO: 99250 - DNA, 518 bp, Arabidopsis thaliana columbia
ttaggtgcaactatagaagagtcttgacgtcgcatgcacgcgtacgtaagcttggatcctctagagcggccgcccttttgttttttttttttaagctgaaggagtaataactaataagaacctcatcgttttagacaaaacaaaccacagtttgggtaataacaagcctcaataatccttaaccgaatcaaacaaaactggcgggaatcgattacaactaaaccgttaattgaatctttaagaagaagatgttcatcattgttaatcaatgagagagttcaacatctgtctgaatttaggaatcttgtttgcttccacggccatcactaaacccatcagctgataattcttcatttcttgggaagtaacgagctgtgagcgcatagggaatgtgaaggaccaagagctaagctcgagaaagagttcatcttcaggcttaagaaatactgtgtcttcaatgtcttcttcaccatgtcgaggttttctctgcttaggattcttcagcttgtaaatcttgg

SEQ ID NO: 99251 - DNA, 552 bp, Arabidopsis thaliana columbia
  unsure (1)..(552): unsure at all n locations
ttnctttcttgggacctcccccgggagngccttaagaggttcctgtgggcgatncccggttcaggggtttcgcccaaggtcggtcgcccctgccacgcctcccccttaatctacatcgcaactgtacttctcttccacgattcccgtgctttacgagaagtatgaagataaagtagatgactttggtgaaaaggccgatgagggagatccaggaagcaatacgtggagttcgacgtgaaggttttgagtaaggtgatgagcaaaattcctaaaggagcctttgcctttatcaagaagaaagattagagagtgtgtaagtttctctcatcatcattatccgagattattcaagattgatatataaatctcgaagcattgtttttttggctgttggttaataaccctttattctctcaaatatctgctatatggattttattcggggtttaaccaaattttatagcaatattgaatctgattgaaaaaaaaaacagtattaccaggggcgggcgctctagaggatccaagcttacgtacgcgtggctgcgacgt

SEQ ID NO: 99252 - DNA, 1250 bp, Arabidopsis thaliana columbia
  unsure (1)..(1250): unsure at all n locations
gttctaatccaattcattatagggaagagctggtccgcctgcaggtaccggtccggaattcccgggtcgacccacgcgtccgatcgcttactgaaaccagaaacaagtttagggtttttgcggaggtttcaaagttaacaatggcggaagagcacaagcacgaggaatcgatcatggagaagatctctgagaagatccatggtcacgatgactcttcttcttcttcttccgattcggatgacgataagaactctgcgtctctcaaaaccaagatttatcgtcttttcggaagagaacagcctcttcacaagcttttcggtggcggaaaacctgccgacattttcctgtggaggaacaagaaggtatcaggaggagtattgggtgctgcaactgtttcctggatcttattcgagttacttgagtacaatcttctcacactcttcggccacatttcaattcttgctctcgcagtattgttcttgtggtctagtgctagtaccttcattcacaagtcacctcttcatatccctgaagttcacatccccgaggatgttgttcttcagcttgcttctggattaaggattgaaatcaatcgtggatttactgttcttagggacattgcatcaggaagagatcttaagaagtttctgttggtgattgctggtttatgggttttgtccaaagttggtagctcctgcaacttcttgaccttaatctacatcgcaactgtacttctcttcacgattcccgtgctttacgagaagtatgaagataaagtagatgactttggtgaaaaggcgatgagggagatcaagaagcaatacgtggagttcgacgtgaaggttttgagtaaggtgatgagcaaaattcctaaaggagcctttgcctttatcaagaagaaagattagagagtgtgtaagtttctctcatcatcattatccgagattattcaagattgatatataaatctcgaagcattgtttttttggctgttggttaataaccctttattctctcaaatatctgctatatggattttattcgggttttaaccaaattttatagcaatattgaatctgattgaaatttgaattgatccttttttcggataccatggtcgtcatgaatgttattatgataaatctttaaatattccgaacttaatttaatgtttacagaagttgattgttttgctcaagaaattgattgtttctgccnnnnnnnnnnnnnnnnnnnnnnnnnnnnnnnnn

SEQ ID NO: 99253 - DNA, 534 bp, Arabidopsis thaliana columbia
  unsure (1)..(534): unsure at all n locations
aggtnnnnnnnnnnnnnnnnnnnnnnnnnnnnnnnnnnnnnnnnnnnnnnnnnnnnnnnnnnnnnnnnnncttttgttttttttttttcagtaattatattagttaaattattgcaactctcattacgaaaacagtcacacatactaaatttgttacgctaatttgttcgttttatcattaaacccacataccatacaaattacatatctgatcaaatttcctacgaactttgtgtgtctccttccttccactgcttgtttgatccaatctcaacctcgggattcggtaccgtcttctcggggttacccttaggcttactcttggaatctctccacctgaaaccactgaaaagctcatccatatcctcaagcatcctcccttgcgtctccggcaagaaagtgtaaaagaaaacccaagccacagtcgcaatccctccaaacaagtaaaacgctccaccagtagtcatcgctttcgacattggaagaaacgatatcgagatcacaccactagtcacttttgtcaccaccacaccc

SEQ ID NO: 99254 - DNA, 937 bp, Arabidopsis thaliana columbia
  unsure (1)..(937): unsure at all n locations
nnnnnnnnnnnnnnnnnnnnnnnnnnnnnnnnnnnnnnnnnnnnnnnnnnnnnnnnnnnnnnnnnnnnnnnnnnnnnnnnnnnnnnnnnnnnnnnnnnnnnnnnnnggcaaaaaataaaattctgataaattttttaatgaaaggaatttggtggaacaagttaaaaattatttacaatgggataatatgcatccatctaaaatctcaatggatgttgaatactactaatattggtaacaacaacatactcagaacacaacatgtcaataaacctgtaaacactctctctaacttggcaatagtctcacaaagtaacgtacaacataacatgctcacggatagccatcgagcacgcctttgagtaggtttaacccttccgcagatatcctccgcctcacccgtgactgcattcggatctctatcctctgtggaggatccggagagaagcacacaacaatcactgtcaaattgtcacatgtattccgtttaagggcctccctcacaagctctctagagcatctctctggatcattatgaatcatcagttccttcctagctattgtcacagcgcactggctgctcatcacatcccacagaccatcacatcccattatcaagaactcgtcgtcttcactcaggtctgtctcttgcaactctggctctgggcttagcggacaagcagagcctttgggacctttcatgtgccagtctccaatggcacgtgcaactgatagttgcccgttgaggtaaccgtcatacacaactccacctaacttttctattcttactttctcggctgtgcagtttggtttgtgatctttggacaactcaattgccctacctcttctccccagtactgctcggcaatcaccagcatttgcaattatcaacctccgtccaaaaataaaagctgtaagcgcngtggtcccagaagag

SEQ ID NO: 99255 - DNA, 327 bp, Arabidopsis thaliana columbia
  unsure (1)..(327): unsure at all n locations
nnnnnnnnnnnnnnnnnnnnnnnnnnnnnnnnnnnnnnnnnnnnnnnnnnnnnnnnnnnnnnnnnnnnnnnnnnctttttttttttttttacttctatcagaaagcctctggataagttggtgacaatcgactgttgtgaccataacggttaagctagccttgcccttccagcatccaatggctattgttgatgaattcactttgaattgttctgacccgagctgagaatcatccacgagaaccataacgcaagatcccaaggctagttctgctgctttctcaccaatctgtggatgtatgaaatctacaaacttgattgatttgtg

SEQ ID NO: 99256 - DNA, 517 bp, Arabidopsis thaliana columbia
  unsure (1)..(517): unsure at all n locations
nnnnnnnnnnnnnnnnnnnnnnnnnnnnnnnnnnnnnnnnnnnnnnnnnnnnnnnnnnnnnnnnnnnnnnnnncttttgtttttttttttttttttttaatctctaacaattcgaggtcgactgagaaagaaagaggtaatacaaactacaaaacattggtttcaagtaaaagaagatagatacagatagatgtacagacctgattagtttccaaaccaaaaatcaaaaacaaacaaaagtgtcaataatttcgtatagatatcattatcatttcacaaacaatgcatcgtatctaaaaaaacaaaccagtcttgttttttaccttaacccaaagtctcctgatcaaatgtcgtgggtcatgaacacgtaaagttgtttcctctagacttcctctcgatccaagttgctactcttgaggatgttgtatttgcagagtgggcaagtcgcgttgatgtatagccatttgtctacgcatgaacagtggaaatggtgtccacaaggtggttcccttagctt

SEQ ID NO: 99257 - DNA, 645 bp, Arabidopsis thaliana columbia
  unsure (1)..(645): unsure at all n locations
cgcgtacgtaagcttggatcctctagagcgtctcgccctttttttttttttttttttttttaacaaaacatgtggtttcaagtaaaagaagatagatccagatagatgtacagacctgattagtttccaaaccaaaaatcaaaaacaaacaaaagtgtaataatttcgtatagatatcattatcatttcacaaacaatgcatcgtatctaaaaaaacaaaccagtcttgttttttaccttaacccaaagtctcctgatcaaatgtcgtgggtcatgaacacgtaaagttgtttcctctagacttcctctcgatccaagttgctactcttgaggatgttgtatttgcagagtgggcaagtcgcgttgatgtatagccatttgtctacgcatgaacagtgggaaatgggtgcccacaaggtgagttcccttaagctctgttcccgtcttccatttgccagagagacagaggcaacattctggatcttcctgccaaaggggtaggtcaatgggggaaactgtaccccccccagcattatnccccgggagtcctgggggtcaccananggggttgnngganncccagntgggaactgaattgggggcgccaagnntctttgagnccncccggtagaaagggnaaaatng

SEQ ID NO: 99258 - DNA, 726 bp, Arabidopsis thaliana columbia
  unsure (1)..(726): unsure at all n locations
nnnnnnnnnnnnnnnnnnnnnnnnnnnnnnnnnnnnnnnnnnnnnnnnnnnnnnnnnnnnnnnnnnnnnnnnnnnnnnnnnnnccacgcgtccgatctgattttcttgattcgattctcaagagcccagacgaggatccagagaagcacaagtatgttttgcaaagtggttttgatgttgtagcaccagatcagattgcgcaagtgtgtcaacagggctcagcagttgacatgagcaatgatgtttcagtgacgggtatccagattaagagtcgccaggcacaaccctcaggttataccaatgactatatagcgcagggaaatggtccaagaaggctgcgtctgcaaagtaactttaatggcattaacacgaagaatcctgagcttcaagctataaagagagaggctgaggacacggttggagaaagtataaagaaaaggtgtggaaagctaatgagatcaaagaacgtgaccggttttgtgttaaaaagattacgtcggtgaaatgttcatatggaggactctttagggcggcagtagttgcagttgtgttcttgatgtcagtctgcagtctaaccgtcgacttcagagcatctgcagtgtcctgaaaactgaaactttntgaaatatagtgcttcaaccggcccgtgtttttgcttctgttattgggttcaggctttcgccaagttataagatatatttgtttggangttttaacatgaagtag

SEQ ID NO: 99259 - DNA, 403 bp, Arabidopsis thaliana columbia
ctgtattgtggccgtcctttttttttttttttttggtagtcacttgaaacaaactacttttcagtttttgaatcgctagtattgtgggcagagatgaaatggcgcaaacctctatgcttacaaaattaacagagagtcgcgctcatttctccgtttctgtttgttactttctacagaagcattaaattgcttagaacacaaatttctttatatctcttctccgtctactcattctgatccaataccaagttcttctgaatccattagtgcaccagatgctttgtgttcttcatcaatcgggagtgtacgttttgagccatccaacgcaacaccaagaacaagattctcctccagtaaagaactagtaccggacccaccaccatctcgagctttcgactctcca

SEQ ID NO: 99260 - DNA, 493 bp, Arabidopsis thaliana columbia
tccacgtcaaactatcaaattagtacatcctgtaaaatccatctcacagtagctttacattaaagtttcgttgaaaagagctaacacgaaattgccaaagtgactagaagctttgaatttaacggacacgattaagttcaatattttgacgttgagagaaaactcaaattattcctaaacgcaagtttcaaatcgctaaaaccaacgtttgaacacgcaacgattactctctcagccgcgtgactttttttccaagtagcgtctgcgtttggcaaagtcctccacttacaaagctttcctcccccaatcgccgccgcaacaatctctccgccgttctccgccgcaccatgtacataaaccatatctcccaccgcgttcaacactatcgacgttaacggccaatcagaattaatccctcttagtttctccaaatacgtctcaggcatagatccgatcgactcgaatttcaaatgcgattcgtcagaatctataa

SEQ ID NO: 99261 - DNA, 793 bp, Arabidopsis thaliana columbia
  unsure (1)..(793): unsure at all n locations
nnnnnnnnnnnnnnnnnnnnnnnnnnnnnnnnnnnnnnnnnnnnnnnnnnnnnnnnnnnnnnnnnnnnnnnnnnnnnnnnnnnccacgcgtccgcccacgcgtccgcctaaacgcaagtttcaaatcgctaaaaccaacgtttgaacacgcaacgattactctctcagccgcgtgactttttttccaagtagcgtctgcgtttggcaaagtcctccacttacaaagctttcctccttcaatctccgccgcaacaatctctccgccgttctccgccgcaccatgtacataaaccatatctcccaccgcgttcaacactatcgacgttaacggccaatcagaattaatccctcttagtttctccaaatacgtctcaggcatagatccgatcgactcgaatttcaaatgcgattcgtcagaatctataacttcccacagttcgattcccgtcggattatattcatctccgatgatcccagccataattaaacgattaacggagaatccaatcgaacgtgagtataagctacactcgccgggacagagatcgagaagcttcgtccacgatctagttactggattgaaactacacgtaacgcctgatctcttctccgtcacgtacatcttctccgaactcaccgctacggaaagccacgtggacgacgcggattcgtagagataatctggcatcgattcgcatctctcccacgctccgtctccggattcgatgtcgaacagcntcacggcgaatctatcctnctccgaatcgcacacacctccgggtataatcaggct

SEQ ID NO: 99262 - DNA, 637 bp, Arabidopsis thaliana columbia
  unsure (1)..(637): unsure at all n locations
ttaggaacacactatagaagagtgatgacgtcgcctgcacgcgtacgtaagcttggatcctctagagcgtgtcgcccttgtgttttttttttttaatgaggaattgaaacttattatggaatgacaaatttaaagacaaaatgcaaaatgaaacatgtttttgaacattaaccgaaacaaacacaagcaccaaacaggttatgtatcttggtctaaaacaaaaaggaacacatgatcccacaaacacacaaaaacacacacataagttctggctgcatgaagacaaactgcagtttcttatccgagtaacccacaaaagcaaacaagacaacccaaattcaccgattgtttgaacattcaaaccatgacccccacccttctaatcctcctctctgtgaccctcctctctgtgatcctcttctctgcgatcctcctctacttgacactcctctctgtgaccctcttctctgtgctactcctcttggtgaaactcgttgagatggtgcagatggtgcagatggtgcaggtggtgcaggtggttcagatggtgcagatggtgtcttttgggnntgntggggacagagacggttgggaagagtggctgngatggtgagatggtnantgntgcntggctgtg

SEQ ID NO: 99263 - DNA, 521 bp, Arabidopsis thaliana columbia
  unsure (1)..(521): unsure at all n locations
nnnnnnnnnnnnnnnnnnnnnnnnnnnnnnnnnnnnnnnnnnnnnnnnnnnnnnnnnnnnnnnnnnnnnnnnnccacaggtccgcggacgcgtgggtttctctgttcgatcgaaatggctaaaactcgtgggggggaagagaagagatccggttcgtcgatcacggagactgagtcaagcatccgccgaatcaaatcctactgaagctgaaccaattttaattccttctgtcgacgaggctaatcgaaagaaaagaaaaaggaagaaggtagcttgaagtagatattgaggaagtatcgtgaggcctgtgagtggcgatgattgtgaggttgttggtgacgaagattgcgaagaggtttgctatgcagacaagagaatcgggaataacgaagaacatggtggagaggaacaatgggacattgacattgtttctgttcagcaagaagacgatagaagtgctgtcggggaagaaggaaacgttgcagctggggttgaggaagaaggaaacgatggaggtggtg

SEQ ID NO: 99264 - DNA, 611 bp, Arabidopsis thaliana columbia
  unsure (1)..(611): unsure at all n locations
tttttgnntntnacttttttggcccctaatttagatttttagctattaaataactttgtgtttaacatttttagtcacccagtgttttcagtatatatagattattcggtgactagttcatatatgattaggaaatttagagtaatgaaactaaccagtacagtactaatctctaaataatctaaaacaaaaactaaccgttactacactagctaaaactttatggaaaagatgacacaaaggtgacaacaaacgcagaaagcctttggttatgggagttgcttctggtggctcagtctttcttactatccacatttgccgtcagccttgcacgctgcaaagttatcgcaaccgcatatcaaattgccattcgcaacatcaaccgcttgcggagctcctccaccatcgcttctcttgtagaaatcgactgctatgaagttaggccatcgctgtcccgcggcttggtaacatgtctttatggattcaagaagagaagctgagttttgcttacatgctactatcacatccgcagcatcagggaaatggttcacaagaacaagagattgtgttccatcgctcattggcgctgattgagctctatttggacacac

SEQ ID NO: 99265 - DNA, 440 bp, Arabidopsis thaliana columbia
  unsure (1)..(440): unsure at all n locations
tgaagtcttcgttacagtttctctctctcaccttctctgtataaagtcttcttgagatcgaaggataacttcaattcaattctctccaaggtacacacagctgatttttgtgataagaagattgattgaaatgggtactagagctcagcagattcctttacttgaaggtgagactgataattacgatggtgttactgtaaccatggtggaacctatggattctaaggtttttactgaaagtcttagggcttctctttcgcattggagagaagaggggaagaagggaatttggntaaagctgcctcttngattggctaatcttgtggnaggctgcagttagtgnagggntttagatatcaccccgcggaccntgagtnctttnaatgccttgtnanctnnggaccncttgaaacccctgatncnaaccccagccaattntt

SEQ ID NO: 99266 - DNA, 572 bp, Arabidopsis thaliana columbia
  unsure (1)..(572): unsure at all n locations
nnnnnnnnnnnnnnnnnnnnnnnnnnnnnnnnnnnnnnnnnnnnnnnnnnnnnnnnnnnnnnnnnnnnnnnnnnnnnnnnnnnccacgcgtccgcaaggtacacacagctgatttttgtgataagaagattgattgagatgggtactagagctcagcagattcctttacttgaaggtgagactgataattacgatggtgttactgtaaccatggtggaacctatggattctgaggtttttactgaaagtcttagggcttctctttcgcattggagagaagaggggaagaagggaatttggataaagctgcctcttggattggctaatcttgtggaggctgcagttagtgtaagttttatatgaggatttggattgacgttagttattgtgatgattagttgaatatcttcttgtgtttggtgattttttcaggaaggatttagatatcaccacgcggagcctgagtacttgatgcttgtatcttggatctctgaaactcctgatacaatcccagccaatgcttctcatgttgtaggtgctggtgctttggtcatcaacaaaaatactaaaga

SEQ ID NO: 99267 - DNA, 668 bp, Arabidopsis thaliana columbia
taggtacacactatagaagatctatgacgtcgcatgcacgcgtacgtaagctcggaattcggctcgatgatttttgtgataagaagattgattgagatgggtactagagctcagcagattcctttacttgaaggtgagactgataattacgatggtgttactgtaaccatggtggaacctatggattctgaggtttttactgaaagtcttagggcttctctttcgcattggagagaagaggggaagaagggaatttggataaagctgcctcttggattggctaatcttgtggaggctgcagttagtgaaggatttagatatcaccacgcggagcctgagtacttgatgcttgtatcttggatctctgaaactcctgatacaatcccagccaatgcttctcatgttgtaggtgctggtgctttggtcatcaacaaaaatactaaagaggtcctcgttgtccaggagaggagtgggtttttcaaagataaaaatgtgtggaaagcttgcctactggtggttatcaacgaaggcgaggatatatggcctggtgtggctacggaagtggaagaagaaactggaattattgcagattttgtccaagtactggctttcaggcaaagccacaaagccatcttaaaaaagaaaacagatatgtttttcctgtgtgt

SEQ ID NO: 99268 - DNA, 536 bp, Arabidopsis thaliana columbia
taggtcaactatagaagagtcttgacgtcgcctgcacgcgtccgtaagctgggatcctctagagcggccgcccttgggtttgtctttttttttttttttattcgaatatattactcgtgtattagagttaaattgaagaaatcaaatacaaacagaacgacaaaaatcgatgtcacaacactttgaaattggtctactaaacacaatacatgaaccatatgtaatgtgatgatatacactcttcagttcttcttcccacgaccacacttgacttgcacggaaagcatcttcacaacgttcttacatgaatccttcttgtcttgttgaaacgtgctcttgttcaccggaatcacacattcagctttccccaaacagggcttctcgatgacttgctttgaaacaggagcattacaagtaccaagtgtgaagtttccacaaacaccaatagggtttccgaagctagcgaactcaactgctgcgatcttcttagtgcctgagcatttaagagtagccgtgagactcacgttatctgtgat

SEQ ID NO: 99269 - DNA, 2348 bp, Arabidopsis thaliana columbia
gccagactcaaaagaatcaaaaccatcttcaaagccgaaaaaacccaatcgagatcggaaattaaacccattcgccggagatttcaccagatccccagctccaatacgtgttctcaaagatgtaatccctatgagcaatcaaactcagatcagcgacaaatacatcttaggtcgtgaattaggtcgaggcgaattcggaatcacttacctctgtactgatcgtgaaacccacgaagctttagcttgcaaatcgatttcaaagcgaaagcttcgaacagctgtcgatatcgaagacgttcgtcgtgaggtagcgattatgtctactttacctgagcatccaaacgtagttaagcttaaggctagttatgaggataacgagaacgtgcatctggttatggagctttgtgaaggaggtgagctttttgatcggattgttgctagaggacattacacggagcgtgctgctgcagctgttgcgagaacgattgctgaggttgtgatgatgtgtcactctaatggagttatgcatcgagatttgaaacctgagaatttcttgtttgctaataaaaaggagaattctccactaaaggctattgattttggcttgtctgtgttcttcaaacctggagataagtttacagagattgtaggaagtccgtattatatggctccagaagtgttgaagagagattatggaccaggggttgatgtgtggagtgccggagttattatctatatcttgctctgtggtgctcctccgttttgggctgagactgaacaaggtgttgctcttgcgatcttgcggggagttcttgattttaagagagacccttggcctcagatatcagagagtgccaagagccttgtgaagcagatgttggatcctgatccgactaagcggttaactgctcagcaagtgttagctcacccatggatacagaatgcaaagaaagctcccaatgttcctttaggagatatagtcagatctaggttgaagcagttctctatgatgaacagattcaaaaagaaagttcttcgtgtaattgcggagcacttgtctattcaagaggttgaagtgataaagaacatgttctcactgatggatgatgacaaggatggtaaaataacttacccggaactcaaagctgggcttcagaaggtcggttcacaacttggtgaaccagagatcaaaatgttgatggaagtggcggatgtcgatggaaatgggtttctggattatggagagtttgtagctgtgataattcacttgcagaagatagagaatgatgaacttttcaaactagcttttatgtttttcgacaaagatggaagtacatacattgaacttgatgagctacgggaagctttagcggatgagttaggcgagccagacgccagtgttctaagcgacatcatgcgtgaagttgacactgacaaggacggacgtataaactatgatgagtttgtgacgatgatgaaagctggaactgactggagaaaggcatcgagacaatattcaagagagaggttcaaaagcttaagcattaacttgatgaaagatgggtcattgcatctccatgacgctctcactggacaaactgttcctgtttaaatttattcgttatcaccaaaaacagagcaatgctccgttttttccccatttcataaattgggaattttccgggcttgttctttgagggatgggaattttacggaagctatggttctttacatatataaacattttacattgtattttgtatgtaatgttttgttcaaaggttgtatttttattgtctcaaagcccctaaaccaaagagtcaaaggaaagatctttattacactgacaccttatcaaactcagcagaagtcttgtccatgtccttgtccttggccacaacatctttgtagcggtaccaatgtgagaccaacaagaaataggccaagtttagagtcatcataccagcaaccaagaagtagaaatactccaatcttcccttgtttaaatcttccggaagccaacttcctcctgaaaatccctctgtggtatcgtgtaccgccgataacaaaaaggtgctgaggtaactcgccaatccgattccacaataatacagagaaccagcaaaacttcgcatgttctctggaaactgtttgtagtaaaactccatttgtccaactccagcgagggcgtccgcgatacccattagcactagctgaggaatcaaccacataccggacatcgaagagattgcgccttttcttggggccaaccctagcgtcggttttgtgagagctacctttcttctgtattgttctcggacgcgtgggtcgaaccgggaattgcggtc

SEQ ID NO: 99270 - DNA, 462 bp, Arabidopsis thaliana columbia
tttttgtctgactccataatcacaccatcaccaagaagaagaagatctaggttttgcatctctcgtcattacaatggagcgagcacgaaccgaaagccctagctacttccgtcaatggagcggcgattcaggtaccaccaatgccgccgccgtagctccttcttctccggcgcgtcatcaccacgctcgatcttcttccgtcactaatatgtctaacgtcaaacgagctcaaaacgttgctgctaaagccgctgctcagagacttgctaaagtcatggcttctcagaccaacaatgatgacgacgatgacgatgatgatgatgaagtcggtggtgatgatttaggtttccgatatggtgctcctcctcctctttccttcactagaaatccttcttccacaattgctaaacctaaacctgttgcttcttctgctgttgttcctcctcctaagatctctagatc

SEQ ID NO: 99271 - DNA, 586 bp, Arabidopsis thaliana columbia
  unsure (1)..(586): unsure at all n locations
ttaggtacaactatagaagagctatgacgtcgcacgcacgcgtacgtaagcttggatcctctagagcggtcgccctttttttttttttttttgaacgaattcttacttgtgtttattctgtaacaaattggcactatctcagttacatagtgataaactttgtgtgttcgcggttattgcaaaagattataatcaataataactcaagaattaataaatatttcgcaaagtgcaactctctactcttttcttgtaacttcaaaaatgccggcaacaaatatcaataggcactactatctcagtatctcctcctctgatagtatcccatagcttgatacatattgcgcattgtgacagctcccaactcctcggctctatccgcaccttctgacaatattttgtcccaatactctggttccgctattatctcctgataacgggcctggattggactcagatggtcgatcaaagcatctgcaaggagaggcttaaatgtaccccagctcatatctttgcattcctccatcacttcctttttnttcttgcctgaaacaatctgatatattgagaggagattgttgcattc

SEQ ID NO: 99272 - DNA, 544 bp, Arabidopsis thaliana columbia
  unsure (1)..(544): unsure at all n locations
actggctctgctatcattgggttgattcttttccttgttggaacaccgagataccgatatttcaagcccacggggaatcctctttcgaggttttgccaagttttggtcgctgcaacgaagaaatcatcggtggaggcaccattaagagggagagaggagatgtatgacggagacagcgaagggaaaaatgcttcagttaacacagggagaaggatagtgcataccgatgaattcaagttcttggacaaagcagcgtacatcacagctagagatctagatgacaagaaacaagactcagtgaacccatggaggctctgtccagtgacacaagtcgaggaagtcaagtgtattcttagactgatgccaatttggctctgcactataatctactcagtcgtcttcactcaaatggcctctctctttgtggagcaaggcgctgcaatgaatacctctgtntcagatttcaaaatncccccggcaagtatgtccagcttcgncatccttngcgtngntttgttcatattcctgtncgagcgttctnntg

SEQ ID NO: 99273 - DNA, 512 bp, Arabidopsis thaliana columbia
ctatagaagagctatgacgtcgcacgcacgcgtacgtaagcttggatcctctagagcggtcgccctttttttttttttttagttaattatattgaattaatcaaataatttatggatacgatcgaagccgaattatatgttgcaaatgatgtagtatatcaacctttatgatgtatatatgaatgcttccgatgaaccctaaacattgacaaacgacagttggatttcttctaacgttaatcttcgagtctccggcaccaagcaccatgtgaatacaattgttgctccacagattatagcggatattataaaagtcccgcttgggctccaaaccaacataaaattgaaagcatagttggcgatccaaccagtgaaccaatttgctatggtcactaaactcccagctaatacctttatatccattggaaatatctcagacattataatccatggtaacgctcccattccaattgcgaacatcatcgtaaacgacaatattccaatgaaacaga

SEQ ID NO: 99274 - DNA, 716 bp, Arabidopsis thaliana columbia
aaagggaggaggatggtgtgacaacattaggatctgtgtataccgaaagaagtcgcgtcgcggatcttctaactatatggagaaacaaatacagtttacaggaatacttagcaataaagctcaagaaaatccagactttttcaactggaatcgagttaagcttcgttactgcgatggtggttccttcagtggagatagtcagaacaaggctgcacggcttcagtttagaggagagaagatatggagagccgcaatggacgatttgaaggcaaagggaatgcgaaatgcgaaacaggcacttctatctggttgctctgcaggtggtctagcagttattttacgctgtgacgaattcagaaacttgttttctggatggaccagagttaaatgcttaagtgatgcaggcttgttcttggacacgcctgatgtatccggtggacacactataaggaatttatataacggcgttgtgcagttgcagggagtgaagaacaatttgccacatttatgcactaaccatctcaatccaacctcttgtttcttccctcaaaacttgatcagtcagatgaaaactcctcttttcattgtcaatgcagcatatgatatttggcagattcaaagcagtatcgctccgccgagtgcagatcctagtggttattggcatgaatgcagattaaaccacggtagatgcactccggcgcagatacggttcttgc

SEQ ID NO: 99275 - DNA, 529 bp, Arabidopsis thaliana columbia
ctatagaagagctatgacgtcgcacgcacgcgtacgtaagcttggatcctctagagcggtcgcccttttgttttttttttaaacatcactggtcttttgaatcaacctaaggtcacaacactgcgagcataatctaccaatactctttagcatactcatttttccaaacctatgaagtaccaaagaaaacatcgttatccttctttctgtgtatgaagcaaatacagttgcttttattcacaaatgacgacgtggcaactacattaagtttaagggcttcccttctgctgctactgtgggtgtagtagccccataagagacattcactagttgcgcagcagcaccgagcagctgctgtctgcacgtatcagcgctagctaggcgcagctcgagctatctccattacatcagtctgattccgtctagtatcagggaggagcttgaaaggctgaagtcagcttagatgatggcatgcttttgctcactgggttttgagcttgaagcttttggaatctctgggtggcctctg

SEQ ID NO: 99276 - DNA, 1960 bp, Arabidopsis thaliana columbia
  unsure (1)..(1960): unsure at all n locations
gatactccnnnnnnnnnnnnnnnnnnnnnnnnnnnnnnnnnnnnnnnnnnnnnnnnnnnnnnnnnnnnnnnnnnnnnnccacgcgtgcgggaacaaagaagatccctgtttatcatcttcttcttcttcaaatcgagatcgaagaagaaccaacaaaaaaccaaaaatggagacgaagccaaaccctagacgtccttcaaacacagttctaccatatcaaacaccacgattaagagatcattaccttctgggaaaaaagctaggccaaggccaatttggaacaacctatctctgcacagagaaatcaacctccgctaattacgcctgcaaatcgatcccgaagcgaaagctcgtgtgtcgcgaggattacgaagatgtatggcgtgagattcagatcatgcatcatctctctgagcatccaaatgttgttaggatcaaagggacttatgaagattcggtgtttgttcatattgttatggaggtttgtgaaggtggtgagctttttgatcggattgtttctaaaggtcattttagtgagcgtgaagctgtcaagcttattaagacgattcttggtgttgttgaggcttgtcattctcttggtgttatgcatagagatctcaaacctgagaatttcttgtttgatagtcctaaagatgatgctaagcttaaggctaccgattttggtttgtctgtcttctataagccaggacaatatttatatgacgtagttggaagtccgtactatgttgcaccagaggtgctaaagaaatgttatggacctgaaatagatgtgtggagtgctggtgttatcctctacattttactcagcggtgttcctcccttctgggcagagactgagtctggaatctttagacagatattgcaagggaagttagatttcaaatctgacccgtggcctactatctcagaagctgctaaagatttgatctataaaatgctcgaaaggagccccaagaaacgcatttctgctcatgaagccttgtgtcacccatggattgtcgatgaacaagcagcaccagacaagcctcttgatccagcagtcttatctcgtctaaagcagttttctcaaatgaataagattaagaaaatggcattacgggtaattgctgagagactttcagaggaagaaattggaggtctgaaggaattgttcaagatgatagacacagacaacagcggaacgattacttttgaagagctcaaagcgggtttgaagagagtcggatctgaactgatggaatcagaaatcaagtctctcatggatgcggctgatatcgacaacagtggtacaatagactacggagaattcctagcagcaaccttacacatgaacaagatggagagagaggagattctggtggctgcattttcggactttgacaaagacggaagcggttatatcaccatcgatgagcttcagtcagcttgcacagagtttggtctatgtgatacacctctggacgacatgatcaaggagattgatcttgacaatgacgggaagatcgatttctcggagtttacagcaatgatgaggaaaggagatggagttgggagaagcagaaccatgatgaagaacttgaacttcaacattgctgatgcttttggagttgatggtgaaaaatctgatgactgactcatcattcttccacaatttctgttttttttctctttaatttcgtttatattttgaattctaatttctaaggatacaaaaatatattctggcttgttttttgctttcctttttatttttgtacatgagcaactttctaaatttttatcctcatatggataatttttgcttcatataaaagtttttgaattccnnnnnnnnnnnnnnnnnnnnnnnnnnnnnnnnnnnnnnnnnnnnnnnnnnnnnnnnnnnnnnnnnnnnnnnnnnnnnnnnnnnnnnnnnnnnnnnnnnnnnnnnnnnnnnnnn

SEQ ID NO: 99277 - DNA, 953 bp, Arabidopsis thaliana columbia
  unsure (1)..(953): unsure at all n locations
cttttagtggcatacaaggatcaacttgctgaagcggcaaaggcagaagaggaagaagaagatgaagatggtgatgatgacgacatggatgaattccaaacagatgatgaagatgaggacggcgatgacgagaatccagatgaaactgatggaagtacactccgcaagttagcagcacaggcaaaggacttccgctcttacagcgatgatgatgacttttcagacgatgattttagcgatgacgaggaattagaatctccaattgatgaagtggatcctttcgtactcttcatgggatgcagtcacagcaatgcaagttatcagactcgccaaggttccaaagccttacccagacactagacccgcactaccatggactcgcaagcacaatagctcaacacacggagctgagaagagcagagattctaaaggagaaacttgagaagcaatcttctgcaacggttgcttcctgattttatccacggctcagtccttgaaaaaccaatcgttggcgctctcaattggctgcattttttcataagcctctttatattcctcaaaagtagagaggcttgtagaggtgagtctggtcgactctcattagtcagttcatgtcttaagagagaccaatctctgccatctccagttttgcatttcatcatcatcatcatcattctttttttttgttttaatcatccataagaccaacaagacaaaagactaaacccatttcgggttttctttattttatttcatttcagacagaacacagaaaccctttggggggttttatgttctccgattgggattttggaggcatatataaaaaaaaagcgacatagtttttttttattactaaaaaaaaaaaaaaaaaagaagggcggccgctttagaggatcccagcttacggacgggtgcatgcgacgtcannnnnnnnnnnnnnngtcctaaan

SEQ ID NO: 99278 - DNA, 539 bp, Arabidopsis thaliana columbia
ctatagaagagttatgacgtcgcctgcacgcgtacgtaagcttggatcctctagagcggtcgccctttttttttttctttttttttttttattttttttttttttttttttttttttttttttttttttttttttttgggcacaaaaagggacacagcttttacattcatgtttcactaggcagtctcttgggtacattatacatatttcgcatttcctcagttgactccgggtacaaaatttgttttttaaagcaaagatctaggactttcagattacaaatcatcttgtagctgggttagaagcccatcggtctcatgggcatcgatttcactgggggttactggtctggtttcgcccccatcaataagagctagggaagatttgtcttcaagatcccccgactgccttaacaattccaaaacggcctctttactggtaacatccgattcctcttcacagagcttgaagaaaccagacagcttcaaccccttgggcctccaattgctgggcccttcagccgaaaaagcatttctaag

SEQ ID NO: 99279 - DNA, 511 bp, Arabidopsis thaliana columbia
  unsure (1)..(511): unsure at all n locations
nnnnnnnnnnnnnnnnnnnnnnnnnnnnnnnnnnnnnnnnnnnnnnnnnnnnnnnnnnnnnnnnnnnnnnnnnncttttttttttttttttggatccctaactgcaaccaattgtactcaaactttgaaacctaaaatactgaattcacaaacggaattaaatcatcctgacggtagtaaaaaaaaggggtacaagtacaagtatgagttctgcgtttgaaagttattaagcttggctcattttattcaaacaattaattccttcttccatatagtcctctctattgatccagaactctggtgcgtccttcatgattcctgcaagaacagcacctccgaggtataccatgtgtttccttctcggtggatcttcgatccgcaatctgagtttcttcaagccatctttgtttccttttagaactgtgtcgagataccgatcctgtatttctttctcaagacggctaggtaatcctgggtacatggtgctacctccgcttaaaactatgtgttg

SEQ ID NO: 99280 - DNA, 495 bp, Arabidopsis thaliana columbia
accagcctgtccgaaaacccaaacctgttttgatacacaaacaacacagaccacccgcaaaactcacatctatctctatctctcttctctgtctctcactctccactttccgatcaccgacgattcaacaaaacatagtaaaaaacaaagcaaattctttttttctccttagttacttcttctacagattatctcaatcttacagagcaccatggatcgttgtatctatggttgctccgtcattactatcttcttctccttcttcttcctcctcaatgcatccgctttagaatcgggtcaccacaacataactgggtcgggtcaaataaactcaaactccgtcctcgtagctctcctcgattctcgttacactgaactcgccgagctagttgagaaggctcttcttctccaaaccctcgaagacgccgttggtcgtcacaatattactattttcgccccacgcaatgaagcactcgagcgtgaccttgacccgga

SEQ ID NO: 99281 - DNA, 685 bp, Arabidopsis thaliana columbia
cctatagcctagctatgacgacgcatgcacgcgtacgtaagcttggatcctctagagcggccgccctttttttttttttttttttttttttttttttagctgaagaagcttctatagatagatccttttttttttttttttctttttcaccgcaaatatcggaaaattgttttgtgtgcattagcttcattgtctacagtacaaaaatcatatgagatgttttaagttcttcaaatcgatacttagctctaaaacaaaacttggaagacaacatagtctcctgacttctcttaaccttaaaacagcaaaaatttcagacaacaaaaacaggtgcagtgaactccctaacttgagccatggttgatttctgttaaatcatgaccgagactttgactgtttcttctccagtttcattttgaggttggctataatcttatcctgagcctgtatctgatgttccttggcattgagcttctgcttcagttcttcaatttcttttgaatgaccttcgcagctgattgcgaactccatagctttgagtttttccttcagttcttccatttcttttaaatgatcatcctcacaaaggtttgcttttgcctctttggtcttctcagattcatcttgaaccatgttacgaacgtttaaacaagctcctgatcctgaactcaggctaaacccaacc

SEQ ID NO: 99282 - DNA, 727 bp, Arabidopsis thaliana columbia
  unsure (1)..(727): unsure at all n locations
cactatagaattagcttgacgtaccatgcacgcgtacgtaagcttggatcctctatagcggccgccctttttttttttttttaatgacaaaagcacaccgttttgcatcatagacacatgcatcatagagatttgcagacaagaaatctctagatcataagacattgacaaagattgggtaccaaagtggacccttaatgtaaatttgtaatgtatttatttacaatcacagttcctaagaacattacaattccaacatcacatacatctcacattgctaaaccggaaccaatcccggtttactactatgtgatttcacaatgtgtaagtcatgcatgactcatgagccatccaagatctttaagattgagatccctgctcgagtaacccttccatgttgttgctatcactgctactgccccagccactgatatttccataagctctttctttccaaatctgttcaacttccgaaaacgttagcccttgagtctcagggacaaacacaatcacaaagattacagcaagaaccgcaattcccggcaaaattcaagaaagtcattcctcttccagcagtttccggggtttgccaagaatggttggtgcacaatccaaattngtggtccagttaactggaggttggnatgcctccgnttatggccccgggattgttgagggggatccctgngntcaccggccatgggggtgggcccattcccgggggaaa

SEQ ID NO: 99283 - DNA, 778 bp, Arabidopsis thaliana columbia
  unsure (1)..(778): unsure at all n locations
nnnnnnnnnnnnnnnnnnnnnnngccccccctcgaggtcgacggtatcgataagcttgatatcgaattcccggccgcaatcacaatagagaaaactggaattcttgtaggtacagtgtattacagatgcatcacagctaatagttataaatacaaacgtggtgtgttgttctgactcttatctacaaacacttaatctggacccaaccaaccataaacaaacccacactggtccattggtccacatagtctcttaattcggtttctttagcaattcttcataccacaatccatgaacagaacgtgacactgttgccacaagaacaagaatgtctgaaacctctatgaccttgtccgagagagaagctgctccgatctttcttagcattgtttccaccaactgctttctcttcgtgttgtttccggccaaaaccgcggctctaatggctaggtatatggtctgtgatacatgtgtgaacactgcgtctcctgcttgtaagcttttcacaagcatgtttgcgattacttgtttctttgtctctgcatcgntagaatcaagaagctcggagagtgtttccatgatttctgaaagacctgcatcaggttttgcgtctagcatctcgtaaagacggtttatgcaagtccgtgtaatagcctccatgtcaatcgaggatgagttntcgcttactagtgtttgctggaggatcaaaacactgatggagacaagagtgattttctggatttggggatgaacatctctcagcctagataggttaagt

SEQ ID NO: 99284 - DNA, 532 bp, Arabidopsis thaliana columbia
atgatcctgcaagcatcaatacgactcactttagggaaagctcgtacgcctgcaggtaccggtccggaattcccgggtcgacccacgcgtccgatttttattcacatacattaaaagagaaaataacccttaataatgcatttgccaatttacactagcaaagtcgtgtaactcgtgttgtatccaatagattactttaatattgatggtggatttgatagatgaaagttacatgtctaaggagcatctagacacggttatagattggataccatcaatgaagaatcttaggctaaaagacatccctagcttcatacgtaccactaatcctgacgacataatgctcaatttcatcattcaagaggtggagcaatccaaacgcgccagtgatcattctcaatacgttcgatgatcttgatcatgatcttatacaatctatgcaatctattttattacctccggcttatacgattggaccgctccatctcctagcaaaccaggaaattgacgaggttagtgaaataggacggat

SEQ ID NO: 99285 - DNA, 707 bp, Arabidopsis thaliana columbia
  unsure (1)..(707): unsure at all n locations
aggcaaatnaagatcatcttcataaatcttctcagatctnttccaattttctagagaaaacatgtcttgctgtggtggaagctgtggttgtggatctgcctgcaagtgcggcaatggttgcggaggttgcaaaaggtactctgacttggagaacaccgccactgagactcttgtcctcggtgttgctccggcgatgaactctcagtacgaggcttccggcgaagactttcgttgcccgagaatgatgcctgcaaatgcgggatctgactgcaagtgcaaccccttgtacctgcaaaattaaggaccttcaataaaacccctaaggcttgtaaataacccctaactggttatggttaagggttttgctttaataatggaaacaaatttggctggattttttcccggtaggtttttcccggcgacgttggtctttctcttcatcggggggggtttttaagggttggtcattaagatatctccccaaaaaaaaaaatttgggactttcttaatcctaagaccattatgggtttgtattaaagtttgctttttttttgctccgaaaaaaaaaaaaaaaaaaaaaaacaaaaaaaaaaaaaaaaaaaaaaaaaaaaaaaanaaagggcggccgccgactagtgagctcctccacccaggaattaattccggaccggtacctgcaggcgtggtagcccccctaggttagtcgt

SEQ ID NO: 99286 - DNA, 654 bp, Arabidopsis thaliana columbia
  unsure (1)..(654): unsure at all n locations
tttgacggtgcatgcacgccttccttagcttggaattcaggttgagggccaattaagatcatcttcataaatcttctcagatctcttccaattttctagaaaaaacatgtcttgctgtggtggaagctgtggttgtggatctgcctgcaagtgcggcaatggttgcggaggttgcaaaaggtaccctgacttggagaacaccgccaccgagactcttgtcctcggtgttgctccggcgatgaactctcagtacgaggcttccggcgagactttcgttgccgagaatgatgcttgcaaatgcggatctgactgcaagtgcaacccttgtacctgcaaatgaagaacttcataaaccctaagtctgtaataaccctaatgttatgttaggtttgcttatatgtaataattggctgatttttcccggtagttttgccggcgacggtggggtttctccccctccggggggggtttttagggtttggcataaagaatctctgcaaagttttatctttgggactttattaatccccagactattatgggtttgtatttaaaaaaaaaaaaaaagggcggccgccgcctcgtgagcttgtggtcccggnnnnnnnnnnnnnnnnnnnnnnnnnnnnnnnnnnnnnnnnnnnnnnnctaatc

SEQ ID NO: 99287 - DNA, 580 bp, Arabidopsis thaliana columbia
  unsure (1)..(580): unsure at all n locations
nnnnnnnnnnnnnnnnnnnnnnnnnnnnnnnnnnnnnnnnnnnnnnnnnnnnnnnnnnnnnnnnnnnnaggtaccggtccggaattaattcccgggtcgacgagctcactagtcggcggccgcccttttttttttttttttttttgaaagaagcaaactttaatacaaacccataatagtcttaggattaataaagtcacaaagataaaactttgcagagatatcttaatgaccaaaccataaaaacacacacagaagaagagaaagaccaacgtcgccggcaaaactaccggaaaaatcagccaattattacatataagcaaacctaacataacattagggttattacagactttcgttgccgagaatgatgcttgcaaatgcggatctgactgcaagtgcaacccttgtacctgcaaatgaagaacttcataaaccctaagtctgtaataaccctaagtctgtaataacccaattattacatataagcaaacctaacataacattagggctcgagccgaattccgagcttacgtacgcgtgcatgcgacgtcatagctcttctatagtgcgcctaaat

SEQ ID NO: 99288 - DNA, 742 bp, Arabidopsis thaliana columbia
  unsure (1)..(742): unsure at all n locations
cnnannnnnnnnnnnnnnnnnnnnnnnnngcctgcaggtaccggtctggaattcccgggtcgacccacgcgtccgcgttttaaggcaaattaagatcatcttcataaatcttctcagatctcttccaattttctagaaaaaacatgtcttgctgtggtggaagctgtggttgtggatctgcctgcaagtgcggcaatggttgcggaggttgcaaaaggtaccctgacttggagaacaccgccaccgagactcttgtcctcggtgttgctccggcgatgaactctcagtacgaggcttccggcgagactttcgttgccgagaatgatgcttgcaaatgcggatctgactgcaagtgcaacccttgtacctgcaaatgaagaacttcataaaccctaagtctgtaataaccctaatgttatgttaggtttgcttatatgtaataattggctgatttttccggtagttttgccggcgacgttggtctttctcttcttcttcttcttctgtgtgtgtttttatggtttggtcattaagatatctctgcaaagttttatctttgtgactttattaatcctaagactattatgggtttgtattaaagtttgcttctttcttgctcaattcacaattaaccgttcctagaaggaacccaaagctttaccgttaccgccttggccattgcaaaacgttcattaagctttcttttctattaaggggggcaacccctaaaaaatttccaaat

SEQ ID NO: 99289 - DNA, 551 bp, Arabidopsis thaliana columbia
  unsure (1)..(551): unsure at all n locations
aggtatggctggtgggagaaggaacaacaagagaagagcaggaaaaagccacaaaagggacattgtttataccattctcacagttccccctcaagcagttacgtagcgattgtatctatcataccacaccagcattgatagttccaaaatctctggtgaatgtccactcctgtgaggtaagtattcaaagctacccaatccaactaaatttattagaagaggtaggccttatttttaaaaaaacacctcctgcagaacctggttacccagaaaggcgatgagtgcaactagagtggccggcatattgcacgccttagaaggatgggaaacgcatgagtntggcacatcccttcttctctcggattttgacaaagtattggaagcctgtntcagccacgggtttcagcttttcctccttccacatcattaaactccaaccttgggaggttttttggggatnagagngncacggtttgtgcttttttcctatntccagttttcacggcacatgactttgacattttaaggggcaaattttggttcgcaaattc

SEQ ID NO: 99290 - DNA, 708 bp, Arabidopsis thaliana columbia
  unsure (1)..(708): unsure at all n locations
nnnnnnnnnnnnnnnnnnnnnnnnnnnnnnnnnnnnnnnnnnnnnnnnnnnnnnnnnnnnnnnnnnnnnnnnnnnnnnnnnnnccacgcgtccgtcataccacaccagcattgatagttccaaaatctctggtgaatgtccactcctgtgagaactggttaccgagaaaggcgatgagtgcaactagagtggccggcatattgcacgccttagaaggatgggaaatgcatgagtgtggcacatcccttcttctctcggatttggaccaagtatgggaagcctgtctcagccacggcttccagcctctcctccttccacatcattaaaactccaaccttggaagattttaggagaatgagagcgacacgctctgtgcttcttttccttatgatccagctcttccacgcacaaatgaactatgaaacatatataaagcgcacacatatatttatgcatatcaagcttttggtgattatggtattgatagagtcaaattaagctcggtgactatggtattaataagagtactatttccttttctctttgtgaactaagaaacatatatatataaagcaaacatgttccagaatatctaagtttttcttctcccaaaaaaaaaaaaaaaagggcgaccgctctagaggatccaagcttacgcacgcggcnnnnnnnnnnnnnnnnnnnnnnnnnnnnnnnnnnnnngaatcg

SEQ ID NO: 99291 - DNA, 2269 bp, Arabidopsis thaliana columbia
aatacgactcactttagggaaagctcgtacgcctgcaggtaccggtccggaattcccgggtcgacccgtcgacccacgcgtccgcgacggtataatggccacaaaaccaggagtcctcaccgattggccttggacacccctcggaagtttcaagtacatcgtaatagcaccatgggctgtccatagcacatacaggtttgtgacagatgatccagagaagagggatctcgggtacttccttgtgttccccttcttgctcttcagaattctgcacaaccaggtttggatctctctgtcccgttactatacgtcctcgggaaagagacgcatcgtcgacaagggaatcgacttcaatcaggtcgacagggagaccaactgggatgaccaaatattgttcaacggagtgctgttctatataggcatcaacctattgccggaggccaaacaacttccctggtggagaactgacggagtgttgatgggcagcgcttattcacaccggaccggtggagttcctctattattggctccacaaagctctccaccatcactttctttattcccgctaccattcccaccaccactcctctatcgtcactgagcccatcacttcggtgatacatccgtttgcggagcacatagcatacttcatcctcttcgcgataccactacttaccacgttgctaacaaaaacggcgtcaataatttcgttcgccggatacataatctacatagacttcatgaacaacatgggacactgcaacttcgagctaatccctaagcgccttttccacctctttcctcccctcaagttcctctgttacaccccctcataccactcgctgcaccacacgcagttccggaccaactactccctcttcatgcccttgtatgactacatctacggcacaatggatgaaagcacggatacgttgtacgagaaaactctagaaagaggagatgatagagtggacgtggtgcacttaactcacctgacgacgccagaatccatataccatttgcgcattggcttggcctcatttgcctcctaccccttcgcttatagatggttcatgcgccttttgtggcctttcacctctctctccatgatattcacgctcttctacgcccgcctctttgtcgctgagagaaactccttcaacaagctcaacttgcagtcttgggtgatacctagatataatctacagtacttgttaaaatggaggaaagaagcgatcaataacatgattgagaaagcgatactggaggcagataagaaaggagtgaaggtgcttagtctgggtctcatgaaccaaggggaggagcttaacaggaacggagaggtgtatatccacaaccatccagatatgaaagtgagactggtcgacggcagtagattagcagcagctgttgtgatcaacagtgtacccaaagcaactacaagcgtcgtgatgacaggcaatctcactaaggttgcctacaccatcgcctctgctctctgccagagaggcgttcaggtctccactctgcgcctagacgagtatgagaaaataagatcatgcgttccacaagaatgcagagaccatttggtctatttaacctctgaagcactctcatcaaacaaggtatggctggtgggagaaggaacaacaagagaagagcaggaaaaagccacaaaagggacattgtttataccattctcacagttccccctcaagcagttacgtagcgattgtatctatcataccacaccagcattgatagttccaaaatctctggtgaatgtccactcctgtgagaactggttaccgagaaaggcgatgagtgcaactagagtggccggcatattgcacgccttagaaggatgggaaacgcatgagtgtggcacatcccttcttctctcggatttggacaaagtatgggaagcctgtctcagccacggcttccagcctctcctccttccacatcattaaaactccaaccttggaagatttttggagaatgagagcgacacgctctgtgcttcttttccttatgatccagctcttccacgcacacatgaactatgaaacatatataaagcgcacacattttatgttttacgcacacatatatttatgcatatcaagcttttggtgattatggtattgatagagtcaaattaagctcggtgactatggtattaataagagtactatttccttaaaaaaaaaaaaaaaaaaaaacatatatatatatatatatatataaagcaaacatgttccagaat

SEQ ID NO: 99292 - DNA, 684 bp, Arabidopsis thaliana columbia
  unsure (1)..(684): unsure at all n locations
gatctgatttaggacgcactatagaagtactatgacgtcccatgcacgcgtacgtaagcttggatcctctagagcggccgccctttttttttttttttttttttttttttttttttttttttttttttttttttttttttaaaaaaaaggcttgcatattattatgtattaaacatcatcctctgtaaccacactgcttccttctaacgacaaataaatgttgtccacaagcattgcttaaattcatttgtgttctcaaatccaacctacaaaatcatttgtctctcccatcgcatcccatgtatgaattccaaagccttcctagtttgttttctcattggctgtctgtgaagtcagcatcgatcacatcatcaccatctcctcctttacttgaagatgaatctcctgatgaagcaccttcgcctcccggggaaggacctgcacctggacctccagctccaggctggttgtatagagactgaccaatctccatcacttccttgggtaagagcacccatggcgtctttggtttcttggggtgacccacttccaatcctggccttaagcccttggagcttgctccacttctctttatttacctggantttnncccaagtcttcagtggtttcggntggaacatgantgctggttngggcgatgggccccnccttgaacttgaantt

SEQ ID NO: 99293 - DNA, 1258 bp, Arabidopsis thaliana columbia
  unsure (1)..(1258): unsure at all n locations
nnnnnnnnnnnnnnnnnnnnnnnnnnnnnnnnnnnnnnnnnnnnnnnnnnnnnnnnnnnnnnnnnnnnccacgcgtccgctcaagtctctctcgttgtctcaggttgggttgcaacattttgtagagaaaatgggttcatatgcatcagattctgcaatgttgaagacttggagaaagactcctccttcgtcttgttctcttgtcagactttcacatctttcttcactacaagcatatataactaagaaatgttgccttttttgtaaaaatcaggagattggttgtttacccaaaaggaaacgaagaggacaatggaaagggctttgtgtctatgtatgtggaatgtctctcatccacaacaccacccattgatgtgtttgattatctctctttctttgtctttaacaagaaagacaacaagtacctctcaatccaagatgttgaagttaagcgtttcagttcttctaaaacggtttggggattgccaaaagctatgtcgcttgaaacattcactgaccctgcaaagggatttatcggggaaggagaaccatgtgagtttggtgctcatgtgaagattgcttcatcacccgtccctgttgatgagaatctcccttttcacaaattctcttggagcattcgtgatttctctgttctgaaacagaatgattgcatatctaaaacctttgcaatgggaggaaagaattggactctaactgtgtatccaaagggagactctgaggcagataacgagttctgcaagtacttgcatttagctgacggtgaagtcttatcgcctggtgagatgatttccgtgcgagcacaactaagggctttagacccgcgtggatccaaacacaaaacagtctggcttcaacaatggatcatggcagcgaccaaagcgaggggtattcctcaatccttgtctttagctgatcttcaggaggcttacttggatgaagatactttgaatgtggagatcgaatgtgaagttgtgaactctaggaaaatgtttttagcgtagaagagaatgtgaagttgtttccaccaacccactctatctatatctatttagctatcatgccatgtctactactctaggactatttgtgttaagcgtagaactgaatgtgaagttgtttccaccaaacgctccctctatatttaggaatatctctttgtccatcatgcaaaaaaaaaaaaaaagggcggccgctatagaggatccaagcttacgtacgcgtgcatgcgacgtcatag

SEQ ID NO: 99294 - DNA, 816 bp, Arabidopsis thaliana columbia
  unsure (1)..(816): unsure at all n locations
nnnnnnnnnnnnnnnnnnnnnnnnnnnnnnnnnnnnnnnnnnnnnnnnnnnnnnnnnnnnnnnnnnnncttttttttttttttttttttatcttaagtagttttcatatgatacaaaggactgataaaaaaaccgataacaaaacgctagtttttgtttgccaacaaaccaagggaaaaaaactaattttaaacctgcgaaagtaaatgtctgactttcgtttcatctctaatgagaacaatgataagcagaattcgaactttttgagtttcttcacctgtgcttgcgtttagatggtggcatagttcttcatgctgctactaccacctccaccgctagttccaggtcgcgatttcccaaacgctttcatctttcttctcttcctctcttcctcgctatcagactcaactccatgctctctgtctgcattagtagcttctctctccagttcatcccaagtcttacctttctcttcctctgactcttgctctgagtcctcttcttcatcatccgtctgactccaccagtgactcactctctgaagcctcggcctctgactcagactcaacctctacatctgatggttcatatccttttgtctgactcctcagacccgccagattctgaatcgcttccgtccaggttcagaaactcccatcctccatcatctataaagctctgcggatcatctgtgatcgtctttaggatctgtctccagttnagattcagtttgctctcgtagtactttatatctgtggtgtctagccactcctttatcccctctagggagcttgtgggaactgagtcaaccctgag

SEQ ID NO: 99295 - DNA, 1298 bp, Arabidopsis thaliana columbia
  unsure (1)..(1298): unsure at all n locations
tnnnnnnnnnnnnnnnnnnnnnnnnnnnnnnnnnnnnnnnnnnnnnnnnnnnnnnnnnnnnnnnnnnnnnnnnnnnctttttttttttttttaatgtaattaacttttcgtatattcgtctcacatgacaaatcatacattatattattctaattgattccaaaattttacatgacaataatctgtaaaaatgtcttaaacgggtaaatttctgagtaaccgaagagctttctcccattgtggtcgttgagacataacgatacgtctcaatactggtacagctcctgctcttatgatggctgtgtggttctcactgtccatggttaagttgtacaatactgacaaactcgcttcaacgcaccgctcgttcctttcttcaagaagcttaaccagcggttcgatacctccttgtgaagcaagtgtttggatagattctggaactccctcggagactatcttgttcagttctaaaaccgctgcttctttcgtttctggtgatgaggaaaagctcatttgttccacgaggctcgggatcgttttgtacagagttacctcaagattgatcggattgttgagggattgagagggagaggagagagcggtgagtttgacaagacaagcggcaacccagtctttgtagtgtagagggaggcttgatcttaggatcttccttactaattctatgaagaccgcggtatctattgtttggcgaaaggactcggagtcaagaagttttgtcagtagccttgaagcagcggaaatcgtcaaaccagcttcttctagcttaagcagatgtttctctaactcctcagcttcattctcaggttcttccaggactttctgccggagagcaagatcaagaacagttgtgaaacccttggagaatgaccgtgcccatgttgggattcctgattattccaaacccgatgacagagattccgttccttagcaggttcggagaggctgtttccgcaatctggacgagccgagaaaaaacagcagcgtccagaacttcctttctggagtctgcttttgatccgttcaccggtccttcataaaacttggattccatttccttgctaggatctaagatatgagcaattatatccagaacgtgttctgtaacgtttagtgagatctctggctgcttcagaagattaattagaaaccatactgcaccttcagcttcaatcctctggcaaacagtgcggctaagtgataaatttttcaaggcacggatgacgggtaatttaacacggacgcgtgggtcgacccgggaattccggaccggtaccgca

SEQ ID NO: 99296 - DNA, 641 bp, Arabidopsis thaliana columbia
  unsure (1)..(641): unsure at all n locations
nnnnnnnnnnnnnnnnnnnnnnnnnnnnnnnnnnnnnnnnnnnnnnnnnnnnnnnnnnnnnnnnnnnnnnnnnnnnnnnnnnnnnnnnnnnnnnnnntttttaaacaaagttcaaagtcacatttctaagcatattcaaacaaaaacacaaattttcactgattcttagcgaaaagcttggtagtattgagtacattagcatctaaatactctttggaaggatgattctcaggaaccaatcttctaaactctgcaaatggcttctctgcttcatctttcttcttcatcatggtataaatcaaaccttgacatagatatggtctaaagtctttaggctcatctttcaccaactcttgataaaccctaagggcttcaattggattacctttgataaccctaatctgaccaatcaacaccatgaaatctctaaaatctttcttggttctccttctggcatttctcaaccgctccgtggatcctactctcgatctctgataatttcgattcggattcggagtaagccattactaatccgtgataagcttctacacgaaatggatctttagatagaacctcttcgaatcctttcgtcgctgaatcgaaatcgccgccgtaggtttgtacctgagcttttaggatcc

SEQ ID NO: 99297 - DNA, 703 bp, Arabidopsis thaliana columbia
cactatagactagctatgacgacccatgcacgcgtacgtaagcttggatcctctatagcggccgcccttttttttttcaacatggtaacaacaccttattgatttgttgaagctaaactttatttagtacaatatcaagattacaacacaaggtcgctaatgatgaccagtaacttcatatctaccaagaaacaaaggaacaaagaaataatccagaaacgatccacacagcatttactgttcttgtcttgagtgctaaacgtttcttctttttgtttttttactttggtatttgctttctcagagccgcggagacagcttctgtgtagcttcacggtaatcataaactcctactcctcgttttcttcctaatctcccagcatcaacgtattgaacaagaagagggcaaggtgcgtactttgagtccccaagtccctcgtgcaacactttcattacggacaagcacacgtctagaccgattaagtccgccaactccaaaggacccatcgggtggtttgtgccgtggttcattccgctgtcaatgtcttcctttgtagctacccctgtgtaaagtgtgtggaacgcttcattgatcataggcatgaggatccggttacttacaaatccgctagtcttgtgagcaaactggtgcttgccaaacctgtcaaccagacctttggaacaagaaacgtttcttctgagg

SEQ ID NO: 99298 - DNA, 831 bp, Arabidopsis thaliana columbia
  unsure (1)..(831): unsure at all n locations
atgatattnnnnnnnnnnnnnnnnnnnnnnnnnnnnnnnnnnnnnnnnnnnnnnnnnnnnnnnnnnnnnnnnnnnnnnnnnnnnccacgcgtccgttattcttctcttccccgtttcgatctcctctttaatgcatctgcgtatctgattttaaagattaacggttctttaaatgatgggtattggtcaaagaagctcttttcaatctgggaaggttactgggtaaatgttggtacattggctcaggttttataaagtttggtgatcattctcagtttcaagtttgatcaaaatgtggggctttgcgtcgaatgtcattggaagtatggggttaaagaagtcccctaaagattcagctcaagcatcctctcaatgctcagatgatgaggtttcaaatattagcagggatgaagagggattagaatgtcccatatgttgggaatctttcaacattgttgagaatgttccttactgtgttatggtgtggcatactctttgccagaattgtgtctctggtctccaatctgctgtcttgagactctcaagccaagatattcggattccgtttttcgtctcgtgcccgtggtgtcagttgctttcgttcaggattgtttaccagggtattctaaaagtccctcggaagatttcttcctctctgatggttgnagtctaatgggacggacagtcatgggacggacagtcatggttcttggcactgatacagcatcggctcgactcgagtggncatgctctggaaccacagacacacatctggtgcaggcttaatggtacagctcagactttgccatatgacacgtacaccaacaacac

SEQ ID NO: 99299 - DNA, 597 bp, Arabidopsis thaliana columbia
cacaaacaattttccttggaaatctccgccttgtatctcttatataactcagctctctatactccgaacatgtccctctccgttaaccctaacggccatgtcagccgccgcagctgaaaccgacgtctctctccgtcgcagatctaactcgcttaacggaaaccacactaacggcgtcgccattgacggaaccctagacaacaacaaccgtcgcgtcggagatacaaacactcacatggatatatctgctaagaaaactgacaacggctacgccaatggtgtcggaggaggaggatggagaagcaaagcgtcgttcacgacgtggacggcgcgtgatatcgtctacgtggtgagataccattggataccgtgcatgttcgctgccggacttctgttcttcatgggcgtggagtacacgcttcagatgattcccgcgagatctgagccgttcgatcttgggtttgtggtcacgcgctctttgaatcgcgtattagcatcttcaccggatcttaacactgttttagccgcactaaacacggtatgtcgtgtgagttaatttaggtaaaatatatatttaatgattatcttcaaattctt

SEQ ID NO: 99300 - DNA, 750 bp, Arabidopsis thaliana columbia
  unsure (1)..(750): unsure at all n locations
agccgccgngggtaggctgtgtctccnccgcgcagaggtgggcttttaacggaaaccacactaacggcgtcnccattgacggaaccctagacaacaacaaccgtcgcgtcggagatacaaacactcacatggatatatctgctaagaaaactgacaacggctacgccaatggtgtcggaggaggaggatggagaagcaaagcgtcgttcacgacgtggacggcgcgtgatatcgtctacgtggtgagataccattggataccgtgcatgttcgctgccggacttctgttcttcatgggcgtggagtacacgcttcagatgattcccgcgagatctgagccgttcgatcttgggtttgtggtcacgcgctctttgaatcgcgtattagcatcttcaccggatcttaacactgttttagccgcactaaacacggtgttcgtagggatgcaaacaacgtatattgtatggacatggttagtggaaggacgagcacgagccaccatcgcggctttattcatgttcacttgtcgcggcattctcggctactctactcagcttcctctccctcaggactttctaggatcaggggttgattttccggtgggnaatgtctctttcttcctcttcttctctgggccatgttgccggctcgatgatncgaatcaattggacantnaggnggattcaanagggttnanncctttnnaaagggcttttganaaccccaatgntttacaagcngtcaannntt

SEQ ID NO: 99301 - DNA, 548 bp, Arabidopsis thaliana columbia
gccacgcccccccccgaggtcggagggaatcgatagcctggttatcgattccggggccggcgatggttaagcatttcattgctctgggattttcaaataaacatggcagacaaaactgaagtcaggaacccaaattgccttatcgaaaggaccatgtgacacttctcttcatgtaatgacagtgggcttctccctccctgggaagtccttcagcttggatacagacaatgcaagatcgattaaaggtttaagagctatttgtgcatccacatcatgttttgaaacgtctggctcaaattgttcaatgtatattcgcactgtagctccagctgagccagttccggataaacgaaatatgattctggatccatccgtgaccacaaaccgaacaccttgcttggatgcaacacttccatcaacagggtctgtgtatgagaagtcatctgcaaactggaggacatagtttccataaacgtcaccggccttgctcttggacaagatttctctaagatactcgatcattttatgggctccttcagattcacatt

SEQ ID NO: 99302 - DNA, 713 bp, Arabidopsis thaliana columbia
  unsure (1)..(713): unsure at all n locations
cccacgcgtccgcccacgcgtccggtcaagtccgacaaggaaatacatgcacttgtcgtccttctaatcctttgcccttaaacatcgttaaaaacgacaacttctctcttcttcttctctactcttctccattttcttctcttcttctcttctttgtccattttttgacagatatggcgatctggtttgctagatccaaaacccttgtttctagcttgagacataatctaaatttgtcgacaattctcataaaacgtgattactctcatcgtcccatcttctatacaacttctcagttatcttcaacggcgtatttgagtcccttcggtagcctccgtcatgagtctacggccgtggagacacaggctgatcatttggttcagcagattgatgaagtcgatgcccaggaactggatttcccaggaggcaaagtcggttacacatcggagatgaaattcataccggaatcatcttcaaggaggnttccatgttaccgggttctttacggagacggacggatnatncccgatagcgattttattccggtnggtgggaaantcgctgttagaattttcggccaaattgggggcgtacaagaatggtcanaatttttnnggggttaccgtaaggnaggatntnttttntttnttccnccgggggagncttaaancgttaaagtgnttagccttaggggggtttcnaacccgaccggt

SEQ ID NO: 99303 - DNA, 774 bp, Arabidopsis thaliana columbia
tcgggccccccctcgaggtcgacggtatcgataagcttgatatcgaattcgcggtgtccattttttgacagatatggcgatctggtttgctagatccaaaacccttgtttctagcttgagacataatctaaatttgtcgacaattctcataaaacgtgattactctcatcgtcccatcttctatacaacttctcagttatcttcaacggcgtatttgagtcccttcggtagcctccgtcatgagtctacggccgtggagacacaggctgatcatttggttcagcagattgatgaagtcgatgcccaggaactggatttcccaggaggcaaagtcggttacacatcggagatgaaattcataccggaatcatcttcaaggaggattccatgttaccgggttcttgacgaagacggacgaatcatccccgatagcgattttattccggtgagtgagaaactcgctgttagaatgtacgaacaaatggcgacgctacaagtaatggatcacatcttctacgaagctcaacgtcaaggaagaatatctttttatcttacttccgtcggagaagaagccattaacatcgcttcagcagctgctctcagtcctgacgacgtcgttttacctcagtaccgagaacctggagttcttttgtggcgtggcttcacgttggaggagtttgctaatcagtgttttgggaacaaagctgattatggcaaaggcagacaaatgccaattcattacggttccaatcgtcttaattacttcactatctc

SEQ ID NO: 99304 - DNA, 411 bp, Arabidopsis thaliana columbia
gttgagattcctccccaacaacaacaatgaagcgtagcttgggttcaaattcttcaaacaatagtggcagtggaagtaacaagaagtctaagaagaataataatccgagcaatcagaaaaccctaggcgcggcatggggcgctgcttcttctcgttcttctttccggtcttctcctttctccgatttcggaagttacatggaagtgaaaaataggaaacttcagaaccaatttgagactgaggcttctgctgcttctcgtggtgtttcgggttctgagaaacttattttccaaggggtttcaatctttgtggatgggttcactattccttctcatcaggagttgaaaggatacatgatgaagtttggtggaagatttgagaactacttttttaggcgttttgttacacata

SEQ ID NO: 99305 - DNA, 822 bp, Arabidopsis thaliana columbia
  unsure (1)..(822): unsure at all n locations
tnnnnnnnnnnnnnnnnnnnnnnnnnnnnnnnnnnnnnnnnnnnnnnnnnnnnnnnnnnnnnnnnnnnnnnnnnnncttttttttttttttttgattcaaacctgatagtaaattagtaagaaataaaacaaaaagatagaaacaaatacagtaatttgaagtctcaagacgaaagtagaaataaaacaatttggtttatcaatcgatttttgttgcgagtttttgttgcctctcttgctcaacttggacaagcaaagttaagagcgcttcacaaacttgagcagcatcagcttctaaaggaacctcgttcaaggaagagtacaccatccaggcatggtctagtttacgtttgggtctaacaaccacagaaccaggaacctctgcgtcacagcaagtcactagcccgtcactcttttcaccgtatctgacttgaagtagctgagcgcaagcagccattgcagcaccaagtggcattaccactggcagttttgcggcttggtttgtcagaggaagttcagcgtgtgctaagcgtgtgataaaggggatagaaccgctgggctaatgctagcttctgtgcggaatgaaaccgtggggagttctcggggaagcggatgattcttcaagaattcttttcttctcttgtatggtaatcttccaatgcttgaatgtcaccctttatgactttgagttagaatctccatcatctttctcaaattgacgtaatcacctagttgtccttcacggaggatatctgtagctattgggcttccaccatatggactctgcgccagtaccaacccagcgaccttatcctttagttc

SEQ ID NO: 99306 - DNA, 1443 bp, Arabidopsis thaliana columbia
  unsure (1)..(1443): unsure at all n locations
agggagagagaaagagaagagagtgagagagatcgaagaacatttacacacatcaatggcgtctctgcaactctgcgacggttatcttctcttcaagccctctgtttctcctcgattcctctctcaacgcatttctcatcgcctaatccctaaagcctcatcttctcctcctccatctccatcaccatcatcgtcctcttcatccttatctttcagtcggcgggagcttctgtaccaatcggcagctgtatcactctcgctttcttccattgttggaccagcgagagctgatgaacagttatccgaatgggaaagagtgtttctcccaatcgatcccggtgttgttcttctcgacattgctttcgtccccgacgaacctagccgagggtttttacttggaacgagacagactttgttagagactaaagatggtggaagcacttggaatccacgttcgattccttcagctgaagaagaagatttcaattatagattcaattcgattagctttaaaggcaaagaaggatggattattggcaaacctgcgattttattgtacactgctgatgctggagagaattgggataggattcctctaagttctcagcttcctggagatatggtgtttataaaagcgacagaagataagagtgcagagatggttactgatgaaggtgctatttatgttacttcaaacaggggatataactggaaagctgctattcaggaaactgtttcagctaccttgaacagaacagtatccagtggaatcagtggtgctagttactacacgggaactttcagtgctgttaatcgttcacctgatggaagatatgtcgctgtttcgagccgtggtaacttctttctgacatgggagcctgggcagccttactggcaaccacacaatagagctgttgctagaagaattcagaacatgggatggagagctgatggtggtctttggcttcttgttcgtggtggaggactttatcttagcaaaggtactgggattacagaggagtttgaagaagttccagtacaaagccgtggctttggcattctagatgttggatatcgctcagaggaagaagcatgggcagcaggaggcagtggcatactactgagaacaagaaatggaggcaaatcatggaaccgtgacaaagctgctgataatatcgcagctaacctatacgcagtcaaatttgtggatgacaagaaaggatttgtgcttggcaacgatggagtcttgctccgatatgttggctgaagaatttaaaaataaaaaagaggttaaattgaaatggttatgtttcaatccttctctgtaaagcctttaactgcgttttgatactacattacactattgtatacattccccttcacaaaatatatataattttgtgtttcttctgaaaaaaaaaaaaaaaaaannnnnnnnnnnnn

SEQ ID NO: 99307 - DNA, 748 bp, Arabidopsis thaliana columbia
  unsure (1)..(748): unsure at all n locations
gattgagctgnnnnnnnnnnnnnnnnnnnnnnnnnnnnnnnnnnnnnnnnnnnnnnnnnnnnnnnnnnnnnnnnnnnctttttttttttttttttagagaatagaaagctgtatattttggtctcattgtatcagatacaggagttagcttcaaagaacacagcctaagagtcaaacaatttatctatcaaatcgtggaaacgtcatgctctcaaaaacttttaaggagttaaaaccctgtttttcaatcttcttccaagttactaggactactttccttgaagcttttagacaaccatatcgcggtttctcttggcgatacctttcccggaccaaatggttttagtaacacgttcagctcatcgtacctctcgtctataagtaatcttgcactgaattcaagtagtccttcaagtgcctcagctcgttgtcgatatgagctagggtcgaatctttgtcttcttgatgcacctgaggaagctctacttgatgctccagcagttgcattttgatcagacaaatcacttttggtttctcggtctgggtcagggtgaatttgtcttttgtattgagcaagctagtggtggctctggaggcgggctggatgatcctctggacgatcctttcttcttgcgaacaacggggatgaaaggctttcttcatatgaagctaccgggaacttgatcctgcgattcttggcgagttactggaccatcggagaaattagctgggggagataccgatgtta

SEQ ID NO: 99308 - DNA, 892 bp, Arabidopsis thaliana columbia
  unsure (1)..(892): unsure at all n locations
ggcnnnnnnnnnnnnnnnnnnnnnnnnnnnnnnnnnnnnnnnnnnnnnnnnnnnnnnnnnnnnnnnnnnnnncttttttttttttttttaaaccaattctgcatatgcatttatgtcactcctgcctcaaacaatagagagatttgtttttacagaaacagagtaataaataatgaacacatacaataatctcagtggaaccaaaagaaaactattttacaaaaacctcattcatgtcaagaagctttctctgtaatgttatttacattccctgaattccaccaatacgtcctttgatttccaatcttattaccattattatcattaccgacatctcttctctctgactgaacttcttgttgctcggttgatccagggttctctgtcaaacattgttcccaaaagtcatcgttaacgcctgtttttggagcaggcgcagtaacggtaacgggcggctctgagttcatatcaatcttcgatgatttgggtcgtgtatcgccaatacttagacttgactcagctgcatcatgatccatgcttgatgactgcaacccgctcttctcgcatgattccgatacaagattctcccaaaacgttagcgaagattctaacttttcgacctgttctatgtgtgaactgcttggaggaagagagttctctagaaatcttctttttcttctctcatggttttcgaggttagtgaaagccctggttttccaaaacctgtgaacatatgccatattgtttctgatgtggtccatatgtggaaccgactttaatgtcgtacttgagctaaatttttccgtcttgctttggtttggtaactccgcaagaaggccttctttctnatttttcagtctttctatntgatcctccatgctccgtctttctg

SEQ ID NO: 99309 - DNA, 617 bp, Arabidopsis thaliana columbia
  unsure (1)..(617): unsure at all n locations
nnnnnnnnnnnnnnnnnnnnnnnnnnnnnnnnnnnnnnnnnnnnnnnnnnnnnnnnnnnnnnnnnnnnnnnnnnnnnnnnnnnccacgcgtccgcccaacttttcgcaagtcgctgtaaagtttgatttgcttctttttatatacacacatacttctcctccatacactttcctcttcaatcctcagttttttttctaagccctaataccatctcaaagaagagatcaagatttgaaatcaagaagacaccattactcagatcaacatgcttgccgttcaccgtccttcttccgccgtatcagacggagattccgttcagattccgatgatgatcgcgtcgtttcaaaaacgttttccttctctctcacgcgactccacggccgctcgttttcacacacacgaggttggtcctaatcagtgttgctccgccgttattcaagagatctccgctccaatctccaccgtttggtccgtcgtacgccgctttgataacccacaagcttacaaacactttctcaaaagctgtagcgtcatcggcggagacggcgataacgttggtagcctccgtcaagtccacgtcgtctctggtctcccgccgctagctcaaccgagagac

SEQ ID NO: 99310 - DNA, 668 bp, Arabidopsis thaliana columbia
  unsure (1)..(668): unsure at all n locations
nnnnnnnnnnnnnnnnnnnnnnnnnnnnnnnnnnnnnnnnnnnnnnnnnnnnnnnnnnnnnnnnnnnnnnnnnnnnnnnnnnnnnnnnnnnnnnnnnnnnnnnnnagacaacgatttttttcccaccaaagtccccaaatacactcgtttgcgtttaaacctttcacttgaaactctgttttagactcttttatttgttagacttttttgtttgtttcgtcgttgttgtcggccgcccaaaccaccatgcgattcgtcgcgccaccgcctcgttccggcgataactcaccgtcaccttcaccatcttccggtatatccgaagagattctctcccgttcttcggatcctcctttagagtttagtcctccattgatcgccatggtggtggttctagccgccgcttttctattcgtaacttactctcgtctcatctcccgccgttttctttcacctctattccgtcgttttagaaggtggcgatgccgtcgacgccgtctccttcacttatcttcagcttcctctgcttcaacttcatcctccgatctccgatcattttcacctttccctttcgactcttttcattactcttcttactcaccttacggattagacgattccgttatcaaaactttaccgctgtttctctactccgccgctgcttgcaccgg

SEQ ID NO: 99311 - DNA, 692 bp, Arabidopsis thaliana columbia
  unsure (1)..(692): unsure at all n locations
nnnnnnnnnnnnnnnnnnnnnnnnnnnnnnnnnnnnnnnnnnnnnnnnnnnnnnnnnnnnnnnnnnnnnnnnnnnnnnnnnctttttttgggtttttataccaaaaaatatacagagaaggggttattgttttacaagtttacaacatctacaaagatttcactacatcctgaaaccaaacccttcgtcctaatttcacaaaccagaccagacaacgacaataataacaaacaatcaaatgtcgtagtgtctttgtttcgtgaatagtagtagtattatcaaagaatcagactttgaagggaaaatgttaaaacatgtgatagatatatatatataagatagatatgagcacattactcatgtttttgggctgagaaatagtgggttttgttgattttccgttagctatcctcaatgttttttatgtcgttatcatcagttgcagcggctgttttacgcacaaattggcctcgcactcgagggcgttgttctgctagttttttccggctttggtatcgtaccttctttcggaagcacctctcttttctcttctgacggaactttgtcaaagcagcttccctttgagagatcttattttcatccgccaagtttccgctaccacttccacttccgcttccactaccatcgccatttccatttttgccagcaccattatcacttcccatattcat

SEQ ID NO: 99312 - DNA, 527 bp, Arabidopsis thaliana columbia
  unsure (1)..(527): unsure at all n locations
nnnnnnnnnnnnnnnnnnnnnnnnnnnnnnnnnnnnnnnnnnnnnnnnnnnnnnnnnnnnnnnnnccacgcgtccggtctgcttgagtttggtgctgatgtcaatgctcaggataggtggaagaacacgccactggctgatgcagaaggagctaggaagcagaaaatgattgaactgctgaaatctcatggtggtttgtcttatggtcaaaacggaagtcactttgaaccaaagcctgtgccaccaccaattccaaagaaatgtgactgggaaattgaacctgctgagctggatttttcaaatgctgcaatgattggaaagggttcatttggtgagattgtgaaagcctattggagaggaacaccggtagctgtgaaacgtattcttccttctctttcagatgatagactggttattcaggacttcaggcatgaggttgatttgctagttaagcttcgccatccaaatataggccaattcttgggagcgggaaccgaaagaaagcccttatggtaatcactgggtac

SEQ ID NO: 99313 - DNA, 723 bp, Arabidopsis thaliana columbia
  unsure (1)..(723): unsure at all n locations
nnnnnnnnnnnnnnnnnnnnnnnnnnnnnnnnnnnnnnnggggannnnnnnnnnnnnnnnnnnnnnnnnnctttttttttttttttttttggcaaaaataacattcaaaaattgaattataaactcacaaacaaaatgctattatcacaaaatacaacattacaagcacaatgcaaaaagatttccaaagaccctcaatacatatgtagaacaaaaccctaacacacatcagacaacaaaagagattaacatttgttttgaaataaaccaaagataaacatacaaaatgaggatttgaacaaaaccaaagatgcaataattaatatcatcagttcttgcctttacccttatggtctgatgagtttctgcatccattttcatagtaaagctgaaactggtgattgtggtggtgattctctgcaggcagtgcaccgaataagaactgtggacctcctccactttctgatgttggaaacctctgtagattagcgaggaatgactgatgctgatttgttgaattggactgaagggtccccctgttgaaaccactgaacccaccaccggatgcggcggagacggcagctccggcgccggagggtgtcgacatattaaaatcaagattgaatgctccgccgttggattctgccggggatatcaaatggtcgggaacgaatgaaaactcttggtgctgatgatgaggatgatgatgatccgagattgatg

SEQ ID NO: 99314 - DNA, 554 bp, Arabidopsis thaliana columbia
  unsure (1)..(554): unsure at all n locations
nnnnnnnnnnnnnnnnnnnnnnnnnnnnnnnnnnnnnnnnnnnnnnnnnnnnnnnaaaggcaaggcagctcttttttcgttttttataacaacttggggttttacatttgattcttcgatctacaaatagaattcaaaagacgggtatgtttgataaattggaaaattcggaaaaccgaagacagcgatcaaacgaaaggtaaaaactagggtataatggttactggctcaaccagctttagaagttcttactacttttggcagctcaacagaatcaagggcaccagggtaaggggtccagagcccaaagccgcctcggctttccttcaaactctctcccttccctttgagttcctgaagactcttgacccactcaatcttcgaggaatgctctcgaatgtgagggtgcagttcgaagagagagttatactcacagttctggaacatgaacaccttgaaggctccttttagtctgtccactacatacccaaagcttagctggtccctcggtgttaacaggtgtacctcattgaaccacaggcagctgaacagat

SEQ ID NO: 99315 - DNA, 603 bp, Arabidopsis thaliana columbia
  unsure (1)..(603): unsure at all n locations
nnnnnnnnnnnnnnnnnnnnnnnnnnnnnnnnnnnnnnnnnnnnnnnnnnnnnnnnnnnnnnnnnnnnnnctttttttgtgtttttttttttggacattcagtaaattaacccgaaagaataagtcatgaacatttaaaagaataagtgaggaacacttcaaaaagaatatatggcttccgttggtgtgtgtgtattgtagagacaaaaaagaatcactcagagactggcaataagaagctaaatccagaattctcccggattaaaggtggcggttcgatatccgctatttcaaatttctccatcgactttgataaatcatcaaccgagaaagggatgctcgagtcgtcatccaaaaggaatgagttgctaacagcattgttcgaatcttctgtcattagcaccctcatatttgctattacgtctggagagacgctatgggtgccgtatttgtcgtcccagtacatggtactgattctgtataactgttgtatgcttagtaccgggcaaagatcatgactgatctcatcaagagttttcttgggtttttgatgtacaaccagaaacccaatggcctgtctaatatgcttaagctcatcccacg

SEQ ID NO: 99316 - DNA, 787 bp, Arabidopsis thaliana columbia
  unsure (1)..(787): unsure at all n locations
nnnnnnnnnnnnnnnnnnnnnnnnnnnnnnnnnnnnnnnnnnnnnnntaggacannnnnnnnnnnnnnnnnnnnnnnnnnnnnnnnnnnnnnnnnnnnnnnnnnnnnnnnnnnnnnnnnctttttttttttttttttttttcaagagatcaaagaagcatatatttcattagagaaaacaaagatacatataacattgcaacaagagaaacatatagtataaagccgtaaactctcttcaacgaaagcgagagagtgtgactccattccctcaaaacctaactttggctaaaatatttttcttggaagaaaagttattgaaactgaacaaacacaaaccacgtagaaaaatcccggaatatagaaataatatcttcaagctcttcacttggcactaccgagctgggagcggataagcttagccgcgtcaaccatggctttaagtgctggtttaacctcagtgtacttccttgtcttcagaccacagtcagggttaacccacaagatgttctgctcaagaaccgcaagcatcttgttgatcctgtctgcaatttcatctgtggatggtattctcggagagtgaatgtcgtaaacaccaggaccgattcctgcaccgtacttcactccttcacggaacactgagagaagcttctcgtctgaacgagagttctcaatggtgatgacatcagcgtccatgtcaatgattgagtggatgattgcgttgaagtttgagtaacacatgtgagtgtgaatctgagggctgtcttggacgcacagttggtgattct

SEQ ID NO: 99317 - DNA, 498 bp, Arabidopsis thaliana columbia
  unsure (1)..(498): unsure at all n locations
nnnnnnnnnnnnnnnnnnnnnnnnnnnnnnnnnnnnnnnnnnnnnnnnnnnnnnnnnnnnnnnnnnnnnnnnnnnnnnnnnnnccacgcgtccggaaagaatcaaaaacatctgtcgcggagagagagagaaagagagaaagagaaaaatgtcgatggctttgcttttgacatcgccggctatgaagcagaagccggcggtgataacttctcctcgccgtggttcttctccttctcgtcgtcttcgagtttcttgtgttaccacaaaccctgctaggaagaaaaacgaaacatgcaatcattttcgacctatcaaagaagtaaataaccaattaacacacacaataccacaggagaagcttgagatcttcaaatcaatggaaaattgggcagaacaaaaactactaccttatctcaaaccggtagaagattcatggcaaccacaagacttcttacctgcgccagagaacgacgacgaattctacgaccgagtaaaaga

SEQ ID NO: 99318 - DNA, 519 bp, Arabidopsis thaliana columbia
acttgatcacccgggtattgtaagaaccacagctaccacatttatggtacaaccaatggaaccgtgtagttcctttgcgttcacaatcattacatagaatgtcctgacagcgatttttgtattcctctggaagttcttctgcttccttaggtaacttttgctgagccgcaatccatcgactggtcctccaattctgtacgagataatcttttctcctcggatcaagtgtggagtcctgatagaccttcctgatctcagcctctagtttcattctgggtcatgcggaaaatatcccccccccctggcttaaatagttccccactttggtccaagatttcttgaatgatcattatctttctgtgcactaggtttggatgtttctgttgaggatgagtcgggtgatcctttccagcattcattaagccattcatcgtgcacgcgtggctccacccgggaattccggcccggtacctgcaggcgtaccagctttccatatagtaaagtcgtattagagctccc

SEQ ID NO: 99319 - DNA, 773 bp, Arabidopsis thaliana columbia
  unsure (1)..(773): unsure at all n locations
nnnnnnnnnnnnnnnnnnnnnnnnnnnnnnnnnnnnnnnnnnnnnnnnnnnnnnnnnnnnnnnnnnnnnnnncttttttttgttttttttttagtggaaaaaagttttctattaaaaattgttaactatttacactcttcaaagaaaaagtctcagcttaatgcaaaaacaaatagcggattatgtggaagaaagaggatgacggtatgggatgttccagaaacaaacgaaattttttggctttgttcaagccaaaatgtatagtaaggtaacctaaataaagactcttcaaaatcttaatatctcagagactatacaaaaaaaaaatctatcaacgggcttcttcacattgttgtgcgaaacagagggtaaaacccgaaaaaaggaaagaaaaaaagagagtaacaagtgagtgaaacctcttggtgttttcaggatgaggttgagcagtccggggggattgtttcggacttgatcacccgggtattgtaagaaccacagctaccacatttatggtacaaccaatggaaccgtgtagttcctttgcgttcacaatcattacatagaatgtcctgacagcgatttttgtattcctctggaagttcttctgcagctaacagggcatcaagcataccaaaataaacagccatatctcctaatgattttccacagattgggcatgggtagtgactgccaagtgtaagcctggaagcaactgagtgcatttaagngccccatggnaagggcccaaacgggtncnccngnggngaaaa

SEQ ID NO: 99320 - DNA, 2196 bp, Arabidopsis thaliana columbia
  unsure (1)..(2196): unsure at all n locations
gcaagagctctcaaacaaaacagccttttacataagaacaaacacccccaaaaactgcaaaaaaaagagagagatcattaatccatcttcaagatgtctcttcctgaaactaaatctgatgatatccttcttgatgcttgggacttccaaggccgtcccgccgatcgctcaaaaaccggcggctgggccagcgccgccatgattctttgtattgaggccgtggagaggctgacgacgttaggtatcggagttaatctggtgacgtatttgacgggaactatgcatttaggcaatgcaactgcggctaacaccgttaccaatttcctcggaacttctttcatgctctgtctcctcggtggcttcatcgccgatacctttctcggcaggtacctaacgattgctatattcgccgcaatccaagccacgggtgtttcaatcttaactctatcaacaatcataccgggacttcgaccaccaagatgcaatccaacaacgtcgtctcactgcgaacaagcaagtggaatacaactgacggtcctatacttagccttatacctcaccgctctaggaacgggaggcgtgaaggctagtgtctcgggtttcgggtcggaccaattcgatgagaccgaaccaaaagaacgatcgaaaatgacatatttcttcaaccgtttcttcttttgtatcaacgttggctctcttttagctgtgacggtccttgtctacgtacaagacgatgttggacgcaaatggggctatggaatttgcgcgtttgcgatcgtgcttgcactcagcgttttcttggccggaacaaaccgctaccgtttcaagaagttgatcggtagcccgatgacgcaggttgctgcggttatcgtggcggcgtggaggaataggaagctcgagctgccggcagatccgtcctatctctacgatgtggatgatattattgcggcggaaggttcgatgaagggtaaacaaaagctgccacacactgaacaattccgttcattagataaggcagcaataagggatcaggaagcgggagttacctcgaatgtattcaacaagtggacactctcaacactaacagatgttgaggaagtgaaacaaatcgtgcgaatgttaccaatttgggcaacatgcatcctcttctggaccgtccacgctcaattaacgacattatcagtcgcacaatccgagacattggaccgttccatcgggagcttcgagatccctccagcatcgatggcagtcttctacgtcggtggcctcctcctaaccaccgccgtctatgaccgcgtcgccattcgtctatgcaaaaagctattcaactacccccatggtctaagaccgcttcaacggatcggtttggggcttttcttcggatcaatggctatggctgtggctgctttggtcgagctcaaacgtcttagaactgcacacgctcatggtccaacagtcaaaacgcttcctctagggttttatctactcatcccacaatatcttattgtcggtatcggcgaagcgttaatctacacaggacagttagatttcttcttgagagagtgccctaaaggtatgaaagggatgagcacgggtctattgttgagcacattggcattaggctttttcttcagctcggttctcgtgacaatcgtcgagaaattcaccgggaaagctcatccatggattgccgatgatctcaacaagggccgtctttacaatttctactggcttgtggccgtacttgttgccttgaacttcctcattttcctagttttctccaagtggtacgtttacaaggaaaaaagactagctgaggtggggattgagttggatgatgagccgagtattccaatgggtcattgatcatgaattcatgatcatgatcatgatgatgaacattatgcatgtctatgttgatatgtttgaatttgattttgagttttgtttgtatattttatgatgcttttcttaattacctcttgtttccgagtcgacaaataatggaccgaccgataagggataaaagttaaagttttcccatcaggttctgtataaaagcagaaattgtaacatttcttaagatttgacgcaaccaacgtcttttaaagggcggccgnnnnnnnnnnnnnnnnnnnnnnnnnnnnnnnnnnnnnnnnnnnnnnnnnnnnnnnnnnnnnnnnnnnnnnnnnnnnn

SEQ ID NO: 99321 - DNA, 616 bp, Arabidopsis thaliana columbia
  unsure (1)..(616): unsure at all n locations
nnnnnnnnnnnnnnnnnnnnnnnnnnnnnnnnnnnnnnnnnnnnnnnnnnnnnnnnnnnnnnnnnnnggtgaactatactaagagctatgacgtcgcatgcacgcgtacgtaagcttggatcctctagagcggccacacaaatcacattcatttcatgttttttcaaatatatatgaaaaagccaattcaaaaggagaatggcttttttcttggttatgtttttcagattcagacattaacaataagagggggctctgaatctccaacggttaaaaaatactttcctttttcaagaaccattactccaaattcattagctctgctcaaatgctcacaaagaccaatctcaaactccatctctgctttctctccattgcttaacacaatgctcttaaacccaacaagctgtttctctgctcgtttaccggcttctcctcctcgctcgtgcctcgcaaacatcagcaccggatgtttccctgccatctccccttgattttccacctctacagtgaccttagtcttggctacatcgcaaccttctttccccatttccgaaaccagagtgtatcgaacagagtccgagttggtttgagctttagattggttcaagtagag

SEQ ID NO: 99322 - DNA, 823 bp, Arabidopsis thaliana columbia
  unsure (1)..(823): unsure at all n locations
nnnnnnnnnnnnnnnnnnnnnnnnnnnnnnnnnnnnnnnnnnnnnnnnnnnnnnnnnnnnnnnnnnnnnnnnnnnnnnnnnnccacgcgtccggtagcctggtccggattcggttggcatctttgccatttcgcaaagatgcaatggagtggcagctcgagcctgtggtcttgttagcttagaacctatgaagattgcagagatcctcaaagatcggccatcttggttccgtgactgtaggagccttgaagttttcactatgttcccggctggtaatggtggcacaatcgagcttgtttatatgcagacgtatgcaccaacgactctggctcctgcccgcgatttctggaccctgagatacacaacgagcctcgacaatgggagttttgtggtttgtgagaggtcgctatctggctctggagctgggcctaatgctgcttcagcttctcagtttgtgagagcagaaatgctttctagtgggtatttaataaggccttgtgatggtggtggttctattattcacattgtcgatcaccttaatcttgaggcttggagtgttccggatgtgcttcgacccctttatgagtcatccaaagtcgttgcacaaaaaatgaccatttccgcgttgcggtatatcaggcaattagcccaagagtctaatggtgaagtagtgtatggattaggaaggcagcctgctgttcttagaacctttagccaaagattaagcaggggcttcaatgatgcggttaatgggtttggtgacgacgggtggtctacgatgcattgtgatggagcggaagatattatcgttgctattaactct

SEQ ID NO: 99323 - DNA, 553 bp, Arabidopsis thaliana columbia
  unsure (1)..(553): unsure at all n locations
ggannnnnnnnnnnnnnnnnnnnnnnnnnnnnnnnnnnnnnnnnnnnnnnnnnnnnnnnnnnnnnnnnctttttttgtttttttggctcaaaattggaagttttcacttctgaagcaaaagtagtataaatagttagttattaattaggagttgaaattagagatagagttgaataagctcatcgctaactacagagggagagagaacaccaaggtcagtgaagaggagtgttaggtactgaggcggagtatagtctcgagctgacctctctacttccacctttgtcggaatctttacaccaaattcgattggtctcaacgccggtgccatgtccttttggtctaatgggtaaagcctagcgaacttgtaactctcagcagcaacatagaccggtttgttcatgctgtgtgccacaagtgcgatttggtatgttcccatcatgttgataataccgccactttctacaactccatccgccccgacaaacaccatgtctacctcgtccatactatacgccacagctgaatcaagcagtagtttcactgggatatc

SEQ ID NO: 99324 - DNA, 1072 bp, Arabidopsis thaliana columbia
  unsure (1)..(1072): unsure at all n locations
gattttacatgtagaagcacagaagaaactgaggcatggtttatcgactcctttgaggaatggcgtaaagcccagaatctcagtaactttattctattaggacattcttttggaggctatgttgctgctaaatacgcgcttaagcatcctgaacatgttcaacacttaattctggtgggatctgctgggttctcagcagaagcagatgccaaatcagaatggctcactaaatttagagcaacatggaaaggtgcagtcctaaatcatttatgggggtcaaatttcactcctcagaagctgggttagagggtttaggtccttggggtccaggtcttgtaaatcggtatacaactgcaagatttggtgcacattcggagggaactgggctaacagaagaggaagccaaattgctaaccgattatgtgtaccatactttggctgcaaaggctagtggagagttatgcttgaaatacatcttctcatttggagcatttgctaggaagcccctcttacaaagtgcatcagagtggaaagtgccaacaacgtttatctatggaatgaatgattggatgaactatcaaggtgcggtggaagcgaggaaatccatgaaggtcccttgcgaaatcattcgggttccacagggtggtcattttgtgttcatagacaacccaattggttttcattctgcagtgctttatgcttgccgcaagtttatatctcaagactcctctcatgatcaacaactcctagatggtctacgattggtttagtcatagtatcttgttccttttaccttccaaatttattctatatgtgtatacaagtatatatgaaaaagaacataaaaaagaattactttctttatttgaatattcggttgtgtattggagtttcaagtcctctttccatgtctaaaagttctatttgtaacgttcttgatttcactctaaaacctcttaaagtgtttcaaatgtgatctcattataaacaaaaaaaaaaaaaaagnnnnnnnnnnnnnnnnnnnnnnnnnnnnnnnnnnnnnnnnnnnnnnnnnnnnnnnnnnnnnnnnnnn

SEQ ID NO: 99325 - DNA, 498 bp, Arabidopsis thaliana columbia
  unsure (1)..(498): unsure at all n locations
aatgnnnnnnnggannnnnnnnnnnnnnnnnnnnnnnnnnnnnnnnnnnnnnnnnnnnnnnnnnnnnnnnnnnnnnnncctttgtttttttttttttttttaataaaagaatttctccaatacaaaatttagtcataaaaactcaccgaaaaggtttacatgaacggaaaagtttatagaagtgaaagaaaacacaagtaatttggatccattaatggtggcataaacaatatatatagaaggaagggaaaactgattttatgtgattgttttatattaagatgttacggtcataagacaaaatgggtaaaaattatcgtcattagacgacctgaatccattctccagtgctgggaacacctttgtagatggcaaagataagatagtaacccggtggagcgatgtttccatttggtggggcaacggcctggatatccgaaccggcaccagcgggtttgacatttttgacccccaagatgagcatcctcatgttcattg

SEQ ID NO: 99326 - DNA, 516 bp, Arabidopsis thaliana columbia
  unsure (1)..(516): unsure at all n locations
nnnnnnnnnnnnnnnnnnnnnnnnnnnnnnnnnnnnnnnnnnnnnnnnnnnnnnnnnnnnnnnnnnnnnnnnnnnnnnnnnnnnnnnnnnnnnnnnnattggaagaaagaatagagccaaaagtaagtaataaaagaatttctccaatacaaaatttagtcataaaaactcaccgaaaaggtttacatgaacggaaaagtttatagaagtgaaagaaaacacaagtaatttggatccattaatggtggcataaacaatatatatagaaggaaaaaaaaactgatattatgtgattgttttatattaagatgttacggtcataagacaaaatgggtaaaaattatcgtcattagacgacctgaatccattctccagtgctgggaacacctttgtagatggcaaagataagatagtaacccggtggagcgatgtttccatttggtggtgcaacggcctggatatcgtaaccggcaccagcaggtttgacattattgacacccaagatgagcatcctca

SEQ ID NO: 99327 - DNA, 578 bp, Arabidopsis thaliana columbia
  unsure (1)..(578): unsure at all n locations
nnnnnnnnnnnnnnnnnnnnnnnnnnnnnnnnnnnnnnnnnnnnnnnnnnnnnnnnnnnnnnnnnnnnnnnncttttttttttttttttgaagaaagatctggatatatggatatgcctgtaattcactacaaaaatggcacttactaaaagaaacaacaagagagacactagttcacagttagtaacctcctcactagctctaaagccataataaagctgacaaatcctccaactgatagaaaacattacatttagaaagaaaaagaaaacaagttctatagagaaaaggaaaaatgttacaacagacacgtaagacaacaaaagggagaaaagctactgagccactgtagaagcagtagctcctgattcatgtgaagacttatattccaacatctcaattctgtatctctccacatccttaactcctttgtcttgataaacctgtttctcagattcagtgagattgctccacatgtgtcctatttccttagtgatggatcgtcctggtccatgggactcaggtttagctcgcgtactgctcagcaaaaagnagttgagcnccctgggattggggta

SEQ ID NO: 99328 - DNA, 600 bp, Arabidopsis thaliana columbia
  unsure (1)..(600): unsure at all n locations
aannnnnnnnnnnnnnnnnnnnnnnnnnnntgannnnnnnnnnnnnctaagaaatttaatatatttgattagtaattttatattttaagtacatttaataaaagtaaaattccataaactttactaaaaattattacatataatataccatcattaaacattttaacataacttcacatatggtaacgaggcaaatgcagattttatttctagcattttttgtattattcgctttatagataaaagattctacagaggttgtggccttgactgaacaatgtaaacatcttcaccaaccaaacaaccttcaacgtcttgagcacagccaaagtttctttccaagaagaaaccaaccgaaccgagtctctgaccgagctgctgtctaaacaccgagtcaacagttaaacgttttttgctatagtccacggtcaaccgaacgtattttccatcagcaggacctgttcctgacacaagaagctcttcgctgaagtttgcgaaagctaaggtttgtacaatcccgtcgagcttacccgaagcgagtctccatggtgttcctcttgttcctgaagctaaagtctcacctaaaccaggagcgatctc

SEQ ID NO: 99329 - DNA, 545 bp, Arabidopsis thaliana columbia
  unsure (1)..(545): unsure at all n locations
nnnnnnnnnnnnnnnnnnnnnnnnnnnnnnnnnnnnnnnnnnnnnnnnnnnnnnnnnnnnnnnnnnnnnnctttttttttttttttttttgcaatcaatcattttccttcaaaaggtgggtgaatgagacaagaatgaccaatgtttgtcttttatctgcacgacaaagcagaagaataatgcctacttaacctcaaaaatttaattgggtgtatcttgtacttaaatatgggggtggagcctcagaatgcctagcgtgtagataggcatcagcaacaccatcttggtcgttgctcacaccaatcacatcagccaccgcctttgtttttttctgcaccgttgctcagagcaactcccaacgaggccagttgcagcatctctatgtcattttctccatctccaatcgccattatctcatccggtgaaacgcccaaatgattgagtagcatttttacaccattccctttggaggttccgggtgggacgatttctagcatgtctgattgagcttgaacaacattagcacggtctcctgtagcttctga

SEQ ID NO: 99330 - DNA, 1445 bp, Arabidopsis thaliana columbia
cttgttcttcctcttcttcgattctcctcttcgacgtctcttgttactgtgcgccgtctttaagccctacgtgctgccaacggcgcactctcctatcctacgctcatctatcgtcactcccacagcgagagctgtctcggaagtttccggttgtactacgatcgatccagattttctcgtagagatctctgattctaaccagacgcgggcgatgtcgaaagctcgtgtgtacaccgaagtcaatgtgattcgacccaaggattattgggattacgagtcactcattgttcaatggggggagcaagatgattatgaggtagtaaggaaggtagggcgtggaaaatatagtgaagttttcgagggtataaatgtgaacagcaaggagaagtgcattatcaaaatcctcaaacctgttaagaaaaagaagataagaagagagattaaaatacttcagaacctatgcggtgggccaaatattgtcaagctgcttgatgttgttagagatcaacattcgaaaactccaagcttgatatttgaatatgttaacagcacagactttaaagttttgtatcctacgttgactgattacgacattcgttactacatctatgagctgttgaaggcactagacttctgccattcacaaggattaatgcacagagatgtcaagcctcataatgttatgattgaccatgagctgcgtaagcttcgtcttatagattggggtcttgctgagttttaccaccctggaaaagagtataatgtccgtgttgtctcaagatatttcaagggacctgaacttcttgtggacttgcaagactatgactattcattggatatgtggagtcttggctgtatgtttgcagggttgttattccgtaaggaacctttcttctacggccatgacaaccaggatcagctagtgaaaatcgccaagggtgttggcactgacgaattgaatgcttatctgaacaagtaccagttagaacttgatccacaactggaagcacttgttgggcggcatagcaggaaaccttggtccaaattcatcaacgcagacaatcagcacttagtttcacccgaggcgattgatttcctcgacaagctacttcggtatgatcatcaagacagattaactgcaaaagaagccatggcgcacgcttacttcgcccaagttagggcagcagaaaccagcagaatgagaagtcaatgaaacacagagatctctctgtctataaacttactgatgatgatgatggtaatgttcatctttttcttcaaagtattttttttaaatcaaggtgatgtttctctgccaacttattaaacaatttgtcctgaattcgaatgtctgaaacggcttatattttaaatatatttttcattgtatgttgtatcaaaccaaaaaaaaaaaaacacgaattacaataaaacaaaaaaaaaaa

SEQ ID NO: 99331 - DNA, 707 bp, Arabidopsis thaliana columbia
  unsure (1)..(707): unsure at all n locations
tcgagtacgaagcctcgtccatgtttgatctgactaatgtcatcatctccggaccacttcctgctctgagagaggcaccaagcgttagacaatgcgatggggagtggaggtaccacccaagaaattctgttctggaatggtctatactacttattggcaactcccaccccagtggctcaaagggagtttgttgtgcctccagtggattcaacggtgttcttccccatctctgttcagtttgcagcgacaagtacctacagtggcttgaaggtgactggaatgattcctctgagaggaggtggtggtgcgactcctaggtttgtgcagaggacgcagctgattgcccagaactatcaagtcatatgaaaccctcctttgggggcatcggttgtttttaatttcttctaaactatctggtgttggatttcgctcttttttttggatgccaaaagtacaatcttaattttctcggattttgctaggatatttctttctcaacttaattttaagccattaaacatattcatatcttctttttttaccaacttctttttcaatgttttaaggaaacaagtacgatttacaatcgttttttttcttctaaaaaaaaaaaaaaaaaaaaaaaaagaaaaaaaaagggcggccgctctagaggatccaagcttacgtacgcgtgcatgcgacgtcatagnnntgtcctaannnnn

SEQ ID NO: 99332 - DNA, 2073 bp, Arabidopsis thaliana columbia
  unsure (1)..(2073): unsure at all n locations
cnnnnnnnnnnnnnnnnnnnnnnnnnnnnnnnnnnnnnnnnnnnnnnnnnnnnnnnntgggcccccccttgaggacgccggtttcaataagctcgggtgatttcatctccttcgatcactcccaagattcgcattacctttcttataatcgccgagattgttcgagcctgaataatcaaaatggttgtgcttgctgctgccattgtggtcaagtctgggaaagtgattgtttccagacactatgtggatatgtcccgtatcagaatcgaaggtctacttgcagcttttcctaagctggttggaatgggaaagcagcatacctatatcgagacggagaatgtgcgatatgtttatcagcctattgaagctctgttcctgcttcttgttacaactaagcagagtaacattctagaagacctggccacccttactttgctctccaaacttgtacctgagtattccatgtctttagatgaagaagggatttccagggcatcttttgagctcatatttgcatttgatgaagtcatatctcttgggcacaaggaaagtgtgacagttgcccaggtgaagcagtattgtgaaatggaaagtcatgaggagaagttgcataaactggttatgcagagcaagatcaatgacactaaggacgtgatgaagcgtaaggctaatgagattgacaaaagcaagattgaaaagaataagccaggaggattttcgtccatgggttcaatgggatctggaagacttgaaagtggtttcaatgaattgagcatatccagtggtggcggcggtggttatggaagtggttctgggtttggcatgatttcagatgtcgaccctatcaataccaaaccaaaagatcgatcacggtcttctgttactgctcctcctaagagttctggcatgaaacttggcaagtcgggaaagaaccagttaatggagtcccttaaagcagaaggtgaagacgtcattgaagatgttaagcctactggccaatccaaagcagctgccccacctccaactgatcctttcacattaactgttgaagagaagctcaatgttgcattgagacgagatggtggacttagtagctttgatatgcagggaaccctgtcacttcaaattcttaaccaagaagatggatttgtccaagtccagattgcaaccggtgaaaatcccgaaattcttttcaagacccatcccaacatcaaccgagatatgttcaataatgagaatattctagggctgaagagacctgatcagccatttcccactggtcaaggtggagatggtgttggtcttctcaggtggagaatgcaaagagcagacgagtctatggtgccactaacaataaactgctggccttcagtctctggaaacgagacatatgtcagcctcgagtacgaagcctcgtccatgtttgatctgactaatgtcatcatctccgtaccacttcctgctctgagagaggcaccaagcgttagacaatgcgatggggagtggaggtacgacccaagaaattctgttctggaatggtctatactacttattgacaactacaaccgcagtggctcaatggaagtttgttgtgcctccagtggattcatcggtgttcttccccatctctgttcagtttgcagcgacaagtacctacagtggcttgaaggtgactggaatgattcctctgagaggaggtggtggtgcgactcctaggtttgtgcagaggacgcagctgattgcccagaactatcaagtcatatgaaacactcctttgggggcatcggttgtttttaatttcttctatactatctggtgttggatttcgctcttttttttggatgccaaaagtacaatcttaattttctcggattttgctaggatatttctttctcaacttaattctaagacattatacatattcatatcttctttttttaccaacttctttttcaatgttttaaggatacaagtacgatttacaatcgttttaaaaaaaaaaaaaaagggcggccgctctagaggatccaagcttacgtacgcgtgcatgcgacgtcatagctggtatagagt

SEQ ID NO: 99333 - DNA, 881 bp, Arabidopsis thaliana columbia
  unsure (1)..(881): unsure at all n locations
nnctatacaagactatgacgtcgcatcgcacgcgtacgtaagcttggatcctctagagcggccgccctttttttttttttttaaaaccaaataaagcaaaagaacttgtaaatcatatcaatatcaccattaaacaccaccaccaattttaaatatgggtaggcttcagatatctgactataataatatagagcatatgagcgtatattaataatacaaggcaaaaacaaaacatataagccaaaaggatttacggaccgaagacttttttccccaggctacttaggtacccgtttctttgcataaccatttacctgtttgctgcgttaagcgagccagaaaggcgtgtatctttcaagcacccggaagtcaccagatgtttgtttggagccgtgaacagcatggaaccaagccggtgaatttgcaaaagagtttataaacccgttgcatccaagttttgtctttctcaccctcagccattgtaaggatgttttgggttttgtgagctctggttaggttgagattgctgtgggcctgaaaggttagtggctgtgtgttgtagtgtgcgaatggctgcgagtagagcgaatttgggagaccctgagactgaagatttggattgtcacaccataaggattctgctgtaatcatcctgggatgagtcgataaagccagcttgggtgaaaagaccttgacctccatgtgccatatactcctgagacatgaaatcattaattccgctgaaacgagaataaccgccttgagaaattctgatcataaagattccaggaaacgccccatgtgctccttgtgtggcataatcaacagcaaatccacccggtgaggcctgtgtagcaaagtcggccatgttgtaaggatca

SEQ ID NO: 99334 - DNA, 449 bp, Arabidopsis thaliana columbia
catttctcttccgtaatcgttaaattatgacataacgtctttgttttggtcgtatcgttcacgcaaaacttcacgattcagatctgtgtgtggcagaatttgaatcgaagcataggatcaatccggtaagcagccgtaacttgcaatcgatcgccgatctggatccgttaaaggatccctcgcagtccttgaagatatcggcgtcctccgccaccgggaacaggatccgttaccgttcaccttccgcttctgagctattggagtctggactagccaccggattatccggtaaccattctcctacttccgactctcatcagggacttgtgtctatcgacggaggaaaaatgacggcgaagcgagcgatcggacggcacgaatcccttgctgacaaggtccatcgacatcgtggtcttctacttgtgatttcgatccccattgtgttgata

SEQ ID NO: 99335 - DNA, 528 bp, Arabidopsis thaliana columbia
ctttctctaaaccaatctttataataacttattcgtcttcaagatttctccaacaagtcctaccatgtccggcgaaggagacacgaccctcaaagctatctgttacaagcctggctctctccagttactcgatcagaggaagcttcctttagagactatttacttagagattcgtgatgcttcagatggatggagtgctattcaggaaatggttgtacgtggtgctcctgctatagctattgctgctgctctttctttggctgttgaagttttcaactttcatggttttgatggatcagcttcagatgctgttgcttttcttgagaacaagttggattatttagtgtcaagccgtccaacagcagttaatcttgcagatgctgctttgaaacttaaacatgttatagcaaaggccttggctactgccaccgaagccaaatccattttcaaggcatatattgaagctagtgaggatatgcttgaagatgatgttgtttcaaacaaagctataggaaactttggtttaag

SEQ ID NO: 99336 - DNA, 804 bp, Arabidopsis thaliana columbia
  unsure (1)..(804): unsure at all n locations
caccgcttcccccaaaaatccaggggcttcttacacgcacacaatcctttaaagctatcgtctttcttatataatcagtgaatcttcattaacacctcccacaaaatctcagaaataactttcacaacagagtcaaagagttccaaatcgtttgtttgtattttgtacgatcaaagttgttggtacttgtaagataatcgaaaccaaagatgcggatgagctgtaatggatgcagagttcttcggaaagggtgtagtgaggattgtagtataaggccgtgtttggcttggatcaaatcgcctgaagcgcaagctaacgcaactgtctttctcgccaagttctatggccgtgctggactcatgaacctcatcaacgccggtcccaatcaccttcgtcctgggattttccgatcgttgttgcacgaagcttgtgggaggattgtgaatccgatctatggttcggtgggtttgttgtggtcggggaattggcagctttgtcaagacgccgtggaggctgtgatgaaaggagaaccggtcaaagagatcgccacagacgctgcgacgatcggccaaggtccgcctcttaagatctacggcaatccgacatatctncaaggatgataactnttgccgccgcggctaactggctcaanccgatttgaaactttcgaaaactcgccgtgntaagcggggtttcancgtcggcntacaggcgggattcgnagggnaagtttacggggcnagtancggttcgccgttnggannagctttaanagtggctccnattanggggggcaangaatcc

SEQ ID NO: 99337 - DNA, 1385 bp, Arabidopsis thaliana columbia
  unsure (1)..(1385): unsure at all n locations
atgatactgccnnnnnnnnnnnnnnnnnnnnnnnnnnnnnnnnnnnnnnnnnnnnnnnnnnnnnnnnnnnnnnnnnnnnnncccacgcgtccgtcttgatcttacgtgcgccgttggcgcattctcttataccaccattaacgtgcgtcaacaccggaaccgttgaatcagacgttactggtatcaggttcgatcgttgcctcgataccgattctctcgccaagatctctctttccaccgtcatgtcgaaagctcgtgtttataccgatgttaacgtgatccgacctaaggattattgggattacgaatctctcaatgttcagtggggggagcaagatgattacgaggtagtgaggaaggtggggagagggaaatacagtgaggtttttgaggggattaacatgaataacaatgagaagtgtattatcaagattctcaagcctgttaagaagaagaagattagaagggagattaaaatacttcagaatctttgtggagggccaaatattgtaaagctgcttgatgttgtcagagatcaacactcaaaaacgccaagcttgatatttgagtatgtaaacagcacagactttaaggttctgtatccaacattgactgattatgacattcgctactacatctatgagctgttgaaggctttggacttctgccactcacaaggaataatgcacagagatgtcaagccacacaatgtcatgatcgaccatgagctgcgcaaacttcgcctaatagattggggtctcgctgagttttatcatcctggaaaagagtacaacgtccgtgtggcctcaagatacttcaaaggtcccgaacttctagttgatttacaggactatgactattccttggacatgtggagcctcggttgcatgtttgctgggatgatattccgcaaggaacctttcttctatggccatgacaaccaggatcagctcgtcaaaattgccaaggtactcggaactgatgaattgaatgcatatctgaataagtatcagttagaacttgatactcaactagaggcacttgttgggagacatagcaggaagccttggtccaaattcatcaacgctgacaataggcatttggtctcacctgaggcgattgattatttggacaagctgctccggtatgatcatcaagacagattaactgcaaaagaagcaatggctcatccctatttcgctcaagtcagggcagcagaaagcagcagaatgaggactcaatagagatgtctcggccgatttttgtttcttcttcttctccagtgtgctcttttgttgtttactaatacattttcatatccatatggatttcttttataatgtcgaaattatggatttataaatatgaaaaaaaaaaaaaaaaaa

SEQ ID NO: 99338 - DNA, 875 bp, Arabidopsis thaliana columbia
  unsure (1)..(875): unsure at all n locations
nnnnnnnnnnnnnnnnnnnnnnnnnnnnnnnnnnnnnnnnnnnnnnnnnnnnnnnnnnnnnnnnnnngtggagcttttttttttttttttcttataaaaactgaattatgtctctccattaaaccccaatctcagaacacaaaacgaaaacaaaaataactctaaagaagaaacaacacatttttcgaatttttaaaacttgcttaccataaaattctggattttatttatccagtctaaaatctacaggctgatcatagtagcctgcttagggatttgatgagtagtttaaggttttttcttgtggcttcatctcctgtgaatcccagaatatctgagcttatactctcgacgttcttcaaagtataaaccagagtgtagattgacttctgtatgagttctgtattctcaggagtcataattgacgaattaacctttctcaaatcgtcagaagcttgggtaaggcttcgagtaagacactcaacttccttgagcaagccgctatcacgaaactcagagagcaaaggttgagcatcttcagccatggcttggaatcttttgagcaatggccttgcttcctcaataaccgaagcagctctctcagcaagcgaatacgtattggcaacaccaatggcctcaacttcgcgtccaatacgagtgaaaattccaactaattcatctaaactaactccttgcactccttttattgtctgcctatcacaaacgatcagaccttccttaccacatttaggatgcagaggtcctactgaaggttctggtatcggattcctaggcataatgtcgatcatagtttccattagaagaccagactgattcacctcaacaatgaattcctcgggataatatcttataat

SEQ ID NO: 99339 - DNA, 745 bp, Arabidopsis thaliana columbia
  unsure (1)..(745): unsure at all n locations
nnnnnnnnnnnnnnnnnnnnnnnnnnnnnnnnnnnnnnnnnnnnnnnnnnnnnnnnnnnnnnnnnnnnnnnnnnnnnnnnnggccgcccttttttttttttttttacattgtaatttgacaatttgtataaccagaacccaaaaatccttggatataaactacatacctatacaagcttcttttctctttacctccaagactttcaaaaagagatataagtcttgagatggggaaaacaaagtacaactttacatcaactaaaggtaataaagacatgactcaacactggtaaactgagaagctcttacttttccatagaaagctgaatgctcttcccattttctttctcgaggctgatttacactgcggttttgtctctgttacagcggctgaagcaacagagaatccgtcctcggggcttgtgacttctgtatgctgcggttctgtgagatgggtttgatccctttgcctcagttccctgaatagtgtcagtagcttctgtgccctttctcttccacgttgagtaccgtttacggagatagatcccaaggggggtctccccccttcttgtaaaaccatctcgctacagatctcactgtgattgcataatatcagaagcaaagaaacagcttggtcttgctcatttggttcacccgtgtcatgaatggtgcagagattgctcacaaggctaggtgctgaaaccatctgtcttttcctggcctcgtcataccaattaagtagaca

SEQ ID NO: 99340 - DNA, 365 bp, Arabidopsis thaliana columbia
gtaaagtcactcgctttcgccggacattatttcccagtaaccatgcaaaggtttttcgtttgaaggctctgacttgtgataatcaagaaagcaatcatatgttcaaggaactgtcaacttctgaatggactcatcacttccactctattcaagtcgatgtctcggaaatggatgccatcatgatagagattgatgcactaaagccgaaagtgaagaacatacttatgtctttccaaggcaattgactcgacaaagaagagaatccttatgatatatatgctgataagccttggccttgcatgtcaatttgaggaagagatctatgagactttaaaagagggtttcggaaaaatagaggagatgat

SEQ ID NO: 99341 - DNA, 529 bp, Arabidopsis thaliana columbia
ccggacgcgtgggaaaaatggaagccaaatttggatctcaaatttctcttcattttcgtaccaattcatttcctttaaggaaactctatggctttccccttaccacattttccggtacgtctttaaatcatcttcgtttaaaggccactaatactttaaagggtgatgatcaagagagtattcgcaagttcaagaagttaccaacttccgaatggactcactacttccactcgtttgtcgtcgatgtctcggaaatggatgcgcttaggaatgagatcgatgcactaaagccgaaagtgaaaaacacaatcatgtcttcccaaggcattgactcgacaaagaagagaatccttatgatatatatgttggtgagccttggccttgcacatcattttgaggaagagatctatgagactctaagagatggtttcggaaagatagaggagatgatggaggatgaagatgatttgtgcacagtttccatcatcttctgggctttaggagatacggtcactacatatcttccgat

SEQ ID NO: 99342 - DNA, 845 bp, Arabidopsis thaliana columbia
  unsure (1)..(845): unsure at all n locations
ttaggagcactatagaagagtctatgacgtcgcctgcacgcgtacgtaagcttggatcctctagagcggccgccctttttttttttttttttgattctaaacaatattattatcatcttagagatttttagatgaagttatacagagagtaaataggtttaaacatttttctttcttttactctacgatacctaaataacaattttgttttaacagtttttgtcgcttgagtttctgttgatggacaagagcttgctaaacatcttcttaggacggccagggattgcacaaaaagccttaaaccgagacggagttcttcctccgtccccattcatgaacctttcgtctacctcttcatcttcagctagcttgcttctcagtgtacctgatagctttgatttaggtgatttgagacccgagacgctccatcgatcttctggtgcagcgatacttgttgtcgtgctgaaagcggctgcatttggattagaagggtcgatgttgtgtgctgctaggagtgctttgatgttgctaggaagttcagtcgtgttcttttcaccgttgttcgtagctgcagcggctcgtgcttgctcgtaaaagaggacttggaccactactctaagcggaagcatctcgttttgcgctgcgtgcatacactgcttcattgatagtttcttgcagccaatactctacaaactctcttcctttctgatttattcaaattcttatgagccttgagatatatgtcaatggctctatagagatcatcatgatcaagtcttgaanattcagggacactttcacgtaaagaacanactttgagagcggaaattcacatctctagcatc

SEQ ID NO: 99343 - DNA, 408 bp, Arabidopsis thaliana columbia
ttattttgtcccttgaactatcagatagagaacttagatcctcttgtgcaacgtgcaatagcttctgcctcaagagttccggatctacggcgtaagtcaggcatcctgtttatcacttcataagcattagcgacgtgattttacctaaagatatgttcatttttggaccacttttaagggattttcatgtcttactatctcttgttttctgatttccctagatctgtatgaaaagataccaagccatattgagccaaagcttcttccttttcagcgagaaggcatagagtatgtcagccatatgtagtacctgtggtttttctttattaccaaatgagtagtaacttgctctggctgcctgatgacttttgcctcattattggtctccacctttctcgcaaggtttat

SEQ ID NO: 99344 - DNA, 799 bp, Arabidopsis thaliana columbia
  unsure (1)..(799): unsure at all n locations
nnnnnnnnnnactatagaagagttatgacgtcgcctgcacgcgtacgtaagcttggatcctctagagcggccgcccttttttttttttttttttttttttttttttttttcctctcctacagggtttttatagatgacatggtaaattttatagatttaagacaaatggtaattctcagggtcctcttgagtggatcaaaactcggaaaactgaagatatggagattaaatgcttctcaatgcaaggtcagtatcttgcatcatgatctctatccagaaaagagcttcaattatcagtatataaggctctcccttagcttcatgtccttgttgggggagcggaagaatcagatttctccgccaaatagtgctcaagcatgtcttcttcgtcatcttcaaagtcttcgtcttcaaagtcgatgtcttcctcatcttcctcctcatcttcctcatcagcaatgaccaccgttcctctccctctcccactttcgaaccactgtcttcctgtaagcttcttctccttaggcgctgaaagagcagactccggcatcaacttggctcgctcaaggcaagctctgcctatatctctctctcacgccaaaatgcctagcgaacaggttctcatgaggacaatacctatccttttggcgttctactcgaaattagctgatatcttgcctagtgtcaacaccagtctttctgatagacaggttagacatgccatcctaatttcaatgcctctgtcagctntcttcagatgggaggcctacatgattctcgatctttaactcaaagcgag

SEQ ID NO: 99345 - DNA, 453 bp, Arabidopsis thaliana columbia
cccacgcgtccgctcttctcttctcatcttccctttttatgattttcttttcccattttcctctgcgtttgattatctgagagagagagagaagaaacttgttgaaacaaaatcaacaacaacttatagaagaccaaaaaaagattcataggatcttttgcttgacaatgaaagaaggaaaggatgggtttgttcgagcagatcagattgatctaaaaagcttagacgagcaactagagagacacttaagcagagctttgactttagagaagaacaagaagaaagatgaagaagacacaaccgccgtcgccatcggtggctctgcttcttcttcccctgtcactctaaacggcggcggatttgttggcaagaggaaacagagacttgagtgggagatcgatccttctaaacttatcatcaagactgttcttgctcgtggcacttttggtaccg

SEQ ID NO: 99346 - DNA, 818 bp, Arabidopsis thaliana columbia
  unsure (1)..(818): unsure at all n locations
attatnnnnnnnnnnnnnnnnnnnnnnnnnnnnnnnnnnnnnnnnnnnnnnnnnnnnnnnnnnnnnnnnnnnnnnnnnnnncttttttttttttttttagttcatcaacagtgcgcaagtaagcatttcaaaaggatactgtaatgttccggttacaacttctaacccaatatacacatcaaaaccacctaccggtcaatattaaaccgaatttctataaaaaaaaacaccggttttctatggtgtttaacagtgatccattgaagcacatttgatggtttttaaggttccaccaagttccattggaaccaaaggtataagagaatgcaagacgtctgtaatcaacggtctataactcggttctggctgcacgcacaaaatcgccactggcgctacctggtaaaggtgtttcaagtccatcgtatctttaatcgcaggatctatgacgcttggtaacttggttctatcagtgagataaggcattgcccaagtgatgatggattggcattcaccgggagctagtttctccacaggttttttcccgagtaaaagctctaataacactactccaaaagcatacacgtcgctcttttctgtaattgggcgttgagaaatactctggtgcaacgagccactgtcccggaaagttatggttcttgttctttgggccatcaacaacagctagaccaaaatctgaaatcttagcatggaaattgctatctaataagatgttggatgatttcaagtccctgtgaatgattgctggatgacaaatgtcatgcaaatattctaatccccttgtacataagagcatctta

SEQ ID NO: 99347 - DNA, 499 bp, Arabidopsis thaliana columbia
tatacgactcactttgggaagctgggacgcctgcaggacccggcccggatttccggggtcgaccacccgtcccggccccttggccgccccttggggcgtggaagagaccaggacacctccgatttcggtttagaccgtgacctaggtcccgatcaaaacctcgatccgaaccctactacgacggatctagctcttaacgacgaagaagtttcgaaacctgttggatctggtttagaaacgacttcgttttggtctctatatgatgatctctacacagatactattcccgctcctcctcccgaagattcaatcgacgatcaagatgaagaaatcgaaacgagtgagatcagacctggacgagatcttccggtaaggaaacgaaggaagatttgtcgatctctaggatctcatttagcttccggtggctggaaccttagccgtgaacaaggcaacaagcttctcgcgagtagattccgaggtgattgtctctacatttgca

SEQ ID NO: 99348 - DNA, 722 bp, Arabidopsis thaliana columbia
  unsure (1)..(722): unsure at all n locations
ttcctctcgtccggaaaggagccgcctagagagaagaaggcgatccatggcggaatctgtcttctcttgtataccagaagacgtagtcttcaacatcttcttcaagctccaagatgatccaagaaactgggctcgtctcgcttgcgtctgcaccaaattctcctcaattgttcgaaacgtttgttgtaaaactcagtgctactccgctatccccaccgtcatctccgatctcctccctcttcctccctccgccgccgcatccgcttcttcatccaccgcggcggattcgtctcttactcctcccggtggttgggcttctttatacaaactcgctgtttgttgtcctggtctcttccacgctggaattctcctcgaaaactccgatttcggtttagaacgtgagctaggtcccgatcaaaacctcgatccgaaacctactacgacggatctagctcttaacgacggagaagtttcgaaaccagttggatctggtttagaaacgacttcggtttgggctctatatgatgatctctacacaggtactattcccgctcctcctcccgaagattaattcgccggtcaaagaggagaatcgaaacgngtaggnaancctggcggntttccggnaggaacgaggaggtttcggcttnggccnattatggtccggggtgaccttnccgncnaggaaaaggtnttggnaaggtccgggggttcnttnaatt

SEQ ID NO: 99349 - DNA, 519 bp, Arabidopsis thaliana columbia
aatacgactcaccttagggaaagctcgtacgcctgcaggtaccggtccggaattcccgggtcgacccacgcgtccgcccacgcgtccgcggacgcgtgggattctgaattcaagatgtatgttacaaggcatctctccgaataccagagaaactcgtcggacttgacacgatcgttgccggaaggtccaaactccggcgtacttgtgattcaagacgaagagtcaaaaccgacttgttgctttggaaattgctacgatggtgaactcaaaggcttaccgttcccacagaacgcaaagctgactgtgacttacagaaccggaactggtaatgacaggcgcagttaccatgaccaggttctgttcattccggttcttgatcagccttattattcgaaccgttattatgtcattaaacgacgtgggaagcaatcaggaggagcttcggcgagtgcaaaggaagaagacagagtcccctgctgcttttgcttcaactatgttcctgaagttaagccacacgaa

SEQ ID NO: 99350 - DNA, 741 bp, Arabidopsis thaliana columbia
  unsure (1)..(741): unsure at all n locations
cactatagattgagctatgacgtccgcatgcacgcgtacgtaagcttggatcctctagagcggccgcgctttttttttttttttttttttcataggaaaaaggattttgattagcttaatctgttctgacttcgtataagattttccacagatacaaatattgttgatcccttgctaacatgtttcatcttgaaactttgattctctgagactcaagagtcaagattcgtcttcgcaggcctctgcggctgaaatctctgaatcaagtttgctcatcagagtctctgtcacatgcttggcaacagagatcatgtcaaggatgacgcttgggtctaagccagaacccgcttcgtttggttaacccacatatatggcctgtccgattcacagatatagatacagctgagcttatctgagactcctcttctggtgttcatcaactatgaaatgcgttcnccactttggtaacgtactatgaccggacactggaagtgtcaattgaaaatattctcgtcgctagtgcaatctctggtgctcatcatctgctacttagctagaacatgacttttgaatggccgtgtggttaaagcagccttatgggcgccccaggcatccaatagattcccatccgactatgacaaacctcaatttaaggtccacccgactctcctttttgataaagcgaaataattattcagctctggtcatttgccaccaaagctttttgaaagccaagcagct

SEQ ID NO: 99351 - DNA, 624 bp, Arabidopsis thaliana columbia
atttaggcgacctatagagtagcttgacgtcgcatgcacgcgtacgtaagcttggatcctctagagcggccgcgctttttttttttttttgtgaaaacaaatgacatgaatcacttgattcgatagcaaacacaaaagcaggactaatctctctcacacacacaatgtctcaacttaaacagagaaaactagtcaatgtcccaaaatgaaaatatagtagagtactagctaaaagagaggtagagagatcattcattcaatagggtttcttttgttgttgatggtgggcatgtcgtcaggaggtatgacagcaatcctgagaccaccaaattctgcatcccaagcgatgggggttgttcgaaattaaagcgggaaaaaggactttggacgcttccgaggtaggtccgaccgctctcatcgggttcatacacgtccttgatctcagctttgaatctgatttccttttcataagcatacacttccacatcatccggactaacacctggcttgtccactgcaaagtgagcccctcctcccgcttttgtcaccccaattagtgctcccttgcgaccagacaccaaacacggatgatcctccaagcgtattccggatggaccttaataa

SEQ ID NO: 99352 - DNA, 515 bp, Arabidopsis thaliana columbia
taagactcagaagccgcattgccccatcagcctacatgcctcaacctacaccaaacagtgcaccgattttcccacaggtgatcacagctcatccacaagaaccgaatcaattagcggttggactgtctgatggttcggttaaagtgattgagccatcagaactttctagaagatggggtgttggcgtcgcagctggttcagataaagcagggactgaaaatggacggccgtttagttcatcagcggctaacaactcaagttcggatcagattcaaaggtaaaaatagtttatgtcagttaagttagttgccatatctcttgttattttggattgtaaagttgtgatagcttgtgctgtttttgtaaatgagattctcaaattaaatcagtaggcgcaataacagtttattttataaaaaaaaaaaaaaaaaaaaagaaaaaaaaaaaaaagggcgaccgctctagaggatccaagcttacgtacgcgtgcgtgcgacgtcataactcttctatag

SEQ ID NO: 99353 - DNA, 875 bp, Arabidopsis thaliana columbia
gatactccagcactaatcgactcacttagggaaagctggtacgcctgcaggtaccggtccggaatcccgggtcgacccacgcgtcggggtgccccaagaagctctctcttcgcccataacctctgcatcttactcatgcaacagccaactggtttacgcgtcattcgctgatggaaacattgcagtctttgatgctgaatccttgagactcagatgccgcattgccccatcagcctacatgcctcaacctacaccaaacagtgcaccgattttcccacaggtgatcacagctcatccacaagaaccgaatcaattagcggttggactgtctgatggttcggttaaagtgattgagccatcagaactttctagaagatggggtgttggcgtcgcagctggttcagataaagcagggactgaaaatggacggccgtctagttcatcagcggctaacaactcaagttcggatcagattcaaaggtaaaaatagtttatgtcagttaagttagttgacatatctcttgttattttggattgtaaagttgtgatagcttgtgctgtttttgtaaatgagattctcaaattaaatcagtaggcgcaataacagtttattttatatttttcggcgttttaacagtttaagatggctatactcttgaatgtagtagctcttaatctatggatttgcacaaaaaaaaaaaaaaaaaaaaaaaaaaaaagggcggcgtctgaggatcagctacgacgcggctgcgacgatagttttataggcactaatcatcactgccgcgttacacgtgtactggaaccctgcgtaccactatcgctgagaatcccttcgcgtgcgtatacagagccgacgtcgctccacgtgc

SEQ ID NO: 99354 - DNA, 1376 bp, Arabidopsis thaliana columbia
ggcccacgcgtccgcccacgcgtccgattcgacaaaagctaaaaccacgcgtccggaagaagcaaaaccctagagctcaaggtaatcgccgtcgatttctcaatctctcaccggcgattacatgccgatgaaagttgtacaatagctgctgtaagagagagatttatcaggtatttttagaatcatgtatagagacagaggaacggtgaattcgagacctgaagttgtggatcgtaaacggatcaacgacgctcttgaacgtccttctccttcaacctctcgtcaagttaacggcaaaggcaaaggaaccgttacggcggcgacgacgacggcgaacttgattgggaagcagcagtcgaataacatcaaccatagagattctcgttctgcttctctctcgaagaacaatacggtttctgatgatgaatcagacacagatagtgaagaatcagatgtgagtggttctgatggagaggacacttcatggatatcttggttttgtaatctaagaggaaacgagttcttttgtgaagttgatgatgattacattcaagatgacttcaacttgtgtggactcagcagtctagttccctactacgagtacgctcttgatttgattttggatgttgaatcttctcaaggagagatgtttacagaggaacagaatgaattgatcgagtcagcagctgagatgttgtatggactgattcatgctcgttacatattgactagcaaaggattggcagcaatgttagacaaatacaaaaactatgactttggaagatgtccaagagtttattgctgtggccaaccttgtcttccggttggtcaatcagacttaccgcgatctagcactgtgaagatatattgcccgaaatgcgaagacatttattacccacgatcaaagtatcaaggcaacattgatggagcttactttgggacaacgtttccacatctgttcctgatgacttatgggcatctcaagccagcgaaggcaacacaaaactatgttcaaagagtgtttgggttcaaattacacaaaccgtgaaggaagtttgacgacaaaacccaaggatcaagatcatggcgttggaatggaactgagaaagaagagacgtgtgtgaacagaaaccggaaaataaaacgtcactgtaatcacacgaatggtgaagagagcattcatgtctctatttgtcttcaggtacatacacattagaagaagcaaaagcatggttagaaagaaaaaaaacacgaaaatcttttaatgagtttgttaaacttgaacatgtatttttctaccttctgtaaacttttttattttgtttctcatcccagtgcctgatttagtcatttatcatttaaaaaagcatccattg

SEQ ID NO: 99355 - DNA, 480 bp, Arabidopsis thaliana columbia
cccacgcgtccgcccacgcgtccgcccacgcgtccgcccttgaacttgtggagagagaaaagggttagatacagagagatagcgaaagagaagaagaagaagaggtctatcgacagagcaaacttcgtcaagagatccgttaaaaggatccatttggagctccgattcgagctagagtcaataatgagcggaagacagagatctgttgcagcggcggtgcatcaccagaggcagctctccgataaccctctcgatatgtcttcatccaatggcagatggcttcaatccactggtcttcagcattttcagtcatccgccaatgattatggatactatgctggtgggcaaggaggtggtggtcaagcatcaagaggataccagaatgctcagagaggaaacgagttctttggggaaccaactactcctcaatacggagctcgtcctaccaaccaaaggaagaacaatgttgaatctgagttt

SEQ ID NO: 99356 - DNA, 709 bp, Arabidopsis thaliana columbia
  unsure (1)..(709): unsure at all n locations
cgatttatnnnnnnnnnnnnnnnnnnnnnnnnnnnnnnnnnnnnnnnnnnnnnnnnnnnnnnnnnnnnnnnnnnnnnnnnnnnncttttttttttttttttttaacatagaaccatacattcattatagaggaaaataaaccctattatttcggataaacaaaagtaatcacaaatttcattccaaaatggatttttaaaattaataaataccaaagacaaaacaaaaaatcacgaattgtatgaaccttgatacccacctcaatgatcagaattacttaattagtcctattccaaaatccaaattcatattatgaactgcattatcatcataatcgtaactctctcaatctcaaagcccatcatcaaccatcaccacacgtgtgaaaccatctcaagtaaaaatcgaacttgcgaattccttatgaaaaaataaaaacaaccctttacgttggccgccacgcactagcccaaaccaccggctgatctctccaacaaaggaatattccggcggcatcaggacactgtaccattgaccaaacaccttctttatattctcctaacaaaagctctgacatcatccgccacctcatcacttataccccaccgttccaaacccactattcctcatcctcctcgaccacttcctcgctgtctctcgcctctccgtggaatccgacggcttacaagccacaagatcaacgatcgca

SEQ ID NO: 99357 - DNA, 687 bp, Arabidopsis thaliana columbia
  unsure (1)..(687): unsure at all n locations
cactatagactagctatgacgacgcatgcacgcgtacgtaagcttggatcctctagagcggccgccctttttttttttttttttcatgtgcaaatgctcataccattgatccggattccataataagaacagaatgcaacacaatacatatcaaatcaaaaagtaactgcactaaataaattgtcttgcgagccaagactttcaagcgggttgagaagtcattagttcgtaccacccccttgtttttttcttatctctgtagaggatatatccatccggaatatatctgctggaattgaaataaacatgtcgattatttcctctggaatatcaacatcttcaagaaccttaaatacaccatctacattgcggccaccaacaaggaaagtgcaacctgtccgtttgcaatcaccaagtatctccaacatccttttgatgcttccttcatagtactttggattgacaagcctcgttgcagggtcagcgcccaatttcaaaaactgcttcctggggagaggtcaggtttcttgtaggaggattggctgttttgaaactattatcggtttccaacttctttaaattgcttncacggnctttaacttgncaattnnaangggggggttccgggatttttcggggnttnaaaacatgggngnggcccnaaaattntggnctttncagtttngc

SEQ ID NO: 99358 - DNA, 829 bp, Arabidopsis thaliana columbia
  unsure (1)..(829): unsure at all n locations
nnnnnnnnnnnnnnnnnnnnnnnnnnnnnnnnnnnnnnnnnnnnnnnnnnnnnnnnnnnnnnnnnnnnctttttttttttttttttaatccaatgaaattgatatacaatataaatgtaagttataaatattacattaaattatcataatatatatatgtgagaatacttcaacgcacaataagagaaatggaggagaagagactgacataatatagaagcatcataagaagaaattatacaaaaaaaaaaaaaaaacctcacttcgtcatctcaaacccaaatcccaatatccgttaatttaaatcgtagtatttatttgcttattttcaactattcgtagaaattagaaaaccagtgaagcccaaaagcagaatccatttgtttcaatcgaaaatggcggtaaggtgatgctccaaaaccgccataaggttacgagtctggcttacttccacaactgcaacagcacagccttgaagctgtctcactgcttctacaagctgtcctcttagcctctgagacagtaaccgaccgtccgctttcatgcactctctgtacagcggcatgtacgctattgctactcttagcggtgcaggaaggtctcttaaggatatcgctgactccccttttttcaaaactctcatgaaattcatgaaatcgtcatggctttctctcattcctttcttaaaagctgactccgaccagtgtctgggggaaacgatttaggnntgaagggacggatcggcttngangacctggngagnnggntgcactgngatnaaccggggatcccnaagaagctggttggagaaccancctgggggccccnc

SEQ ID NO: 99359 - DNA, 763 bp, Arabidopsis thaliana columbia
  unsure (1)..(763): unsure at all n locations
cactatagcttgactatgacgtcgcatgcacgcgtacgtaagcttggatcctctagagcggccgcccttttttttttttttttaagataatactcttaatttataatctaaggagtttggatacaaaacacaaggtgtaaactgtggtgaacctgtttgggttctgatcccaactagtacaacaatagtctatatcttgaaatctttccaaaaatggtttcttaaataaaagggtctttgaatagccaagctaaatccaattgctctgttaagatatatccatagagcccctcctacgaatcacactgtgacctctccagggagttttacttctttgttatccgaccataatgcctctggcgtattctaaatgccggttttcgtagcagtactttgttggattgtttgagatttacctgatcgtttcgagacttaatcttaagtggatgagcttcggtgttgaatacccactcgtctaaaggaatgactgttgtcggcgagaagagtagatagagatacttgagtgtctctgcaaggaagaaactttgcatcttgttgtccttaacgcctgtattaacatccttcaaaccaacatatccagactctatgcgcgagttcttctcaaatgcttcaaatatattccatccccactcttgatatgtcttgtttccagttaaccgncagaggtaaaacagtgattcgacagtttctggtctcaagatgttccacgacgttcccacactcatgtcactcccagagttga

SEQ ID NO: 99360 - DNA, 660 bp, Arabidopsis thaliana columbia
ctacaaattgctgtggcaaaaacgttgtccatctgttctttaaactgatacaacaatgtgcctcaaactttgtggtaatatataataatatcaaattccatttgagcagaaactgtctactaaacgttaatctgatgaccaaacttcctctggcgtagtgctatagttggcttacgcgggtcattccgtgccacaatcttaagcggatgggcttctgtgttgaaaacccacctcgtctaatgaaataacagatgaaggcgaaaagagaagatatagatacttaagagtctcagctaagaagaagctttgcatcttgttgtctttagcacctgtattgacatccttcaagcctacatatccagattctacgcgagagttcttctcaaatgcttgaaatatattccatccccactcttgatatgtcttgttcccagttaatcgccagaggtaaaacagtgattcaacggtttctggtcttaaaatgttccaagatgtgccaacactcatgtcctgccctgcagtgaagaaatagttctctccagcaagtttcgttggtgtcgattggtaaaagttataacaagtccaggcaagctctccagccagtgaaagaaactttttcggacgcgtgggtcgacccgggaattccggaccggtactgca

SEQ ID NO: 99361 - DNA, 932 bp, Arabidopsis thaliana columbia
gcatgcacgcgtacgtaagcttggatcctctagagcggccgccctttctttttttttttttaaaatgaaatgtaaacaagattaaaccaaaaaggaaccaatcaatgtacaaatttttttggcagctctcttctcccctatgatctacatttatttatggacaaacccaacactagacttttttctatacaaaactcaaaaaacttttcaaactgcaaaacacaaatgaacatccaaatgctatcctttccgtccagaaacaaacgggggaactaatctcaggttctcgtgttagatacatcagcttcaattgtgttaaaaaatctcccccaagaataaagcctaggaaatcctctctgactcgctctcgctctgtgcgaatgcgatgtggccaaagaatttaaagacttagcgacacatgcaaataaaagatgcccaagaagaatccaataaaagattggtccaaggggtcaatcgtggtgtttttttttcctgcacatactatcacgactaggatatatgcaatcgggtcacttgaatcgtttaaacttaaaccccttggagtctatatgggaactaatattttggaatggcccgaggaaagcttggaattgcaacttgggagttggaaagaaaccacttaacttggcttagctgagtgaacccgatttcaaaagccatccaataataacctgataacccctgaaggatagaaggagagggctccttgtggtgggacaaagccgattggggggatattcgggtagattattggtgaattctgcgatcaatgagcaaaggaggcggtttactagaataagcttcgctagtggcggattgtatattggggtgcgagcgcgttggctttttgtcgtagtggcaatgacctggtgtgggtttatcggagcgcactgtgaggtcagctgcgtggg

SEQ ID NO: 99362 - DNA, 982 bp, Arabidopsis thaliana columbia
atttaggcgacctatagagtactatgacgtcgcatgcacgcgtacgtaagcttggatcctctagagcggccgccctttttttttttttttactccatccttatttacatatataatccgacttagaagtgcaacaatgagtttagaaatgacatcgatgataattcttttgtgtgctttttttttgttttggtttgtgaaacaaatattacaaaatgtgtggatttgtatgaacagtttacaacgagaagttgttgtgtaaattgggctcttttcttcagaattcttgccacccaaggaatcgttagtcacttttttgtcgccggttttgtgagttatcaaatatgtataaaaacatacaaaaacgctactactcgtgaatcttctgcaatgctatttcttggcctttttaagatacttcttgtgaagtttcattgcaccagtacaggcttttttagcatccaagtttccggttatgtcgtttaagatctttacaacgtcatcaagtcctcgagcttcggtcattaacttagaactcttgtctttcaaaaccctagcccctaagaaaacagagataggcaaaggaccttccgcgcttttccctccattcctcatggtctctctctcgtacctcccgcattggtttatcgactttggtttacctttggaggaaccttcgattctctctccctcgaattgaggctcctcatatagagaatacatttcagggttggactttaatggccacatcatcttcccaagggtcaaggagtcccaaaaggaggattcttttcggaactgaaacaaaaacatttggataacaaagagatagttcccccccccccatttcttttaattatggttaagtttggggtccattattttagtgattggagcccaaagaggtaactgtgtttgcctccacttttggaaggctggcggagcgtgccgccgcgtggtcaacccggaattcgggccgggtc

SEQ ID NO: 99363 - DNA, 725 bp, Arabidopsis thaliana columbia
  unsure (1)..(725): unsure at all n locations
nnnnnnnnnnnnnnnnnnnnnnnnnnnnnnnnnnnnnnnnnnnnnnnnnnnnnnnnnnnnnnnnnnnnctttttttttttttttcagcaaatatatcttatataattaattgttctcatattgtttaatataacgttagtataaacaatgactacatcaacttcgcattcgcactatagaaacaggatactatttggatatatcaactaaactttggggatattttctctcatctactaagatatactagtataacttttttcctaagggggtatatgaagataagataattactttttcttcttcttagctacatgggtcgaaactggtcttggaatgttgagtaaccagaatctcagaagcagcccataatttggtagcttcgctggagttggttccgagtccagacggtgtcgtttcattacaatccgtaaaatactttcccgatacgttcaccagtcttggatttgttgccacgtaacacgtcgttgctgctgcttgagggacggtcttaacgagcttggaagccaggaagaagacgagatctgtcaatagaccttctcggtctctagttaaccgngttctaacaactcctgggtgtacgcaatttaccgtaacattcgctccaattttctggagtctagaagagagctccttggtatgcaaaacgttggcaagcttcgagagagcatacgcacgtgtcgcatcgaaatgacacttgggtt

SEQ ID NO: 99364 - DNA, 522 bp, Arabidopsis thaliana columbia
atacgactcactttagggaaagctcgtacgcctgcaggtaccggtccggaattcccgggtcgacccacgcgtccgggtagatgcgagtgagcttgcgaattccatcaaacatccattcagaaacatcttgcagaaacgacacaggcctcagctagttatggctatttgcatgccaatgtttcagatactcacagggataaactccattctcttctacgcacctgttctgttccagacaatggggtttggaggaaacgcatctctctattcatcagctttaacaggagctgttcttgtcctatcaacatttatttccataggattagtagacagattgggacgaagagctcttctcataactggaggaatacaaatgataatctgtcaagtcatagtagcagtgatcttaggagtgaaatttggagacaaccaagagctatcaaaagggtactcagtgatcgtagtcatcttcatctgcctctttgttgtagcggtcggatggtcatggggtcctctaggttg

SEQ ID NO: 99365 - DNA, 859 bp, Arabidopsis thaliana columbia
cactatagaattactatgacgtcgcatgcacgcgtacgtaagcttggatcctctatagcggccgccctttttttttttttttggcaggttctttgattatcatatacaacttgcaaccaaattaaataaattcaaataccaattagagtacttttggtaacacttgggaatggtttgttacacacaaaagaccagcaaaaaaaggatttaaaatagggaaaaaagagaattaaagacagaaataaaattaggttcaaaacaaaggccactgcttattcctcaatatgcttcaagttcaagcgaagatgctgagcggaccagtcttcgtagaagcgtctataccattttcaccagtcctgattccggttatccacgtctttctcacgttgtcgccaccaatatccatcttgattgttagccgtttagttgctttcatgaaatcactgaaaggttcgtctccaatacgtttgataacaccatttgcctcccggtacacaacatgagtcaccaaatccgacctctcttctatatgaaacatctcagccaatttcccggacaattcttggtacgagccaataaccgagagatcgagtgtgcgtccaacatcctcagattccatgaaaactttacaatgacccgtctcaagtccttgcaaactataattccatgttaacccacgagccactaaacctttctcctcctccgcttccgcctcttcttccaaaaaccgttttcggttcataacttgctgttcggttaaaatcggttgaccgatcaacacgaaatgatgagtcttaaccgaaccaacagacttcttcttatcatgagccataggtacgcttgggttaatccgcaaatg

SEQ ID NO: 99366 - DNA, 652 bp, Arabidopsis thaliana columbia
atgcacgcgtacgtaagcttggatcctcttgagcggccgcccttttcctttttttttttctttttttctttcttccttaacagttgggatcaatagaatcaaaattcacctaataatataatccatataaggagttgatcattatgtttaaacatcaatgaaccttttgaagaaacatgtctatttgccggaaaaaaacatacaaaaatatgtgtccgactcagaaaccaacgaaactcaagtttccaagagtagagccgtaagagaagaatgggttggtacaaaaagataactacgggattgaaccaaaagaacaagttatttgccggtgattcttctaaacccgggataagtagacgaactaatgaaaatgacagagacaaaaaggagaagatttagtccgcattttcggattcaacgtttgacccattggaagcttttttttgccttgggttttccaggtttctttttttccacaactcgagagtcttttgtcaagaaaccagcagctcgaagtgatgtccgcatttctggttcccagttttgcagtgccctgctgatacccaattgaatagctccgacttgacctgtagtaccaccgcctttaacagggcccttaatatcccaacgccccaaggttttggtgtcagca

SEQ ID NO: 99367 - DNA, 836 bp, Arabidopsis thaliana columbia
  unsure (1)..(836): unsure at all n locations
gaatgaannnnnnnnnnnnnnnnnnnnnnnnnnnnnnnnnnnnnnnnnnnnnnnnnnnnnnnnnnnnnnnnnnnnnnnnnctttttttttttttttgatggtgatagtagttataattcacatgatgattaaatgttttagtcacaatacctcataaatatgccatgttccttgttgtaagtcgtaacttacaccttccatgacatcaattaattaagttgttacaaaaaaatatcaaaatactgtaataggaaaataattattatgaaaacattatttttttccctttcaaaatcttctgcatgacaaagatcgagtctttcgtacaggagttggagtaggtgttgtaacacaaaaatctggcgtacagacatatcctttctccgaaataccctttccgctaaacagctccgacaagtggtttccaatatcttcagggttatatcggacattccactggccttccgttcccgctaacataacggcatttctatgagcgttgtaaaaatcgcggtaaaccggtaacagttttctcccgatcgaaattctcatctcgtccaacagcttcggatctagtacgatgcactcactctgtgcctcgcacgtgctctcgaaagtctcgttgaactttntgaattgcatcatcgcttcttcgggcgacatctccaccagctccgaagtactaatcgccggacacatggacgccaatggaccccatgccaaccgctcgtagcttcttgcgaactgtctaactgtctctgagttnttcgctatccaatcgttgccgagaacatgctncacgttcgtggatcgagcacgtgagacaacgtgttgga

SEQ ID NO: 99368 - DNA, 818 bp, Arabidopsis thaliana columbia
  unsure (1)..(818): unsure at all n locations
accctatagatgagctatgacgccgcatgcacgcgtacgtaagcttggatcctctagagcggccgcccttttttttttttttttttttttttttttttccaaaggaatcaactgattgagattaaaaacaaaagctagactgaggggcatcggctaaatacaaaaaaaaagaagggaaaaagctaacctgagccgccgagtcatttgcactttctcatcttcttcaaggcccatttgaagcccacatactacatagctcggatctgtcctccatagccgtagtacttgagaagcccctcgtcttgtctccagttctctttcactttcacttccacctggaggaagactttcttctgaaggaaatcttcaatgtcgagccgagcagccgttgctagtgttttcagagcctttccttcttttcctataaggatgatcttctgagaatttttatccactactacttccacttgaataaaatcttttgcagctggtctagttttgtagctcagcacgttcacctgacatgcataaggaacttcatttcggtactgcataaatattttctctctaacaatctcagaaacaaaaaatctctctggatgctcgctcacaatatcctttggataataaggtggcccgaagggaagtttggataatatccactctttgacatcctctattccatgtccatactttgcacttacaggtataacttcatcaacatccgtaaatnttcataccactacagtttcttggcaatctcaccagggtggatcagatctttcttattcataacaagcaacatggggtgggttttt

SEQ ID NO: 99369 - DNA, 681 bp, Arabidopsis thaliana columbia
  unsure (1)..(681): unsure at all n locations
nnnnnnnnnnnnnnnnnnnnnnnnnnnnnnnnnnnnnnnnnnnnnnnnnnnnnnnnnnnnnnnnnnnnnnnnnnnnnnnnnnnnnnnnnnnnnnnnnnnnnnnnnnnnnnnnnnnnngggggggaaaatgttttcattttttaaaaagatcaggaagttttaccttagaaatcatgttttgatgttggacacttggtataagtcttcgaatgatcccactttcaagaatacaaaaaaataggggattcattcatcccttccttcctcaatattctcattctactctgggggggcaagacatgattggtagatttcatctcttctttgctcaaggatgcttcaacaataagctcttgtactctgtttccagctcaagcaagcagtttgtattggttctcaaacattggagccatgtaaacctgaaacgttggagcaagacccggactcaaaaaaaaacgactttttgagactgattggattccttcaaccatttccagctctttgatcaaagattccacgtaaggccactcagcgtcgagctctgctgcttgtaatcgcccccccacctgatctttttcaccaccaactacagattctaaagccttattaagaggatcaggcgtaatttcttttaagacaaaaaaaaccgtccaagaacaaaatctacctggggccctttcg

SEQ ID NO: 99370 - DNA, 860 bp, Arabidopsis thaliana columbia
  unsure (1)..(860): unsure at all n locations
acactatagaattactatgacgtaccatgcacgcgtacgtaagcttggatcctctagagcggccgccctttttttttttttttttttagctatcaaaatttccttcgcatttttgaaagatacatggtcaagaagacagagcaatttagatacaacgaaccttcttcatcacaattacagaaaaaatgattatgtagatatcatgtttagagcctaaacggctaaccagttccatcattaatgtcttaaacaagcttttatgaacagacaatggaaccttcactgcgcaactggagcgtataaaagccagaaaacgtgcaccgaataacctctggataggctctggaattttctaaattctttcaaagcttcagggatggaatgaagcaggcattgtgggttgcacttttccttctccgttggcaggtccaaaacacaccaaggtaatctaggaatggaccagaagcagcatttccgacatggaacccaccttggttttgcatttngctgctctatggcctttggagtggaaggaacctaattcttgggacaaaatgaaccttcactaagtagccttagtcttatcatctccaacaccagaaagtttggcgcaactattcaagatttcatcaagtccttaaagaacccaatcccttcatattattacctccctgtacttccgacccatggcttgattccccacttgccaaccaggttctccacttattcaaacccaattaaaccacctcccaagtttagcgctgtcccattgttcagaatatactcctggttaacatacccagtgagaccacagcgagattgaacattgaaccgggatgcaccctcgaactttacattga

SEQ ID NO: 99371 - DNA, 799 bp, Arabidopsis thaliana columbia
  unsure (1)..(799): unsure at all n locations
cactatagacttactatgacgtcgcctgcacgcgtacgtaagcttggatcctctagagcggccgccctttttttttttttttatggggaaaaaggtatagactattaattacatcataatgatgtttacaatgagaaagagtaatatcatctccaatctccaatggttacatctcgaatttttggatactataatatgtttgccatgttctttttttggcaacattgtcatgttcactataagacttttctagtttccagtctcatttggctttttcacttgggtcactaactatgcacaaaagcttcatataaaaccacattcacatgcatgttgttatatctctggaccagatgcgaacagaggtataaggccacgcaatacttgggctgataattggtgagcctcaaagatctctccgtccaaattccacacactctcttccccaaattgatgtaaacgtgaaagctcgcgtcttgtgatattccacaaactcgaagttcaaaggttctccacctctttttgcaagctcggttaggggccctaagtccttgggacgagaacaatcttttatgagtatgaaatgaaggaaaccgtcggagaggtgtgcatccacaacaagcccatcagggggctctttcatttcggtttgacatcactgcagcaccctatcctaaaaaccggtcctttcgttctacaccatncttgttttttctggacaggaggtaaagggttgggcttgcacttgttcaaccaaccttactgttacaatcttgcattttcacgacatagtattttc

SEQ ID NO: 99372 - DNA, 537 bp, Arabidopsis thaliana columbia
agatactccattggatgcaaaacactcctcgaccatgtgtatatataccatcgctaacttaagacatacgccacgcgtccccacaaacctaaattgaaaacaaatatatttccacctgaaacaacataaacagaatggaaccttcaaaacaagaagttccaaagctcatggagacaccaccgaacatatcaaacgattcatcagcaaccgagaaaggagaagcaacaaggcaacaacagctaccaaacaataggtacgcactcacagttgacgaggtgatcgagcaacacattggagcacttgggtttgctcagatcttgcatgctctcttggtctctatcgcttggatcttcgatgctcagaccactcttatatccattttctccgatgctcagcccgcggcgaggcttcttgcaaccggtgccatcgtggagggtgcctccttgtgtggattggccagtggagaatgggaatggattggaccaaagagtgacactgttgtttctgagtggaatctcatatgtcaacataaatttc

SEQ ID NO: 99373 - DNA, 730 bp, Arabidopsis thaliana columbia
  unsure (1)..(730): unsure at all n locations
gacctatagattagcttgacgtcgcatgcacgcgtacgtaagcttggatcctctagagcggccgccctttgttttttttttttttttttttttcatgaagaaagattctttcaaaaggttttcgctttgccactcacaaacaagaagttgggccacagctttgtgaaatttacaccaaaaacaaacgaaaaaagagagagactgtatcttggtttcctcttaaacacattacaaaatgcagtattgagtcagatgcggcttgaatccctcccgaatatgtacctccttgtccagtccgacaccaccagagccctcgttcgccagctaacttgcttgctggcataaacagaataccagagccactgggcgctttttccagctgaaacccagtctccaggtagttcagctgctgcttggtcccctcctagtggagcaaattgtccaaagtgcttgtactggaaggggcgaaactgatgatgcccgccagttctgagcccttaggaccttcaggtagctctttacactgctccatcctgttgaagcattttgcaagataagcaccttgctgggcagcgacctgagcagttgcaggcagggttttcatctgtgaatcagcctccgagagagccaatttgaatgcctcaatggctacttctttccttgcattnccttcaaatctgccagcagatcgttaatatgccaatatgcttgttttcaggagagctcacct

SEQ ID NO: 99374 - DNA, 662 bp, Arabidopsis thaliana columbia
  unsure (1)..(662): unsure at all n locations
angggnggtaacctttcgaatggctttccatggccatttcntgggntgntccccaggttcccctggcncgaaggttcggggnaaccccggtccccttttnggtcnaggggcttaagntccccccnttgcgatntntcgcctttcggcaggattngggctcaaccttgttatcaacatgcctggaaacccaaacgcattgccgattgtatggaggctctgttacctgcattgaaacacgccactgaagccgatcaaaggagacaagagagagaaccatccgaagcccatccctcacgcagaagccaccctaccgcctgatacatgggaccaaagctataagtcagcctcatgagccgggagagaagaaagaagaggctggatgttcttgtactccctaaaactctccagcttctccttcaaagccccaagtcattttcctctgcccccccgtgactgtaaaacttttgacaagttttgtgtttgctgagttagttacccgaaacccaaatactatatatggtgcgaaatgtagtttttgtaataaggtttcacttttttgtaataatacgcataccccttgctggggaattattaaaaacccgcttaacccaagggcgccagctttagaggatccaagcttacgtacgcgtgcagtcgacgtc

SEQ ID NO: 99375 - DNA, 2382 bp, Arabidopsis thaliana columbia
gcccatcgtctctctctatcaatcagcgacggaaataaatggaaggtcaaggttgttgtggcggcggcggcggaaagacggagatgataccgacggaggaagctctgagaatagtattcggcgtctctaagcgtctgcctccggtaatcgtatcgctgtatgaagcacttgggaaagtgttggcggaagatattcgagctcctgatcctttacctccatatcctgcttccgtcaaggatgggtacgcagttgttgcttcagatggtcctggagaatatccggtgattactgaatcaagagctgggaatgatggtttgggtgtgactgttactcctggaactgtggcttatgtgacaactggtggacctatacctgtaggtgcggacgcagttgtccaagttgaggacactaaagtaattggagacgtctcaactgaagcaaaaagagtaaaaatactgattcaaaccaagaaaggcaccgatatccgtagagtgggttgtgatattgagaaagatgcaactgtactaacaactggagaaagaattggtgcctcagaaatcggcttgctagcaaccgcaggagtaaccatggtgaaggtatatcctatgccaatagttgctattctctctactggagatgaacttgtggagccgacagctgggactttaggtcgtgggcagattagggactcaaatcgagcaatgttagtggcagcagtgatgcagcagcaatgcaaagttgttgaccttggaattgttagagatgatagaaaagaacttgagaaggttttggacgaggccgtatcctctggagttgatattattttaacttctggtggtgtttcaatgggagacagggatttcgtcaagccattactcgaagagaaagggaaagtatatttcagcaaggtattgatgaaacccgggaaacctttgaccttcgccgagattagagcaaaaccaactgaaagtatgctggggaaaacagtccttgcatttggattacctggaaatcctgtgagctgtttggtttgtttcaatatctttgttgtgcctacaatccgccagcttgcaggatggacaagcccccatccactgagagtgcgacttcgacttcaggagcccatcaagtctgatcccatccgccccgagtttcatcgggccataatcaaatggaaagacaacgatggatcagggactcccggatttgttgctgagagcactggacatcagatgagcagtaggcttttaagtatgaggtcggctaatgctttgttggagttgcctgctacgggaaatgtgctttctgctggaagttctgtatcagctataattgtttctgatattagtgccttttcaatagacaagaaagcctcattatcagaaccaggctctattcggaaagaaaagaagtacgatgaagtacctgggcctgagtataaagtggctattcttaccgtcagtgatactgtctcagctggggctggacctgatcgaagtgggcccagagctgtgtcagtagttgattcctcgtctgaaaaactggggggagctaaggtagttgcaacagctgttgtccccgatgaagtggaaagaataaaagacattcttcagaaatggagcgatgttgacgaaatggatctcattcttacacttggtggtactggcttcactccaagagatgtaacacctgaagcaacgaaaaaggtgatcgagagagaaacacccggtctcctctttgttatgatgcaagagagcttaaagatcactccatttgcgatgctctcgcgctctgcggcaggaattagaggctcaacattgataatcaacatgcctggaaacccaaacgcagtggccgagtgtatggaggctctgttacctgcattgaaacacgcactgaagcagatcaaaggagacaagagagagaaacatccgaagcacatacctcacgcagaagccaccctaccgactgatacatgggaccaaagctataagtcagcctatgagacgggagagaagaaagaagaggctggatgttcttgtactcactaaaactctccagcttctccacaaagccccaagtgattttgctctgcactgttgtgactgtaaaacttttgacaagttttgtgtttgctgagttagttacacgaaacccaaatactatatatggtgcgaaatgtagtttttgtaataaggttctacttttttgtaataatatgcatatcccttgatgagaaaaatactttgtataagccaaataacagaaaatatcaacaatttgattaaacattcattttcggtttggtttacgaaaaaaaaaaaaaaaagggcggccgctctagaggatccaagcttacgtacgcgtgcatgcgacgtcatg

SEQ ID NO: 99376 - DNA, 961 bp, Arabidopsis thaliana columbia
aggtgcaactactagaaaatctatgacgtcgcacgcacgcgtacgtaagcttggatcctctagagcggccgccctttgttttttttttttttttttttttaaccaacaacaactttgtgctgtttctttaacgaaaacatacactgttctataaataaataaaaacgtctgaaaaatctttacaaggaatgacaaagtttataaagcaaagaactaaatgcgttttaagtttcaaatatccacaccacacgttccatgtttaaactatatctacattccttgagacacccttttgcgattcttgatcagatccattgacacttccttttcttctgaacgatctctgactgaatatccgcgaaatgatcttaaccggagctggcggttctgttatcgattcgtccttagccgaattgttgtctttcaagtccaaatcttccgatagtttcttcactaatgccacaaaatgtcgacgaaatgttggatatcttgataccgttttcgttagcccttgcatcctgcgagcaaaggcatcgagttcggctcttttacgttcgggtgagaggaggagaccccggaaatggcattcgagctctttagcctctctggatctccacaatagcaaaacttaatcttccgaggtactcttccttcttcctcagacaagtttgtagctttcatttgctcctttagtatcaaaaacggattcagaaaccaatcaaagaaagaccgctttttgggcggttcatggtagttatttcagttacaccgtcacttagtaacaagccggaagaattggctttgactgagcgaagaatctcgtaaagaagtccataagccggtaaaccaacgctgatcacttggctgcctttactagatctcgcttcttcgatatctttcgagtttatcagtccttttgtcgctaaaacttctccatatcttctacattccacaaagagct

SEQ ID NO: 99377 - DNA, 831 bp, Arabidopsis thaliana columbia
cccaccgtctggtcgacggtatcgataagcttgatgtcgaattcgcggccgctctgtgttagcagaagaaatactgaagcgtttagatctggagaatctctgttccgtcgcatgcgtttccaccactctccgctccgccgttgtttccggcgttcttccttctcttacctccctcgatctctctgttttctctccggacgatgaaactctgaatcacgtgctgcgtggttgtatcggactcagcagcttaactctgaattgtctccgccttaacgctgcttctgtgcgtggagttctcgggccacatctccgagaacttcacttgctcaggtgttcacttttatcctccaccgtcctcacttacattggcaccctctgcccaaaatctccgggttcttactctggaaatggcagacctggattctcccgatgtttttcagtctaacttgacggcagatgcttaacgggtgtccttatctggagtctctgcaacttaatatccgaggtatcctagtagatgccaccgctttccagtctgttagattctccttgccagaaactctcaaagctctaaggttacagccacttcttgagtctgaggcaattcttctcatgaacagattcaaagtgactggaacttatttatctcagcctgattataatagtgccttgctatctccttcaccttcttttactttgcaaagcctgtctcttgtcctggacttgatatctgacaggcttatcatagctatcacaggttctcttcctcaacttgtcaaactggaccttgaagatcgtcctgaaaaagagccatttcccgacaatgacttg

SEQ ID NO: 99378 - DNA, 770 bp, Arabidopsis thaliana columbia
cactatagacttactatgacgtcgcatgcacgcgtacgtaagcttggatcctctagagcggccgccctttttttttttttttttttttttggaaaaacgagagtttaacaattgggtttgcttcttacaagtgatcatctatcgccatatttcggggaaacaaaaattttgatttcaatctgacctcaaaactcccaaaaaaaataaaaataaacaaatcatttcattaatttatttattgcttcaaaagcggctcacggctctcttcccactggtccaatctgctcgaagctttctcaacctctttgtcccaatcagttcgtaaagtgacaatcactaagattattgtttgcattaaagtaccaccaatcatcccagtccatattcccttagctcccatatcataggtgaagccaagaacgaatcccactggattccccacaccgtagtaccatccaatggttaccgtacccaccaaatgcttgccttccacatccaacagccacccgggccaaaacaggctgatttccattgaggacaattgtgatggctaaaaaggaagataattcggcaccggcctaacccctggtggactatcagtaaacgcatagctgatgacgtgacgccacaataggaccacaatggcttcgaaaaccgatggaaaattgatcctcccgttggcacgactgtggaaaacgcggctgctctcgggtttccggctccatactcgttgcttactctcacacttgcagctgcgttgaatccaacga

SEQ ID NO: 99379 - DNA, 674 bp, Arabidopsis thaliana columbia
  unsure (1)..(674): unsure at all n locations
atgattcttccnnnnnnnnnnnnnnnnnnnnnnnnnnnnnnnnnnnnnnnnnnnnnnnnnnnnnnnnnnnnnnnnnnnnnnnccacgcgtccgagcagatcaagataagaaagaagaaagaatcatcaaaaaatgggaataatggaggcagagaggaaaacaacaggctgggctgccagagacccatctgggatcctctctccttacacttacactcttagagagactggaccagaggatgtgaacataagaatcatttgctgtggaatctgccacaccgatcttcatcaaactaaaaatgatcttggcatgtctaattaccccatggttcctgggcatgaagtggtaggggaagtagtggaggtgggatcagatgtgagcaagttcaccgtaggggacatagttggagttggttgcctcgttggatgttgcggaggttgtagcccctgcgagagagatctggaacagtattgtccaaagaagatttggagctacaatgatgtttacatcaaatggtcaaaccttccacaaagggggcttccggttaaagccacccgtcgttcaccaaaagtttttggtcaagattccagaaggaattggcggtttancaagnttcgncgctnactnttccnctggtgtnncttttttaangccanttgggccacttttngttt

SEQ ID NO: 99380 - DNA, 602 bp, Arabidopsis thaliana columbia
  unsure (1)..(602): unsure at all n locations
cgnnnnnnnnnnnnnnnnacctatagattactatgacgtcacatgcacgcgtacgtaagcttggatcctctagagcggccgccctttttttttttttttttgtaacaaataatgtcccacacttatcattatccaaatatccaaatccaaaaaaaacattcaaaccaacccatttctttctatccaaaaaagtcaaaaacaatcatctcctcaaataaaataaaaaaaaaaaaacaattttacatcaaatttgattgatgaatccaagaattaaaccaaacacaaaagtgtttcttgtcttttagcctgaaaatccgaaaatcagtttcttggagtcagcatccatggagcttcaacaatctgtaaacagagagacaaacataaactatgaagaagtgatgttttaactctcacaaatctccttgcctcatttcctctctctctcactttctccacataactctccactttaccatttgctctctcaatcaacacttttaacaacgatctaaccgtctcaaacgttacccgcccggttaaatccaccacatatttccggttactcggtaccgataacgacgacgacacccgatcgatccacg

SEQ ID NO: 99381 - DNA, 689 bp, Arabidopsis thaliana columbia
  unsure (1)..(689): unsure at all n locations
nnnnnnnnnnnnnnnnnnnnnnnnnnnnnnnnnnnnnnnnnnnnnnnnnnnnnnnnnnnnnnnnnnnnnnnnnnnnnttcctttttgataatttccccccaccccccacttggggccgaacatggtcttctggattgggccccttatctaaactcgggatgtttcttttcgaagatgtataaaaagacacagcacattgatacatggggaccgctgaaaccaattacagaagaggcaattcaaaacatgactagtctgctttggtatcactatccccttcactctaatgcttttttcacagctctcctgtgcaatatgcaatatatcaggatgaaagaaaccatcccatgttcctatctacaatgtttcacttcacaggacgcaccccgactgtcttaacacggaatctgtactgagggggcgactcatcactggcatcgctggcttcatcggcttcttcttcactggaatcatcttcaactgtattccaacgggcgtaatcgagtgttgaatgacccttaggcttaggtatggcttgccatgcattagattgctttccagacattggcacttccttgctgggctgntctctaacctctggtgttttaggtgcaacaacttcccccttgtttatcgcatcttctcctggagtctctagatctcttctaagggaaactaccgactcaaac

SEQ ID NO: 99382 - DNA, 838 bp, Arabidopsis thaliana columbia
  unsure (1)..(838): unsure at all n locations
nnnnnnnnnnnnnnnnnnnnnnnnnnnnnnnnnnnnnnnnnnnnnnnnnnnnnnnnnnnnnnnnnnnnnnnnnnngcctttttttttttttttttgataggagaaagacgaaaactaagttcaaagcatgaaagaaagatcatcgtatacacgtggcggtacacaacgaatctgccaagtgtctgcaaaaacaacatttcttttaaaacattacaactgattttgaagtgtaatcatatttgacacccatcaagattcatatcaaagcatattttcatcaaagaagcacaaaaaaactcaattcaaaatccattttatatagattcgtttcgacacacttggcaggttagaagaaccaccacttcctttgccggcttcccttttgagctttcttctgtgactttaacaagatgggttgtggaagaacagccatgcttgagtcttggatgtaaggtctcactttctgctccaacatttcctccaccttctcttgacgccatttagcttcccattgtgcatccaagattttgtctgcgatttctctttgagcattgagaagaactgtcttctcgtacagttttgccgggtttttgagatcctcttcactccaagaggaaatattcaatgggagattcagttcaccccaattctgaggacggggaggtggattgagtttcgtgacttcagcctccagagatttcttagccttgtataagggacattcttcactatgacggggtcttcccgagcacggacaggatcaatggagaccaaggcttcctgcaaatattcccagccaggattgcgtgtagccccaagtcccgaagttgatcatatc

SEQ ID NO: 99383 - DNA, 453 bp, Arabidopsis thaliana columbia
gatagcttctctagcagctcaaatccgtcccttcacatgtttggccgcgtctctgccgtcacggttggcgcctcatccaccagacctcatccggtggatcaagcgagaaggcggcttcgttcaccacgcggttaagctctctcaggagactcaatttggtatcggactcatttccaccgagcaaatctctccaggcaccgacctaatctctctccctcctcacgttcccttacgcttcgaatcagatgattcgtcatcttcatcgtcctctctcctctccgcattggcccgtcgtgttcctgaagaactgtgggcaatgaaattgggattgaggatgttacaagaaagagccaatgcagattctatctggtggccatacattagcaatctcccggaaacttatactgttcccatattcttttccggagaagatatcaaaaacttgcaatatgc

SEQ ID NO: 99384 - DNA, 708 bp, Arabidopsis thaliana columbia
  unsure (1)..(708): unsure at all n locations
actatagatgagctatgacgccgcatgcacgcgtacgtaagcttggatcctctagagcggccgccctttttttttttttttatagaaaatggtttttcatagataataagaccgataattacaagaccttgaggaatttgttgatggagctcctcccactcccctagattactcactaaatactcataaaactctcctaactctcttagacttcttatatagataagactcatgagcacaacataagcttaaccatagttacttgccattacccacaccaaaccatggttaatctataatacgtgcaattctaatagagcctttgagccttgaagcccactgactgtatcactttctgcattggtctcaatcagaggtgatctttcttgcctttcttcagcagctttgacatatgattcacctgctcatgactttccttagcccctcccttcagccattgtatagcttcagctgccgcatccttctcagcactcttcttgttgctgcaaggctgtcccatgatctgtgtctcgttaaactctactgttgtttggaacttgttgttcttcaactgcttagtcttatacattcggactgtataaccagncctcgtgagtattgtttggagctgacttttggaattgtcaccccccggcccactttcggtccttagaaacaatgacggttttgttgacaacgccgatattt

SEQ ID NO: 99385 - DNA, 798 bp, Arabidopsis thaliana columbia
  unsure (1)..(798): unsure at all n locations
ggaacttcgatcgtagaaaccttgaaaatccgagacatccacaatgccgccaaagttggatccgagtcagatcgttgacgtgtacgtccgagtaaccgggggagaagtcggagcagcgagttctctagctcccaaaatcggtccgctaggtctcgcaccaaagaagatcggagaagatatcgcgaaagaaaccgcaaaggaatggaaaggattacgtgtaaccgtcaagctcacagtgcagaatcgtcaggcgaaagtgacggtggttccatcagcagcagcactcgtcatcaaggcgttgaaagagccggagagagataggaagaaggtgaagaacattaagcataacgggaacatctcgtttgatgatgtgactgagattgctaggatcatgagacctagatctattgctaaggaattgagtggcacagtgagggagattctgggaacttgtgtgtctgttggttgtactgtggatgggaaagatcctaaagatattcaacaggagattcaagatggtgaagttgagattcctgagaactgaagaatttggaaatgatggtgtgtttgttatcctttgccttttgagattttagtttcttcttcttatgttttgtttagaacaacgacaagtcagttttggattgttattgctgcttttttatctaatctcaattttatgcttatgcttagtttctttcaattttataaaaaaaaaaaaaaaaaaaaagnnnnnnnnnnnnnnnnnnnnnnnnnnnnnnnnnnnnnnnnnnnnnnnnnnnnnnnnnnnnnnnnnnn

SEQ ID NO: 99386 - DNA, 754 bp, Arabidopsis thaliana columbia
  unsure (1)..(754): unsure at all n locations
ggcnnnnnnnnnnnnnnnnnnnnnnnnnnnnnnnnnnnnnnnnnnnnnnnnnnnnnnnnnnnnnnnnnnnnctttttttttttttttacagatcaaagtatgcggttctaattatttaatcagtacataccatttttagttacactgacagaatgagattctaaggaagtagaatgtgttgcaaaattcaatcgaaagggtcgatacgaggatcatgctcactggccatagccattcctgtgcacagacatgtcgggcacatcacctttccggcacctgaacagtttgaacatctttcggttttgggcggtgatagagaatgattcccaccagcaatagctgagactggttcagttaaaacaagagcacctgtgctagagcaacgagcacatgctagatacccagttcctagacagtatttgcatctcttgtgctcttgctgctttacgttgttaacttctactaccatcaaagccgaaatcacaccaaccgctcctccagaaaacgacgctactatcgggtccacttgactcaattgcataggtagatgaaggctttgaatganatctgcatacgatgtacctcctatacctaacttcagctctagagtaggagctagtagaccaccgaataggataatccccgcgatgagtgagaaacaagttgcgtaatagactttcaaattggcagcagtcaatggaggtagaatggggataaagatgggaaataggtaattcatgttcttggtcttcgt

SEQ ID NO: 99387 - DNA, 610 bp, Arabidopsis thaliana columbia
  unsure (1)..(610): unsure at all n locations
nnnnnnnnnnnnnnnnnnnnnnnnnnnnnnnnnnnnnnnnnnnnnnnnngaaagaagacgacagaagggggctaactcccaaaaaaaaaaatggcggcgtttttgcaaacgaacatcagtctgaatgcgatcaagatcgtcccggggaaatacagttctctcaccgatcatcagtttcgtgcgccgtatcgaattaggtgcgccgccgcttcacctgggaaaaaacggtataacatcgctctgcttcccggagacggtatcggtccagaagttatctctgttgctaagaatgtgcttcagaaagctggatctctcgaaggactggagtttgatttcaaggagatgcctgtcggaggagcagccttggatttggttggagttccattgccggaggaaactttcacggctgcaaaactatctgatgccattcttcttggagctattggagggtacaaatgggacaagaatgagaaacatctgagacctgagatggctctgttttaccttagaagagatctcaaagtctttgctaatttgagacctgctacagttttgccacagctagttgatgcttccacactgaagaaagaagtagcagaaggtgttgata

SEQ ID NO: 99388 - DNA, 412 bp, Arabidopsis thaliana columbia
gttctattgataaattttatatcaaaaaccttaaaaagtttcattggtttacaaattttaccttttttcgttgtgtgttgcgtgtgttactaaatcactgaagagggtaaagagaaaaacataacaaaaagttcttagctttggatgaatctggaagtgatccaaaacactggcttattccactcctcttctctagggttgaattgttagttaatagatggcgacacttcaggatattggtgtatcagctgggataaacattctcagtgcctttgttttcttcataatctttgcggttttgaggcttcagcctttcaatgatagagtttacttctcaaaatggtatctcaaggggttaagaagcagccctgctcgtggtggcgcctttgcgcagaggtttgtgaacctggac

SEQ ID NO: 99389 - DNA, 737 bp, Arabidopsis thaliana columbia
  unsure (1)..(737): unsure at all n locations
ggcgaactatagaattactatgacgtcgcatgcacgcgtacgtaagcttggatcctctagagcggccgccctttttttttttttttaagaaaaaaaaaacatatagagaaaatcttgcaaaccataagtcaccacagaatcaatatcacaatatggtgtgtgctacacaacatgaacaagtaattaagcaaatacacggtttacaaaacaccaaaccatacgacttagtgagacaaaaacataaacgtttaaatcaaaggatggagcaccagccatgagggagtttagacgcagcagcttggtcaaggaaccaaaccacttcaacatccgcggttagtctaccagctggtaagtctttggtatgattaagagcagccgcaaccgaatcagcctgctctttatcacatacggccataacattataggaagcacaattgataaccggtaaagtcaatgtgatcctttttgacggtggcttaggtgaatcggttatagatgggaccatttcaccttctcattgatctgagcatgtacagggatagagacgccatgtgaccgtccggtcccatacctagaagctgaagatcgaactggggaaaacagaagattgtacgtcggattatgttnagttcactttttgttgaaggactcccgaacctttagctggtagtcggggttgccttctgccccatccgtatcatagcgaaatgtttcagtgaatggaaccttgaagaaac

SEQ ID NO: 99390 - DNA, 702 bp, Arabidopsis thaliana columbia
  unsure (1)..(702): unsure at all n locations
nnnnnnnnnnnnnnnnnnnnnnnnnnnnnnnnnnnnnnnnnnnnnncccctcgagtacgacggtatccataagcttgctttcgttttcgcggccgataagaacacaacaccattcagataactcttttaaatcccaaatttggtttatgatgatggatcatctgagttttatttatttattaaaagttaaaaccagagtcttgctgaaactgaaactttcctcagttcatcaatgcttctgctaatggaaatgtcggagatatatccaccggtaccttaacgcgttcgagattctccagagcggttttcaatggtccggtgatagtgcagtacttatttagaagcaatgttgctgcgtttttgtcaccttttccttgaatagttagtatctcatggctcaggctctcaactgcaccttcgatcttagcgaaatcaaccgagaatgtagagtcctcgtggaacacgaaggctcctttttcatataaataggttgaattgcaaggcttgccctttcccatgagcttctgtgagaccaaaccggatcgatctaaagcaaccagctaggaacgaaacatacatactctccaccatactctttgaaagcaaccccttagtgatgagactcttcagtgcccaaagaccaactatatctgcctttgcttcttccattgcaaatggacttcttggagtcctttctcactg

SEQ ID NO: 99391 - DNA, 809 bp, Arabidopsis thaliana columbia
gtagaattgtcatcttcgcaaaagcttcgagagtagtgcaatcgaaacaagtcatggatctttcgcctgttaaggaagctttggccgccaaatcctttgacaaaatcgccgatatctgcgatactctcatgcttcaggttgcttccgaaggaattgaatatcatgatgattggccttacgcaatccatcttctgggttacttttacgttgacgattgtgatagcgcacgtttcctctggaaaaggatacctacagctatcaaggagaggaagcctgaagttgttgcagcttgggggattggtcagaagctgtggacacacgtctatgcaggtgtatatgaagctattcggggttatgattggagtcaagaagctaaagatatggttgctgccttctcagatctttacacaaaaaggatgtttcagcttttgttgtctgcctactccacaattaccatccatgatttagctcttttcctagggatgacggaggatgatgccacaacttatgttgtagaggaatggatggaccagtgggatgcagcttcctcaaatgggcggagttgttgaaggaaacaagcttgttaaaaaggaggagcaaaaaaggctggattcatccgcaagctacaaccgctttgaccggcagtatgttgttccacctttgaaccatttaaaacctaaagtgcccgatctcctattaagatagtgaaattctaagaacagaattcgtttttgagagatttcacaatgactgattctaagttgcaacatatcttgactctttgagtatatgatgaataactcctacca

SEQ ID NO: 99392 - DNA, 709 bp, Arabidopsis thaliana columbia
  unsure (1)..(709): unsure at all n locations
nnnnnnnnnnnnnnnnnnnnnnnnnnnnnnnnnnnnnnnnnnnnnnnnnnnnnnnnnnnnnnnnnnncttttttttttttttttttgacgagtaaaatccattacttagggaacaagtttatatttgcatagaacatacaaaaatgttaacaatctatgagtgaagtttatgtaaattttcctagactgaccttttgagtgaaactactctatgcccgttacaaactaacagtacggggttacattagccttgtcgacacacgaaggcctcttcgctttatagtagaaatgcgcaatcatatgaaccaattcatccgccgtgcgaaagtctttctccctgtacagaatccggtttccgcgtaagaagagaatctgtgggcattccttagctttaagagcatatgccaaatctgtctcgatgttcaggtcaatcttaaccgcccgtggaggtaatcgatctttcgcatcccaataaactttgatagctttctcaagctccttcaatgtcttccagttatcactagctcttttgtatcgctcgaatacaaggacaacgagtggactaggatgaaaagcaaagctttnccattccaaacaattgatctccttgacccaactatcatcaatctcaccttccaatcattctcactcccatcatctccaaaccacgttttgattggatgtgtatcgaaatactccgaagctttga

SEQ ID NO: 99393 - DNA, 824 bp, Arabidopsis thaliana columbia
  unsure (1)..(824): unsure at all n locations
gattgaggcgannnnnnnnnnnnnnnnnnnnnnnnnnnnnnnnnnnnnnnnnnnnnnnggccgcccttttttttttcttttttttttttttttgggtaaaatgtggacttccatcattctgactataaaattgaataggtgtgtacaacaaagaggaaactgatatgactggaacaacagttagaagaacacaagaccaatgctcccagaaataccagagagttttggaataaactgtcatgtaggaataactgaaataaccgccacaatgagatcaatcatcactcttctctgcttagcctctcccttttgcatataggatcaagccaatgatgcatcaaaagggtctattgtaaagaccaagcaatggtttttctctatcttcaactcgtttcctagcagcttctcttgccttcaatgcagctttctcttctgcagatactttcttcggtttctcatcttgcctctttctcttgttgttgccaagatcaacagatgaagccgctcctttcacagctcttttaggatttaaagaagctgtgacaagacggccaggtggtttccccacacttggtccagctcctgaagaagatacaggctttttcacgagaggtactttggttcctgatgatgttttaaccgcagcgtaggcctcgtcttgtgtcacccaatgtcctattgagtcactgtaatagaatccagactgtgaatcatagtgcagaccattggtctgggttgaataatagcctgaagcactgtcgagcttncatcggatgtccatcctctggtgaccggttgcttagctacttgctgacagttgaata

SEQ ID NO: 99394 - DNA, 430 bp, Arabidopsis thaliana columbia
aaaacctcaaatcggaaaatccgacattcgaaagacgccctaagtttcacaacatgggcatcgctcgtttcgctacgcggtcactcaacaacgtaacgttccttcgaccatgtcgtcccatcgtctctagaagcctcgccaccaacgccaacgaagatccaaaccagaatcgatcttcttttgactcatcggacaatttggattcgttgtttggcgattacactggcaacgatgagaaaagcaatgatttcttccagcatcttagtaaagcggagaaagataagcgcgatttcaatggctataatagatcaggagggtcgagatactccggtggtggttcaatgagcaaagacgagaccttcgatccttcatctgatggtgttgatggaaaattgaaagaagctgcactagcttacaatatggatgaagg

SEQ ID NO: 99395 - DNA, 633 bp, Arabidopsis thaliana columbia
  unsure (1)..(633): unsure at all n locations
gagaagccaaaaccaccggtttctgtcacacccgcttcaaggggccatncntttgtccncnccattttaaggatcaggcccgttttccaanggacatagggcagggtttacgcctgnggggctatngccagntcaaaccctaaacggcaatccacatccaatggccttgcatatggnatggccggtctcccgtgtcagccgcaaatgttctggnctcgcccattgccatttgaaagtcattgaacatcctttccaagagcactcgaaaggtctttcatccttatgcacacgttgatgaagcaccagatatttgtgagccctgaatttctttccacacccttcgtgagtgcaacggtttctcttgtgagtttgtaatttcgctttactctcaaaagtcatcttgcatccctctaggtaacaacggttggggtgagttgtcgtggggacttcttgctgacgactccctgagcaagcctttggtgttttcttcagccttttcgcaatgggtttcttctcttcatcactcgtttcagtgtgctttaatgaagtttcacatgttgctttcctcttgccccttgacctcaacccttcacaaggactccttatgaaaccaatgctactctctggattatc

SEQ ID NO: 99396 - DNA, 913 bp, Arabidopsis thaliana columbia
  unsure (1)..(913): unsure at all n locations
nnnnnnnnnnnnnnnnnnnnnnnnnnnnnnnnnnnnnnnnnnnnnnnnnnnnnnnnnnnnnnnnnnnnnnnnnnnnncttttttttttttttttttgggattaaatgggtgagtcatgcgtattaacattttgaatccaatcgttacatgtttaacaacgaatctaaacaagagtgcgaggccttctcaaaagtggaaagaagtcacatctatactacataaagagatatagcaacggtctaaaccactagaaaagaactaaaaaaaccaaccagatattacatgttacaacaactctcgattccaaagagaggccatttcactttgttcagccaccatttttaagcattcagtgccgttttttctatgtgacatagtgcatggttttacgtctgtggcgactatagtcagatacaaacctaaacgacaatccacatccatcgaccttgcatatgtatggtcgctctcccgtgtgcagacgcaaatgttctgtcctcgcccattgccatttgaaagtcattgaacatcctttccaagagcactcgaaaggtctttcatccttatgcacacgttgatgaagcaccagatatttgtgagccctgaatttctttccacacccttcgtgagtgcaacggtttctcttgtgagtttggaatttcgctttactctcaaaagtcatcttgcatccctctaggtaacaacggttggggtgagttgtcgtggggacttcttgctgacgactccctgagcaagcctttggtgttttcttcagccttttcgcaatgggtttcttctcttcatcactcgtttcagtgtgctttaatgaagtttcacatgttgctttcctcttgccccttgacctcaacccttcacaaggactccttatgaaaccagtgctactctctggattatc

SEQ ID NO: 99397 - DNA, 846 bp, Arabidopsis thaliana columbia
  unsure (1)..(846): unsure at all n locations
gcagtaccggtttcggattcccgggtcgacccacgcgtccggtttatggactcaagccctgattcttctgtggagtttcatgaggagagaagtaagaatcctaaaaggaaaaaggaagtgcaagagtctcctccagtgaaggtaaccaaagttacgagagagggaaggattgttcgttgtggcagatgtggtgtaattggacacaatacgaggaagtgtggtaatgttggggtggagtatataagaccgaagaatcggaacacatcagatgaaggatttgagttcatggatctagactacaacgaagagccaagtcaatcttcggttaatttgtagttttcgaaggtttattttagatgatgtgaacatcttttgcttacaagtggaagtgatgaatgatgattttagttcaggcgtttttggatgcaaaattctgtaaaacttagcaacatgtgtacgcattacagattaatcttacaaaatcgccatagttcgtgaaggaattagccgttttctcaactttttgactatgaaaatttaaagagcaaaatgataccacaagggattaatctcactagttcaacataaagattttacgaatttggtttttaagtaaacataatttcaaagaagangcttcaccatgtaaggaccttccaattcataacccaactttctgtagtaatggctgggttcctacaccagaaatcacaccggattttggtaagatcgaggtccccttctagnaanccccccngggttcttcccaccggagggggaaccagngccccggntnngggaaatttnnggacccggcccnnaaggggggaaacnggtncccggana

SEQ ID NO: 99398 - DNA, 771 bp, Arabidopsis thaliana columbia
  unsure (1)..(771): unsure at all n locations
gnnnnnnnnnnnnnnnnnnnnnnnnnnnnnnnnnnnnnnnnnnnnnnnnnnnnnnnnnnnnnnnnngctttttttttttttttggattaatctcactagttcagcataaagattttacgaatgtggtttttaagtaaacataatttcaaagaagatgcttcaccatgtaaggaccttccaattcataacccaactttctgtagtattgtctggttcctacaccagaaatcacaccgattttgttagatcgatgttctcttctagcaatcctctctgcttcttccatcagaagtgtaccatagccctgatgttgcaacttatcagcatctcgaccatgaactggtacagctgttccgcatacatgaagctcaccgacaacagaacactttcccatgggttctggacacgttacattcttcccgcattttcgcaaacgtagcaatccaacaagaatggcctggcgtgtatcttcttaagaaaggaacgtctcccaaccttcattggcagtgtaatcacgacgcacaagctctactggctctggcttattttatgatgaatggcctgaatctcagtttcacgagtacggacatcacggcattttagggccaagtcttncattctggctagagccaggtcacgaagatttcctttttctacccttgccgaaccagaggcataggattatcacctgactttatatcacgtggccatggaggtccataggaagagatcctgcacttttccacagctggtaggtggatatttcggcct

SEQ ID NO: 99399 - DNA, 607 bp, Arabidopsis thaliana columbia
  unsure (1)..(607): unsure at all n locations
atgatcctgccagcatcnnnnnnnnnnnnnnnnnnnnnnnnnnnnnnnnnnnnnnnnnnnnnnnnnnnnnnnnnnnnnnnnnccacgcgtccggagatgtacctcaagcattgatgaacagaaagttgatatctcttgatatgggtgctctcattgctggagcaaagtatcggggagaattcgaagacagactaaaagctgtgcttaaggaagtcacagactcagaaggccaaatcattttgttcatcgatgagatccatacagttgttggtgcaggtgcgactaatggggccatggatgctggtaatctgctgaaaccgatgctgggccgaggcgagttacgttgtatcggtgcaaccacgcttgatgaatataggaaatacatagagaaagatccagccttggagcgtaggtttcaacaggtttatgttgatcaacctacggttgaagacacgatttctattctccgtggtttgcgggaaaggtatgaactacatcatggagttcgcatctcagatagtgctctagtggaagctgctatcctctcagaccgttacatcagtggccggtttctacccgataaagcaattgacttggtcgatgaagc

SEQ ID NO: 99400 - DNA, 971 bp, Arabidopsis thaliana columbia
  unsure (1)..(971): unsure at all n locations
gaggctcttcgtgtcttcctctctattctccaaaccatcccattggtggtagttgagtcaagaagagaagtagatgaggttaaggaactggtcatcattgttaaagaatatgacctcggtcttcaattggagctcaagaggagagagatgaccgcgcgtccgcccacgcgtccggagctcgctgcttacttcactcactgtaaacttcaaacacctcacctacggctcgcgtacttcagtgcaatgaccgtctgctacaagtcaaagaacatggctactgctgctcacttcgccagaagtttgttggatacaaacccaactattgagagccaggccaggacggctagacaagttatgcaagcagctgaacgcaacatgacagatgcaacaacactcaactacgactttagaaacccgtttgtgatatgcgggtccacttatgtgccaatctacaaaggacagaaagacgttgcatgtccttactgcactgcccggtttgtaccaagccaggaaggtaacatttgctcggtctgtgatcttgcagtcattggcgcagacgcatctggcttgctatgctctgcctctcaagtccggtgaacaagtcagaatgattatgtgcttcaatcgtgaggtaagcacgagatgctcttttatggaagaagagtgttgagcttttggtgtttgtgaattttccgctgcaacttctattactctttaaagtctttatgttgtttcttatcttagtaacaaacgcatgagaactttatcttcttgctttatctctttttgtttgattttatttttacagtctcaggacatttcatttaggcttatcggattttaaactcgattgagaaatatagacgtaatattttataaattttcaaaaaaagaaaaaaagnnnnnnnnnnnnnnnnnnnnnnnnnnnnnnnnnnnnnnnnnnnnnnnnnnnnnnnnnntgtcctaaaaac

SEQ ID NO: 99401 - DNA, 597 bp, Arabidopsis thaliana columbia
  unsure (1)..(597): unsure at all n locations
attaggcgcactatagaatagctatgacgtcccatgcacgcgtacgtaagcttggatcctctagagcggccggcctttttttttttttttttttaaagtttctacacattggtgtatataagaagttgaattaaagaaatacaaaaatcgtatggtaatattactccgaaaaaatgctatgctacatggtcatttatctcctttaccagtgggaccagagttggtgatatgaggatttccctggggtcgttgagaagctaaacgccgttccaagggagtcttcctcttgctgacaacaaacctattcactcctttcctcatcggcattatcgacgggaaatcttcgtctgggatctcactcagctctgatatgttctttatctcagcccactctcttaaaccatctttctgcttttgcttcctctacatgtccaacaagtctgactcctttattaacgaaccctccaagctctttccatttctgatcttcactgccactgtatcanatttgttgattgaaggttctcttggttcttggtggactacctggaaaacgttttctgtcgccggagctggaagagtatctatngattcctt

SEQ ID NO: 99402 - DNA, 737 bp, Arabidopsis thaliana columbia
tgatacttcagctctctacgactcactattgggaaagctggcacgcctgcaggtaccggtccggaattcccgggtcgacccacgcgtgcgcccacgcgtccgcaaatcttccagacattcttcttctcgcttttttccccatttcaacttttttttttcctctccagtgcactaggaaacaaaaaaaacccaagatctatagttcgatcggatcgagagaagctcgaaaatggcgctggcgttcgatgagttcgggcgtccgttcattatactgagagagcaagatcaaaagactcgtcttagaggaatcgatgctcagaaagccaatatcgccgctggtaaagccgtggctcggatccttcgatcctctcttggacccaaaggaatggataagatgcttcaaggacctgacggagacatcaccatcacaaacgatggtgctacgatattggagcaaatggatgttgacaaccagattgcgaaactaatggtggaactgtcgcggagtcaggattatgaaattggtgatggaacaacaggtgttgttgttatggctggtgcacttcttgagcaagctgaacgtcagttagatagaggaattcatcccattcgtattgctgaaggatatgagatcgcttctagggtggctgttgagcatttggagcgtttttcccaaaagtttgaattcgatgttaataattatgagcctctggttcaaacttgcatgactactctgt

SEQ ID NO: 99403 - DNA, 747 bp, Arabidopsis thaliana columbia
  unsure (1)..(747): unsure at all n locations
tnnnnnnnnnnnnnnnnnnnnnnnnnnnnnnnnnnnnnnnnnnnnnnnnnnnnnnnnnnnnnnnnnnnnnnnnnngctcttttttttttttttcgaccaaaaaaacgcatttcggatttcaaaaggaatgttacaaatgtaacatcatcgctgatctatttacaacacaaagttttactttaaaatcgtcatggcatgatgatgttgtgatagagatgacgatgaagaagaatggaggaagaggcagacgactgacatatcatccatggagtatcctcgtctctttttcttccaagcccgaaccgcttgctctactaatcgcttagccgccttaggccgctcagccgttgaggagacaatctctatagcctcttggttagagatcacatcccatatcccatcactggccaagattatgaagtggtctttagtagagatgtgtctttgagtgacttcagggactgagaccaatccatactctttaatacagtagtctccgaaggctcttgacattgcgagccccggtgttnctgggtctggctgcccacacgatgggctcccggctatcatctagacagaaaacccgccctttgcagccaattatccgctccttctcctgtggtagattcggttagaatcgagggtgagctgaaccgcaccaagcttcctcatccgactccatggtagaccgtcctgagatcgctacatngctacataataacttaccctgtctacataggtagagct

SEQ ID NO: 99404 - DNA, 520 bp, Arabidopsis thaliana columbia
  unsure (1)..(520): unsure at all n locations
nnnnnnnnnnnnnnnnnnnnnnnnnnnnnnnnnnnnnnnnnnnnnnnnnnnnnnnnnnnnnnnnnnnnnnnnnnnnnnnnnnnnnnnnnnnnnnnnnnnnnaaaaacacatcttgtttatatttattgtaacatcaacatacatatttagatgatattgcaaattaaacacagagtcacaaaccacctaagaggctgaacatctgaacacatgtctatattccaaaggagttttaaaagggtttatttcttcaagcttgcacactgaagtacacattgtatgtttcatctcttaggctaaacaatggcgatagcacaaagttcctctgtgttccgctcatcacgaaactcattggattgtattgattcattcctgtctttaaactaaagcttgctgcctgtttaaacttctcatcagtcgcagccgaaccacattcaagccttagtttcgtcccttgctttaatgtttgatcgctggacacaaaacaaccctttttgctctctaggcttaacgacacgct

SEQ ID NO: 99405 - DNA, 1017 bp, Arabidopsis thaliana columbia
  unsure (1)..(1017): unsure at all n locations
nnnnnnnnnnnnnnnnnnnnnnnnnnnnnnnnnnnnnnnnnnnnnnnnnnnnnnnnnnnnnnnnnnnnnnnnnnnnnnnnnnnctttgggtttttttttttgatacttttttttttttttttataaaaacacatttgtttatatttattgtaacagcaacatacatttttagatgacattgcagaacacaaaatcacaaacaaacctaagaggctaaacatctaaacacatgtctatatttcaaatgagacttttctttcttatattttcacccaataagggtttctttcttcaagtttgcacactgaagtacacattgtatgtttcatctcttaagctaaacaatggcgataacacaaagttcctctgtgttccgctcatcacgaaactcattggattgtattgatgcattcctgtctttaaactaaagcttgctgcctctttaaacttctcatcagtcgcatccgaaccacattctagccttagttttgtcccttgctttagggtttgatcgctgtacacaaaacaaccttttttgctctctagtcttaacgaaacgcttcctagcttcccgtcaagtccagatactaaccgaaagctagaagctcctttgtcactaggagaagaagcttgaactgtgagggagctatcagttgcttgctttacaatcatgccagggaaatcaaacggctcaagcatgaccagccttccaattagtccttctggacccgaaatccgtggtttagaattatcagtcacgagcctgaaggtcgctgcaacggcatcttgtgcccctggctcgggtgatactctcattgtgatggtttggttgctattttgaaaactccgtaagatacgtttccagattgttgtgagagtgtggcaaggtaactgttttgagtttcaggtataggggttatccattttccaggtttagcctgagttgtgatgctccagtccctgctcgtgtgtccggctaacaagtagggcccatagagtatggcgtgaagagatgcg

SEQ ID NO: 99406 - DNA, 792 bp, Arabidopsis thaliana columbia
  unsure (1)..(792): unsure at all n locations
ggcnnnnnnnnnnnnnnnnnnnnnnnnnnnnnnnnnnnnnnnnnnnnnnnnnnnnnnnnnnnnnnnnnnnncttttttttttttttttttaagcaaaccaaatccttgttgacttattatataataccacaatacatattcacagagatgatacacccgattcaaacaagttcagggtatttagtcaatatacgaattagactagactgtatatatattagtgtgatcagtaggagccaagagtagtggagaggtctaagcgtgaacgagatcgccactctcgtatagccgatctgagagtgtggttcggtgtaagatcagaatgtttgagccgatgcttagtaacaggagacacatcttgatgtttttgaatccattcttttatcgcttttcgttcgtatgtgaatccatctgctgctatttgtggatcttccattatttccttaagaattggacagtaatagtgagttggtgctcgtgcgttagcttgttctgtcttgagtctactatttgcagattcaagaatacgtttgagagcaggcaagacttgtgtgctaagatctgggctgtctctgcatttgagctgggaacacctgattgcaatgcgagctagttctttcgcttcggctatgggccagtctttgactgatccatctaacatatcttcaaaacagcctctctttactgcatcttcaacgcagaaaagaagaccgttggggatgtcgagcgggtaaaagctggagaattatgattccaaatgcgtaaagatctgatttcggtctgattgggccg

SEQ ID NO: 99407 - DNA, 799 bp, Arabidopsis thaliana columbia
  unsure (1)..(799): unsure at all n locations
tgnnnnnnnnnnnnnnnnnnnnnnnnnnnnnnnnnnnnnnnnnnnnnnnnnnnnnnnnnnnnnnnnnnnnnnnnnnnnctttttttttttttttagtgtttaaaccacatactaatatatctatatattaaaaatataattaaaaaatatataatatcaatctataccgtgaaatacccaagaaattaaagagaacaaaaaaaggagattgtttatagagctatatcttggactcaaaggactagatccttctctctgtagtgtgcatcacaggagatgataaacactatgatacaggtggtctcatcaagaggtttggtttgacgaaaaccatagctttttctggcaaaccagaatcttctcacttttgactgcatactcagtctcctctctccggcaactccaccttatccctttcgctaacgttgtgattgcgtccatgaaataactcgattctcggattataacatatccactcggccgcaagatcctgtccatctctagcaaaatgtacttcatctcacacctgtgactctccaaggtaaaaagactgtcgaggtgaagaagatcatatgttcttggatacgttgagaaagcttcgcaccagtcgtggtaagtcccgatgagaccgcgatcaaagacaacaggaagcgaatttgcgctgtacgatgattcaacgttcatgacccnaatgggatcctcaatganggccgcagagaaccncataaacagtgttatatccataacattcttatcttggctgtcaaagagctggtaaactttcttgaatgctaactct

SEQ ID NO: 99408 - DNA, 917 bp, Arabidopsis thaliana columbia
  unsure (1)..(917): unsure at all n locations
ggcgacnnnnnnnnnnnnnnnnnnnnnnnnnnnnnnnnnnnnnngaaattagcaacaaaaaacttatttgccttttcttgtcttctaagatgaagtgattttcttcttcaattaatctataaaagtacaacaaggttgatttcgggtgaagaaaaactacggagattgaagtagaataccaaaaatatataagtttccagatcagacagagttcttgtcttgtagctgctgttgcttggtttcttcttcattggtctcaatctcagtgatgtcttcatcattacctcctttgtatctataccatctagccatcaacaagaagtaagccatgttaacaaccatgagtcctgtgagcatgaagtagaagtaatccaatttcgcttttgttcagatcctcaggctaaccaattccctgagggtgaatgcccggttgttcgatgaacagttggtttcaaggaagctagcggggtagctcgaaccccctgcaccggcataaaaggtaggacccgcgaagctcttcatgttttcagggaaactggcttggtagtaaaactccatttggccaatggcagcaaaagcttctgctatgcctgcaagtgtaagctgcggaatcagccacaacgctgacattgatgagatttctcctgtccgaggcgccatcccgagtgtcggtttggtcaatgcaaagtttcttctcctttcctctataaacccggaaactaataaactcattatcgcaaatgtaaacccagctccgattctttgtaagagtgatataccggtttctaacccggtcactcttctgagcgacgggacaagtacacggtcgtagaatatgatgaaaactgtcatgccagtcatcaagaacactacataggtggccgcaggaatcctgaagccaccagaacctaatcgtc

SEQ ID NO: 99409 - DNA, 1238 bp, Arabidopsis thaliana columbia
ccacgcgtccgttggatcaaatttaaaaagatcgaacctatgctcaccgaagaatctatcgatttagaagacccctccagtttcccaatggtccttattcagatcccaatgtgcaacgaacgagaggtgtatgaacaatcaataggagcagcttcacaacttgattggccaaaagataggatcttaattcaagtattagatgattcagacgatccaaatttacagcttttgatcaaagaagaagtatcggtttgggccgaaaaaggcgtaaacataatttacaggcataggttgatcagaactggttacaaagctggcaatttgaaatcagccatgacttgtgattacgttaaagattacgagtttgtgaccttcttcgacgcagatttcacaccaaatcctgatttcctcaagaagactgttcctcatttcaagggtaatccagagctagggttggtccaagcaaggtggtcatttgtgaacaaagatgagaatctcctcacgaggctacaaaacataaacttatgtttccacttcgaagtagaacaacaagtgaacggtgtgtttctcaatttcttcggattcaatggaaccgctggagtatggaggatcaaggcattggaagaatccggcggatggctcgagagaaccaccgtggaagatatggatatcgcggttagagcgcatctcaacggctggaagtttatttaccttaatgatgttgaagtcacttgcgagttgccagagtcttatgaagcttacaagaagcaacaacatcgttggcattccggtcctatgcagctgttccggttatgccttccttcaattatcaaatcaaagatatcggtttggaagaaggcgaatttgatcttccttttctttcttctaaggaagcttattctaccattttactcattcacactcttttgcattatacttccattgacaatgttcatacccgaagccgagcttccgttgtggatcatctgctatgttcctatcttcatttcgcttctcaacattctcccgtcacctaaatctttccctttcttagtcccttaccttcttttcgaaaacacaatgtcaataaccaagttcaacgccatgatctccgggctgtttcagtttggatcggcttacgagtgggttgtgacgaagaaaaccgggagatcatcggagtccgatttgctagcgtttgctgaaaaggaagagaagttgcataggagaaacctcgagtc

SEQ ID NO: 99410 - DNA, 650 bp, Arabidopsis thaliana columbia
  unsure (1)..(650): unsure at all n locations
nnnnnnnnnnnnnnnnnnnnnnnnnnnnnnnnnnnnnnnnnnnnnnnnnnnnnnnnnnnnnnnnnnnnnnnnnnnnnnnnnnnnnnnnnnnnnnnnnnnnnnnnnnnnnnnnnnnnnnttttttttttaaaactggctattatttataacaaaacaatccaactatactgaataatacagaatcaaactgggatccaaaaacaatttaaaacaaagttggaaactcaaccgaaacaagaacaaatcgaatccgacatgaaacaagtctcacaagtgttcttaagctgacagaaagatggtcaaaaccaaacttaaaaccgtagtaatcgacataacggtcataccattcgccgacgattttttctgccctggagctccagccggcgtagagatatcaccagcggctgatggaccatctcctgaaggacccatcgccgagcctgacggagaatctgacggtgaagaaaaagtaaagcctcccggacccaacgatggagaaacggggggtgagtttgaaacaggggatgaagatttaggggcccttgatccaggtggtgaagccctcggagcagaacacggaagaatagttgaaaatgatttaggggccattggggccggcggggaattcatcagaacagagggtggggaaa

SEQ ID NO: 99411 - DNA, 682 bp, Arabidopsis thaliana columbia
  unsure (1)..(682): unsure at all n locations
gacnnnnnnnnnnnnnnnnnnnnnnnnnnnnnnnnnnnnnnnnnnnnnnnnnnnnnnnnnnnnnnngcttttttttttttttttttaacaaataaatctgtgtttaatatataaaagaactaagtctataggtctatacaaaggacttcagcagtatcaccaagatcttatcaatggagttgttgcataagaagcgcctaactgtgtctaccacacattcaatagaatttcaaagaatagtttatcttgaccttttgatccttgcttggtctttcatggaataattgaaattgctttgggaagccgcgagatggttaaaccgacatgttccaagaagatattctgggagctcctctccggtattcgcctgtattaggaaggccatttcaatcacgagtttgttgaggtacccaggaacaagactcccaactcctcttgcaacagttgatgacccattatcaacgcccagctcaatatagtcctttcccctgaagtagttgatctccagggcttgaccaataaggcatgctttctttcccacacttggcttaactatcccagagcccttggatatgtagggaatgagcttgacccttgatttcctatatgcgtcatcaccattaacaaagctaactagcaaaggatgctcttcatagggagtgctccatcatgaatatagcac

SEQ ID NO: 99412 - DNA, 1035 bp, Arabidopsis thaliana columbia
  unsure (1)..(1035): unsure at all n locations
gtgaatttccacgctttacgttttgtccctcacattacatcactcggtgatgctcttgtcagccgccttagaaacccgtcatggagaagcaataaggaacagaaaaatgttgatcatttaggagacatgaccaacccacacagaagacaagaacccgggaagtttgctgtgcttcatcttcgcttcgacaaggacatggctgcgcattcagcgtgtgattttggcggaggcaaagccgagaaactctccttggcgaaatacagacaaatgatttggcaaggaagagtgttgaattctcaattcactgatgaagagttaagaagtcaaggacggtgtcctctaacaccagaagaaatgggacttcttttagctgctttcggattcgataacaatactcgtctctatcttgcatcccacaaggtgtatggaggagaagctagaatctcaacattaagacaagtattcccaagaatggaagacaaaagaagtcttgcatcttctgaagaacgagctcgaatcaagggcaaagcttctttattagctgcacttgactactacgttagtatgcacagcgacattttcatctccgcatcacctggaaacatgcacaacgctcttgttggtcatcgaacattcgagaatctcaagacgatcagaccaaacatggcgttaataggacagcttttcctcaacaaaagcatcacttgggtagattttcagcaagcgcttggtgaaggacatgtgaatagacaaggacagatccggttaaggaaaccaaaacagtcgatttatacttatcctgctcctgattgtatgtgccatgtttgattagtttttaaagtcttgatctttagatatttcttataagaataaaaataaaaactctgattcttgatgaggctagtttgtgtttagatttgtgttcttgaggcttaataaaaagcggccgnnnnnnnnnnnnnnnnnnnnnnnnnnnnnnnnnnnnnnnnnnnnnnnnnnnnnnnnnnnnnnnnnnnnnnnnnnnnnnnnnnnnnn

SEQ ID NO: 99413 - DNA, 907 bp, Arabidopsis thaliana columbia
cgaggacggcataacaacacctgcgagctcccatccatcaccggaacagcagcataccagcacggcccacataaacaacacaccaagccgcctcattcctccccagccagccgccatcaggtgtattccgagcaaccccactctcctggcaatccagcaatattggcaagaagatgtgaatctcaatcctgataaagtaaaagtcagacgtgtcctcaacccaaagaaatggacttctttagcgcttcggattgatacaatctcgttctatctgctcccacaaggtgtatgaggaaaagctgaatctcaaattaggcaagtttcccaagaatgaagacaaaagaagtctgccatcttctgaagaacgagctcgaatcaagggcaaagcttctttattagctgcacttgactactacgttagtatgcacagcgacattttcatctccgcatcacctggaaacatgcacaacgctcttgttggtcatcgaacattcgagaatctcaagacgatcagaccaaacatggcgttaataggacagcttttcctcaacaaaagcatcacttgggtagattttcagcaagcgcttggtgaaggacatgtgaatagacaaggacagatccggttaaggaaaccaaaacagtcgatttatacttatcctgctcctgattgtatgtgccatgtttgattagtttttaaagtcttgatctttagatatttcttataagaataaaaataaaaactctgattcttgatgaggctagtttgtgtttagatttgtgttcttgaggcttaataaaaagagtatagtttgattagaaaaaaaaaaaaaaagggcggccgctctagaggatccaagcttacgtacgcgtgcagtcgacgtcatagagcttctatagtgtgacctaa

SEQ ID NO: 99414 - DNA, 1325 bp, Arabidopsis thaliana columbia
gattaaaacatatttatcacattttctcccagggtgcttagcaaataacaactgggctctcgtgacttctccttgcaccctataatactctacacgcgtgacatctacgcgctggtgtgaacgcgtgtaagctctagtcccgcgttgagctgtcactctctgtgccgggcctcttcgcttcccctctctccttctccactaatcttacactaattattaaactaatcacccattaactctaaatctcagcaaatcataatctcttataaagaagacacacatctcctaaatctgacccttattattattcattctctctaatcaaatcctcttctctctcaaatctcaatctccgattatgacagacgacagagtttaccctgcatcaaaacctcccgccatcgtcggtggcggtgccccaaccaccaatccaactttcccggcgaacaaagctcagctctacaacgcaaatcgtcccgcttaccgtccaccagctggtcgtcgtcgtactagccatacccgtggatgttgctgccgttgctgttgctggacgatattcgtaatcatcctcttactcctcatcgtcgccgccgcatcagccgtcgtatacctaatctaccgtcctcaacgacctagcttcaccgtctctgaactcaaaatctccactctcaacttcacatccgccgttcgcctcaccaccgccatttccctctccgtcatcgccagaaaccctaacaaaaacgttggattcatctacgacgtcaccgacatcacactctacaaagcatccaccggaggagatgatgacgtagtcattggtaaaggaacgatcgcggcgttttctcacgggaagaagaacacgactacgcttagaagtacgatcggaagtcctccggatgaactcgatgagatctcggcgggtaagctgaaaggagatctgaaggcgaagaaagcagtggcgattaagattgttttgaactcgaaggtgaaagtgaagatgggagctctaaaaactcctaaatcaggaattagggttacttgtgaagggattaaagtggtggctccgacgggaaagaaggcgacgacggctacgacttccgccgctaagtgtaaggttgatccaagatttaagatctggaaaattactttctaaatatagtaaacaaaataatggaatcacattcttagttttttcttcattttctttttattactccattgtttcaattttcatttctttttaaatttgatttcatatacagttctttgattcctgtaagactttatttttttggtttatgtaaatggagatataaatatttgtg

SEQ ID NO: 99415 - DNA, 477 bp, Arabidopsis thaliana columbia
cgtagcttggatcctctagagcggccgccctttttttttttttttgaaagaatctttcttcatgaagctgacatttacaaaagataacaaaaactcacaatcttaatgggtatttagaaaagacattaagcattccaacaaagattcttgctctgcgagccgaaaaacaaaatcaaaaccaaacaaattcacaatcaagtaaccacaacaagagttggggattttactcaaattgataagcggatcattcattcttcaaacttcagaagctggcaaaaagtgaagttacgatccttggcttgtaattctgcaactctcttagcagcacctgaatcacgagggctccctcccacacgacgaagcgttctgatcttaggtagctccttaactataggagactcgtcaccgttctcaccactgctatacagatcaacttcacttggaatctcccatctcttcttcactctcccttcactc

SEQ ID NO: 99416 - DNA, 529 bp, Arabidopsis thaliana columbia
  unsure (1)..(529): unsure at all n locations
gtnttctgctgtcgagtcgaatccaatcgaaatcgaatcgaaattgagtcgagtcatcatctcctccgccattatcgtcttctctctctctctctccgccacctctcttcaattctgacgcttctcagatcctccgatccggcggcgttacttttgctgatacacttctctccatttcttctttttgttcgccgagaagctaaggagaattcttcctgaaaacgcgttgatggatctgatgtatagctacggattagaattgtgtaattctctctaaaatctgttcgttgaccagctcgaacgaggtttgattgggtttctctgtttatgctcatcaggggttttgttttgtgtatgccttccgatcactgtttgtcgtctgtttcgtccgcggaactcaagagcagagagattgttagtgtacggatatgcagaagagtggtgttaatcggaaccctccttgaaagaagcattcccaggananagngntagacgtaaggtttgnccaaaagaagggggtcagagcttc

SEQ ID NO: 99417 - DNA, 518 bp, Arabidopsis thaliana columbia
atacgactcaccttaggggaagcacgtacgcctgcaggtaccggtccggaattcccgggtcgacccacgcgtccgctctttctcttctctctgtgttaccctcttgaaattttccgcgaaaaatctcaacttttccatctgaaaaccccccaaaatcaaacaattggatcttgatttttagctgtgatttagtgattaagaggcttagggtttgtggcgaaatgttggtacagagaagagtaatgagttggagaagagtctggaagtcgtttcaagcggcttctgcgcattgtttactcttctccttcacgcttcttctcgctttgaagcttgatcatgttggttctcattcatggtggtttgtatttgcacccttgtggttgtttcatgctgtgattgctcgtggtagattttcattgcctgctccatcaatgcctcatgatcgacattgggctccttttcactcggttatggcaacaccccttcttggtgcttctgagaccctcctcctggcacat

SEQ ID NO: 99418 - DNA, 568 bp, Arabidopsis thaliana columbia
  unsure (1)..(568): unsure at all n locations
cnnnnnnnnnnnnnnnnnnnnnnnnnnnnnnnnnnnnnnnnnnnnnnnnnnnnnnnnnnnnnnnncttgtggtttttttttttttatccaataccaaaccaaaccaactatttattaagtcaaaggtaatccaatcagcaatttcaaatctaacaaagcaacaacacacagtgaaaaaaatccaatgagatagaatcaacagctttatccatggctgagttctaatatctaaatgatgctcaacactactttacaagaatctcttgagtcttggagtcttcaggatcagttttgagggatgtttgatcattgtacaataccgtggtcacgaaggatctagaaattttcttgccactgcaaacttttcagtcatccacaggatgttctcgacttcacaacattccaactttgtcaaaagattggagattctcagcgaattttttgaagtgcgtcttcactcatctcaactttttcggactacacccggaaagatcttgttcttctcggaagcagcagtgggagaaacttgaccacagagctttgatttcatctctaagcaagatttgag

SEQ ID NO: 99419 - DNA, 459 bp, Arabidopsis thaliana columbia
gagggagactgagaatcatctgagatcggaaacgacaaacctaattttcccgaagaatcgagaccattatgtggaggagaatcgtttcatcgcatcttaaatccatctccgccgtcgggtcctgcgcggctccgtcgtgcaggcacgccgtcgtagagtccactcacctttctctctcgactcgtgcatcctccattcccgcatattcctccatattctctcgtttaatcggctccgctgcagcggatactgctgtgaagaagcgtgttgaagatgtgatgcctattgcaaccggtcacgagaaagaggaactacaagccgaattggaggggaggaagctggacgatatagactttcctgaagggccttttggaacaaaggaagctcctgctgtagtcaaatcctactacgacatgagaatagttggttgccctggaggtgaaggagaggatgagcatg

SEQ ID NO: 99420 - DNA, 544 bp, Arabidopsis thaliana columbia
  unsure (1)..(544): unsure at all n locations
actatagaagattatgacgtcgcctgcacgcgtacgtaagcttggatcctctagagcggccgcccttttttttttttttttaatgataaatagtttttgataagagtctcacttttgagttaattaagacaaaaaaaagtttacaagtaacaaaaaacaaaattttgcatgtgtaaccaaattactcagcagaatctgactcgtcttcttcatcattttctgacactgcgtcctcatctgcgtcagagtcactttccactccatcttccgacaccgcgtcctcatcttcttcagcatcagttccgttttcggcgtctgtttcagttgactcttttgctttcttatcatccttgaggtctttctcgtcatagaagtccctttggacaggaacatctttctgttgttgggtagacatgattccagcaatggctttcaatgcagcagctgcctgactggtatcagctatcggcttccttatccatggcctggcactattactcctgattctggaggccnaattggctanctaaggaggtggggcaaa

SEQ ID NO: 99421 - DNA, 563 bp, Arabidopsis thaliana columbia
actatagaagattttgacgtcgcctgcacgcgtacgtaagcttggatcctctagagcggccgccctttttttttttttttgaatgacttcaaatgtaactaaaaagcttacccgaggatgatggttacaaattattcgagtcataacggtagattttttggcttaaaagtgaaccgtaaccggatcaaacaatagaaatcacataacatttcgtaacttatttgaaagaaaagtctaaatgcgaaattgaaccatatcaaaccgaaattcggagaacatgcaaagaaccaaaacgaagaaaagtctaaagcttagaggatggtggtttcagcaatcatggaggtaactaggtaaggatccatattagacgaaggccttcgatcttcaaaataccctttaccttctttctccggatctcttcctactctcaccgatgctccacgatccgccactccccatgagaaagtgttgatgtctgcaggttcatgcttcccagtgagacgcctctcgttgcgttcaccataagtagcaatgtgttgtgtgtgtttcactccaagcttctt

SEQ ID NO: 99422 - DNA, 677 bp, Arabidopsis thaliana columbia
  unsure (1)..(677): unsure at all n locations
aattatttgggacgactatagaagagttatgaggtcgactgcacgcgtacgtaagcttggatcctctagagcgtgccgcccttttttttttcttttcaatacataaatacgtatccaggacgtgtacctactaatacatggtctctagtacaaaactatacgcagtgtcacatgcatactttactcatgtaggtcacaagttgcttctaaaaggtagacccctcacataaatctctgacacaaccgcgtgtgaccaagaattaacaatatcaggacattatacgattgtaatacattcagatgcattgtcacgaacacaaaaaagtatatatcatctggttggtgtcttagggacagacagatgagggctggagagcaagtgacagtacctacaagatggagaagagcttcttcttttcttcttcttttggggcttcagtgggagtttgatggcaatttccagagagattgggttgcgataagaatcttctctcttccatggaattcaggttctctctcgtgagtgggaaaagaccatttacagcatgaagccatctggcaacttatctaacgccttaggagagtctgggtcacaacctctcctttggacgaaaagtgtgtgcatttgtaccgttagtctactacgtacacctgattcgttggagtctgncgtttat

SEQ ID NO: 99423 - DNA, 805 bp, Arabidopsis thaliana columbia
tttatagaacagctatgacttcgtatgcacccgtacgtaagcttggatcctctagagcggccgcccttttttttttttttttttgatcacaaaaggagacgattctcaggccctgatccattcaaatatgtatgtgcacaacagtgtacgtgtatatatagtctatagacatttaattcaatcttaaagaggaaccatcatcacccgcatagccacagaaatactcctcaaagatgctaatctcagactatataaaccagcattgtgtgacacagtatcccgcaaacaaaaacactgaatttcattcatgaatgtaacctacctgcgatggctgcaacctgaacctccatttgtgccgccctgactttagaacccgtggctcggtggaagaactgttctctcgacaacaacctcacattcctcaaatactgatcaaagggaacaacaccatcttgaaacgacttatccaaggaataaatagcatcttcaatggctaaatccaaagcagtacactctaacatctgcttagagagtgtgtcaccacattcaaaagcattatccacatccaaatcaactaaattcttggttttgccttggtttcttttaacccacgagtctagaatatcagtgttcatggagaaaatctgtaattgttggttcaaggtgtttcttttttccctcaacccattttttttttaaaccccttattattaaagcttcaataccttttttttttttttttttaagcgcccaatcttttggcaaaggcttacaaacaaggcttcccttttgtgttttaaaaact

SEQ ID NO: 99424 - DNA, 804 bp, Arabidopsis thaliana columbia
cgctggatgcacgcgttcctacgcttggatcctctatagcggacgcccttcttccttttttttgtttattgcattcaacattcctgataaatataaagcattccatcatgaaaattcaaacatttcataagtatctactatatttgtaggaaaaagacatgcacctttaatatactctcacaaaattaaaataaacagagtattaattacgaaccaagaaaaggaaaaagataagaggagttaaccggcgattttgtaactcgggttagcgaggttctctaaaccggagacaacttgaatgggattcgataacatcaccaactttaagatcagctggaaaatcttcggtatcagtaacgctagccaaagacagcgtaacgaccatccaagatgttggaattgcttggggggcagctcactctcttttagcagccaaaacacttggcttgatcctgagtcattctcaaactcttctcttgccattgccattgtcccaaaagcgttgaaaggaatcacaacctgagccttgtaaagaccaagttcttcaagagttgagccgtaaaaaggcgttttctctccagtcaccataatctctagaggaaccgtcctcgttttctctgtgcttggatcgataaatccttccgcaggaccctctggatctcccgtttgtaccacaaatccatcagatctctggatctccatgccatcgtagaaatgcctctctaccaagtccacaaagtttccggcggtaacaggggcgttataaccatcaagaacaatgcggaacacacagtcctcgatcgg

SEQ ID NO: 99425 - DNA, 695 bp, Arabidopsis thaliana columbia
  unsure (1)..(695): unsure at all n locations
nnnnnnnnnnnnnnnnnnnnnnnnnnnnnnnnnnnnnnnnnnnnnnnnnnnnnnnnnnnnnnnnnnnnnnnnnnnnccacgcgtccgctacactgtaatgtcatagctaatgctactaactggcggcttaaacctggaggtggaggtgtgaatgcagcaatattcaaagctgctggtccagatcttgagactgcgacaagagtacgagcaaacactcttcttcctggaaaagccgtggtagttcctcttccttctacttgtccattacacaatgcagaaggaattacacatgtcatacatgttctaggaccaaacatgaacccaaaccgaccagacaaccttaacaacgactacaccaaggggtgcaaaactctccgggaagcttacacatctctatttgaaggttttctatcagtagtacaggatcaatcgaagttgcccaaacgaagcagtcaaacagctgtgtcagattctggtgaggatattaaggaagactctgagagaaacaaaaagtacaaaggatcacaagataaggccgtaactaataatttggaatcagagtctctggaggacacaagaggcagtggaaagaagatgagtaaaggatggaacacatgggcattggctctccacagcattgcgatgcacccagagagacacgagaatgtcgtgcttgaatatttagacaacatcgt

SEQ ID NO: 99426 - DNA, 566 bp, Arabidopsis thaliana columbia
  unsure (1)..(566): unsure at all n locations
tatagaagatctatgacgtcacatgcacgcgtacgtaagcttggatcctctagagcggccgcccttttttttttttttttaaaataaaataaacacacttttattggttgatttttgctaaatatagcattttatttcaatatattcgcgcattacactcgtagtcttggttacacaacataatgtaacaatttttccattgaaaaatacaaaaacataactaaactttcgtgtaggccgggagcttattcattatgggtcgagtcttacacaaggctcgtaacggcaccatcatacgcatagccatccccggaccctcactcatatcaatctctttttcgttcacctttttccaatcaaagcattgaattaacgatcctaacgctaatgtcacaatcttgtgcgctagtccaacaccgggacatattctccgtccgcttccaaacgctatcagcatacggacatcatctttttctccttctccaccggtgaactctcaggggtaaaccnctccgggtcnggtccaaagatctnggtcnctanggatcgnccacgggtcaccatta

SEQ ID NO: 99427 - DNA, 508 bp, Arabidopsis thaliana columbia
  unsure (1)..(508): unsure at all n locations
nnnnnnnnnnnctatagaagagtcttgacgtcgcatgcacgcgtacgtaagcttggatcctctagagcggccgccctttgttttttttttttttttttttttttttttttttttttttttttttttttttaaacagaaaaaaaaaatcctacaatccccccaaaaaattttccttttttttctgtttcgccttcaaaaaaacgttcaacaacattaccgaaaaaaaaagaaggggcccatgatattgataatcctaatatagaaagaatctctgacctcttaaggaaatgcaaagattagggagtttgggttctctgtctctcaaggggggggctttagaactcgttaaaaaccgttcccaaacccatcaaaaaaaccaaagccttccctttcttttttttagaatgtgaccccaatcggggtttttctcattttccatcaaggaaaaaagactcgacttttttttttaaattttaaagcccgggtttagccttagggggcctttgga

SEQ ID NO: 99428 - DNA, 526 bp, Arabidopsis thaliana columbia
  unsure (1)..(526): unsure at all n locations
cactatagaagtttcttgacgtcacatgcacgcgtacgtaagcttggatcctctagagcggccgcccttttttttttatttgtttgtatccaaaatgattctattttccattttcccggtaactgagaacagctaacaaaacagataaacctactaatagtgtatagtaacattactagatgacagaattttgataatatgactaatgtatttcccctagtgaatttaacttgtgaaggagcttgccatcttgcgttatctcacaagtcacacctatggctcaaaattgtcaatcatgtgttgtataacatctgctccagctgaattgatcatctttgttttcacctgaatggtattgtgagcgagaaatctttgcagcgttcctctgaaactaacatcaactcgttcccagctcactgttgcgaatgctcttatcatctcctcttccatatctaagtcctaagaaccttggctgcttgggcctgangtngccccaagtactgcagaccgggntcaaatccanggt

SEQ ID NO: 99429 - DNA, 978 bp, Arabidopsis thaliana columbia
  unsure (1)..(978): unsure at all n locations
nnnnnnnnnnnnnnnnnnnnnnnnnnnnnnnnnnnnnnnnnnnnnnnnnnnnnnnnnnnnnnnnnnnnctttgtttttttttttttgggtagccacatctctttcacataagtaactttcttccttttgcttattcaatatagccatgtatgatttggagcacattcttccacttacaaggattggacaaatttgggtatgacgcgaaactatttcatgatatacaaagaagagaagaaaaaaagagactaaaggtaaaggtcctgtaacgtgaaatggcgcgttttgttttttgtgttgaaaaaggaagaaaaataatagaagaaacgaaaacgtaattagaaaggaagataggaggaatttaatacttcgtgattcaagaatcgatgtgaatggtaatttcgttttactctatcatttggtgatcggaatcgatgtggccgaagatgtctggacagtctacccatgatccatcctctcgggcttcccagtaacctcctttgtatcggtaagactcgcttcctttctccttcatgaaccacctcggcttccatcctctctcctgcatcttcctcgcctgacgttgtcgctgttccagccgcaacttttctgtgttggccatttcaaactctccgttctcgagatacctctggtccggtcgcagccttgaatccgttggtggcagcctctccttaagcccaggtgtaagctcattcaatgtgattgcaaaacgtgttagattatactttgttgcgtttccaggaggtttgctccgtttccagagaagttgagctcctgacatatcttcactcaatttcccttttccagaacaatcacccgtcacaaagtgtatgctctcatcccatttcccaaacatagttgccactgtcttcccactcttgtttgaactataccatgaacctgatgaggatttcggtctatgatggactgctccttgaatttaaggttacatgagta

SEQ ID NO: 99430 - DNA, 799 bp, Arabidopsis thaliana columbia
ctatccacgtcgcatgcacgcgtacgtaagcttggatcctctagagcggccgccctttttttttttttttttaagtaactttcttccttttgcttattcaatatagccatgtatgatttggagcacattcttccacttacaaggattggacaaatttgggtatgacgcgaaactatttcatgatatacaaagaagaaaagaaaaaaagagactaaaggtaaaggtcctgtaacgtgaaatggcgagtaaagaataatgagatgaaaaaggaagaaaaataatagaagaaacgaaaacgtaattagaaaggaagataggaggaatttaatacttcgtgattcaagaatcgatgtgaatggtaatttcgttttactctatcatttgttgatcggaatcgatgtggccgaagatgtctggacagtctacccatgatccatcctctcgggcttcccagtaaccccctttgtatcggtaagactcgcttcctttctccttcatgaaccacctcggcgtccatcctctctcctgcatcttccccgcctgacgttgtcgctgttccagccgcaacttttttgtgttggccatttcaaactctccgttctcgagatacctttgggtccggtcgcaagcctttaaatcccgtgggggcagcctctcctttaaccccaagtgtaagcttaattcaatgtgaattggaaaaaccgggtaagaaatataactttggttgcgttttcccggaaggttttggttccttttcccgagaaaatttgagcttcctggccctatgtttcccttaaaa

SEQ ID NO: 99431 - DNA, 518 bp, Arabidopsis thaliana columbia
  unsure (1)..(518): unsure at all n locations
tnnnnnnnnnnnnnnnnnnnnnnnnnnnnnnnnnnnnnnnnnnnnnnnnnnnnnnnnnnnnnnnnnnnnnnnnnnnnctttgtttttttttttttttggtttcaaactttcactgtctgttgtttgtataatacatacacttatcaaagatgttgaacacattgtacaaacggagatagctttgatgcgatttcacacaaattaacaagaaaagacaaccaaacaaagcatacaaacaaaggtagagtatcaaccttttgtgtacccaatatgatatttcttcaaccttcttcatcatttttcttggtcttctcaagttcaagcaaatatatcttctcagcttctggcacagccatggttaaagctcgaagcctatggttcaagtcgtcaagctttttcatcaccctatcgtttgtgaacattcccatacaaacactcttgatcgtgtcccaactttccaccaatggcaaaccaatgatcacgatggatcctatagttccccaagctattgccacaat

SEQ ID NO: 99432 - DNA, 928 bp, Arabidopsis thaliana columbia
  unsure (1)..(928): unsure at all n locations
cgccagctctattctacttacattagggaaagctggtcacgcctgcaggtaccggtccggaattccacgggtcgacccacgcgttcgtggacgcgtgggcggacgcgtgggcggacgcgcgcgcgcacgcgtgggttttaattcctcgttcgtctcttaaacttagctatagggagtgatggagataacgccgaagaggtactggaggaggtggagaggatacgagaagcttgatgggtcatcggagacgacttcgggtcgaaggaaaggcaaaagggtcaaaatggatccgactcgcaagaaacgtttttggaggatcaagattgtgccgaaactgaggatccttaaaacggcgtcgccgaagaagttcttggtgtggctacgtgattcatatgttaagatgatgatgcggttggctaactcacgggttgttggatcttctggatacggtggatccggattcgggtcaggtcagatgaaggagtacgatgagaaaatgcttgtggagatttacaagtcgatactgatggtgcaggcgcaggggaatctcgtgcaccgcgacacacctaataataatcttaagcttccttcagaaccagcggttgtctctgtcgtatcttctgttgttacttgttaggtaataaagaacaaacaattatcctttcttctttacgataaatttccaatgttgagaatcaaaattgttgacttgcttgatactatttcgagattgatgataggcaaagtttgtgattttgatttgtatcaaatttatatatatataaaaatagtacaagaaaaaaaaaaaaaaaaaaaggatggtggattgtgggtccaattaaaaaaaaaaaaaaaaaaaagnnnnnnnnnnnnnnnnnnnnnnnnnnnnnnnnnnnnnnnnnnnnnnnnnnnnnnnnnnnnnnnnnnn

SEQ ID NO: 99433 - DNA, 656 bp, Arabidopsis thaliana columbia
gtcgcatttacgcgtacgtaagcttggatcctctagagcggccgccctttttttttttttttttttttttttttttttttttttaaaaaagggagatgtaaaaaagtgaaacttgttcataattcaacttgatatccagacccccaaagacaaaacagattaaaaaaaccaaaatcttttgactaaaatatggaaagggttccaaagcagacgagattattactggctagcaccgagccatttggtgaagttatcaaactcggtgtaatcactgtcggagatcatagtcttgtaccacgacttgcctgctgctttgattgccaacgcctcctccttggtaacggttttcctcttcttggcgagcttctccttcttagccttaactctctggcgcttcagctaacaggggacatccctttcgggggcctagcataaggggtccaacttcaacatcacattgagattcttcaatggatttttcttaaaaacagcccttttcgcatcctttttgatcggattcacaacactttgaatctcatctgaattgataatcctggcaagatcagcattcaccatctttgcccgaggaagcccatacccctttttcttttctgatggctttttaaacgaaccatagattgactcaagcttttaaa

SEQ ID NO: 99434 - DNA, 779 bp, Arabidopsis thaliana columbia
  unsure (1)..(779): unsure at all n locations
cnnnnnnnnnnnnnnnnnnnnnnnnnnnnnnnnnnnnnnnnnnnnnnnnnnnnnnnnnnnnnnnnnnnnnnnnccacgcgtgcgcccacgcgtccgatcgattcgattccaaatcggaaggatgataacgtcgtccctaacctcatctctgcaagctctcaagctttcgtctccgttcgcccatggctccactcctctctcatctctctctaagcccaattccttcccgaaccacagaatgcccgctttagttccggtcatcagagccatgaaaacgatgcaggggcgcgtggtgtgcgcaaccagtgacaagactgtggcggtggaggtggtgaggctggctccccaccccaagtacaagaggcgcgtgaggatgaagaagaagtaccaagctcacgaccccgataatcagttcaaggttggcgacgtggtcagactggaaaagagcagacccatcagtaagactaaatcatttgtggcgcttcctgtcatcgcaagggccgccaggaaagccgaagccggaggagatgaactccttggccttcccttggagtctcagcagccggcgtagagaatgattgctctttgtttcttttggtaaagccgtcttttttttgctctgcttctgtttgtttgttgtgtatcccggaaccagtgtaatttatggaatgcttttgtgatttcattgcttatgccatgagtgtgttttcaatctgacgctttccgacccccaattgtttcctcttacttcatcttcacctccagtaaataatgaatgt

SEQ ID NO: 99435 - DNA, 607 bp, Arabidopsis thaliana columbia
actatagaagatttatgacgtcgcctgcacgcgtacgtaagcttggatcctctagagcggccgccctttttttttttttttttttggaaaggaaaaagtcatgaaatctcttagtccaagagggacgtttcagaaaacaacaacaacatgcgaggtcaaaatctcatacaaacaacgacctcaaaacaatcagcgaacgttcaattcttgacccgtaacaagacagcattaaaaaaagatgaaataaaattttccaatcgggagagaaaacaggcaaagagtgatcactttgggtaagcgggaggaggaggataagccccaggagggtattgagaataagctgagggaggagggttttgaggatagccagaaggtggataaccttgtggagggtgttgaggataaccagaaggtggataaccttgttgtggaggataaccgactgcgggtggggtggcttgatcaaaccgtgacatttgctgagccggaggcactgccattggctgtggcccgaacttaccgtccctcttgtccatttccatcttgtgttgtgtctgcatacatgcgcaaaccgtgcagtacaccatgtcagagcaacatgtgagta

SEQ ID NO: 99436 - DNA, 863 bp, Arabidopsis thaliana columbia
  unsure (1)..(863): unsure at all n locations
nnnnnnnnnnnnnnnnnnnnnnnnnnnnnnnnnnnnnnnnnnnnnnnnnnnnnnnnnnnnnnnnnnnnnnnnnnnctttttttttttttttttttattgaaatctctggttaagtatcttatattaagattaatatgtatatatgtgtatacaatgataaagaagaatcataagctctaagtaaggcttacactaagacaagaacagagacataacaagaccaatcccacgagcgactctctttcgaccttactactcgaatatattgcaagaacctacagagcaatatgttagagagctgtgaagtaacttcttggctgggttcttgattcttcaactgagccaagaactcgaataaatcatctgcaaatctgaaaaattcaaccaaaatccaccaagccctctcaactcagtatttcgtctgtaagaacctcccgactcttttttttgtgcaacctcccgactctttctgacaacaaacctgagagattatgaggttggtaataatccataccatcgcaggttcacttttcgctttggttatctcctatgaaccgttaaccccatttagttgatgccttggcgtggttttacttttgtcttctttagagcattgactgtggtaagatcattaaacttgacttggactcgcttgaaccacacaaagcctatgagctgatccttctctgatttttctactaccacatggctttccatgaatccaaccattgaaggaccataagcggactggtgtcttaactgcttgcttgcacagtgaccggtctgctggcagtatgctgaagtgtttgtgttcacacgtgtctgactaccctacatttacttttgtgtgaggctaagctcgc

SEQ ID NO: 99437 - DNA, 847 bp, Arabidopsis thaliana columbia
  unsure (1)..(847): unsure at all n locations
actatagaagatctatgacgtcgcatgcacgcgtacgtaagcttggatcctctagagcgtncgccctttgtttttttttttttttaattgaaatctctggttaagtatcttatattaagattaatatgtatatatgtgtatacaatgataaagaagaatcataagctctaagtaaggcttacactaagacaagaacagagacataacaagaccaatcccatgagcgactgtgtttcgaccttactactcgaatatattgcaagaacctacagagcaatatgttagagagctgtgaagtaacttcttggctgggttcttgattcttcaactgagccaagaactcgaataaatcatctgcaaatctgaaaaattcaaccaaaatccaccaagccctctcaactcagtatttcgtctgtaaaacctcccgactcttttttttgtgcaacctcccgactctttctgacaacacaacctgagagagttatgaggttggtaataatccataccatcgcaggttcacttttcgctttgggtatctcctatgaaccgttaaccccatttagttgatgccttggcgagggttttactcttgtgtctctttaaaagcatccacatgtgggtaaaacaattcgatctgacttgactaccttgaaccacacaaaactcatacccgacacttctctcatttaatgctacacaggctttcctgaaaagaacctagaaggaacagagcgcatgtgagataactgtgttcatcccaggcagtcggcggtcggaagaagagaatcagacgactcatcccgccgggcaaacggagtatcagtgtaataaaaggtgatcgcgccta

SEQ ID NO: 99438 - DNA, 640 bp, Arabidopsis thaliana columbia
  unsure (1)..(640): unsure at all n locations
antgtcccacctatcncccttggaactgtccctcagtcggncggatccggncgcccccgccgatatctggttcgggaatnctcggtcntggngcagtcttttctggttctnnctgcggctgcagctnccattgctttgtcaaaactcaggttcaggaaatgcacccggatgctcaaggaaagtatcccatacacaggttcgctccgattgtgcgatgaaacccttaaaagaaggaggncctctgaaattttactcgggtttcccagtttactgtgtcaggattgcccctcacgtcatgatgacatggatcttcctaaaccagattacgaaatttcaaaagaagattggtatgtgaggaacaaatacagcagcaaaaaaataagatgagaagaacgaaaacacaattggaattgtgttcatttgctttttaatcatatacataacctgccttaaaagcatattattgtagctgtttgaactttaattttttgtttcggtcggtgattggtccggtgaattttaaattttcttctttggtggaagtttaagacacatagccagagatttcaaaattttcatacgaactaaaaaaattctctgaatgaggaaacaataaatatatgaaacattgatgatgggg

SEQ ID NO: 99439 - DNA, 1362 bp, Arabidopsis thaliana columbia
  unsure (1)..(1362): unsure at all n locations
nnnnnnnnnnnnnnnnnnnnnnnnnnnnnnnnnnnnnnnnnnnnnnnnnnnaattttcgctctgacccacgcgttctctttctctctctctttttctccgcggaaggaatctcttcttctggttgcgtttgagtccgtacgaaaacaaaagaaaagagagagatggcggaagagaagaaagctccaatcagtgtctggactaccgtgaagcccttcgtcaatggcggtgcctctggtatgctcgctacttgcgttatccagccgatcgacatgattaaggtgaggattcaacttggtcagggatctgcagccagtataaccaccaacatgcttaagaatgagggcgttggtgccttctacaagggattatctgctgggttgctgaggcaagcaacttacacgacagcccgtcttggatcattcaagttgctgactgcaaaggcaattgagtctaatgatggaaagcctctaccgctgtatcagaaggcactatgtggtctgacagctggtgctattggtgcttgcgtcggtagtccagccgatctagcacttatcagaatgcaggccgataatactttgccgctagctcagcgcaggaattataccaatgctttccatgcgcttacccgtattagcgctgatgagggagttttagcacctttggaaagggtgtgggcccactgtggtcagagctatggctttgaacatgggaatgcttgcatcttatgatcaaagtgctgaatacatgagagataatcttggtttcggggagatgtctacggtcgtaggagcaagtgctgtttctgggttctgcgctgcggccttccagtctgccatttgactttgtcaaaactcagattcagaaaatgcaaccggatgctcaaggaaagtatccatacacaggttcgctcgattgtgcgatgaaaaccttaaaagaaggaggacctctgaaattttactcaggtttcccagtttactgtgtcaggattgcccctcacgtcatgatgacatggatcttcctaaaccagattacgaaatttcaaaagaagattggtatgtgaggaacgaagacagcagcaaaaaaataagatgagaagaacggaaacacaattggaattgtgttcatttgctttttaaatcatatacataacctgccttaaaagcatattatttgtagctgtttgaactttaattttttgtttcggtcggtgattggtccggtgaattttaaattttcttctttggtggaagtttcagccacaaaaaaaaaaaaaaaaaaaaaaaaagggcggccgctctagaggatccaagcttacgtacgcgtgcatgcgacgtcatagctctgtaaatgggtaacgacct

SEQ ID NO: 99440 - DNA, 639 bp, Arabidopsis thaliana columbia
taggtgcaactatagaagagttatgacgtcgcacgcacgcgtacgtaagcttggatcctctagagcggtcgccctttttttttcttcttttcttccatccttttctttataaatttgatcagtatataaattttatttttccatcctgaacaataatatcatcccccattgtgcaatagacaacaatttcgaagctgaaactaagaaagaaaaaagtaaccatttgtctgccttctctgttttaatcagaatcagctttgattaggattaacacagctttctttcaatccaagaagcacttgatcccagacttggtgagctctaaatgaaagcttatccatatatatatataaaatcaattggggtattagtgtctcacttggcagtcttttagctcttctggttcagactctaacttgcatgggagaacgatgatggaactctcactgttggcttaaaaccattaaatagactggtcctaagtgtcctgaaacaacctcctaatctgatcaacgctggctggaatcaatgtcaccggacatcgcttgtactttgaaacataccttaatacgcaggatagcagaaaacaatccagagacagtgacaactgatggatttgcacgtttttgcaagcataaa

SEQ ID NO: 99441 - DNA, 706 bp, Arabidopsis thaliana columbia
ctaatacgacttactatgggggacgctggtacgcctgcaggtaccggtccggaattcccgggtcgacccacgcgtccgcaatctctgactctctgagtaattaggttttttttttatctcatggccggcgccggaatccacccataccaccagcagtggccgccggcaggtgcgccgcctcctccagccgcagtatcatcagctgctccaccacatccgccgcccattcatcaccatcctcctcctcctcctgttttagttgacaaccataatcgtcctccttatgacgagctgcggacaatcttcatcgcagggcttcccgatgatgtaaaagagagagagcttttgaatctcttgagatggttgcctggttacgaggcttctcaggtgaacttcaagggagaaaagcccatggggtttgctcttttctccacagctcagtttgcaatggcagccaaagatacccttcagcatatggtgtttgatgctgagtcaaagtctgtgatacatacagagatggccaagaagaatctttttgttaaaagaggtattgttggggattcaaatgcttatgatcaaagtaagcgcctacgaactggtggtgactgcacacactctgtgtatagtccatctcctttccatcctccacctcctcctgtgtggggacctcctcatggatatatggcacctgcacctccaccatatg

SEQ ID NO: 99442 - DNA, 994 bp, Arabidopsis thaliana columbia
ccactatagaagagttatgacgtcgactgcacgcgtacgtaagcttggatcctctagagcgtccgccctttgttttttcctttttttttttttttttttttttttttttttttggagacaaatacaatgatgttcaaaataactttttcttcacgtcatgcaaatgaatagaatagacaacaaacatacattgccaaatgccaaaaacgttcaaattaccctattaataccaataagaattcacaaaaacgtctttttcatttcaaagaagccaattaacactaatgttaccaagccatatcaaaagtgggaactggaccaaggctaaaaacagaagaaggtagggatgtttgctcaaatcgtaacttcttacttcagcaaacagaacacgtttcatcgtcttcaccaagaaaatcccagtgcatagacaagtccatggcattaacgcgtattacgagtattcccacattattttggcaaaccccgcagaaacaaaccagcaaaagcttaccctccctttgccacaatatttataaatggcgcctctccactaccaagtgaaaaaagggtactttgaggagcattacttggaaaaacaaccaaccattcctttcacaaaagccaattaaaagcttccggtgaaactttccattagtcccaatgaaggaccacgaaaaaacggaggtccaaaggcataaagggaaggccaaattggagcattattcatttttgggggctggtgagacccacccaactggtcaaatcttgagcagtgcccgggaaggaagaacacaacacctcgttattccacattaggcattctcggatagttggggacaaaaccccgtttttgtctgaatccaagggaccaaatgtcgcctcctccacccgggaaaccagcccggggaagtaccagacgccaggggcggtggtggcggggggcctgtttgtgggaaagggagcacgaaaaaggaggcggggagggcgctggggg

SEQ ID NO: 99443 - DNA, 774 bp, Arabidopsis thaliana columbia
  unsure (1)..(774): unsure at all n locations
nnnnnnnnnnnnnnnnnnnnnnnnnnnnnnnnnnnnnnnnnnnnnnnnnnnnnnnnnnnnnnnnnnnnnnnnctttttttttttttttgttttgaacttgatcctgtatgatttatgaaatggtaatctaccgcaacatgtttcatctgtgaatgtaactgatcgatcgaaatcaataatacggtaagtgtggttcattattaagtatatacacgttattgtactttagtttttgagaccaaaaatagagaagctaagctattaaatccaaaagatgatggtttttattgaatccagtagaagaactcttgcctgagccaattatagcctcaaagttcaccatcaaactcaaagagtcaccgaactaaggtgtttgtatttagaaaagattcaccaatattctcctccacctacaaacgacgacaagctcgagtcatcctcaatctccaaatatgcatcttcatcttcgtcttcttcttgttcgtcttcgctttcaccttcactttcaccttcagcttcaccttcacctttaactggccaggggtggtgagactggttggcatgaaaaactatgaaattgatagtcatttatcactttagtcttgggctaatcttagtcatgttctagtccattatgaattaggataaaattacagttggaaaatgttagaaagtacctggccaggagaagtaagtatcaagctcactttgagatagaactctgggagaaacatccanaattnttaccacatccttttatcctttggactgagc

SEQ ID NO: 99444 - DNA, 768 bp, Arabidopsis thaliana columbia
actatagaagagttatgacgtcgcctgcacgcgtacgtaagcttggatcctctagagcggtcgccctttttttttttcttttttgcaagtaacaagtaaacatgatgaatatatcacaatttataatttaacaatccaaaaaactaacaaatcgaaatttagcaaaagctttttgattttgattacattgatttcattcatagtttgagtacttcactaagtaaggatctaaatttatattataaaagccttaaataaagatttgttcttttcaagacgattccaaaataagatcagcaacggcggctccggcgagatcagcggcggagagagaatgattatgatctccttcataagtaacaatcaacatggacgaatcatcagctgctctctcaacatgtttacgtgctggacaacctcttacgctactacacttataatatcctcttggatgtggagatcctttaattggtttttgtccgtatttcctccatgaataatcgtccggtggtacatcgaacattgttgcacttatcgccggaaccctaatattctcctctgtttatctttctttcttcgagcaatgacacgaccggaggaagaagcggaggcgcattttccggtgagaagatctcagagttacattttctctttgttgattttgagaacacgagactgtcgtggagaggctttgagttgagacgcaacggcgccgtttagagggacgttgatgagatgaatcttctctggttgttgattccgtgtaca

SEQ ID NO: 99445 - DNA, 554 bp, Arabidopsis thaliana columbia
  unsure (1)..(554): unsure at all n locations
cgnaaatggccaattcattaattatggacgtgtacatgtaaaatcgtttttcaacttcgccagctatccaaatcaaaatttctttacttgccaaactacgaagctgtggtggaggccatattacgcttttaaattagcctacaatagccttgcaggaaaaccattgcaaaaccgattcaatattttgaggtacacgaaacgttcattcagaataatcatcctcattaccatcactatattgattggcatcttgttccggctcgtgtttccaagatctaccaaggccgccttcggtcctcctaatccttctcatcttgggagctcgaagcaccaacccttggaagggtaaaccccctggaatctttaggggtccaatcacngatacagttgatccccgccctaaagttacccctggaagggactgggaaggcgttcaatctcatcagaagacttccttcccgggcccttttttcccaaggtcaacncatgggaggggggaaannangggcccatgncaaaggancaggatgggcaggacggttgatggggggaat

SEQ ID NO: 99446 - DNA, 746 bp, Arabidopsis thaliana columbia
acgcccgtacgtctaggctatgcttttataatgggaccggcccctcttcttttttgtttttttttaaaatgtttttatccataaaaaatctttatttaccattttaagaatggggttataaactaggacggttatccttatcaaaattcctttacttgccaaactacaaagctgtggtggaggccatattacgcttttaaattagcctacaatagccttgcaggaaaaccattgcaaaaccgattcaatagtttgaggtacacgaaacgttcattcagaataatcatcctcattaccatcactatattgattggcatcttgttccggctcgtgtttccaagatctaccaaggccgccttcgtcctctaatcttctcatcttggagctcgaagcaccaaccctagaagagtaaacccctgaatctttatgttctatcactgatacagttgatctccgccttacagttacccttgaaggtactggaaagtgttcaatctcatcagaagatcttccttccctggcccttttcttcctcaagttcaacctcatgggtaggggcagatagctagcgggcccattgtcaaatgataccaggtatgtgccaagatcgtttgcattgggttgtacattccagaggtattttcgaaccccagtgtaagaaaatttttgtcgaaaagatacatgggatttcccttaaaaaaacttattccaagggaaggaacccatgttccgccaaaaaaattttt

SEQ ID NO: 99447 - DNA, 877 bp, Arabidopsis thaliana columbia
  unsure (1)..(877): unsure at all n locations
nnnnnnnnnnnnnnnnnnaatacgactcactttagggaaagctcgtacgcctgcaggtaccggtccggaattcccgggtcgacccacgcgtccggtctaggttaatcgaatatttcactatttgctttctatctttctgctgcgaatcaatggcgctatggatggacgctggagcgacgccgaccacggagaaggaaaaggctgatcttgaagctatttctgctctcaaagaatccaccgccatcgaattcaaagaagagggcaatgaatgtgtaaggaaagggaaaaagcattactctgaggcgattgattgttacacgaaagccattagtcagggagttctaagtgattcagagacctctattttgttctcgaatcgatcccatgttaatctactcttaggcaactatcggcgtgccctcaccgatgctgaggaatcaatgaggttatctcctcataacgttaaggcggtgtatcgagctgctaaggcatccatgtcattggatttgctgaacgaggcaaagtcttattgtgaaaagggaatcgagaatgatccgagtaatgaggacatgaagaagctttaaaacttgtgaattcaaagaagcaagagaaagacaacatgaggctcaagcctcacagggcggtggtggagccaaggcttgtctctctgcgatcgagaacagatgagtgaagattggcannagcatgtaccgagaactcactggtttgaagaagccattgtagataaaaacacatncttcattggcctgnctgctttttacgctgaggcatgacagtgacttgttgagactttgtgaacagaatgttgcactatcttgattgatgttcaaggacagccgcgtgcagggataaacac

SEQ ID NO: 99448 - DNA, 3045 bp, Arabidopsis thaliana columbia
accacgcgtccgagagaaacaagtggctagctagctcgccaaacttcttcaacaatggcggtttcctagggtttgatgtttatatgatcgggaaactctctcatctagatcgcgataactctcttttccatggaaatgcccggtagaagatctaattacactttgcttagtcaattttctgacgatcaggtgtcagtttccgtcaccggagctcctccgcctcactatgattccttgtcgagcgaaaacaggagcaaccataacagcgggaacaccgggaaagctaaggcggagagaggcggatttgattgggatcctagcggtggtggtggtggtgatcataggttgaataatcaaccgaatcgggttgggaataatatgtatgcttcgtctctagggttgcaaaggcaatccagtgggagtagtttcggtgagagctctttgtctggggattattacatgcctacgctttctgcggcggctaacgagatcgaatctgttggatttcctcaagatgatgggtttaggcttggatttggtggtggtggaggagatttgaggatacagatggcggcggactccgctggagggtcttcatctgggaagagctgggcgcagcagacggaggagagttatcagctgcagcttgcattggcgttaaggctttcgtcggaggctacttgtgccgacgatccgaactttctggatcctgtaccggacgagtctgctttacggacttcgccaagttcagccgaaaccgtttcacatcgtttctgggttaatggctgcttatcgtactatgataaagttcctgatgggttttatatgatgaatggtctggatccctatatttggaccttatgcatcgacctgcatgaaagtggtcgcatcccttcaattgaatcattaagagctgttgattctggtgttgattcttcgcttgaagcgatcatagttgataggcgtagtgatccagccttcaaggaacttcacaatagagtccacgacatatcttgtagctgcattaccacaaaagaggttgttgatcagctggcaaagcttatctgcaatcgtatggggggtccagttatcatgggggaagatgagttggttcccatgtggaaggagtgcattgatggtctaaaagaaatctttaaagtggtggttcccataggtagcctctctgttggactctgcagacatcgagctttactcttcaaagtactggctgacataattgatttaccctgtcgaattgccaaaggatgtaaatattgtaatagagacgatgccgcttcgtgccttgtcaggtttgggcttgatagggagtacctggttgatttagtaggaaagccaggtcacttatgggagcctgattccttgctaaatggtccttcatctatctcaatttcttctcctctgcggtttccacgaccaaagccagttgaacccgcagtcgattttaggttactagccaaacaatatttctccgatagccagtctcttaatcttgttttcgatcctgcatcagatgatatgggattctcaatgtttcataggcaatatgataatccgggtggagagaatgacgcattggcagaaaatggtggtgggtctttgccacccagtgctaatatgcctccacagaacatgatgcgtgcgtcaaatcaaattgaagcagcacctatgaatgccccaccaatcagtcagccagttccaaacagggcaaatagggaacttggacttgatggtgatgatatggacatcccgtggtgtgatcttaatataaaagaaaagattggagcaggttcctttggcactgtccaccgtgctgagtggcatggctcggatgttgctgtgaaaattctcatggagcaagacttccatgctgagcgtgttaatgagttcttaagagaggttgcgataatgaaacgccttcgccaccctaacattgttctcttcatgggtgcggtcactcaacctccaaatttgtcaatagtgacagaatatttgtcaagaggtagtttatacagacttttgcataaaagtggagcaagggagcaattagatgagagacgtcgcctgagtatggcttatgatgtggctaagggaatgaattatcttcacaatcgcaatcctccaattgtgcatagagatctaaaatctccaaacttattggttgacaaaaaatatacagtcaaggtttgtgattttggtctctcgcgattgaaggccagcacgtttctttcctcgaagtcagcagctggaacccccgagtggatggcaccagaagtcctgcgagatgagccgtctaatgaaaagtcagatgtgtacagcttcggggtcatcttgtgggagcttgctacattgcaacaaccatggggtaacttaaatccggctcaggttgtagctgcggttggtttcaagtgtaaacggctggagatcccgcgtaatctgaatcctcaggttgcagccataatcgagggttgttggaccaatgagccatggaagcgtccatcatttgcaactataatggacttgctaagaccattgatcaaatcagcggttcctccgcccaaccgctcggatttgtaaaatacccccggtccattcaaaagttgttataatcatgatatgcacatatactctcagcattcttttgctgcccaggagggagacactagttaagatatagctttaaaggtacattcctcatgagctatcaatcatatcctacagaatcccatggtttttatacatgtattatttttgcgatctttgtctgctgttttgttccctttttaatgttgcagattgttaaaatgtacatgactattgtcacagggaggaaaaaaaaatgtagtaatggaaacaatgtgagggatataatctatctatctagtcccaaagggtaagcaatattgtgttgttatgtctttgtagcaatgcactgaaagctatatttaattacattgctgtacatttataccgctaaattagttactaagcgaaggtaaaaaagagcagctggtaaatgctgtcaaa

SEQ ID NO: 99449 - DNA, 748 bp, Arabidopsis thaliana columbia
  unsure (1)..(748): unsure at all n locations
actatagaagagctatgacgtcgcctgcacgcgtacgtaagcttggatcctctagagcggtcgccctttgtttttttttttttttataaggaacttccagagacattaattattatacaaaacgaccatttttgttctttacaattgaatagacaatactgttttaagcttttcacacttgtgatctccccgaatgtgaacagatcaaagagttattcgtcgtgggtaaatacattctctaccttaagagctaaaaacaggaaagagaagagtgaaacacagaccataaccagcatcactatgagcattgcttgcagtgatatgtacgggcttaggaagaacactatcgctattgctgcgctctgccatacttttagctgcgcaaatgctccttccgtgtcatgtttgaagagtaatgcgagaagagcactgatttgagtatttaatattccatcaccaattcctaatatggccgccattataagtgggtaagctgngccaagtactccgctagtttgcctgtacccgagaagatgccagagaaacacagaagcttgagcacagctccaccagaaactatgaaggggatcgatgacanaccagaggtaaaccttccagcagtcatttgacaaactgcatcaagagctccgtagactggcatcgccccaccaacacctgagacaccaatcgccggcgtatcaatttcctttgaaactcagcccaacaaatgcttgttgcattcctgata

SEQ ID NO: 99450 - DNA, 590 bp, Arabidopsis thaliana columbia
  unsure (1)..(590): unsure at all n locations
nnnnnnnnnnnnnnnnnnnnnnnnnnnnnnnnnnnnnnnnnnnnnnnnnnnnnnnnnnnnnnnnnnnnnnnnnnnnnnnnnnccacgcgtccgcgcgaacatttcgaccggagttttgagagagctcagagtgtttcgagtgtgttatttggatctgcgatctgatcgtctcgcatcgacgtgaaaggttttctaatccaattggttctgtggaaatttggattcggaggtttttgtttggaagatctttctgcggttttcaccgccatggctgctccgtttttctctactccatttcagccttatgtctatcagagtcaagaagatacgatcacacctttccaaattttgggtggtgaagcacaggttgttcagataatgttaaaaccacaagagaaggtcattgctaagcctggttcaatgtgctacatgtctgggtccattgagatggataatacttatacccctgaacaagaagttggagttgtacaatggattttaggaaagagtgttagtagtatagttcttcgtaacactgggcaaaacgatggatttgttggtatcgctgcaccttctttggcaaggattct

SEQ ID NO: 99451 - DNA, 544 bp, Arabidopsis thaliana columbia
gacaaatctttctttctctttattttatcctaaaatttcctatctgatttcttcctcttgagctaaatttgttaccttctgggtattcaaaaagatctcattttttcttctagctctaaattttcagggagtttctttcttcttcttttgaagaccctttgtcatgagctaatttttatcctctgtgtgttgagaaagatctcattttttagctttaggattgagggagtttcgatttttacttagcacttttccttggaagtgatttggtggaactcatggtgattggtttcttcctaaggttattagagattgagttctggatttttcacgcgccttggatttgatctaatgtactctcttttttcatgtcttaatctggtttagatttttattttgagatcttttgttatataggttgcaagttctgtattttgttaggctttttagtttctgtgttgattatgattctcttggtctaggagagatttgggtgttgttaactgtttgagtttgagaattgtgaaattaggttttttttttt

SEQ ID NO: 99452 - DNA, 759 bp, Arabidopsis thaliana columbia
  unsure (1)..(759): unsure at all n locations
nnnnnnnnnnnnnnnnnnnnnnnnnnnnnnnnnnnnnnnnnnnnnnnnnnnnnnnnnnnnnnnnnnnnnnnnnnnnnnnnnnnnnnnnnnnnnnnnnnnnnnnnnnnnnnnnnnnnnnnngggccaccaaaaaggagaaatccctgaatgttcattccctgtatttgatgtcttgggggttagattttgtaaaaatctttactgatgagaacatgatcaacttgcaagaaaactatgggtctgggctcaaacacagagggtaaatactttatgaggccttgggttcagtaacaatggttccaacaggtttgacagcatctctaatcacattggagtaatactaagaagaaggctgcttctcctgcaacattctggaatgttgttctaagtattctttgctgttcatctccgttaatctgctaatggggcggtctttagcaaaaccaagctcgttgtccacgcaaaggtcgggatcatcactcttccttgatcttgaagaggttctaggtgctatttgctgtgcatcagagattgtcactattctctccagcagttctagagggctaccttctgccgtgcatagaaacctggccttgttctcatacattacatcaaccagtgtcacaaagcggtaagctgcagtcctattatggagcccgaagaagggtacaccttccagagccaaaggttgaaatttcttgaataatccagataatcggctgcgcctaggggtctttacacagctcttcaaaagaaggt

SEQ ID NO: 99453 - DNA, 796 bp, Arabidopsis thaliana columbia
  unsure (1)..(796): unsure at all n locations
taggacacactatagaagagtcttgacgtcgcatgcacgcgtacgtaagcttggatcctctagagcgtgcgccctttttttttttttttttttttttttttaccaataatttcattttggtttaagaaatttcaaaggacaaaagcacctttaagattcacttctctttgacttttgacagtacagaagtactagtacaatatttaatctagggatcttcatgaatgatgactaatgagtagtatgatagtcgatgatgataacaatgtttgataatttgctttgtcaattttctcccaaaaagtctttgggaataaatcagtcaactcaagctcaaaatctaacacgcgcgagacaaaaacccgacccgtgacccgaccaagtcataagcgacccggaaaccttgttgctgtatgtttccaatgattgacaaactccccatagttccggcaaacgcaaaacagaaccgtccttcagtgttaaccgggatcagataattactcgccggaagcgaaacctctccgcctccgaaatgaaacacaaccgtcggaaccttcacagtcgtcattcccgagagatcaaaacacgtgtcgaacaaagaatacgatggagcacgtttcagcttcgtagcaccaagtctaaaagcgtctctaagcgctacgtaagcaggttgcgtcagccgagtaaccgaagtanccggatctataatgacaccgccgtttccggtggcgtcaagcttgaactgcgactccgaaacgccgggaacgcgcgaccaccaacgctgattcaagaagct

SEQ ID NO: 99454 - DNA, 730 bp, Arabidopsis thaliana columbia
cacactatagaagagctatgacgtcgcctgcacgcgtacgtaagcttggatcctctagagcgtgtcgcctttttttttttttttgaaaccaaaactttagacagttgcacagcaatactaaaaccaagagttcaaaatcacaaatacaatgctcaatcttgcaataaacaatattataagaaatgtgcagaactaccaaaaatcataaaaacttcttctgagttctgaccatcaaaggctccaaagtgctaaaaaagggttccatagtgaactacaatcacccagaatgggccgagcaaccaataataggagttatgagttcagcaccagtctcatgatgatgttatttcatttaccaacctttctagaaataggataagcaaaatatagtacaagaccagctggaactgcgaaaagtattgtgaggaggaagtaaagggcaagacttatgaggctaccaggtatagcaaagaatacgatcagaaggaagatgatcacaaacggaaacttggaggtgaaagagatgaaaaaatcaagagatttgtgaaaggagatgagttgtctgcttggttggttactgtggtcatgatgtggcaaaaggtctgtagactggttacgcaataaaggcctcgcaaccagattgttgttgctgatgtgggttcccagagacatgctacacctcggagtcggacgcattgctggttatagtgccaaggaacatgacttgcct

SEQ ID NO: 99455 - DNA, 462 bp, Arabidopsis thaliana columbia
accacgcgtccgcggacgcgtgggcaacaattcgaatctgaaatctgcaattcacgagaagatgtttttttttgtaacaatggcgaatccaattcaagagattattgagaaacaagttctaacggtagcgaaagctatggaggataagatagacgacgagatagcgtctctggaaaagcttgatgaagatgatttggaagttttgagagagaggagattgaagcagatgaagaaaatggcggagaagaagaaacggtggatgagtattggacatggtgaatactctgagattcattctgagaaagatttcttctccgttgttaaatctagtgaacgcgtcgtttgtcacttctaccgtgagaattggccctgtaaagtgatggataaacacatgagcatattggccaagccacacatttggacacgtttttgggagatccaagctgagaaaagtccattctt

SEQ ID NO: 99456 - DNA, 543 bp, Arabidopsis thaliana columbia
  unsure (1)..(543): unsure at all n locations
nnnnnnnnnnnnnnnnnnnnnnnnnnnnnnnnnnnnnnnnnnnnnnnnnnnnnnnnnnnnnnnnnnnnnnnncttttgttttttttttttgaacaaaagcaatgtttatgagtaaacgccaagaggacaaaatgtagaacacattgaaatggtatcaaatactaaaacacactgttccatatattaatgcacaatatcactaagagctgccatttataccagtggaccttcacggaccatgtgactgcaccgcttcttgaaggctcttcacagcgctttcataagtcacaaaccccataaaccagaactcgtggttgtcgatggaaatcacttgtatgtatttatcagatgtgttcactctacttgttgatgggttcactgccttcagctgattcgccggaagtaccaccttgtaatagctccacagggtctgctcaccctctttgtaagagagaggattgtcactagagaacgcaagcttgtgagtcgaaagatacataactcccaggacaggaccagcagatgtagacaagtagcaagcat

SEQ ID NO: 99457 - DNA, 572 bp, Arabidopsis thaliana columbia
  unsure (1)..(572): unsure at all n locations
atagaagagctatgacgtcgcacgcacgcgtacgtaagcttggatcctctagagcggtcgccctttgttttttttttttacaaaatgaacactgctgcatttaaaattctttcaagtaatctcagctttcaaagtcacaaactcaaattgtagttttgacattggctcctctgtcgagtttggtccaaacaaaactagaaacaagccatacataggattaaaaatcgatgcacgacataaaaagagtaattggaatagtaaaagaccagaaaaaaacgattacaccttaatatatattctcagagagctaagattgcagagacccaaacggtacggaggctttttggaagacaagtcacactctccagaatcagcatagcctgaataacaaatcattcttccatgcgatctccagcgccggatcctttgacatcaacagagaacgagttctcttggtcacaccccaagtaagagtcccacatggaggatagggggggaattctttnnccccgggttanccngggngggggaaaccggttcacnttaacttccgngggantggaaccnttgnt

SEQ ID NO: 99458 - DNA, 479 bp, Arabidopsis thaliana columbia
  unsure (1)..(479): unsure at all n locations
ggtgnnnnnnnnnnnnnnnnnnnnnnnnnnnnnnnnnnnnnnnnnnnnnnnnnnnnnnnnnnnnnnnnnnctttgtttttttttttttaaataagaacagtccatgcatttataattcgctgggaaataatatcccacacacaggccatgcattaaacaaataatatcgtattcgtaccacacacacattaatatagaaagagagagatgagaggatgaatactcataatttataaactctcacatgttacctccttgctgatcatgaccattgtgccaaggaagaaaagtcccatacgaccctccggtgccacgtggcatctgattcatcaccggacttgcccccgaaagcctataaaccgggttcaagggaggcagttgctgcgacggaagcggctgaggctgaaaaaccaagtccacgacgttgccaggtgctccggcggctgatgtggacaaaccataatgtgccaagtcagcat

SEQ ID NO: 99459 - DNA, 1759 bp, Arabidopsis thaliana columbia
  unsure (1)..(1759): unsure at all n locations
nnnnnnnnnnnnnnnnnnnnnnnnnnnnnnnnnnnnnnnnnnnnnnnnnnnnnnnnnnnnnnnnnnnnnnnnnnnnnnnnnnccacgcgtccgctttaccgaaagagaaatatcaagactaagaaacaagaagagtaagaatcattgggagagcgatcatggcgacgagagcaaacgtacctgaacaagtcagaggtgctcctctcgttgatggtttgaagattcagaacaaaaacggtgctgtgaagagtcggcgtgccctcggtgacatcggaaatcttgtttctgttcccggagttcaaggaggaaaggctcaacctccgattaatcgacccattactcgaagtttccgtgcccagttattagcgaatgcccaactcgaaagaaagccaatcaatggagacaacaaggttccagctcttggtccaaagagacaacctcttgctgcaagaaacccagaagctcaaagggcggttcagaagaagaatctagtggttaagcaacagacgaagcctgttgaagtgatcgagacgaagaaggaggtgactaaaaaggaagtagcgatgtcacctaagaataagaaagtgacgtactcgtctgtacttagtgctcggagcaaagctgcttgtggtatagtcaacaaaccaaagattatcgatattgatgaatctgacaaagataaccatttggctgcggtggagtatgttgatgatatgtactcgttctataaagaagttgagaaggagagtcagcctagaatgtacatgcacattcagactgaaatgaatgagaagatgagagcgatcttgattgattggttactagaagttcacatcaagtttgagctcaaccttgaaactctgtacctcaccgtcaacatcattgatcgattcctctctgtgaaagctgtccctaaaagagagttacagctagtgggaatcagtgccttgcttattgcttccaaatatgaagaaatctggccacctcaggttaacgatctggtgtatgtcacggacaatgcttacagtagcagacagattctggtgatggagaaggcaattcttggaaacctcgaatggtatttgacagtcccgactcaatacgtcttccttgtccgcttcatcaaagcttcgatgtctgatccagaaatggagaatatggttcacttccttgctgaattggggatgatgcattacgacaccttgacgttctgtccctccatgcaagctgcttcagctgtttacacggcaagatgctcattgaacaagtcccctgcttggactgatacattgcagttccacaccggctacacagagtctgagattatggactgctcaaagcttttagcttttcttcactcgagatgcggtgagagcaggctacgtgcagtgtacaagaagtactcgaaggcagagaatggaggtgttgctatggtttctccggccaagtctctcttgagtgctgctgctgattggaagaagcctgtttcttcttagatgttttttttcatcagatctctctctgattcaaaattctagatttctcatcagatactcttttgtttttttgagttcaaacgtattaatgaattcttctcatcagtgtttttcttaatctctgattacttggatattagatttctactatatctttaacagatagatgatgtttgactgtaataaatcagatgcgtgcaattagtttccgacttattgtaaattgaatgatgataaatgaaatgcataaaatagttaatgtt

SEQ ID NO: 99460 - DNA, 526 bp, Arabidopsis thaliana columbia
  unsure (1)..(526): unsure at all n locations
nnnnnnnnnnnnnnnnnnnnnnnnnnnnnnnnnnnnnnnnnnnnnnnnnnnnnnnnnnnnnnnnnnnnnnnnnnnnnnnnnnnnnnnnnnnnnnnnnnnnnnnnnnnnnnnnnncccattaaaaaggaaattttatgtaaaagcactcaaatgaagttgtcctaaagaagcataaacaccatttttgatattaataaaagcctaatgctttccccttctccacgatgactccattcttaaccactgcaattacatgggggttcttgattgttgataaccgatgtgccaccaccacgggggttgggttaaccataacccggtccaatgcatcctgaaccacacgctttgactcagggtttagagcacttggggcttcatcaagtagcaacactttagggtctttaacaattgctctggctatggctactctttgtttttgcccacctgataattgaactcctttttcacccaccattggttcatagccctgttggggtccactgatgaagccatgaccgttagatag

SEQ ID NO: 99461 - DNA, 491 bp, Arabidopsis thaliana columbia
tatagaagactatgacgtcgcctgcacgcgtacgtaagcttggatcctctagagcggccgccctttttttttttttttaatatgattttagataggaaaaattagcactaatggtttcaaaagaaacaaacttacttcatttattttattattttaatttatattatcatgaggttctaaatctttacccataaatattctttcacaatggaatattttattgtaacataaaacaaaaataaaatatcactaaatcttagtgacactaactttgagaccatgttgcatgcgaagaagaacggaaggaactggttttggtttgtgcccttcaacgaccttaatgtcatagtttctaatgatttcgaccgctactgtcttcatctgcaagaatgttaatcttttccccaagcaagttcttggaccagcgttaaacgccaaaaacttatatgaagactcttgtctcaacattccactgtctgaaatccatctct

SEQ ID NO: 99462 - DNA, 432 bp, Arabidopsis thaliana columbia
gtttttgtttctgtgagtgctgtgtgtgttctcggtttgtaatatctaagtcgcacaaagatcagacaaagtctgtttgcgtttgatagcattagagtctgatcgaatttggaagacctgtgagattagggtttctttttgtttgtttttttttattccgaaggagagctgcggagcaattggaattacctcggttaaagcaatcacgtagctttggatcgtttagggttttctcattgggtttgggggatttgtattctagcttcctcaaactcaatctgatggtgatgtgagacaaggcttaatcctgttaattggcgattctagggtttttcaatggcgagcacaggcgagcctgaccgtaaaaggcgtcactttagctccatatcaccttctgaagctgcagccgccgtaaagaaacagcctttcttt

SEQ ID NO: 99463 - DNA, 616 bp, Arabidopsis thaliana columbia
  unsure (1)..(616): unsure at all n locations
gtgnnnnnnnnnnnnnnnnnnnnnnnnnnnnnnnnnnnnnnnnnnnnnnnnnnnnnnnnnnnnnnnnnncttttttttttttttttgatgaaatggtttgcctatttgaagggttatttacaacccgcgtgtttatccgtttccagaggcaagataatgacgattttttacaaaacaatgtcaatggcattactctgtaactttttacaaaacaatgtcagattttgttataaacttctaaattaatagtagggattagtgcagaatagtagagatgaacttctcaggcttggataagaggttaccagagacgaagaagataacaagacagaatatcattaatggtgatgcaaaaaaaatcaaatgacggaatgtaattttgccaaaaaatttttgctattagtcggtaaactccgtggttcctttaggagggttcatgaagctgggctggtttgtagatgacaacattcgcgcccacattctatctgtaatcacaactttgttctgtctttcggttattcggttaaagggaatgtaggtgtgccttccattaacaagaccagngncaaagccggtatagccagccattgcaccatggactgcgctttgggcaagg

SEQ ID NO: 99464 - DNA, 600 bp, Arabidopsis thaliana columbia
  unsure (1)..(600): unsure at all n locations
gacccggcgnccgtgagagtttaccgaaaaaaaaaaaaaaaaaaacacctctttagttttaatcaacgaaacttatggaacgtgaagcacatgaattcttccgcgcatctgattttgccgttgatgaccttttagttgatttctctaacgatgatgacgaagaaaacgatgttgttgctgattccaccactaccaccaccataaccgacagctctaacttctccgctgctgatcttcccagtttccacggtgatgttcaagacggcactagcttctccggtgacctttgtataccttctgatgatttggctgatgagttagagtggctttcgaacattgtggatgaatcattgtcgcctgaaggatgtacacaagctcgagctaatatccggttttaagagtcggccggccccgaaatccggtaccggaaggcccggaaaacccgaatagcagaagtcccgtttttaactaccgncggtttntgtaccggccaaaggttgngnaaacggtnanggggccgttgggtgaaattngggcctacggggggttnntaaggaacgtttttgggagcccttaaccgggnaccntttttttggaaaa

SEQ ID NO: 99465 - DNA, 943 bp, Arabidopsis thaliana columbia
tttccttcgcagtaccggtccggaattcccgggtcgacccacgcgtccggtcgcctgaagatgtacacaagctcgagctaatatccggttttaagagtcgaccggacccgaaatccgataccggaagcccggaaaacccgaatagcagcagtccgatttttactaccgacgtttctgtaccggccaaagctagaagcaaacgctcacgcgccgctgcgtgtaattgggcctcacgtgggcttctcaaggaaacgttttacgacagtcctttcaccggagaaaccattctctctagccaacaacacttgtctccgccaacctcgccgcctttgttgatggctccgctagggaaaaagcaagccgttgatggaggacaccgacgggaagaaggatgtttcttcaccggagtctggtggcgcagaggagagacggtgtctccactgcgccacggataagactccgcaatggcggacaggcccaatgggcccgaagacgttgtgcaacgcttgcggtgttaggtacaaatcgggacgtttagtgccggagtatcggcccgcggcgagtccgacgtttgtgctggcgaaacactcaaattctcatcggaaagttatggagctccggcgacagaaggagatgagtagggcccatcatgagttcatacatcaccatcacggtacggacactgccatgattttcgacgtttcatcggacggtgatgattacttgatccaccacaacgttggcccagatttcagacagcttatttgatttgatccctttttatttttccaataatttaattagggattatcttcttagatcaaattttgctaatctaaattttgatgatgacaatttacttatttcttccttttaatcttatgttttgggcgttgctagacagcttttgtcccattccccatgggatgaaatgaattttttt

SEQ ID NO: 99466 - DNA, 516 bp, Arabidopsis thaliana columbia
  unsure (1)..(516): unsure at all n locations
nnnnnnnnnnnnnnnnnnnnnnnnnnnnnnnnnnnnnnnnnnnnnnnnnnnnnnnnnnnnnnnnnnnnnnnnnnnnnnnnnnnnnnnnnnnnnnnnnnnnnnnnnnacgagtagagagacattcatataagaagcacatttacaaagtcttaaaagttcattataaccatagaccaaaaggctagttagacaacttagcttattcatttccacccatcgaccaaaaggcttgttagacaaagctaattctcacacgagaatccaaagtcctaaaagttcattagagtagatagaaagatgaagcctaagatagataacaaaataaggcattacatcttcattaaacccgagattaaacggataaacatatacaatccaatagcttcctcttcttcttcttagttggtttgagtaagcactgaagtcacctccttcaaaacatccatgttcgccaacaacaactcacatttcttagcatccacaagcttcatcttctcttgaatcctcttcttagtc

SEQ ID NO: 99467 - DNA, 504 bp, Arabidopsis thaliana columbia
atagaagagctatgacgtcgaacgcacgcgtacgtaagcttggatcctctagagcggccgcccttttgtttttttttttgatgaaagagttttctacttcttggttaaaggttttcatttgtaaaccaagaaaatcgattcaaatacaaccttattctgaatgaagattcaaatacaaccttacacatgtccaacgagtgaaattacttaaaataataacgccttctcttctcttcacgagtgaaatattttctcaaagcaagagagtacatattccacgtcgacgtctgagatttggtggtgtagaacaatcctgattctgaatgtagcttggggtatgacaagcacaccgacatcttccaagctcttacatgcctcttctgctccaaattttggatcttctggtatgtctacgtatatgatgttggtttccacagctgcaacgttcactcttaaccgttcaatccggttcagtccttctgccaaaaccctggctttcttatg

SEQ ID NO: 99468 - DNA, 513 bp, Arabidopsis thaliana columbia
  unsure (1)..(513): unsure at all n locations
nnnnnnnnnnnnnnnnnnnnnnnnnnnnnnnnnnnnnnnnnnnnnnnnnnnnnnnnnnnnnnnnnnnnnntgtcttttttttttttttttttaatcccccctcaatactaatttggtgaaatctcaagtggtgtaaaatgaacccaattagtatccacaatgtgtttctctgatcaatccttaaaatttgccacgaatccatacaattccaaaatcaagcttcttggttgttctcgatgagtatcttcttgcaagcttcataacacatgaaggagattccagcagcaggaaccaacttcaagcaactcggtccaagccctttgtaccaaccgagaataccttcatgctcaagtatggtcaccagagcgtgcaacatgttcttgtacacaaccctcccgctaacagctcccacctgcatatgcttccgggccacttcaagagggaaagttgcagtgctcgatagtgcacctgctaaagaacctatcaaaagagtctcaatgtttccaatcttct

SEQ ID NO: 99469 - DNA, 526 bp, Arabidopsis thaliana columbia
atagaagagctatgacgtcgcacgcacgcgtacgtaagcttggatcctctagagcggccgccctttgggtttttttttaaataacgaggttttttttattaggcgacatcactgatactttaatttgagtggacgtctacaatatatcaatccctggtgttcatcatcttcaccttcagaatcagaacgaatgtcctcagcgactttgcctttggcacgtttttggcttatgagcacacgatatatcaagatccaccagtagatggggcagaatctgtaagcaataaagaagtgtgttgaagacatagtacaaaacgttaaggggtggtccggtttccatcaaacgctgcttgtcccagtactccgttgtcactcttatagacttgtactggggcttcattaggatccaggcacggttattttctgagtctcgtacggggtccactccaagaaaaattaggccaaccgagcctcttgtcatagcgtccgggcgccctcggctgcgcccaccgagggcatgtctaaa

SEQ ID NO: 99470 - DNA, 657 bp, Arabidopsis thaliana columbia
  unsure (1)..(657): unsure at all n locations
ttagaagagctttgacgtcgcccgcacgcgtacgtaagcttggatcctctagagcggccgcccttttttttttttttttttttttggcaggtaattgaggcaaaacctctttgcactggaaaattcaaaggctacacaacatgtttcttccaagtcccaatagtaaaagaaaaagaaaaaaaaaacagcagaatacgtatgtacacattacgattcccaaaactgacaagagtttgacctctctctatatggtaaattccttttgatgagtgttgttattattattaccaccttctctcagaccttgaagacatagatgcaatgttctctggacactatctgcaaccaacttgagttttccctgagtcaaatctcctgcagcagaaccgttgacttccactgtacggctcactctctgtttacatttctcccaatcgtccactcgctgccaacaagctcgacctccatgacttccttccattccaagaaacgtcacgcaggggttttcggccaaatggggnnctaaaccaaacnggtncncggaaggggaccagggggnccncagcggggttattggggggntgncccngggnnaaganaggggtngggaaggaccgggtttggggggcgnatggattggttnggggcaatggntgc

SEQ ID NO: 99471 - DNA, 538 bp, Arabidopsis thaliana columbia
acgactcactattgggaaagctggtccgcctgcaggtaccggtccggaattcccgggtcgacccacgcgtgcgcggacgcgtgggatcagaaacagaaacgagacaagaattaattctctcgtccaaatttcttctgggcagaaaccaacatttatccttatccgattcttctagggtttcggaagatctaaccagaaccttcgcaacaagatggataagtatcagagagttgagaagccgaaggcggatacgccgattgctgagaatgagattcgtatcaccagtatgggtagggcacggaactacatcacctatgcgatggctcttcttcaggaaaacaaatcgaatgaagttatcttcaaggctatgggaagagctatcaacaagagtgtgaccatagttgagctgattaagagaaggattcctggtcttcatcagatcacatctattggatcaacggacattacagatacctgggaacctacagaggaaggccttcaaacaattgagaccacgaggcatgtgtcgatgataacc

SEQ ID NO: 99472 - DNA, 523 bp, Arabidopsis thaliana columbia
gcacgcgtcgtaagcttggatcctctagagcggtcgccctttgtttttttttttaattactacatgaaattgcataaaacttattcattaaattaattattgaaccaaaagatgacacacaaagaaactgaacaaagatgaataaaaaactcaatcccacttgctctttaacttatcaacatgcgtaaactcatatgtcaacaccaaactcccatccattctcttcaattcgaagctctctatcaataccaaacatcgataactcttccaatgcgatgacccgccttcaaatctctctgatctcttaatgttagatctttcaccgttgtttaaccatccgaacctttcctcttcccatttcatcctctccacgacaacagacccaagacctatcttcttgtcttgtctctcatcccctaaaacactaaaccaaacaaatccaccaccacttgtctctctagaaatagtttcttgtccctcaagctttaccacttgtgtttctacgtcaacatcaactacaacc

SEQ ID NO: 99473 - DNA, 543 bp, Arabidopsis thaliana columbia
  unsure (1)..(543): unsure at all n locations
ggtgnnnnnnnnnnnnnnnnnnnnnnnnnnnnnnnnnnnnnnnnnnnnnnnnnnnnnnnnnnnnnnnnnncttttttttttttttttatataacatactctttatataagccatcttacatttttaaaataacagtttcattggtactctctattatctactcccttaaaagaacctttctcacaaccggtctcaaaattcacaaccgaggaaccatgcttatgctccgtagcttcattcgccaagcgccgccactctacggccttctctcgcattttctttcccttctctctatccattagctctctaaccactgtctcgacctcctccctcttaacatctccaccaatctcgacaccaactccccactcatcacaacaaaacttacaattcgtttgctgctcggcaaaaaacggccagcatattatcggaacaccaccagagatactttcgagtgtcgagttccacccgcaatgcgtcaagaaccctccaaccatagggtgggaaataactttttcttgagaacaccaactcaccagcatt

SEQ ID NO: 99474 - DNA, 1060 bp, Arabidopsis thaliana columbia
  unsure (1)..(1060): unsure at all n locations
atgatcctgccagctacnnnnnnnnnnnnnnnnnnnnnnnnnnnnnnnnnnnnnnnnnnnnnnnnnnnnnnnnnnnnnnnnnccacgcgtccgcaaaagcatctctctgtttcttctcctctcttcaagctttttgtttcgtctcagtcgtcgtcatcatctctgacagcaaggttattcacataggcaaagaagtcattcttttgcatgctgttttccaataaagttaattctctaacagaacaagtttcgagattggatattgacgacaacgatatgggacttggaggtagtgaaacaatggaatgcaagtgtggtatgcctctgtgtatctgtgtagctcctcccaaatcaactgataaaccaaacccacctgctaccattgctcctgtggttcttcctcagttgaagtcagaggcttcagcaaaaagtaaaggttccacttccagcagcaatgctagatcagctctaaatgctggactagacaccccccaaagagactatgaagccagtggggagggattaagagaagcgattaagaatggtgacagtgctggtgcgaaaaagcttctaaaagagggcgtagatgcaaattaccgagacaagcaaggaatgtcggtgcttcatctggctgtcctgttcaaccaaactgatattgcgttgatgttgatggatcatggagcaagccttgagtacaagaatgcacaaggagaaacaccgctagattgtgccccggcaacactgcaatacaagatgcgggaaaagatgaagtccacttaacagcatgcctcagacagagctacaaatcattcctcaaatctttttcagataagggaaagatttgtaatggaaaaaaatcaagggatcatgaatttgcttgtaactttagttgcattctgtgtgcaattttccatgttatgtgatctttgaaccatgtcttcttccgctatgacataaaaactcccttttgttttaaaaaaaaaaaaaaaaaaaaaagggcggccgctctagaggatccaagcttacgtacgcgtgcatgcgacgtcaagactcttctata

SEQ ID NO: 99475 - DNA, 524 bp, Arabidopsis thaliana columbia
  unsure (1)..(524): unsure at all n locations
nnnnnnnnnnnnnnnnnnnnnnnnnnnnnnnnnnnnnnnnnnnnnnnnnnnnnnnnnnnnnnnnnnnnnnnnncttttgttttttttttctttcaacttctatttttttgccttcataattgcggttttataatgaatacaagtatgaaacattgtttcctctcattttgcttaactatagataaaagataggataaaatctcattaggaataagaaaaacacagaacataattaagattataaataaaagccaactaactcaaaattctacagttattgctacaccacataaagggttcacgatcatgagtcatgaccgcatgatcatcccaaacccgacccggaatcacaacgtatccatttgggtcaccacgatggggctccgaaccacgtgtttcccaccatcaaaccacgtgactgacccaaacacagcacctggttctcccaacacaacattccttgtattaaccgtcactgtaaccgcatagctccgtctcttaacggccgaagtaaacacaagcct

SEQ ID NO: 99476 - DNA, 655 bp, Arabidopsis thaliana columbia
  unsure (1)..(655): unsure at all n locations
atgatttgccnnnnnnnnnnnnnnnnnnnnnnnnnnnnnnnnnnnnnnnnnnnnnnnncgtgcgnaagcttggatcctctagagcggcctgcccaagcgggggacctctctttttgcttaactatagataaaagataggataaaatctcattaggaataagaaaaacacagaacataattaagattataaataaaagccaactaactcaaaattctacagttattgctacaccacataaagggtttacgatcatgagtcatgaccgcatgatcatcccaaacccgacccggaatcacaacgtatccatttgggtcaccacgatggggctccgaaccacgtgtttcccaccatcaaaccacgtgactgacccaaacacagcacctgtttctcccaacacaacattccttgtattaaccgtcactgtaaccgcatagctccgtctcttaacggccgaagtaaacacaagcctaggtgggtttcactgtcaccgtcactcctctcggcgactctatcctcgcccgataaaccgcctcagcctgcccgcccttcgtcgccgtcctcccncgcgtccgcggncgcgtgggcggncgcgtgggcggncgcggcctcgcccgcgtgggtcaacccgggaattccggnccggtacctgcaggc

SEQ ID NO: 99477 - DNA, 529 bp, Arabidopsis thaliana columbia
  unsure (1)..(529): unsure at all n locations
nnnnnnnnnnnnnnnnnnnnnnnnnnnnnnnnnnnnnnnnnnnnnnnnnnnnnnnnnnnnnnnnnnnnnnnnnctttgggtttttttttgtttttttttttttttaatggagtcaccgtagctgcgtaagctatggcaagaaagtaaattttatcttccttaaatataaaaagcattcgttcataatctttatttttctctaggaataatttcgactgtggaaagtagaaacatattatatgaaaccaaccgcttgcaccatggaatatgaaaagtagaacttggttatgtagtgcattcacgtttgcgtgtgatcggtgatggagttttagttcttgtggactccgagccttagcctgaagtcttcttccataagtggaaggccttcacgaagcttcacctttggttcccatcccaacacttctttagcctttgtggatggccggcttcctctggcttggatcatccgggtgtggtctcaaccatctttatctctatgctgcgggttaatcagctctttcactgtctc

SEQ ID NO: 99478 - DNA, 526 bp, Arabidopsis thaliana columbia
  unsure (1)..(526): unsure at all n locations
ccnnnnnnnnnnnnnnnnnnnnnnnnnnnnnnnnnnnnnnnnnnnnnnnnnnnnnnnnnnnnnnnnnnnnnccacgcgtgcgaaggattcgtgattgtttgacgcagttatatgcaaaggacattactcctgatgacaaacaagaactcgatgaagctctgcaacgagagattcaagctgcttttcgcacagatgagatccgagagaactcctcctacaccgcaagatgaagtgagagcagggatgagctacttccatgagacaatctggaaaggagttccaaagttcttaagacgtgttgacacagctttaaagaacattgggatcaacgagcgtgttccttacaatgcgcctctcattcagttctcttcttggatgggcggagaccgtgatggaaacccgcgagtaactcctgaagttacaagagatgtatgcttattagctagaatgatggctgctaatctctacttctcccagatagaagatcttatgtctgagatgtctatgtggcgttgcaatgaggaac

SEQ ID NO: 99479 - DNA, 1263 bp, Arabidopsis thaliana columbia
  unsure (1)..(1263): unsure at all n locations
nnnnnnnnnnnnnnnnnnnnnnnnnnnnnnnnnnnnnnnnnnnnnnnnnnnnnnnnnnnnnnnnnnnnnnnnnnnnnnnnnnnccacgcgtccgcccacgcgtccgatatttttttaaaaagaaaaaccaaaaaatcctttgaaacttttttagcctgtcgcttctctttccatcgtcttcctcgtgaacgaaacttctcgatcttcttttcttttttttcacctgtttttcggtatcacgagaatactacacttcccactccactttatcggatatatttccttgattttctccgattgtggtcaatctggaaaattattgagaatctctccctcacttaaccaaaagcgtttttaatcagatagagagagaggaaaaagcatcaaccaaaccatggctgcgagaaatttggagaagatggcttctattgatgctcagctcaggcttcttgctcctggcaaggtttctgaagacgacaagcttatcgagtacgatgctctgttactggatcgatttctcgatattcttcaggatttgcatggcgaggatgtcagagaattcgttcaagaatgctacgaagttgcagctgattacgatggaaaccgcaacactgagaagcttgaggagcttggaaatatgctgacgagtttggatccaggggattcaattgttgtcactaaatcattctccaacatgcttagcttggctaatctggctgaggaagtccagattgcttaccggcgtaggattaagaaactcaagaaaggtgatttcgctgatgaggcctctgcaacaacggaatctgacattgaagagactctcaagaggcttttgcagcttaacaagactcctgaagaggtctttgatgctcttaagaatcagactgttgacttggttttaactgctcatcccactcaatctgttcgtcggtctttgctccaaaagtttggaaggattcgtgattgtttgacgcagttatatgcaaaggacattactcctgatgacaaacaagaactcgatgaagctctgcaacgagagattcaagctgcttttcgcacagatgaaatccgaagaactcctcctacaccgcaagatgaaatgagagcagggatgagctacttccatgagacaatctggaaggngtccaaagtcctaagacgngtgaccagctttaangacattggatcaacggngngtccttanatgggctccatnagtccctctgntggggancgtgtggaacccggggaaccccgaagttc

SEQ ID NO: 99480 - DNA, 765 bp, Arabidopsis thaliana columbia
  unsure (1)..(765): unsure at all n locations
nnnnnnnnnnnnnnnnnnnnnnnnnnnnnnnnnnnnnnnnnnnnnnnnnnnnnnnnnnnnnnnnnnnnnnnnnncttttttttttttttttgcgtgaaacattgattttttatacacactcaagcggtcaaatctcgtcgacaaaacaatacaaacgttaaaaagattaaaaaaaacctttccgctttcttttatctcacaaaggcctctccgattaagtaacagagattttttttagtatttggcctattggtaaaacattatcagcaaaattttagggcaagctagagtaaaatgaccctttttaaatgatatcttcaactattcttttctttctgcacaacatccgattctcttaggcttctgtttctccagctttggacaaaatgtgattccgcaaataagtggtacagcaaagaagagtatataattcaagaccgtaaactccatccacgtgcagccaattcacgccgtattctcgtagctgcctctgctgtgtcattcaatggcggataactccaactttccgacatatcttcgaaacctgtaaatgagcggacaactcctcgctccctcaaagacttttggaattctgcaatcttccatttacagtgatcggctccaacaacgtacactggtttcccggtgctaacaagcttcgcttatcagactgactgaatctgctgtcaccaaaaaagcatcaccccaagctagatgccccatgtaaggatttggttcttggccattccatatgtnaactttggg

SEQ ID NO: 99481 - DNA, 524 bp, Arabidopsis thaliana columbia
  unsure (1)..(524): unsure at all n locations
nnnnnnnnnnnnnnnnnnnnnnnnnnnnnnnnnnnnnnnnnnnnnnnnnnnnnnnnnnnnnnnnnnnnnnttctttggtttttttttttttttgccattcctgtcgaacataaactgataaacatggaaacataatccataaaaagaaaaaaaccttttccacacacaaagaaatcataatatgacgagctatttccgaaaactccaatctcaacaaactacaaacaaatttatagacacaaacacattttagacccaaccttgtttgtattcgcggaagagatcctcagtctgagcattcctaaacgcgcttcaagcaataacataaacccatatgagaacaacgactgggatgataagtttgagatttgctttacgccattcttttctaaggtttcccaataaaccagctttgcatgagttgcaatggtaacaaagctggctttggtcattgctccattagaacaggctgggtctgcagccatattggttggatttagccacagggttgggttcacaaagtt

SEQ ID NO: 99482 - DNA, 565 bp, Arabidopsis thaliana columbia
  unsure (1)..(565): unsure at all n locations
nnnnnnnnnnnnnnnnnnnnnnnnnnnnnnnnnnnnnnnnnnnnnnnnnnnnnnnnnnnnnnnnnnnnnnnnctttgggtttttttttttttttttttttttaggtcccatgagaaacccttattgatatttgtttaaacatgacattaagattcactatgagagagatgatcacaacatatatggttcacaacttcacaagaaaaaaagatcagagatcgaactaaatgtacttgttaggagatcatatgcattgaagatctgataagtccatgaaaagtatcagtcgtttctgcaagaaatgtagctagcaagagctaccagaggcgccgccttgtcagactcaaaccctagaagctgctcctcggcttctctgctcagtttctccgcaacttccctggatctctccaaacctatcagccttggatacgtcagctttccagccattacgtcttttcctgcagtctttcccaattcctctgtagattttggtacgtcaagaatatcatcaacaacctgaaacaatagtccaatacacctagcatactttctaagcttttcgatc

SEQ ID NO: 99483 - DNA, 782 bp, Arabidopsis thaliana columbia
  unsure (1)..(782): unsure at all n locations
nnnnnnnnnnnnnnnnnnnnnnnnnnnnnnnnnnnnnnnnnnnnnnnnnnnnnnnnnnnnnnnnnnnnnnnnnnnnnnnnnnnnnnnnnnnnnnnnnnnnnnnncttttttttttttttgggttggcatagacaatgctttgtttactttcctcaaaatcatatacataccaaaaagaaaagttatatgttatatgtttattttcacaaacaaaaataaaaaccattattttattattttattctaaaatgatgattgatgaagactaattggcatgatcatcttcgttggaagttgagtttgcccacgaagaatgcaaacatagaagctaaggcaatgggaaaagcgatttgaacaaccgcggtaaccgccaaaaggtcatgatgaaatccaaaatagtctttcaagaatcttgcaaccgtcgtggattgtccaaagacattgatctcttcatgaatatcgccgtattgggacgagataaacccgttgagtgtccaagacgttggtgttagataatataaccaaatccaccaccctggtacttgctgcaattttcacaaaccaaaagaatacattacaaaacattttcttcttggtaaagattcttgttcaagaaactaaaggatgggtgatcttaccgtttgggggatcaaaaaccccgaaaaaaggttgaaaccaacataaaagagcgattgaagaatcgcggcaaccatgaagtttggcgtgatggagaccaggaacattgcaaggtaattgaaagggggtagtgaacaaaacataga

SEQ ID NO: 99484 - DNA, 715 bp, Arabidopsis thaliana columbia
  unsure (1)..(715): unsure at all n locations
ggctgcccaaaatgtcataacacaacaaattggacaataggattattaaaacgaagcatagcttctttaacaaaagacaaacagacaagagaaaggtcgacaatttcttcaccatcatcctcatgcttctactacgtcgccaccaattacttctctctcctccctcagcctctctcttacttggcttggccactctattgggcctgtcaaggctgtgtcctaactggtatctgggtcatagcccacgaatgcggtcaccacgcattcagcgactaccaatggctggatgacacagttggtcttatcttccattccttcctcctcgtcccttacttctcctggaagtatagtcatcgccgtcaccattccaacactggatccctcgaaagagatgaagtatttgtcccaaagcagaaatcagcaatcaagtggtacgggaaatacctcaacaaccctcttggacgnatcatgatgttaaacngtccagtttgtcctcgggtggnccttgtacttaggctttaacggnttntggnagaccgtatnacggggtcggtttccaattttttcccaanggttccaatttcaatgacccggaacggcttcagataaacntttttnatggggggattttagccgcctttttggcttaccgtanggtgtnaaaaggnttgctcgtncttccttagggnccgtttaaaggannggcnnggtttnc

SEQ ID NO: 99485 - DNA, 1612 bp, Arabidopsis thaliana columbia
  unsure (1)..(1612): unsure at all n locations
accacgcatccgcccacgcgtccgccgaagaagagccacacactcacaaattaaaaagagagagagagagagagagacagagagagagagagattctgcggaggagcttcttcttcgtagggtgttcatcgttattaacgttatcgcccctacgtcagctccatctccagaaacatgggtgcaggtggaagaatgccggttcctacttcttccaagaaatcggaaaccgacaccacaaagcgtgtgccgtgcgagaaaccgcctttctcggtgggagatctgaagaaagcaatcccgccgcattgtttcaaacgctcaatccctcgctctttctcctaccttatcagtgacatcattatagcctcatgcttctactacgtcgccaccaattacttctctctcctccctcagcctctctcttacttggcttggccactctattgggcctgtcaaggctgtgtcctaactggtatctgggtcatagcccacgaatgcggtcaccacgcattcagcgactaccaatggctggatgacacagttggtcttatcttccattccttcctcctcgtcccttacttctcctggaagtatagtcatcgccgtcaccattccaacactggatccctcgaaagagatgaagtatttgtcccaaagcagaaatcagcaatcaagtggtacgggaaatacctcaacaaccctcttggacgcatcatgatgttaaccgtccagtttgtcctcgggtggcccttgtacttagcctttaacgtctctggcagaccgtatgacgggttcgcttgccatttcttccccaacgctcccatctacaatgaccgagaacgcctccagatatacctctctgatgcgggtattctagccgtctgttttggtctttaccgttacgctgctgcacaagggatggcctcgatgatctgcctctacggagtaccgcttctgatagtgaatgcgttcctcgtcttgatcacttacttgcagcacactcatccctcgttgcctcactacgattcatcagagtgggactggctcaggggagctttggctaccgtagacagagactacggaatcttgaacaaggtgttccacaacattacagacacacacgtggctcatcacctgttctcgacaatgccgcattataacgcaatggaagctacaaaggcgataaagccaattctgggagactattaccagttcgatggaacaccgtggtatgtagcgatgtatagggaggcaaaggagtgtatctatgtagaaccggacagggaaggtgacaagaaaggtgtgtactggtacaacaataagttatgaggatgatggtgaagaaattgtcgacctttctcttgtctgtttgtcttttgttaaagaagctatgcttcgttttaataatcttattgtccattttgttgtgttatgacattttggctgctcattatgttatgtgggaagttagtgttcaaaaaaaataaatcaaagaaaaatacaaaaaaaaaaaaaaaggctnnnnnnnnnnnnnnnnnntgtcctaannnnnnnnnnnnnnnnnnnnnnnnnnnnnnnnnnnnnngtagctgnnnnnnnnnnnnnnnnnnnnnng

SEQ ID NO: 99486 - DNA, 873 bp, Arabidopsis thaliana columbia
  unsure (1)..(873): unsure at all n locations
nnnnnnnnnnnnnnnnnnnnnnnnnnnnnnnnnnnnnnnnnnnnnnnnnnnnnnnnnnnnnnnnnnnnnnnnnnnnnnnnnnnccacgcgtccgctgagcttgagcaggtgcgagtagtgaggaaggtgcatcgcttcgattcttcttcttcttcttcttcttcgttgaatccgtcatcctccgatcactgaagaggtttccgattacctttctctctctctcattctcattctcaccatgcgattgcttcttctctcccttcgccgtgtaactctattctcgaggcatcaacgatacgctttcgctcccattcataattgtttgatctctatcaatcccagcacatcttcttcatctctattctcggcttcttccttctgttcgtctccacattccaatggagatggaaagattgcagggccgttagtggagtatgaacgcagaatcgtagctggagagttattggatggagatttatgtcagctaggtacactaagagaacttcagagactctacgacgagcttgttcaatctgctgatgcttgtcgattggatcgttattctgcatctgcaaagtccactangagtaattggttctggaacaaatntgtgtctcactcttctgtctctcctgtcaaaggcttatacttatatggaggagtangaactggaaagacaatgctcatggacttngtttttatcaattgccagctagctggagatcacanaggattcactttcacaatttcatgttgagtgtgcatagcccgcctgcaaagcacaagggtcttgaagatccactngaagtcgttggcctggaatagctgacgaggcatattactatgcttagatgagtccatgggcattgatgt

SEQ ID NO: 99487 - DNA, 548 bp, Arabidopsis thaliana columbia
  unsure (1)..(548): unsure at all n locations
taggaacannnnnnnnnnnnnnnnnnnnnnnnnnnnnnnnnnnnnnnnnnnnnnnnnnnnnnnnnnnnnnnnnncttttttttttttttttgatgatcactctcttcttacaataaacagtgtggtatggcaaacatttgaacggtaataatacaaaggttctattttagtttatttacctatctgacagtcacaaatcacaagacctcgtcaatggttacatagcggcgctcctgaatggagagctgtgcagcaactcccatggcaacagccatcaatccgtcttccaaatcaacagctgctattccttcacctctgattgctgataagaaggtgaggtgttccaagtaacttgacccgtgatgcaacccttcatattttattctttcatcttctgcttttattgtttgaacgtgttctcttcctccaatacgactgccagatcgaactataccctctggaacaagtgcctccccctttccaatgtcaccagtaacagaaatttcttgctcggttttgcttccttcagcaaacatgcaaagatcgag

SEQ ID NO: 99488 - DNA, 527 bp, Arabidopsis thaliana columbia
  unsure (1)..(527): unsure at all n locations
nnnnnnnnnnnnnnnnnnnnnnnnnnnnnnnnnnnnnnnnnnnnnnnnnnnnnnnnnnnnnnnnnnnnnnnnnctttttttttttttttttaggtgatatgggtgtagtaaatcccatatatagcaaaagaggatacaaatgtgagtgcacctctgtatttcacatttcagtaaggattaaagaggacacaattacaacgtatgcaagaaatatgaataaccctatttgaactaataatcttggattttctctcatatttggggacgtcaccgaccttgcaattcgctgcgagagtcgatgaaacggtaaactttggatgaacacgatgcctggtcccgttagagttgctgttactacattatcacccccgaaaactgcccgtcttacaggagcagcattgtatttgatttggaaattgatcgacggagtgagagcggcaatgcaagaaacgtcaatggtgagaacttctcccacctccaggtttttctgtacaacagagccgccagcgataataaaagcaagaccc

SEQ ID NO: 99489 - DNA, 593 bp, Arabidopsis thaliana columbia
actatagaagagtcttgacgtcgcatgcacgcgtacgtaagcttggatcctctagagcggccgccctttttttttttttttgcttttctcctccaaaagatgctacttctaccgtgtctcctcccgtcgctgcacaaagccataaagatgcacttgctaaccatcccctcgatttcttcggttgctgacccagtcttgtagtggttttcaccgacctgttcttccttacatgccaatccatgtgtttactatgctcttcttgacacttgaatctcaacccacacgatgaacattgtctcggcatatcagaatacagagacttaatcacagattcatgtcgaacattaagtgacgatggattatcaaagcttaatccaacaggcaaagaatcactattacttgcttctaaagttttcttctctttctcattgttaagaagactaagcaaatcagtcaattctttgctcaaaacaattggttgatgcatagattgagacacaactgaaaccatgttcgaatgattcatcggattttgaacattcgtaaaaacaggagtgtttggtacaaaattcgatgacctaacaggataattc

SEQ ID NO: 99490 - DNA, 854 bp, Arabidopsis thaliana columbia
cctgcaaccatgattggtacagaagacagaatcttgaacccctggtcaatgttcgttaaaaaatatggtttcctcccgctcataggtggtggaaccaccaaattccagcctgtttatgtggttgatgttgctgctgcgattgttgctgctctaaaggatgatggctccagcatggggaaaacatacgaattgggtggtccagatgtctttaccactcacgagttggcagagatcatgtatgatatgattcgtgaatggcctcggtatgtgaagcttccgtttccaattgccaaggcaatggcggctcctcgagacttcatggtgaacaaagtcccgttccccttaccctctcctcagatcttcaacctggatcaaatcaatgcacttacaaccgatacacttgtatctgacaacgccttgaagtttcaggatctggaccttgtcccccataaattgaagggatatccggtcgagtttcttatccaatatcgcaagggtggtcctaacttcggttctactgtcagtgaaaagataccaacagacttctacccttgatgctgcttctctgctcaaaggtcatttcctggactaattttttcatgcaagtgtcacaatgagattgcggaaaccagatttgctatgttgatgactttcatttacttctgtcaataataaacgggtcctcctctttgttgtgttcttgaaaaaattataacacatcaacatcattataagttagagaggggacaatatatttcttgatgtggttggtcccttaggatttatgcaatgtctggttcgtttcgaactccatgtacttcttcccctgagtaaaactaaagccatatgccttc

SEQ ID NO: 99491 - DNA, 531 bp, Arabidopsis thaliana columbia
  unsure (1)..(531): unsure at all n locations
nnnnnnnnnnnnnnnnnnnnnnnnnnnnnnnnnnnnnnnnnnnnnnnnnnnnnnnnnnnnnnnnnctttggttttttttttgtttgatcggtgtttattatgaagtgacggagatgcaaaagaaaaggacaacaacaaacgacagtacgtcaagtaaaagttaaaaaacataaacgactaagagtagtaacataacatagaaacgactaagcgttgaagaagataacagagaaagaaacaaggcgttttttttttttagacaccatcttgttttcttcttcttaaggacggaactttggataaaggtttggtgccaagcgtggctcaacggacaagtgaagaggtttagccctaagcaatgatgcctcatcttcctcggggcttaacgggcccaaatcttgatggggggttccagttaaacccttgaagaaaccttgccaacgaacatatccagcaggatcggcccggctttaacaccggtgcagcgctcgttggccgggtgctaaacgaggccaaacacgtttgttgttt

SEQ ID NO: 99492 - DNA, 521 bp, Arabidopsis thaliana columbia
  unsure (1)..(521): unsure at all n locations
nnnnnnnnnnnnnnnnnnnnnnnnnnnnnnnnnnnnnnnnnnnnnnnnnnnnnnnnnnnnnnnnnnnnnnnnnnnnnnnnnnnnccacgcgtccgggttcaacaccgggttatccttacggtggttatcataacggtttccgtggagttcctcctcgtggacaagagcgtcctatggctcgtggaggaaaccaaagtgatgcatttctgaagaatatcctcttttttgttggaatctgtgtggtgatatttctcatctggtgaaaacgaatcacatttggtgtatttccaggtatgatcaaacttacttacttggtgcaagttgtgtatgtaaatatggtaatagctgagtgtacttgtctgctatttcgacgttgttattgtatttttgttttgaagatgaaccgtgagtctacaagcttttttacacaactcttttgttgcttttgtgttttgtctaagcatcttgtgaaaactagttgtgacataaatggtgcgtgttatgacataagaagtattatg

SEQ ID NO: 99493 - DNA, 813 bp, Arabidopsis thaliana columbia
  unsure (1)..(813): unsure at all n locations
nnnnnnnnnnnnnnnnnnnnnnnnnnnnnnnnnnnnnnnnnnnnnnnnnnnnnnnnnnnnnnnnnnnnnnnnnncttttttttttttttttcacacagagaagaaacaaggtcttttatctttcctgtaaattacaaatcagctttttttgtctgacaacagcaaagttctaacttgttttttctgttgtttttttttgcagacaatggctttcctagagagaacgtattgaaaaggagaaattctttgttgggtggaagtgaaaatggacctccgccgcaaaaacgactgaccaatcctaatcagtgaaacatctgtaaatttgtgtactactgctaaatttattgtatctgcagagattcttcaacattcatatacagtcaaattatgatcaacaattttcataacctctggacctttgagacatcagtacaatgactcataagcttatgatttatataaactctcacattgagataaatattatcagtcttttgtgacaagtaactcactagaagttctgtactgaaaagtctgaatcttcttgggctccaaaaggttgcattttcaactactctattttgagaaagctgcttcttcttgttcagcatctgctgtttctgactcaatcttcttgaatgtgagcttttgctgaggtaactggccattggagaacgctgtgacctcggtatcgatcaaaatgccatcttcctccttgaaatctcctctcaagatacccttagcaagctcattctcaatgttttgctgtatcacacgcttaacaggtctagctccatagtttggatcataccc

SEQ ID NO: 99494 - DNA, 517 bp, Arabidopsis thaliana columbia
  unsure (1)..(517): unsure at all n locations
ccctctcgtccgctctctcttcttcttctctctattccatggctttagtacgtgaacgtcgtcagctaaatctccgtcttcctcttcctccaatctccgaccgccgcttctccacctcttcctcctcagccaccaccaccaccgtcgctggctgtaacggaatctccgcttgtgatctcgagaaactcaacgttctcggatgcggaaacggcgggattgtttacaaagtccgtcataaaaccacatcggagatctacgctttgaaaacagttaacggcgacatggatccgattttcacaagacagttgatgcgagagatggagattctccgccgtacagattcaccgtacgtcgttaagtgtcacggaatcttcgagaaacctgtcgtcggtgaagtatcgattctaattggggtttttggnncggngggacccctnggatcatttngggggggtntacgggggcaaaaattngccggnttcgttaaaaagttttaaaagggttagntttttncang

SEQ ID NO: 99495 - DNA, 649 bp, Arabidopsis thaliana columbia
  unsure (1)..(649): unsure at all n locations
nnnnnnnnnnnnnnnnnnnnnnnnnnnnnnnnnnnnnnnnnnnnnnnnnnnnnnnnnnnnnnacnncctcatactttgggtttttttctttaacctgcaaactcaatccaatccatgtaacaacaataaaagctttctatctcacactcttttaaagcaaatgaaaagatgaaaaagaaacaatctttacaaaagaaatgaaacagagattaataaggcaaacagagaatgatactttcttgtttctggttgtttttgtgcttaaataatggattttgtgtattatgaagtgaataagccccaatggtgatctgatggtagagtttccttgatcttttcaagtctcttgagaatgtccagaaacgacggtctctggttcatgtctgcgtcccagcatttcacaattaactctcttagatctgggtgtgcatcctttggaacggaatgtaggtctagtgtccatcagatacatggttggctgcctcatatggctcagggttcgcaaatgggggctctccccagcactcgtaagtatcatgcaaaggagagacacgacttctcggacgcgtgggcgancgggaanccggacgggactgaagcggaccagcttccctaagnagtcgnatagagctggcggaaanagggcaag

SEQ ID NO: 99496 - DNA, 529 bp, Arabidopsis thaliana columbia
  unsure (1)..(529): unsure at all n locations
nnnnnnnnctatagnagagttatgacgtcgactgcacgcgtacgtaagcttggatcctctagagcgtccgcccttttggtttttcttttttcatgtaattgcgaaatttatttgacataggaatatttatttgtagatatcgaaatcactggtaaataaagaaagaaaaacattcatctcacatttcttcaaagagataccaatctccaaaccaccaatctcatccctccttgccgacatagaaaactcattggtcttgtaaagagacataacatcagtcttaacaggtcttccccacccgaaatccgacccgtatatcccaaattggtttgatcctgtaacagtcacattctgtgtatccaattgcatattttttgttccatcctcatacacttcccatattgactcaatggttcgggaacccaaacctctaaccgaatcacttaaaatctcaactcccttaaccgtatccatcttttcctagaaaccgttgtggctttgtatccattgaaatcatttggcaagacac

SEQ ID NO: 99497 - DNA, 607 bp, Arabidopsis thaliana columbia
  unsure (1)..(607): unsure at all n locations
actatagaagagtgatgacgtcgcccgcacgcgtacgtaagcttggatcctctagagcggccgccctttgggttttttttttttttttttttgtattgaacttggttaaatcattttctagaaccgaatctcgtcacaacttaaaaaaaaaaaaacataaatccgagttcaacatcctaatcatacatatcaccacgaaacatgataaataaggcaaacagaggtggatcctcagatctgcatagcatcttgttcgtcttctgcagcagcttcatcgtttttgattggttcactgaacatatactgactctgatactcaacaagatactgcatcgatctcctcacatccaagaacagtctgtaaactctctgaatatcctcaacctccacgactttccctttccggttctggcatgacaatgcagctgcggttataagatgaatcgcataccttagagatgtatcacgtgcgatcaatgtcaaaagctgtttggcctcttcggtaatccaaaggctccccttgggaaggggtttaaaantccctnngnacgccnngnaggngggggngttttaaaaggcagggnaacgggcccggggggtcggttgc

SEQ ID NO: 99498 - DNA, 512 bp, Arabidopsis thaliana columbia
  unsure (1)..(512): unsure at all n locations
nnnnnnnnnnnnnnnnnnnnnnnnnnnnnnnnnnnnnnnnnnnnnnnnnnnnnnnnnnnnnnnnnnnnnnnnnnnnnnnnnnnnnnnnnnnnnnnnnaaacaaagataattttattcacaaagggaagcatgaaacggaaaatcaaaagtcaaaggttaagagacacgattaaggaactacatcagcaccacatataggacacgtggagcgataagagagaagattagaccttctctggcatgaggtgttggaacgactgttcacataaatctttgtccttagcttgggaagtctctagcactagatcgtctctgccaactgtggaacgaacagaagcagcttgtaaagagaaacttagagacatagatatggcccgccgaagtgtttgtcgtccatgagagaaaccgcttctgtagccctgtctcgaactcatggctcgaggtaaggtcatgttgcttgtccttatcagattcaagctaaccaattggctttgcatctcctctggtaactg

SEQ ID NO: 99499 - DNA, 1275 bp, Arabidopsis thaliana columbia
  unsure (1)..(1275): unsure at all n locations
tggggaagctgacctctgcctttcctcctccattaatcaaggaatataaatcagctttaaactcagtcctcttatggaagacaaaaaagcaaatatttattcgtaaatataacttcagaaccctttcaacaaaactctctctgttctttctccgtggagaagttaaagatgacgatgtcggagaactcaagaaacttggaagctggtttgctactgaggaagaaccaaaacgacatcaacgaatgtcgtatcactgctgttgtacttttcagtactttcgtttctgtttgtggctctttctgcttcggttgtgcggcaggttattcatcagttgctcaaacagggatcataaatgatttaggtctctctgttgcacaatactccatgtttggttcaatcatgacttttggaggaatgattggtgccatcttcagcgggaaagttgcagatctcatgggtcgaaaagggactatgtggtttgctcaaattttctgcatcttcggttgggttgcagtagcattagcaaaagactccatgtggcttgatattggaagactatccacaggatttgcagttggtttattaagctatgtgataccagtttacattgcagaaataacaccaaaacatgttcgaggagcgtttgtatttgctaatcagctgatgcagagttgtggattgtctttattctacgtcattggaaattttgttcattggcgtaacttggccttaatcggtctcattccatgtgcgttgcaagttgtgactttgttctttattccagagtcccctagactactgggaaaatggggacatgaaaaagaatgtagagcttcattgcaaagtcttcgcggagatgatgcagatatctctgaagaagccaacactatcaaagaaaccatgatcttgtttgatgaaggaccaaaatcgcgggttatggatttctttcagagaagatatgctccatctgttgttattggtgtgggactaatgcttctacaacaactctctggaagctcaggacttatgtnctatgtcggtagcgtatttnataaaggagggtttccaagcagcattggctcaatgattcttgcagtgatcatgntaccaaaagctctattggggctgattttggttgagaaaatgggccgagnccacttntattggtgatgaccttaatttacaggctttaccggtggaatgncntttccngntgntcctnagtttncctntgctttgggnaaatggatcttntnggnnncccggtttcaaaga

SEQ ID NO: 99500 - DNA, 471 bp, Arabidopsis thaliana columbia
cccacgcgtccgcggacgcgtgggtttctaacaaatgcacacctcactacacgcatacatacatcatgatgagctttaccacatcattaccatacccttttcacatcctactagtctttatcctctccatggcatcaatcactctactgggtcgaatactctcaaggcccaccaaaaccaaagaccgatcttgccagcttcctcctggcccaccaggatggcccatcctcggcaatctacccgaactattcatgactcgtcctaggtccaaatatttccgccttgccatgaaagagctaaaaacagatatagcatgtttcaactttgccggcatccgtgccatcaccataaactccgacgggattcgctagagaaagcgttttggggagcgagacgcgagatttggcagaccggcctcaacttttcatcatggagacaatcggagacaattacaaatcaatgggaatttca

SEQ ID NO: 99501 - DNA, 604 bp, Arabidopsis thaliana columbia
aagctacaatacgactcaccttagggaaagcagctacgcctgcaggtaccggtccggaattcccgggtcgacccacgcgtgcgcccacgcgtccgctctactgggtcgaatactctcaaggcccaccaaaaccaaagaccgatcttgccagcttcctcctggcccaccaggatggcccatcctcggcaatctacccgaactattcatgactcgtcctaggtccaaatatttccgccttgccatgaaagagctaaaaacagatatagcatgtttcaactttgccggcatccgtgccatcaccataaactccgacgagatcgctagagaagcgtttagagagcgagacgcagatttggcagaccggcctcaacttttcatcatggagacaatcggagacaattacaaatcaatgggaatttcaccgtacggtgaacaattcatgaagatgaaaagagtgatcacaacggaaattatgtccgttaagacgttgaaaatgttggaggctgcaagaaccatcgaagcggataatctcatagcttacgttcactccatgtatcaacggtccgagacggtcgatgttagagagctctcgagggtttatggt

SEQ ID NO: 99502 - DNA, 525 bp, Arabidopsis thaliana columbia
  unsure (1)..(525): unsure at all n locations
nnnnnnnnnnnnnnnnnnnnnnnnnnnnnnnnnnnnnnnnnnnnnnnnnnnnnnnnnnnnnnnnnnnnnnnnnnnnnnnnnnnnnnnnnnnnnnnnnnnnnnnnnnnnnnnnnnnnnnnnnnnnaactgacatgaactagtcataggtttacttcttctactatcgggcatttttggggggggccacccaaaaatgctcatgagaaaaaaagagatccccatttgactatccaaagaaaaagaaagcacacgacattgttctcttctaatctcctaaatataaaaacgaatatttcttcctttaatatacaatcacaaaacattataatatactgtaatgaataaccaaaaaaaaagtaaattcactctttatctgtgggtatagtaaagccacaccatatgaatcttgtgaagggtattttaggtaatttcacaaagaacggtcagattttgacctcaaccaaaaaaatcaacgggcggtgatcaactctacctaaatccacaagcttcttagaccggttaccg

SEQ ID NO: 99503 - DNA, 308 bp, Arabidopsis thaliana columbia
ctctctctctctctctctctctctctctctctctctctctctcttctcctctaaccaaatttcccgatgtgaaaaaacaagtttccgatcaactcaaaccaccgtcaccacttcttctctccgacatggctccgtcgttaaggaatttcaacttctttcaccgcttctccaccttcctcgtcttctctctattctccgtcgtttcttccgacgatctccaagtcttactcaagctcaaatcatcattcgccgattccaatctcgccgtgttcgattcctggaaactgaactccggtatcggtccttgt

SEQ ID NO: 99504 - DNA, 641 bp, Arabidopsis thaliana columbia
  unsure (1)..(641): unsure at all n locations
tgatactctcnnnnnnnnnnnnnnnnnnnnnnnnnnnnnnnnnnnnnnnnnnnnnnnnnnnnnnnnnnnnnnnnnnnnnnnccacgcgtccgcggacgcgtgggcaaatttcccgatgtgaaaaaacaagtttccgatcaactcaaaccaccgtcaccacttcttctctccgacatggctccgtcgttaaggaatttcaacttcctcccccccgtctccaccttcctcgtcttctctctattctccgtcgtttcttccgacgatctccaagtcttactcaagctcaaatcatcattcgccgattccaatctcgccgtgttcgattcctggaaactgaactccggtatcggtccttgtagcttcatcggagtaacctgtaattctagaggcaacgttacagagattgatctctctcgtcgaggtttatctgggaattttccattcgattcggtttgtgagattcagagtctcgagaaactctctctcggattcaattcactatctggaataatccccagcgatttgaaaaactgcacgagtttgaagtatttggatctcggcaccatttttttctccggtgctttccctgagttctcatctttanatcagttacaggttctgtatctcaacaacagcgcttt

SEQ ID NO: 99505 - DNA, 445 bp, Arabidopsis thaliana columbia
ttctcattctcattctctctaaaaaaccaaatcctgagtcagagaaacagagagaagagaagggctgtgatggctctttccaacgcctcctctctctccaccagatctatctacggcggtggtctttctcaccgtccaagcaaccgtcaatcatccttcacatttcatcccgccgtcaacaccaagcctaaatccgtcaacctcgtcacggctgtacacgcggctgagccagctagaaacgctgtttcagtcaaggaatccgttgcgtcttcttcgtctggtgcattgaaatggactccagagagctggaaactgaaaaaagctctgcaacttcctgattatcctaacgccaatgagcttgaatctgtgcttaaaacgatagaagcttttcctccgattgtgttcgccggagaagctagaaatcttgaaaagagattggctgatg

SEQ ID NO: 99506 - DNA, 1939 bp, Arabidopsis thaliana columbia
cccacgcgtccgcccacgcggaatttctcgagctacttcagttctcattctctctctctctaaaaaaccaaatccagagtcagagaaaatctgtgatggctctttccaacgcctcctctctctccaccagatctatctacggcggtgatctttctcaccgtccaagcaaccgtcaatcatccttcacatttcatcccgccgtcaacaccaagcctaaatccgttaacctcgtcacggctgtacacgcggctgagccagctagaaacgctgtttcagtcaaagaatccgttgcgtcttcttcgtctggtgcattgaaatggactccagagagctggaaactgaagaaggctctgcaacttcctgattatcctaacgccaatgagcttgagtctgtgcttaaaacgatagaggcttttcctccgattgtgttcgccggagaagctaggaatcttgaagagagattggctgatgctgctgttggtaaagcttttcttctccaaggaggtgattgtgctgagagtttcaaggagttcaatgctactaatatcagagacaccttcagggttctgcttcagatgagtattgttcttacattcggtggccaggttccggtcattaaggttgggaggatggctggtcaatttgcaaagcctagatctgatgcatttgaggagaaggatggagtgaaattaccaagctacaagggagataacatcaatggtgatacttttgatgagaaatccaggattcctgatcctaataggatgattcgagcttacactcaatctgcagctactttgaatcttcttagagcctttgccactggaggttacgctgctattcaaagagttactcaatggaaccttgattttgttgaacaaagtgagcaagctgacaggtaccaggaattagctaatagggttgatgaggccttggggttcatgtctgcatgtggacttggcacggatcatccacttatgactacaactgatttctacacatcccatgagtgtttgcttctgccttatgaacagtcccttacaaggttggattcaacttctggtctctactatgattgttctgcacacatggtctggtgcggagagcgtaccagacaattggatggcgctcatgtcgagtttctcagggggattgctaatcctctgggcattaaggtgagcaacaaaatggatccctttgagctggttaagctagtagaaatcctgaatcctaataacaagcctggaagaatcactgtaattgtgagaatgggtgccgagaacatgagagttaagcttccccacctgatcagagcagtccgcagatcaggccagattgtgacatgggtctgcgatccaatgcatggaaacaccatcaaaagcaccttgcggtcttaaaacacgtgcctttgactcaatactggctgaagtccgagcattccttgatgtgcacgagcaagaaggaagccacgcgggcggtatccatctcgagatgacaggtcagaacgtgacagaatgcattggagggtcccgcactgtgacctacgatgacctcagttctcgctaccacacacactgtgacccaaggctgaacgcgtcacagtctcttgaacttgccttcattgttgcagaacggctcaggaagagaagaacgggtagccagcgtgtgtcttgagtccggttcttcccttttatacactttttgattccaaacaaatcttttctctttgtcctgtgactgtgagttggtgtgtttatgacctaagttaaaagccccaaaagcctctctagagagtaaacctgtttctgctgtggacagaccatgtcatgtcattgttctttatgttaactttaatgtcaaaccgtgtcacttacactagtgtatatttctttttacatatctacacgaacatgaaccctgacgtagctcgaggaattcc

SEQ ID NO: 99507 - DNA, 489 bp, Arabidopsis thaliana columbia
cagtccgagagagagaaaaaaataaaaaataatctgtcggtgatttataacctcctctctaataaaccaccacatcctctgaaaccctagcctgaacaactcgccgtcttctcgagaaacatctttcttacttcgcttcattacaagatctgatgaaaccagatcggatcttgctctagatccagatgctccttaacttatttactcgaattcatcatcatcgttatcatcaccatgtcactgtttctaaaagacgattcgattcaaatccgtgaagtatggaacgacaatctcgaatcagagatggctctgattcgagaagtcgtagacgatttcccattcgtagcgatggacacagagttcccaggaatcgtgtgtagaccagtgggaacattcaaaaccaacacagagtaccactacgaaactctcaaaacaaacgtcaacatactcaagatgattcagcttggactcactttctctgatgagaaa

SEQ ID NO: 99508 - DNA, 510 bp, Arabidopsis thaliana columbia
  unsure (1)..(510): unsure at all n locations
tttaggacgannnnnnnnnnnnnnnnnnnnnnnnnnnnnnnnnnnnnnnnnnnnnnnnnnnnnnnnnnnnnnnctcttttttttttttttttcaacatcaaaattgcctttttattctgaaaccaatgaaactatagtgtatatacaaaaaccatgaaagataaaaaatagaaacctaaatcagtggctaagagcttaaatgcttttgtttcttactaagttcaaatattgaagcaacgaagagagttccgaaggaaacctttacttaagtggtgaagaaaaaaatcctaattctaaactttctcctataatctccagagaaatggcaacagtgagaatctttgctttagatgatcttcgtgtgattctcatgtgttttgcttccccctgtcaaaaaagaattaactttcgtcgagtctgagcccgagttaatccgttcgctcaaggcaactagatttctgttttcatcctccaagtgatttctgcttgtaaccattttttatcctatcg

SEQ ID NO: 99509 - DNA, 560 bp, Arabidopsis thaliana columbia
  unsure (1)..(560): unsure at all n locations
nnnnnnnnnnnnnnnnnnnnnnnnnnnnnnnnnnnnnnnnnnnnnnnnnnnnnnnnnnnnnnnnnnnnnnnnnnnnnnnnnnccacgcgtccgtcttgatcttcttcttaacttatacctcaaataatggataattatcagaccaagaatatatctaatctattaacttctttgtgttttaccactctcttaatattagctccggtggttatatgcactagacaacaccggttcgatagcccgaaaagaagcttgttggccaacgagcaagatttagtgacaggtttgcctggacagcctgatgtgagtttcagacattatgccggatatgtccctgtcgatgaatccaacggaagagctatgttttactggttctttgaggccatggatctcccgaaagagaaacctctagtcctctggcttaatggaggtccaggttgttcttctgtgggatatggggcaacacaagaaattggtccttttctcgtggacaccaacggaaacggacttaactttaatccatacgcatggaataaagaggccaacatgctgtttttaga

SEQ ID NO: 99510 - DNA, 905 bp, Arabidopsis thaliana columbia
  unsure (1)..(905): unsure at all n locations
nnnnnnnnnnnnnnnnnnnnnnnnnnnnnnnnnatagaacagctatgacgtcgcatgcaccccttccgtaagctgggatcctctagagcggccgccctttttttttttttttcctactcattttgtattataactatctcgagtttcaaatatggtttctgttcacaaagagggataaattaaacacagcacgagtaatgcttttagtgtaatgcacacacaatattggtttttttttttaagttagtttactgatctcttcacaacagagactttggatatatctccaccaagttcttcaaaaagtactaacaagttcccttttggcttcaaccacgaacgcggaacatgataccatctttgtgtcggctcgccacaaccagactggcatttgttctgcctgtatgttccagcgtagttacaacttccgcagtctcctttggcaaatgccatccagtatctccctatgctttgcccgtttatccaagcttgccctttccccatactctttagatccaaagccagcggctcgttccctctaggcgcgtcaaaataggccttgtaccatgtcaaaggttgtttgttttgcttagccaatgagcctttgatccaatcaacagaggagtcctcagtaggagagaccaagttcattgattcccctcgcagaccagcctgataagtccatttctgccaactcaagtctttgttaccctcgtcaaggccatgaagcgccacagacccgacgattcctgtggcccacgtctcaaaatgtggtccaacattcggcaacccaactgctacactcagtagtgcgattttgttagctccacctcgtagattgacttgggagctaaatgaaaacattctgttttctcttgttccaaaggcagatccgtaaaaatgtc

SEQ ID NO: 99511 - DNA, 502 bp, Arabidopsis thaliana columbia
actatagaagattctatgacgtcacctgcacgcgtacgtaagcttggatcctctagagctgccgccctttttttttttttttttttggaagtaaatagtttatgcattgaaatgttgtggcgtttacaatgatctgtttggaagattttagacatatggggtaaaaaattgtttctttgattgttgtaacccttgagcactgactcttacggggcagaaactcttggattcgaaatgacttcaagaaatgagtttgtatttgattttgacgattaatgcaaagaggccataagaaggaagatgcaggagtgccaccaacaaataccacactggagccatgtctaatgacaggttgagaaatggatatggccacccaacggagataaacatgtggagaatccactggaaaagaacgaaacatcctgtccataagatgaagtaagaaaacctgaacaagggaaattcagacggttaaaaacgtgtcattagcagaaaacgaggt

SEQ ID NO: 99512 - DNA, 621 bp, Arabidopsis thaliana columbia
  unsure (1)..(621): unsure at all n locations
agctannnnnnnnnnnnnnnnnnnnnnnnnnnnnnnnnnnnnnnnnnnnnnnnnnnnnnnnnnnnnnnnnnnnnnnnnnnnnnnnaacgatgaatatncggccgctaaagaagaagccactatcaaactgttcaacaacaacaacaacaacaaaaaaagcttttagaaggaagctgtgcatgagttctacagagagaaagcttttgctacatatgaaacctaatcataccttattatgcattattcatatccaaaaccattgctattccaccatcaccttcacaaagcaagcttattatacctctacaggtccctcctgctttagctctgagtacatgcaaatgggtgaaagcttccttctgcaaattcttgcatcctaaaccttcgcattagctccacagacagacgattctctcgattgcggcttagcttctgttgattactctccattacttccactacattggccggttgctggtccagctgatcccccggtaaaattgatgggactgatgcgggtggggccanaccttaatggggnaacaatncacncggggnanaaactatcaacggggggattgatggngtcaaacggtcangcaangggcttnnaagctcccg

SEQ ID NO: 99513 - DNA, 665 bp, Arabidopsis thaliana columbia
  unsure (1)..(665): unsure at all n locations
nnnnnnnnnnnnnnnnnnnnnnnnnnnnnnnnnnnnnnnnnnnnnnnnnnnnnnnnnnnnnnnnnnctttttttttttttttagtaaaaattcactttttcagcgaatattcattacatgtatatatacaaattgtctgtaacgctgtgaaaaggaagtaggcatagatatctgaagcaattttcttcagaacattattgactggtgaataataacacaacagttacaaattacaataatacgtgtaacatgatctgatcctcttaattcctctatctaatcacaaactaatcaagccatgcaggcttgtcttgtccttctgcagaacaatctcaagaaactcgaaccggtttaaaggaataagaatgttgtaaccttttattaggagccagggaaataaagctcattatattcctgcttcacatcaccagtgtaattcctctgttgctcgattctttgaagatgtgatgacagttgcagtagatcaaccgtggatgttccttttcctttacaaggactagaaccagcagaattggtcttgccaggatcgatccacaacggttgttccatctgatgatagtcagttgatgatgagtgattgagattttggttgggttggtgatgagacggtgtgtttgaactaggcaaggttgttggctagctgc

SEQ ID NO: 99514 - DNA, 526 bp, Arabidopsis thaliana columbia
  unsure (1)..(526): unsure at all n locations
aaccgnnggnncccctttccattgccgggaagccncgntacctttaaatgggaaaaatggaagggccccccctttaaaacggggttttggattggggccccaaaccnaggggggggaataccctggccgggtcctgaggaaaaatttggtgggtcaatcctcccctttaacccaaacctaaccccttggaaattacctttgaaataagtctcacccccatttccttgcatctccgaaacccgtgttaatccctttggtcgagcccaaatcaagatctctgtaattcaaataagctcctctcggcgatttagaaacatacggagtcatgtaatcgtgtaacgatctcatccacctgacatgtttgttcatctcctcgacttcattcactttccatttcaccatgtactgtatattatacagattacctcttctgtgtggatatggagattctgtttctgaaatcttgctgattttcccacccaatggctcaaagatcatcagtggagtatcttgctcgagaaatctc

SEQ ID NO: 99515 - DNA, 656 bp, Arabidopsis thaliana columbia
actatagaagattctatgacgtcgcctgcacgcgtacgtaagcttggatcctctagagcggccgcccttttttttttttttttttcattcagaatttggtctttgaattgactattctcggtccgcttaaaccgtattgggtacatctcacttttacaattgtagcagaaagttacattatctattataattgaaaaaatgaaatgacatcttttatatctggttttgtattgaggactcaaaacagaggaggaatactctgttcgttcctgaagaaatttgttggatcaatcttccctttaaccaaacctaatctcttgaaattacctttgaaataagtctcaccccatttccttgcatcttcgaaactcgtgttaatccctttggtcgagcccaaatcaagatctctgtaattcaaataagctcctctcggcgatttagaaacatacggagtcatgtaatcgtgtaacgatctcatccacctgacatgtttgttcatctcctcgacttcattcactttccatttcaccatgtactgtatattatacagattacctcttctgtgtggatatggagattctgtttctgaaatcttgctgattttcccacccaatacaacaaagatcatcagtggagtatcttgctcgagaaatctc

SEQ ID NO: 99516 - DNA, 516 bp, Arabidopsis thaliana columbia
  unsure (1)..(516): unsure at all n locations
nnnnnnnnnnnnnnnnnnnnnnnnnnnnnnnnnnnnnnnnnnnnnnnnnnnnnnnnnnnnnnnnnnnnnnnnnnnctttttttttttttttgcatgagagattaattcactaatgtaacttttttttcacacataagccgaaaaaacatagatcacacgacggctaaaaatctagaaaacgacgtcggatctaacgaaactacccgacaacgacaaagactcatcacagagacatcttcttcttgctctcagccgcagtattctcggctattttcgcaagagattgaagattgcatcgtacgataacgtcaacgaagtcacaagtctcttcctttgtgttgcctggaggaacatcaacgacgtaagactcgacaacgacggtcccggagatcggtgaagggtgaagggtcgttacggatcggtagttagagagccggtggtcaccaccaacaacgctgaagctgatgaacggggcgttcgtcgtcgaggatatcgagtctctcggtggagctagcg

SEQ ID NO: 99517 - DNA, 818 bp, Arabidopsis thaliana columbia
atgatcctgccagctactaatacgactcccttagggaaagctcgtacgcctgcaggtaccggtccggaattcccgggtcgacccacgcctccgtcgccttctccgtctttgccgttctcttcttcacctcctctgcttcttcccaataccaaactcttgtcgtcaacactcttccttcttccgcaacactctcatggcccgagtccgaatctttaactgatgaatctttatccgagtccacaacttcactctctgtccatttatcacacgtggatgctctgtcttccttctccgacgcatctccggcggacctcttcaacctccgtctccaacgagactctctccgcgtcaaatctattaccagcctcgccgccgtatcaaccggacgaaatgctacgaaaagaactccacgtaccgccggtggatttagcggcgcagttatctctggcctctcacaaggaagcggagagtattttatgaggttaggtgttggaactccggcgactaacgtttacatggtgctcgacacaggaagcgacgtcgtttggctccaatgctctccttgcaaagcctgttacaaccagaccgacgccatttttgacccgaagaaatccaaaactttcgccaccgtaccatgtggatctcgcctttgccggagactagacgactcgtcggaatgtgtcactcgtcgaagcaagacttgtctctaccaagtatcgtacggtgacggatcattcaccgaaggagatttctcaactgaaacgctgaccgttcatggagcgcgtgctgatcacgcgccgttaggatgccggaacgtt

SEQ ID NO: 99518 - DNA, 558 bp, Arabidopsis thaliana columbia
  unsure (1)..(558): unsure at all n locations
nnnnnnnnnnnnnnnnnnnnnnnnnnnnnnnnnnnnnnnnnnnnnnnnnnnnnnnnnnnnnnnnnnnnnnnnnnnnnnnnnnnnnnnnnnnnnnnnnnnnnnnnnnnnnnnnnnnnnnnnagctaagggaaatttagcaaataataatcataggcaagagagaacataatttaatggccacaaactatatagctcactagtaacaaggggcaactggctgggtttcatcatcataataaacatcattttaatcttattggtaacttcgggaaattaaaaaccattttaacgcacgttaaaatcctgacctagcttgagcccaaccataagcttcttggccgctcatctgtcctcctccaccactgccaccattagaaacaagatttcccggcatattatacaccggaagtccttggttaccgtcgcctccaccagcaccgttgcttagtggcgaacctccgcctccgagctgccccggaaccactcctgcggtggctccaccaccggctntntttggtggctcttcctcctccaatggcaatctctcgtaagtcgcgt

SEQ ID NO: 99519 - DNA, 568 bp, Arabidopsis thaliana columbia
  unsure (1)..(568): unsure at all n locations
cgattgatcnnnnnnnnnnnnnnnnnnnnnnnnnnnnnnnnnnnnnnnnnnnnnnnnnnnnnnnnnnnnnnnnnnnnnnnnctttttttgtgttttttttttttggaacaagcatttttattgcgggatataaaaattcagaaggacatatccttgatgtatgtacatgaaggaaccgattttgactccaagctacaaagaagaagaagaatgatatacaaagaaaactgcatatcctcaccatgaaattgaaagctagaggaaggggaataacagatactctgcgtagaagagattccatataaaccgataatatcctgagatagcttccttggtgtagtttgctttttctagtacccatgtctggaaaattaagcctgaagccaagatcacatgtgcaggaatcatcaagctacctctaaaaacctgaggcatgtagaaagctagtgatatggctgaaacataatttactagcagaagtccagaaccgaggaatgcaatgtttctcactccaagttttgttgccagggttgatatttggaactttcgatctccttcaacatcaggg

SEQ ID NO: 99520 - DNA, 1856 bp, Arabidopsis thaliana columbia
gaattcctcgagctacgtcagggccctgacgtagccgtcaatcgaaatcccaaagatcagcgatggtgactctaaacgcttcttctcctctcacgaccaagtcgttcctcccctaccgtcacgctcctcgccgtccaatctctttctcccctgtcttcgccgttcattcgactgaccccaagaaatctacccaatcagcctccgcttcggttaaatggagtctagagagttggaagtcgaagaaagctttgcaattgccggattatcctgatcagaaggatgttgattcggttctacagacgctttcttcttttcctcctatagttttcgctggtgaggctaggaaactagaggataagcttggtcaagcggctatgggtcaagcctttatgcttcaaggtggtgattgtgctgagagtttcaaggaatttaacgctaataacattagagacacctttagggttcttcttcagatgggtgttgttctcatgttcggtggccagttaccagttatcaaggtgggaagaatggctggtcagtttgcgaagccgagattagacccatttgaggagaaagatggtgtgaagctgccgagttacagaggagataacataaatggtgatgcttttgatgagaaatcgaggattcctgatcctcataggatggttagagcgtacacacagtctgtggctacgttgaatctcttgagagcatttgctactggaggttatgcagctatgcagagagttagccagtggaaccttgatttcacgcaacatagtgaacagggtgacaggtaccgtgaattggctaatagagttgatgaggctttgggattcatgggtgcagctggacttactagtgctcacccgatcatgactactactgagttttggacatcccatgagtgtttgttattgccttatgagcaagcactcacaagagaggattcaacatctggactttactatgattgctctgcgcacatgctttgggttggagaacgaactcgccaacttgatggtgctcatgttgagtttctgaggggaatcgctaaccccctcggaatcaaggtgagtgataaaatggtccctagtgaactggttaagctgatagagatactaaaccctcagaacaagcctggaaggattacggttatagtgagaatgggagctgagaatatgcgggtcaagcttcctaatttgatcagagcagtccgtggagccggtcagattgtgacttgggttagtgatccaatgcacggaaacacaatcatggctcctggtgggctaaaaactcgttctttcgatgcaatcagggcggaattgagagcgttcttcgacgtccatgatcaagaagggagtttccctggcggggttcatttagaaatgactggtcaaaacgtgacagaatgtgtcggagggtcacgcaccatcacttacaacgatctaagctcacgctaccacactcactgtgacccaagactcaacgcatctcagtctctggagcttgcattcatcattgcagagcgtctgcgaaagagaaggcttggttccgggaatcttccgtcatctattggagtctagagaacaagaaaatacttatccgagctaggatgtgtgtgtatagaggctgatctctacttattaagttgccaagttaaatgagcttgtgtactgttaaaagtaagatattgttgtttttgtgtgttgggttatgattttgtctgaaataagtggctgactttataacccgtaaatctctacgtcacgcttgcaacaaaaattcgatatttgattcaatcacagaaaagtcctcccattaaggtgtaaaccctgacgtagctcgaggaattc

SEQ ID NO: 99521 - DNA, 558 bp, Arabidopsis thaliana columbia
  unsure (1)..(558): unsure at all n locations
ggtgactnnnnnnnnnnnnnnnnnnnnnnnnnnnnnnnnnnnnnnnnnnnnnnnnnnnnnnnnnnnnnnnctttttttggtttttttttaagtaagaagacatcaaaacacatgacattgtaaaaataaaaacgcaaaatcagtttaatcaatagtatctgcccaaaattacgtttagaatcaataataaacaacaaaatcattttcaaccgccggtacaacacttaaaaagaagttctctcttcgaaaccgtatctccaatctgtcggaagcaacacattactattgtagtattccggcaaggttctcatcttctacagaattgtttctagataaccagtatccggtttgattccggtttactagtgccatgatcatccggaacatcattgacttaagcagaagtttggtctgtggtgctcaaggaatggtacttgattccacattgactaagacttgtgatcacctcaaagtctccagctttagtagacccatctttactcgacacctgtcttctcaattcagcacaaccacaatactctacgtcgtacacatgtt

SEQ ID NO: 99522 - DNA, 552 bp, Arabidopsis thaliana columbia
  unsure (1)..(552): unsure at all n locations
nnnnnnnnnnnnnnnnnnnnnnnnnnnnnnnnnnnnnnnnnnnnnnnnnnnnnnnnnnnnnnnnnnnnnnnnnnnnnnnnnnnnnnnnnnnnnnnnnataaaaactccttatataactttttataaatgttcaaagaggtattggatggaggaacaaagacgcaataagttgtaagagcttttgatcaggatgcccaaatccatcggcttctttgtaaaacaaatccattacacgcgcaatgttgacgggtcgcaccagaatctgtcgtggcatagctttggacgtcatgaactcctcaatcattatcttataactctctctttccatcttcctcagttcttcaaccgctgcttctttggtgacaccatgttgcttcatgtaacagttgacaccatttgccacctctcctctgctcatctattgctcgaacgtgacaatgtcatttctgatacgaaacagagcattcaaggcatgaaagattttaggtttggagtaaaaccattccttcaattgcttctgatcacaatcgtccattgctataaagccgtagg

SEQ ID NO: 99523 - DNA, 855 bp, Arabidopsis thaliana columbia
  unsure (1)..(855): unsure at all n locations
tgcttcgccggccctatacgacttacttagggaaagctggtacgcctgcaggtaccggtccggaattcccgggtcgacccacgcgtccgctcagctagaagcatttgataaagcttggtgctcttaccttgagggttttgtagtctggaaaattaatgatgctaagcttctagaaaaagatttagccagaactcaagagtctgagctgtctgaggtatcaaaacatacttcctctcccaaaataatagacagtggcttgaatcagaagacggtaaaggcatcttctccaactaatcgggctttattctctgaaactgatggagcacgagaatcaaaagcacctgcagattcgcatcttccatcttcatcttcaccttcaccgggctcatcgaatttgtcaccctctttgaactctgcagggagcgaggccatttctactccaaacgtggtagctaatagctttgatgcagcgttggctagtgagaacgaagtaattgtaaatgaaattgtccatgacaatagcagtagttttgctgatagcctcgaccctaacactggggatacaagcaaccttcaggtgagggttaaggagacaatggaaaaggctttctgggatggtgtcatggaatccatgaaacagtcgcagccagacttcagctgggttattaaactcatgaaagaagtcagggatgaactctgtgagatatctcccaaagactggagacaagagattgttcanactatcgatacggatgtgctgtcacagttactggcttctggtatggcgacatagggtatcttggaaatatccttgagtttcccttggcatttgctgaactcttgctccgctatgag

SEQ ID NO: 99524 - DNA, 536 bp, Arabidopsis thaliana columbia
taggtgacttatagaagagctttgacgtcgcatgcacgcgtacgtaagcttggatcctctagagcggcctcccttttttttttttttttttaaaagaacacacctttgagtaatgcaagattctttcattgaacataaacaaagcaaagtatccatcataatttaagacgagggtaaatcatagtggtcttgtgactaagacattcttctctgagtgatttgatcctctagtcgaagcaaagagagtgattttcttcacttccggttcttgctctcgttcttttcccgctctctcttcttgtaaagcttctcgagggctcgttttgcttcacagttggggaagttggaaagatcatagtaatgctgagcaacatcgactaaccattcaccgcggatatctgtaacagtgcgtatgaaattccgagtagtcaagacatattcattggaaatcacccactctggtttgtgatccaggcaattagatggatgcaagtgaaccacttggttatctttgacggtcaagtaatggccagtgg

SEQ ID NO: 99525 - DNA, 563 bp, Arabidopsis thaliana columbia
atgatactccagctctctacgactcactattgggaaagctggtcacgcctgcaggtaccggtccggaattcccgggtcgacccacgcgtgcgcctgaagtgaatgcagtggctgaatcaatggttgagcggttgaggactcatagccgtaaatccggtggccgtttcatagcagtagaccttagaatcgacatacttgagaagaaaaattgccatacaactggtgtagtagggtccaagacatgttacaacgctcaagagattgctttattcttgagaaagcttggatttgccagcgacacaactatctatctgactcagccaagatgggacagtagcctcaatatccttaaggatatcttcccaaaaacattcactaaggaggcaataatgccggcaagtaagagatcaaagtaccttgaatcagtgagttccgagtacgaaaatgttatcgacttctacataagctcaagaagcgatgtctttgttccagccatctccggtctgttttatgcaaacaccgttggcaaaaggatagctttaggtaagcctcaagtgttagtt

SEQ ID NO: 99526 - DNA, 545 bp, Arabidopsis thaliana columbia
  unsure (1)..(545): unsure at all n locations
nnnnnnnnnnnnnnnnnnnnnnnnnttctgctncaatcaggntnttattaaacaataaatagagagcaccacaacagaatgaagtttttcacatattcgataagtaaatcattcgntctttatttggaatttataacctttttattgagttattatattcatggtaactgaaaaagaaaacaacaaacttggcctaacaatgacatccaataggatggacctaagaagggattcattttatttattccaacacaaatggtttcaactcaagaagcctatgaactggcgaaaaacacacaggaacaaaaaccttgaaagactaggatgagattcaatcatccttctttttctctgaaatctctgtcttctcctccaccgactgggatcccgtcatccttgccaacaaaacaaacgacattcctccagcaacattgtttgcacacctcaaaactatcacacttgtcttaaacaccaatgggggcaacacctttgccagcaagaactcaatcccattcaacgtttggtaccttgcattcgcactcact

SEQ ID NO: 99527 - DNA, 535 bp, Arabidopsis thaliana columbia
  unsure (1)..(535): unsure at all n locations
aggtgaccttatangagagctttgacgtcgcatgcacgcgtacgtaagcttggatcctctagagcggcctccctttttttttttttttctgaattaagtataattaaagtacttataaaaatttatgatgtaatatatgtttgttttcataactaattgagtaaatcattttcaacatcttcactatcattaagtaaattaaagtcctcatcttttgttatgaaatcgcttgttcctataatattggtggttttattttccacaattttattatgcattttatatagattttgttcattaattgctcttatttaattatcgtttaaagacatgtcttcctcgtcatcattaaactaatttacttattaactgtgattggtaatatctttgccttaattattaagattgtgttataaatcgttgtcatcttcttcatcatagtaatattcctcttattaatggttatctccaccttcttcttaatcattttagatgttatcgttatcataaaattgttaagttatttgatgattag

SEQ ID NO: 99528 - DNA, 811 bp, Arabidopsis thaliana columbia
ttaggacgtgacttatagaagagcttgacgtcgcatgcacgcgtacgtaagcttggatcctctagagcggccgccctttttttggtttttttgaccagcaaaatatttatcccttcatatatattattcatcaacattggttatggggagttacatacatatttgaaaaagaataacatttaaacaagaattcaacacttgaccatataaaaaaatcatctcaaacttttatcacaaacaaaactaaaatcgaaagaaagaaactgcaaacaggtttaatttgaaactactgatctaatatattaaaacagagagaaaatcatcggatgatctatacttctagtattttcaatggagacaaggctcgaaagtgctaaccaccttcttcaattggtctagcaacgacaagtacgacaccgttccatcgtttccagcgagaaccctatacttatcttttcttgtgaagttggtgcactcaaaccctaacgtagccgccaagattctctgaacatagttcgccacggtcatgcgggctcttcccggacgaacatgttgcctccataggaagctggttcaagaacgtaatctcgtaaaccggtcttgggttcatgaaggaagaaaattgggtccaaacccttccagcctctcgctgtagtcgcgaggaagaatccgactctgtagttcatcgcaaccggaacaatcctatccgttaactcagcgaaaagcgcgctgaatcttaacaaaaacggttcacgacaagtggttccctcaggacaaaccactagatctccttttgacagttgttgtttga

SEQ ID NO: 99529 - DNA, 558 bp, Arabidopsis thaliana columbia
  unsure (1)..(558): unsure at all n locations
nnnngacctaaaaaaaactttaacgtcccatgcacccttccgtaagctgggatcctttaaagcggccgccctttttttgtttttttcttggttggtttggtttggcattcatctttttttacaatttgtaaacaaaacatggtgaatacacatggacagcacaccacagaacattaatatgtaaagaatgatccccaccttcatcatcatttagtcatcttcttcatcaagcatgatgttattgttcctgctcatcagtggtcaatgcagaagaactgggaactgctgctctctggataggtttctgtagctgctttaaagaatccatgatctctccaaaacttggtcttaaccttggatccgtctgccaacatttcctgatgatatctgcaattccaggatccacaaattcagggatatcaagtcgtcgatgttgaaaaccaaccgcgccaaccacttgctttgggttcattcttccccatggttgctgtaacgtaaaagagttcccagagaatgaccccgtagctgtacacatcacacttctcatctgcgggttcg

SEQ ID NO: 99530 - DNA, 578 bp, Arabidopsis thaliana columbia
  unsure (1)..(578): unsure at all n locations
nnnnnnnnnnnnnnnnnnnnnnnnnnnnnnnnnnnnnnnnnnnnnnnnnnnnnnnnnnnnnnnnnnnnnnnnnnnnnncttttttggctttttttttttttttgaacaacgacatgaagaaatccaagaaaccgcgaaaaacctctattcatgtttcgagagaacactgaacatgtctctttcagacgagtagaaactcaagcagtactctcataagaacaatacacagcccaatggctctctctctttctctctggccctctctactacacaccaaaattagaacaatgcagacaaagattagtgaccagaagcagctaacttgggaggatttttgccttccaactcttttggttaacttagtaagtatcagcctttagtttttgttagactccctttggaaccaaatccacatcaaaaagcagatggttggggacttgggatgatgcaggttcttccacgaggaagacgggcttttgctctgcgtttttgtccagggttgtaagactcatagttattatgatgaaacttcctgaaatgctaggttgagttcgagcacagacttggccaccaaacct

SEQ ID NO: 99531 - DNA, 334 bp, Arabidopsis thaliana columbia
aggaggcgcttctttatgtcatcactctcttctctctctcagccctaaccgttacattaggagaaagtataagcatcgactgtggatcaaccggatcttacgtggactccaacaatgtaacatgggtcggagataaaggcttcgtcaccaacggcgagcccatgaagattccggacgttgtcaaaaagccaatcaacactctccggtacttcccaactggtcaaaccaactgctacaccaacattccggtgacaaaaggccagaaaaccctcgtgaggacgaagttttactatgagaactacgacgcgaagttctcgccgccatcttttgatgt

SEQ ID NO: 99532 - DNA, 551 bp, Arabidopsis thaliana columbia
atagaagagcttttgacgtggcatgaccgcgtacgtaagcttggatcctctagagcggccgccctttttttttttttttagctaaatcacactttcattccacagcggctaaataaactttcttgcgtattcgtttgaaaacccaagcagtttgtgattcggatcaataaaaatgctgaaaccacagtttgcttggttaatataagctaaacaatgaattaaaaacattgactaagacggggaaaaataaaaaaaaaaaaaaaataattttgggttggagacgacaacacatcaccactttgatgagcccatgcatgctataacgagaaaccaggaaattggaagtttggttagaccaccaaagcagccaaaagagcatgcaatatcgcccagtatagcatgatccctaaccgtaaagcaggttgtctcatgagcgtccgatcacaagagacccataaaccatcgaccatgttagtgatgggtcttgtgaatctaggaatgattcttgacgtaaagagtgatctgaaaccatgagctttatcatcatcttt

SEQ ID NO: 99533 - DNA, 408 bp, Arabidopsis thaliana columbia
actcagtctctttcttcttcttcttcttcttctcattaaaagctgaacacaaagatctattctttcactaacacattaccagtttctgcatttgtattatatccttttctaaaacttttaaccattctttctccattcccagttcttagaaagagtcaagagcaatgaggaagcttttcttgttagggtttatagttgcaggactggttcttgggaatgaggcaaatgggtatttagagttcaatgtcactgaattagatcgcattgaggatttagagtttggtttcgccaaatttagttccaatttcaatccattaatggttggtctcacacgtatcagaggagctggttctaaaggagctgtttgtttggatggtacattgcctggatatcacttacatcgtggac

SEQ ID NO: 99534 - DNA, 450 bp, Arabidopsis thaliana columbia
tccgttggccttgtttcgtccacccaacaaactttttaaaaaaaactcgatcggctgatacttaatcgcccacttgattttggaggtgggtacctttttttgttgtaatttttccatacacccaatttcccgtggaagaaaaggagtcagctttttcgtttgctttaaagcttgaatctttacatagttccagttactttctatagagcttcataatccctagttgcccaaaaggattctgggttttgtgagaatgatgacgtcatgtcggaatatagatttaggtacgatgatgatggcatgtggttgtggccgtcgtcagtttccttcattagcgaagactgtttgtaagtttactagcagcaatagaagctattgcggtctggtggggagttgcaaagcggtgccaacgaaatcaaaagagatctctttgctcaatggtattggtca

SEQ ID NO: 99535 - DNA, 638 bp, Arabidopsis thaliana columbia
  unsure (1)..(638): unsure at all n locations
nnnnnnnnnnnnnnnnnnnnnnnnnnnnnnnnnnnnnnnnnnncgtgcgtaagcttggatcctctagagccccctccctttgtttttgtaattataacgaacaaaggactattattaatttattttaatttagttaagtatctccaaattctaaactcagaacaggatctaaacactcgagttcctacaacaaccacaagtacaaggaacaaaaagaaaagatcacaagccaccaaacacaacaacaatgatcctcccgactttgaatccagaacccgctgcggagccaccctcaagtcctaatccagtctgtgccaccactgaaccagccctttctgtacacatcttgaaccttttgagaccagacataaccagacataaggggaaataacacaccagccggagaaggaaacaaaagacactaactaactagcatttgcacaacacatcatttacatctttgagatatccatatatctatgctttgcttctgtcatgttcactggttgctgaatgagctctcttttcttcattggcaggggtggggaaactctcttcaggttaagtacgggcanggaggatagtcctgggcggcaaatcagggggaccaaagggggccaacccataaaggcntgggg

SEQ ID NO: 99536 - DNA, 562 bp, Arabidopsis thaliana columbia
  unsure (1)..(562): unsure at all n locations
nnnnnnnnnnnnnnnnnnnnnnnnnnnnnnnnnnnnnnnnnnnnnnnnnnnnnnnnnnnnnnnnnnnnnnnnnnnnnnnnctttttttggtttttttttttttttccaacaaaatgtgaatatggtataacgcacgtaaataatggtaatctcatttattgacgacacaaaaacaaaacaaaaacctaatgtttgatactttagcattggatttaataccaccaaattaccaacggggtagcatgggcatgacggtgaacttcatggtaccattgctgcaatgagcaccgtcatgctcgccacacgaaatgtagtaaggcttcatctgttttagaacaaactcaaagccttttccagcaccttgcttcggagacgcaatcattttgcctttcttcacgtcacacttttcataactcgatgggttcggaagcaagtaaacgctgtgcgtgaacggggctggtgggttgtatttgaaaacaagtatgtcattgagaaagaatggagcagtcttagaagcccagtcagcgtaattgaatccataagtccactctttgtctccacc

SEQ ID NO: 99537 - DNA, 568 bp, Arabidopsis thaliana columbia
  unsure (1)..(568): unsure at all n locations
tgannnnnnnnnnnnnnnnnnnnnnnnnnnnnnnnnnnnnnnnnnnnnnnnnnnnnnnnnnnnnnnnnnnnnnnnncttttttttgtttttttaaacatcaagtaatcactggcacactttattgatcactgagtttggttatttaaaaacagaacgtacagagaccaagcataatcaaattgtattttaacaagtaaatggcacaagaaggcccttttagccatgctaaaagataacgattcgttcaatacaaaatcctttatgactctcaaattctgaaaaaaacgaatttggaaaactcataattgaagtgcagagaaagcatcgtcaacttcgtcaacctaaaaagagacaagaggacagaggttgagaattgaataccagggcttcacaaactcaaacacaccacattttacacgtattttaagatccaaagaccggaatagaagaaattcgaatcgccatagaatgaagaagaaagaaaaagagaaaacggaaggatggaatcgttgatcacgattaagagaagattttcttcagttttgctcgtcgatttcatcagtcggg

SEQ ID NO: 99538 - DNA, 542 bp, Arabidopsis thaliana columbia
aagagcttgacgtggcatgaccgcgtacgtaagcttggatcctctagagcggccgtcctttttttgtgttttttccttcaaaatatcacatatattaaataccaaactggatatgctgtaaaatggagacattaaaggaacctcacagccacatatatatagcttgtagagataatagcagggtactgggttttgatgatctacatacatacccaaatttatttccaacttatagtaaatgccataatcagtttctcttggcgatgaacaaaccccacttctgctcaccacttgagctcctaagtagctttgacttccacccgcctataatatcctcgtaatcctctttcgagaagtcactgatgaattcttccttctccttctccactgcatccagttcccgtttcaggactttcatgaactgatcggttctatcctccgcgattacctcctcgaaaccagcatctctcagcatctgaccgtatgcttgtacatcatgaagatcataacctcgtttcttgatgtagattgcaaagtctgga

SEQ ID NO: 99539 - DNA, 556 bp, Arabidopsis thaliana columbia
  unsure (1)..(556): unsure at all n locations
aggtgcctnnnnnnnnnnnnnnnnnnnnnnnnnnnnnnnnnnnnnnnnnnnnnnnnnnnnnnnnnnnnnnncttttttttttgcctcatattgagcattgtcaaatatttctatgatcttcttcgtagaccctaaggatgtaacaattttgtggttgtaaatagcttctgatgcaatctgtgagctacggttttgtgcataggcgtaattgttggaaattttggagagcaaaacctttttggtatagaagcaaaggatagagagtggctgtaccgcgatcattaccaacgcgagtttccaagaaattagtagacctatgatcattgcgattgtgacacctgaaatggtctggacaagtaaggagattctgtcggctactaaggacttcacaatggacacttcattattaagccttgaacaaatctcactggtaaagttctcttccacatcaaaccatgcaggttcaaaggtaaagattttttcaagcattttcaaccgaaagtcgttgcattagcctttcacccatttttgcaaaactataatgctgaaggagata

SEQ ID NO: 99540 - DNA, 403 bp, Arabidopsis thaliana columbia
gttttgccggagatagtagttttcgcgtctccaaaaacccttctacctttgccggagatagtagttcctcactctctttaatccgattcatcgagccggagagctcaccttccgccgcgtaaaatggcggctctagaaagcccactgccgggaacgccgactgcgatgaggaatgctttcggcaacgttttatcagtcctgatcctcgtcctcattggtgtcctcgctttctcgatccgactcttctctgttataaagtatgaaagtgtgattcatgagtttgatccttacttcaattatagagtcactcagttcttatcgaagaatggaatatacgagttctggaattggtttgatgataggacctggtatcctcttggccgtgtgattggaggaactgttt

SEQ ID NO: 99541 - DNA, 740 bp, Arabidopsis thaliana columbia
ggccccccctcgaggtcgacggtatcgataagcttgatatcgaattcgcggccgcgggaacgccgactgcgatgaggaatgctttcggcaacgttttatcagtcctgatcctcgtcctcattggtgtcctcgctttctcgatccgactcttctctgttataaagtatgaaagtgtgattcatgagtttgatccttacttcaattatagagtcactcagttcttatcgaagaatggaatatacgagttctggaattggtttgatgataggacctggtatcctcttggccgtgtgattggaggaactgtttaccctgggttaactttgactgctggaaccatctggtggggattaaattcattaaacattcctctgtcagtagagactgtctgtgtcttcactgcacctgtattttcagcttttgcatcctgggcaacttaccttttgacaaaaggaagttaagggcttccggttgctggacttgccagctgctgctcttttggccatggttccctcatatatatcccgatctgtagctggtagctatgacaatgaagctgttgccatctttgctttgatcttcactttttatctttacataaagacattaaatacaggttccttattttatgccaccctgaatgctcttgcatacttttacatggtatgttcatggcgaggttacaccttcattatcaatctgataccactgcacgtgcctttgtgcattgaaaccgggcg

SEQ ID NO: 99542 - DNA, 551 bp, Arabidopsis thaliana columbia
  unsure (1)..(551): unsure at all n locations
nnnnnnnnnnnnnnnnnnnnnnnnnnnnnnnnnnnnnnnnnnnnnnnnnnnnnnnnnnnnnnnnnnnnnnnctttttttttttttttttaaagaacaaatatttattcataggaactgtgaaaagagtggcaaaactcaatgtacagttttgtgacaaatatgacaaatatattggattcactcattcctcacctcttcttaaaaaaacttatagatgcaataaaaagatgtataggatcccaaaaagaggaaaaaacctattgatgaaaatgttttaagcagtggtggagactgggaagagcttttccaccatgttgttggagaggattctatttgggtccagctccctacgtgctttgttgtatgcatccactgggaaacgttttcttattcttgcctgtaaggcttcaagttcttctttgtcttttggtatctcaattttagcccaatgttcatacgcagaanattgatcccacaattggttctgtgtcaaatgtctatagtgggaaaaatcatcttggatgtcctttctctggcgagggtctgcttt

SEQ ID NO: 99543 - DNA, 573 bp, Arabidopsis thaliana columbia
  unsure (1)..(573): unsure at all n locations
nnnnnnnnnnnnnnnnnnnnnnnnngtcgcatgcacgcgtacgtaagcttggatcctctagagcggccgccctttttttttttttttttgatatgtaatatagtgatttagaaacttaataaatctcattggaacctaaaaaaaaacaaaaacaaagaactcaatgtaccaaactttcttcactaacacatctagagagacagataggtacagaaaaagagagctctttggtgttatcaaagttggggtaaaggaggagcctcgccaaatttaagaatgtaagcagcttggtgaattggtctcagctgcaaaatgatctgagcatcaagatacgctatagcttagtgcaaggcagtgaccggtttgttgatgatgcatcagcatatgcctattcacgaaacggctgcatagaacctctttacaacaaaggcataaccagttctctaccgggttttggcacctagaacaaggcggacgcgtgggcggacgcgtgggtcgacccgggaattccggaccgggacctgcaggcgtgccagctttcccaatagtgagtcgtagagagctggagtatca

SEQ ID NO: 99544 - DNA, 907 bp, Arabidopsis thaliana columbia
  unsure (1)..(907): unsure at all n locations
atatggaatncgcggccgcggnacttttacctgggaggtaagttgatgcctacaaaggacttttttctgaaggccactcaaggtgaagctatcaggaactattaccatgatatgcatgtgattcaggatatgcttagtcctctttacaaggctggcgatgcactcgaatgggcacaccgagatctgctcttgaaggggttttgggannggcccacacaaactctttgaaacaaacaatcaaaggccaaatgtgcccagagccagtcttctattacgaaaaccgacaatgaaacccagattatgctcagatgtacacctgatgttggagtctactacgcacctgactgtgtgctaagaggtgaagagtttgatggatcataagcagtgcctccgatggagaaatggctgctaaaaaaaccatggattccaaccctcagtacgcggtggctgagcccagacgagaagaagcttctgcagaatgtttaatggtgaattgtatgaggagtgccgcaagaagtatagagctattggaacgttcatgagtgtttactacaagtccaagaaaggaagcaagactgagaaagaagttagacaagctgancaagctcatctcgaaactgcttatgccgaggcagattaagtaataataagccttggtttgatgtaatggctcgggatgattattgttattcctagtagtgtctgttatgttgagagtcctcatttcagtgttagtgtcttgaagactcttgttgatgttgtttgcttcttgttgttgtttgactcattctggtctgagtggatcttagagtttacaacttttggattgccctatgcggcccgcgaattcctgcagcccggggcatccactagtatagagcgtccgccaccgcggtgcagctccagc

SEQ ID NO: 99545 - DNA, 666 bp, Arabidopsis thaliana columbia
  unsure (1)..(666): unsure at all n locations
acgactcacttattagggaaactggtacgcctgcagggtaccggtccggaattcccgggcgctgttgttgctgagcttgatgaccttaccgttggtggacttatcaatggatatggtattgaaggaagctctcacatctacggtttgtttgctgataccgttgaggcttacgagattgttcttgcgggtggggagcttgtccgcgccacaagggataatgagtattctgatctttactacgcaatcccgtggtcgcaaggaactcttggactccttgtagctgctgagatcaggcttattaaagtcaaggagtacatgagactcacttacataccagtcaagggtgatcttcaagccttagctcaaggttacattgattcttttgctcccaaagacggtgacaagtcgaaaatcccggatttcgtcgaaggcatggtttacaatccaacggaaggagtgatgatggttggaacatatgcatctaaagaagaggcaaagaagaaaggggacaaaatcaacaatgtgggatggtggtcaanccgtggtctnccaanacgggganacccgccctgaaaaagggcagttttgttgganancccaccngtgaancttccccanggcacaaaggcgtttnncttggaaggncgtttctccatttggncagnt

SEQ ID NO: 99546 - DNA, 652 bp, Arabidopsis thaliana columbia
  unsure (1)..(652): unsure at all n locations
ttancccccnatcaagncnaactncccngcccagnttccnntccgaancccggcnaggggcccccngaagatccccanatttcnctgntgnttgggnccactncncacctggcctntccctaagaggtgaagagtttgatggacccagaaccagttccgtaggatggagaaatggctgatagagaacccatggattcccagcctcagtaccccggtgtctgagctcgacgagaagagcttctggagaatgtttaatggtgaattgtatgaggagtgccgcaagaagtatagagctattggaacgttcatgagtgtttactacaagtccaagaaaggaaggaagactgagaaagaagttagagaagccgaacaagctcatctcgaaactgcttatgccgaggcagattaagtaataataagccttggtttgatgtaatggctcgggatgattattgttattccctagtagtgtctgttatgtggttgtttcctaatttcagttttagtgtcttgaagactctggtggttggtgtttgcttcttgttgtgttgactcatctgtgaggattaagtaactaaaaaaaaaaagcgcgcttaagacagctacgacgcggcagcacgtcaagtctctatagtgtcacctaaatcaatcg

SEQ ID NO: 99547 - DNA, 2144 bp, Arabidopsis thaliana columbia
  unsure (1)..(2144): unsure at all n locations
nnnnnnnnnnnnnaatacgactcactttagggaaagctcgtacgcctgcaggtaccggtccggaattcccgggtcgacccacgccaccctctcactctctctctcctttggattcttcagtgaggagaggaaatgtcggatcttcagacaccgcttgtgaggcccaagaggaagaagacttgggttgattactttgtcaagttcagatggatcattgtcatcttcatcgtccttccattctcagccacattctacttcctcatctacctcggggacatgtggtcagagtccaagtcctttgagaaacgtcagaaggaacacgacgagaatgtcaagaaagtcatcaaaaggcttaagggtagggatgcttccaaggacgggcttgtctgcactgctcgtaagccctggatcgctgttggaatgaggaacgttgactacaagagagcccggcatttcgaggttgacttgggggagttccgtaacatccttgagatcaacaaggagaagatgactgctagagtggagcctcttgttaacatgggacagatttcccgtgctaccgtcccaatgaacctgtctctcgctgttgttgctgagcttgatgaccttaccgttggtggacttatcaatggatatggtattgaaggaagctctcacatctacggtttgtttgctgataccgttgaggcttacgagattgttcttgcgggtggagagcttgtccgcgccacaagggataatgagtattctgatctttactacgcaatcccgtggtcgcaaggaactcttggactccttgtagctgctgagatcaggcttattaaagtcaaggagtacatgagactcacttacataccagtcaagggtgatcttcaagccttagctcaaggttacattgattcttttgctcccaaagacggtgacaagtcgaaaatcccggatttcgtcgaaggcatggtttacaatccaacggaaggagtgatgatggttggaacatatgcatctaaagaagaggcaaagaagaaagggaacaaaatcaacaatgtgggatggtggttcaagccgtggttctaccagcacgcgcagaccgccctgaaaaagggacagtttgttgagtacatcccaactcgtgaatactaccacaggcacacaaggtgcttgtactgggaagggaagcttattcttccatttggtgatcagttctggtttaggtacctcttaggttggttgatgcctccaaaggtctctcttcttaaggccactcaaggtgaagctatcaggaactattaccatgatatgcatgttattcaggatatgcttgttcctctttacaaggttggcgatgcactcgaatgggtccaccgcgaaatggaggtgtatccaatttggctttgcccacacaaactcttcaagcagccaatcaaaggccaaatctacccagagccaggcttcgagtacgaaaacagacaaggagacacagaagatgcacagatgtacactgatgttggagtctactacgcacctggctgtgtcctaagaggtgaagagtttgatggatcagaagcagtgcgtaggatggagaaatggctgatagagaaccatggattccagcctcagtacgcggtgtctgagctcgacgagaagagcttctggagaatgtttaatggtgaattgtatgaggagtgccgcaagaagtatagagctattggaacgttcatgagtgtttactacaagtccaagaaaggaaggaagactgagaaagaagttagagaagccgaacaagctcatctcgaaactgcttatgccgaggcagattaagtaataataagccttggtttgatgtaatggctcgggatgattattgttattcctagtagtgtctgttatgttgttgtttcctaatttcagttttagtgtcttgaagactcttgttgttgttgtttgcttcttgttgttgtttgactcattctggtttgagtggattttagagtttaaaacttttggatttgcctatgaaattgaaggtttccggttttcgnnnnnnnnnnnnnnnnnnnnnnnnnnnnnnnnnnnnnnnnnnnnnnntctaatcgnnnnnnnnnnnnnnnnnnnnnnnnnnnnnnnnnnnnnnnnnnngaagatca

SEQ ID NO: 99548 - DNA, 500 bp, Arabidopsis thaliana columbia
  unsure (1)..(500): unsure at all n locations
gtactgatcaagataacaaatttatcaaaaataaatacatcatactggtttatgagcaagaaacattgctcagaattattaccaaataagatgtttagaaaccaagactcgaaatacttgatcccggtgcagaaagaagcgccaccggtgacaactttaccgatgaaagcttcaacggtgaaatctccacacaactgtgaggccattctcagagacgcagatcctccgatctctctctcctctgttaatctctctgaacagctacggtctggtgttttcttgaaacccaagaaacagatcaaatattgggtggacggggagaaacagcaacccgctttcatgcctctttgccaaagaaccccctctataaccttggcctgatggcggcaacctatttggccttgggtttcccgaaaaagggtcacccaaagcggggttcggtgcaattaaaatccctttctntttgattttnnccccaaaaantggnnntttttttgttc

SEQ ID NO: 99549 - DNA, 638 bp, Arabidopsis thaliana columbia
  unsure (1)..(638): unsure at all n locations
ccnnnnnnnnnnnnnnnnnnnnnnnnnnnnnnnnnnnnnnnnnnnnnnnnnnnnnnnnnnnnnnnnnnnnnnnccacgcgtccgatcaagataacaaatttatcaaaaataaatacatcatactggtttatgagcaagaaacattgctcagaattattaccaaataagatgtttagaaaccaagactcgaaatacttgatcccggtgcagaaagaagcgccaccggtgacaactttaccgatgaaagcttcaacggtgaaatctccacacaactgtgaggccattctcagagacgcagatcctccgatctctctctcctctgttaatctctctgaacagctacggtctggtgttttcttgaaacccaagaaacagatcaaatattgggtggacgagagaaacagcaactgcttcatgctctttgcaaagaacctctctataacttggtctgatgacgtcaactattggacttggtttaccgaaaaagagtcaccaaacgagaatgtggaagctgtgggattgaaaaacgtttgttggctcgacatcacgggaaaattcgacacgacgggggggcccttaggttcggggggnttntttcggnggntgggcttcaagggnaagntttgnggtncccgccn

SEQ ID NO: 99550 - DNA, 735 bp, Arabidopsis thaliana columbia
  unsure (1)..(735): unsure at all n locations
atcgtaagaagcataggaaggttgatcccaaggccatcaagaactgggcaaggcagattctcaaaggcctgaactatttgcattctcagaaccctccggtaattcaccgggatctgaagtgtgacaatatatttntcaatggaaatactggagaggtcaaaatcggagatctcgggctcgcaactgtactgcagcagcccactgctcgaagtgtgataggtactcctgaattcatggcacctgaactgtatgaagaggaatacaatgagcttgtggacatctattcttttggcatgtgtatgttggagatggtaacctgtgaatatccatacaacgagtgcagaaaccaggctcaaatttataaaaaggtcacctcgaacataaagcctcagtctcttggcaaagttgacgatcctcaagttaggcaatttatagagaaatgtcttcttcctgcctcttccagaccaactgccctcgagctctcgaaggacccattccttgcaagggatggaggcaaggactctgctctgcttgcttcatcaagcacatcatctaaatatgtgagaccaccacagcttgaacatcttcccatggatgtggatcataacgagaataaaagtgtttcaagcaacgaagactacccatggtcccaaaccattgaacttcagaggattgcagagaataaagagttcangttgagaggtgagaggagcgatgatgtcacagcgtctatgg

SEQ ID NO: 99551 - DNA, 742 bp, Arabidopsis thaliana columbia
ggcccacgacataaaaagtaattagtgagaaaattaagaaaaacaaagtctattccatacgaataagagcctcaggttaattttttaaaagatgggttattggaagtcgaaggttgttccaaggatgaagaaattgttcgagaagagtccagcaaaaaaggaagtttgttgaggaggagaagccacgagaggtggaagtcgtggaggaggtcgtcgtgaaaaccgaagaaccggccaaggaaggagaaactaaaccggaggaaataattgcaaccggcgagaaagagatagaaatagttgaagagaagaaagaagaggctaaaccggtggaggttccggtcctcgcagctgcggaggagaagaagccagccgtagaagaggagaagaagacggcgccggtggaagagaagaagccagctgtggaagaggagaagaagcctgccgtggaagagaagaaacctgtggaggaggagaaaaaagaagttgttgccgctgttccggtggctgaaactccttcgactaaggctcccgaaactccggtggttgaaactccggccaaggctccggaaactccggcggctgcgccacaaaaggcttgaattttcttcatggtacatttttctaaaaaaatattgattgtctttgtgtggataatttattttctttgtttatttgtcttattatccatgtgaatttcctctataaattaatttgcttgcttgaattatatattcttatgatc

SEQ ID NO: 99552 - DNA, 569 bp, Arabidopsis thaliana columbia
  unsure (1)..(569): unsure at all n locations
atgaatcaggtgacttatagaagagctttgacgtcgcatgcacgcgtacgtaagcttggatcctctagagcggccgtccttttttggtgtttttttttttttatagtccattgtaattttcatttaaatccaatatgttggacttatataagacatagaagtacgctgatccacataagaagtacaaaacacacctgaattcaatatataaactctttacacttactttattcaaaagaaaagtgcttaataagagaataaatatgaatagagcttaataagagaatagatgaagatatttatgacgacggagatctgcggaaatgaagaggaggggacgaagagctgcaaaaatggtcccgaaagatatgttgaagataccagtagatagatttgaggtctcttttacatttgatccctctttgagacttactgatcctgccaagttcacaaagtctttcacgacgatggagaatctcttaagagaagctgaaggaagaggaggaggaagaagagtcctctctcccacctcccatctccgggcgttggctncttcttcttcttcttct

SEQ ID NO: 99553 - DNA, 541 bp, Arabidopsis thaliana columbia
agctctctacgactcactatatgggaagctggtacgcctgcaggtaccggtccggaattcccgggtcgacccacgcgtgcgcgcaactctctctctctctctctttgagcttctgtaatggctacttggagtggtttcaacgtctcttcttctccgttgcttaggcttcggtcttcctccgtctcaaatgtcactaagcttccgtttctctctcctatttgccggcgtcggttactggcagaacgctttggtctcgcaactgtcgttgttacgcgccaaaacctcacggttactccgtcgtctgcggcggtggaagctcgtatctcagggaaaagagaacctatgacgcctccgtataacatattgatcactggctcaaccaaaggtataggatatgcattagctagagagtttctgaaagcaggcgacaatgttgtgatttgctctagatcagctgaaccagttgagactggtgttcagagtcttaaggaagatttggggagcatgtgtggggaactaagtgtgatgttaccgaagggaa

SEQ ID NO: 99554 - DNA, 563 bp, Arabidopsis thaliana columbia
  unsure (1)..(563): unsure at all n locations
cgnnnnnnnnnnnnnnnnnnnnnnnnnnnnnnnnnnnnnnnnnnnnnnnnnnnnnnnnnnnnnnnnnnnnnnnnnnnnnntcctttttttttttttttgctaaacatgtttcgatttagctaaccgggatttgcataaatattacaatggtcctgtatggaagagagttttggaccttttggtccataatcttaaaaatacaacgatatgttttgtgttgtaaactcaaaacttgaagttaaaaactctcacacaattatcatccccacaagaagttaaccatcgcaagctctgattagactcacacttctcggttggtctccaagctaacctgttcacagccgagacatgacacatgaacggttcgagccgaagagcaagagctgctgttgcagtcgtaccttcctctgtttctataatctttacgttcgacagctctattagcccgctttccatccccactgccacgcacccactcttctcgttgcggtctagtccagtccaagccacggccgttacactgcttccaaacggaggcaagacaagaatctgtttaatgcgag

SEQ ID NO: 99555 - DNA, 569 bp, Arabidopsis thaliana columbia
  unsure (1)..(569): unsure at all n locations
nnnnnnnnnnnnnnnnnnnnnnnnnnnnnnnnnnnnnnnnnnnnnnnnnnnnnnnnnnnnnnnnnnnnnnnnnnnnnnncttttttttttttttttctttttttggatacatgaacctctacaaatctcttatttagaaccatatctacataaacaagtaaaaatacaaggtgatattccatcatcctagtttacgtccactaaaatgagactaaacttgaaagttcaaacttctaaagtcaccaaactcttttatgtacagaaagaggtgatcatctatcaccatcagaatttaaaaatcacaaccaaagagcaaatcacatacaagcttctacctcgtcagctagacacccatcttccagagcaacacgtttcagatcaatgataaattgatctcgaagaaacccgaaaccgaaagtcccattgtcatacaaccagacccgcccttcacctctaagaaaaccaatgccattgccaggttctcctggcaacaccagatcgcagctagacttcatgtacaacattccagatacaacattttcatgaacttcagcgaaagggctaatatg

SEQ ID NO: 99556 - DNA, 525 bp, Arabidopsis thaliana columbia
  unsure (1)..(525): unsure at all n locations
tgannnnnnnnnnnnnnnnnnnnnnnnnnnnnnnnnnnnnnnnnnnnnnnnnnnnnnnnnnnnnnnnnnnnnnntcctttntttggttttaatcttttttngttaacaataaaggcaatgaaatagctttctctcaagggtttctgggtacaattacattattgccttattaaggtgggtggtactagcacaatatagggggtcaaaccagtagaaagattaaaaaacaatacatatatatttaaagagtgaatagtaaaatattatcaccaagagaaaggactagctccttgcaagaacacttcattctccacatcttttaccctttggcacacctgattgcatatctttatcgccatcgccttgtctgcaagtggatcaaatgctgcatagagttcaaaatctggtgtgacccaacatagaaagagtgtagtttgcatctcttctatattgagtctgggggggtcccaatccttttacatgcattgaagcataaagtttctggtatgctcgatatagactttt

SEQ ID NO: 99557 - DNA, 552 bp, Arabidopsis thaliana columbia
  unsure (1)..(552): unsure at all n locations
nnatgattctgccagcgtcnnnnnnnnnnnnnnnnnnnnnnnnnnnnnnnnnnnnnnnnnnnnnnnnnnnnnnnnnnnnnnnnnccacgcgtccggaaaactgtctgaaaaaaaagagtccaagtgagattgtctccgtcaacgatggccttaaacgtgatcaagatctctcgagtcagccttgtaactaactcagtcgaaccactcgttctcccactcactttctttgatttactatggctaaaactcaatcccatagagcgagttaccttctacaaactcaccgagtcatctcgtgactccttcttctcttccatcctccccaaactcgaacaatccctctccctcgtcctctcccacttcctcccactctccggtcacctcaaatggaacccccaagatcctaaaccacacatagtcatcttccccaaagacactgtctctctcacagtggtcgagtccgaagctgacttctcttatatctctagcaaagaacttcgtctggagactgaattacgttctcttgtccccgagttacaagtttcctctgac

SEQ ID NO: 99558 - DNA, 509 bp, Arabidopsis thaliana columbia
  unsure (1)..(509): unsure at all n locations
nnnnnnnnnnnnnnnnnnnnnnnnnnnnnnnnnnnnnnnnnnnnnnnnnnnnnnnnnnnnnnnnnnctttttttttttttttatgtataatcttttgctttataatggtctggacagagaaaagctgtttatacagaatgcataatcaatcatgaaagcagaacattttcgagcgtctaagataatcttttgtttcatctatataatgttggtttttctagtggaactgcggaatggatcatcatcaccgaacgcagcgacgttccctgggcgtgagaaaaactatctggtagcttctaagggtaagagtcttgaaaccagctgcacaatagtcggaaataatattcccatgtccttatgaatttatcgtgcgaatccaagatcgatgatttgtttttgtctctccaaaaagttcttcctccaacatctcaacgggtggtagtaatggatcccaatgttctcaacgttttcaatggcctacctagaggaagaggccatggctgaagtac

SEQ ID NO: 99559 - DNA, 534 bp, Arabidopsis thaliana columbia
  unsure (1)..(534): unsure at all n locations
gttgctagtactccccagctactnnnnnnnnnnnnnnnnnnnnnnnnnnnnnnnnnnnnnnnnnnnnnnnnnnnnnnnnnnnnnnnnccacgcgtccgtaaacatagtagtaatacaatatgtattgtcgtgacgagtacaaaccaaaatgtgtttagtattataaaaacggcttgttcgtattctcttctctcgctcaacacatgaagctcaagtgatccaccgtggttagcaaaaggacggttcacatcatgactatattcgcgagagatctcatctataggatcgaaacgaaggttttgttgccgctcttccttgtccatttgttaccttatgtaacatgccagcaagagtcagaatccgtagaccgcaatagaaaaaccaatttcccaacggaaacggtaatcgcaatcattgtgcttgcaatatttatctcattaagcatggtcgcttgtttcttgcacaaaacattctatagagcagaggttgaggcggcaagccaagaagtgtttcacagtagagcgaggcgtgggc

SEQ ID NO: 99560 - DNA, 504 bp, Arabidopsis thaliana columbia
  unsure (1)..(504): unsure at all n locations
nnnnnnnnnnnnnnnnnnnnnnnnnnnnnnnnnnnnnnnnnnnnnnnnnnnnnnnnnnnnnnnnnnnnnnnnnnnnnnnnnnnccacgcgtccgcttctccggccctaataatggcttgcagagcaaaagaacttgtgtcgttaatcttgtataagatctgtaatcccaaaaggtctgattccaaaattgaggaacatgtggaagaagtagaggatttgaaagcagaggcagaactctttaggtctggttccaaaattgagaagcatgttgaagaactagaggatttgaaagcagaggcagaactctttaggttgaaagcaatctcaggaacagaggaactgaaagcagtggcagatgtcaagaggttgagaacaatcttagaaaacaatagtggaacctcagaggagtgtaagggtgagatgttgaaagaagatctttttcttccctcggatcttgtacgtctcatattgtctcgtctttctttcaaagacaacatacgctct

SEQ ID NO: 99561 - DNA, 534 bp, Arabidopsis thaliana columbia
  unsure (1)..(534): unsure at all n locations
nnnactatagaagacttagacgtcgcatcgcacgcgtacgtaagcttggatcctctagagcggccgcccttttttttttttttttaaagcaaaacaaagttgatttattaatgaataaaagaaacacagaccacattacagtaattcctataactaaagtctttcttttattcaacattgttaccccataactctacaaaacatcaatataaaccccaagaagacatacctcagttcaccagagaggaatttacaacggtgctaacaaacaaaaaaagatacaacaagcggagacgttggatcatcttctgctatgcattaagagcatttgggatgagagaagatcttgtgcttctgctgataggcaagtgaacataaacctcgtgaacttcctgcttacatacatcccctttgtctctatcaatcgcgtaacagacatagattgtgtcaatcacatcgtcaagaacatgtacaaagaaagccaatatcacaatcagtaacacccacgccagtacagccaccacgtacgaatct

SEQ ID NO: 99562 - DNA, 1134 bp, Arabidopsis thaliana columbia
  unsure (1)..(1134): unsure at all n locations
nnnnnnnnnnnnnnnnnnnnnnnnnnnnnnnnnnnnnnnnnnnnnnnnnnnnnnnnnnnnnnnnnnnnnnnnnnnccacgcgtccgtacggctgcgagaagacgacagaaggggaagcgttgtaaaagaaagtgtgattcacgcgctttgcttcttccgtttgccctaaacgactctgctagagaagacgaaggagagagaaaatccctccgattatattccgtacaatccgatcgatttcccggcgccagatctcaccgcgactcgtctactttccgatttggttcgtgttgactcagttacgattaaactatggatccaatggatatagtcggcaaatccaaggaagacgcttctcttccaaaagctacgatgactaaaattataaaggagatgttaccaccagatgttcgtgttgcaagagatgctcaagatcttctcattgaatgttgtgtagagtttataaatcttgtatcttcagaatctaatgatgtttgtaacaaagaggataaacggacgattgctcctgagcatgttctcaaggcattacaggttcttggttttggagaatacattgaagaagtctatgctgcgtatgagcaacataagtatgaaacaatgcaggacacacagaggagcgtgaaatggaaccctggagctcaaatgactgaggaggaagcagcagctgagcaacaacgtatgtttgcagaagcacgtgcaagaatgaatggaggtgtttcggttcctcaacctgaacatccagaaactgaccagagaagtccgcaaagctaactgaaaccgtaagggtaagtgttaggcaagaaaaaacaacatccttttaacattcccttgtaagttgcaaatgcgtatgttctctgtttatatgctcttagtatgatatatgttagttagtgtttcacgatctaaaaacacttgtgattcagatgtaattagtaagcattccttgttttgtgtttactttgtgtcttgactaagcatggtgggtcaggtctacacaaagcatctgattcgatgacttacaggaatcttaatgtttgtagattggataaatttggtgattggtgtaattgtttttccataaacacaatgcaatcattgtttagtgttgttaac

SEQ ID NO: 99563 - DNA, 868 bp, Arabidopsis thaliana columbia
  unsure (1)..(868): unsure at all n locations
ccacgcgtgcgcagaggcatttttggtcataaaatccacacagaggtggttcgacatccaggtgaatccaagtaataaattgcaggattctctctctataatatatatagatatagcttgcaatcatttcctgcgtttggatcggtctgggttttgtcgagggttttttggggaagacgaaattagggtttagttggggcaaagtaagtagtaaagaagaagaagatgcagcagcagcagtctccgcaaatgtttccgatggttccgtcgattccccctgctaacaacatcactaccgaacagatccaaaagtaccttgatgagaacaagaagctgattatggccatcatggaaaaccagaatctcggtaaacttgctgagtgcgcccagtaccaagctcttctccagaagaacttgatgtatcttgctgcaattgctgatgctcaacccccaccacctacgccaggaccttcaccatctacagctgtcgctgcccagatggcaacaccgcattctgggatgcaaccacctagctacttcatgcaacacccacaagcatcccctgcagggattttngctccaaggggtcctttacagtttggtagcccactncagtttcagggtccgcaacagcagcagcaggtacatcagcaagctatgcaaggccacatggggggttagncccattgggtatgnccaacaacggggntncaagcatgnggtngaacaaccnggaanccggtttttggnggnaacgttgggggtttaggggggggaaancaagtttggnccattttggccaagggaaaaatttttngaaatttaaaaggttcccaaaggggtttttttttntaaatttttngncttt

SEQ ID NO: 99564 - DNA, 777 bp, Arabidopsis thaliana columbia
  unsure (1)..(777): unsure at all n locations
nnnnnnnnnnnnnnnnnnnnnnnnnnnnnnnnnnnnnnnnnnnnnnnnnnnnnnnnnnnnnnnnnnnnnnnnnnnnnnnnnnnnnnnnnnnnnnnnnnnnnnnnggctccaaatgctggtcccgccgctgatacttgattactattcgatacgtggacaatataaatagtctgcaatgagaagtcgatatggacatgatactatatgaggtattttaaccacacagttcctctagattcaaacatgaaagccaggaggataatcttgaggttgtttctttactaattccttcaaaccaagttcttgctcttctaggttcttcggtttaacatcatatacatcgttaaacaactctgtcaatggttgtttctcccacttctccgcagcctgaatcgcttgcagaagctgttttcttgcgttagatcttagcttggattcatcttcctcactccaccatccgttatcttcgacccatttccgaaatctattcacagggtttctcgacattttccagtactggatttcatccgccgccctgtacttagttgaatcatctgatgtagaatgatgtcctactctataatggcatcatctcaatggggacaggtctttgttctgttacagccatttctcgagctgagcgtacagcactttaaaccgcaagtgcatcgttaccgtccacacggatgcttcgggtaccgtaagcttgacctttcacaactattccatcacttctaaactgttctgagatatgagtactaatcgcccaaccgttgt

SEQ ID NO: 99565 - DNA, 498 bp, Arabidopsis thaliana columbia
aatacgactcacttagggaaagccggtacgcctgcaggtaccggtccggaattcccgggtcgacccacgcgtccgaaagatggaaaatggctcgatttcctttccaagcaatggagatgtgaattctggaggaacttcttgggcctttaagcagccatctttggaaattggaaacgagaaagaggaaaaggaagtacagacaggcaagcccaagggagttttgccattgtcctttttcgaggatgagaaatcggaaacctctgacactttggttcatgaagatagttttgttttagccagcgattttcctgtgagagagaaaactaaggctccaagtccaactgtgtccatcagtgacttaatatccagattatacagtcaggtggaggagaagaatgcgtgttaatattttgagaaaactcgtgcaactgcttctaatgaagtaaatggtgaggatgattcatggggaatttcagggccccaaaatgccataacaga

SEQ ID NO: 99566 - DNA, 1047 bp, Arabidopsis thaliana columbia
  unsure (1)..(1047): unsure at all n locations
nnnnnnnnnnnnnnnnnnnnnnnnnnnnnnnnnnnnnnnnnnnnnnnnnnnnnnnnnnnnnnnnnnnnnnnnnnnnnnnnnnnnnnnnnnnnaccaatctaaaccagttgctgctagttggctcctttatgaaagagtgaataaaaaaattggagtccggaggaagaatgcatagaatcaacaatgaaaatggttaattgtctaactaagttgagaaatatcaacctcatcaggaatcttgaaggtatccgcagcaccaaactttctaaattcttcgccttcagccactgagtcgtcttcattatcatcataatcttctgcaccatcctgatggcggggtgttgaagggtcaaacacacttctggaccggcagtcatgagttgcaagcatgttcacttggccaaggtgtgaaatctctaccatcacagtttcatcatccagtggcagtggctgtttccagggctccccatccatcctcatgaatgtatggtcggttgcacctntgtgaaattcgaagcgaatacgatttgcctgggcaagtcgtgtcccatgtccattgggagcgagcagaacaagaccatgccaagcatttctaaacccaacaacctcaatgaggccatcatctacaaatggtggagtcaagcctctatcacgttgtttcctgggatttggtgtgccccaaggatttaatcctcccgcaaaagctgggccagatctcagcacatacaatgggacctgatgctatgtggtatgtggagggacctgccactggccatttctagttgcaatcttaaccttggcaagctgagctatattccgtgaagcagggtggaaaagagaggcacaaaaccatccttgcgtgcaaccaagctttacatacgtactctgattaaccagctgattcttaaacttttcagggtgaagcttcctctcagaatgaaacgcataagaaatctgagcatccattccgaggctaaagtaattccagaaccctcctcgaaaagtgtggcagccttccttgtttagtcggacgcgtgggtcgaccct

SEQ ID NO: 99567 - DNA, 526 bp, Arabidopsis thaliana columbia
  unsure (1)..(526): unsure at all n locations
nnnnnnnnnnnnnnnnnnnnnnnnnnnnnnnnnnnnnnnnnnnnnnnnnnnnnnnnnnnnnnnnnncttttttctttttttttttttgtaaacatgaactgttatttattattaccaaacgacaataaataaataattaggtaagacaaagaaaatttacatgaattcattcaaacactaatctataaagatttttgaaatctattctaataaaagttttcttcaccttctttggaagttgaggaacttgataccataagcaaaggcaaagagaaagatcaagatccaggcgatgtggacaacggctacaactggtaagaagtcataatcgaacccgaatccatttttgagcaacgttttaagactcatatctccaacacccgtgatgtgcacaatcgaatccctgtctcctacttgagatgtgatgattccatacaatgtccaagccacaggtgatgcccaatagtaccatctccaccatattggtatttgcggtctagggatgaagaaaccggngaaaagattc

SEQ ID NO: 99568 - DNA, 521 bp, Arabidopsis thaliana columbia
  unsure (1)..(521): unsure at all n locations
ttnnnnnnnnnnnnnnnnnnnnnnnnnnnnnnnnnnnnnnnnnnnnnnntggatccntctaagnccggccgcccgtcacttctttttcttttttttaatccaaacaaaatgcattattatatttaatttatttttcgaaatacaataggggctcgatatgaaatcaaagacaaaggagattattacatcaatgtgactaaacaagacccaatgtctcaaagagaggtgctatagaacttggtggcgaaagaaaggccttcctcggataacacgtcaagactctcaacggaaggttgtgctcgtgccactttagcaatagccttgtgttcctcttgagtacctccttctaggaacactcctactactttcccatctttaacccaatacgtcccaaactttggctttggagatttcgggtcattatctccaaacagtacagattctccaacgttttccccatagaattcccacgatagtttgaaaaatcgagagtagaaatagggaagataatcgtaatctga

SEQ ID NO: 99569 - DNA, 604 bp, Arabidopsis thaliana columbia
  unsure (1)..(604): unsure at all n locations
nnnnnnnnnnnnnnnnnnnnnnnnnnnnnnnnnnnnnnnnnnnnnnnnnnnnnnnnnnnnnnnnnnnnnnnnnnnnnnnnnnnnnnnnnnnnnnnnnnnnnnnnnnnnnnnnnnnnnnccatattctaagtttgtttataggaaacaaaaggaatgacatttgctattaatattaatgttaaggattcgatagttttacagtttacacactcttctgtctctctactcttcacatgagctcagcttcttcggtgtctccatcaacatcttcaacatcgttctcgtcattctcatctgttgcatctgggtctattcccttcatttgtttctccaagcgatctagtccctttttggctgcctcattctgtggatttattcttaatgcagcttgaaagtgtgataaagaatcttgtagcatattcgttgcagcaaacacttgagctagcttgacgtggagagaatcatctgcataatctttgagatatcgttcaagtagtgatacagcatctccattcctcccttccattagatgaagctcagctagggctaacacagctccaaggtacccaggttccagcctcagacctgactcgtaaaacttttt

SEQ ID NO: 99570 - DNA, 617 bp, Arabidopsis thaliana columbia
  unsure (1)..(617): unsure at all n locations
atgatacgcgcagannnnnnnnnnnnnnnnnnnnnnnnnnnnnnnnnnnnnnnnnnnnnnnnnnnnnnnnnnnnnnnnnnaccccacgcgtccgggagagaactgtcctcattgtttcccaaccctctccgctattggaaggacgggttgggaaacaatgaggagagaactgtcctttctgtacagtcgtttctatgggatccttcttggaggcattttgataatgtaccagttccacaactacatgcagccgattctccttctcatgtactcattttggataccacaaatagtcgccaatgttgtccgggattcaagaaagcctctgcacccatattacatcttgggcatgacagctacacggttagctataccgttatatgtttttggatgcccacacaacttcatgcgtgtagagcccaacaaggtttggtgtatatgcttgtgcacattcatggggttgcaagccgtcattcttcttcttcagcattattttggttcacgctgctttgttccccgtcagatgctaccagagaaatacaactaccaccgaagatttaatcgggatgtaagccgcaccactgattgtgttatctgcatgaccgctattgatctca

SEQ ID NO: 99571 - DNA, 1250 bp, Arabidopsis thaliana columbia
  unsure (1)..(1250): unsure at all n locations
gaacgcaacttctgtaaatgttgaagtctactataacaaagctgtgaactatacactgatggtcacttttgtctctttcctccaggttcttctgttgccacgcgtccgggagcacggtaacacacaatctggtgctgctaaggtatccattgtaatgattgggcaacaagcgatcatggatgcttatttgtgcctcttacatctaacagccggtatattagtcgaatctctatttaatgcatttgcaaccgctgcgttcttcaagttcgtagtcttttcgatttttgagatgagatatcttctggctatatggaaagcaacccgtccttccaatagcggagagggttgggaaacaatgaggagagaactgtcctttctgtacagtcgtttctatgggatccttcttggaggcattttgataatgtaccagttccacaactacatgcagccgattctccttctcatgtactcattttggataccacaaatagtcgccaatgttgtccgggattcaagatagcctctgcacccatattacatcttgggcatgacagctacacggttagctataccgttatatgtttttggatgcccacacaacttcatgcgtgtagagcccaacaaggtttggtgtatatgcttgtgcacattcatggggttgcaaggccgtcattcttcttcttcagcattattttggttcacgctgctttgttccccgtcagatgctaccagagaaatacaactaccaccgaagatttaatcgggatgtaagccgcaccactgattgtgttatctgcatgaccgctattgatctcagacagcataccagtgattgcatggtaactccatgtgaacatttctttcactcgggatgcttacagagatggatggatataaaaatggagtgtccaacttgtcggcggtctcttcctccagcatagaggatgttttcggtttgttaggatgtacagacttcactcagattattgcgggtggggctggttctttaatttcaggtccttgcagaggtttagaagatttttagatgaaaacagagcaaaggtggaatctgtaactgcggctagataccgcagatagacaattgtgttctgtataaactgtattacgttataatcttagtgcatattcttcaccccaaaaaaaaaaaaaaagaagaagcgaaaannnnnnnnnnnnnnnnnnnnnnnnnnnnnnnnnnnnnnnnnnnnnnnnnnnnnnnnnngacctaa

SEQ ID NO: 99572 - DNA, 873 bp, Arabidopsis thaliana columbia
atgatatgccagcactatacgactcacttagggaaagctggtacgcctgcaggtaccggtccggaattcccgggtcgacccacgcgtccgatttgattaacaggcttcttgtccatgagccggaaaagcgactgggggcgaacggtgctgcagaggtaaagtcgcatcccttttttcaaggagttgactgggagaatcttgctttgcaaaaggctgcttttgttccgcaacctgagagtataaatgacacaagctatttcgtatcacgctttagtgaaagcagttgcagcgatactgaaactggtaacaacagtgggtcaaatccagattcaggagacgagttggatgaatgcaccaacctggagaagtttgattctccgccttattatctctcgctcattaacttttctttcaagaatttgtcacaattggcttcaatcaatcatgatgtgctattgcaaaaggatccagctaaaggaggaggagactcaccctttaaaagccatggaacgtagagctctcctacaaccgtcaaaggtggccttagtccgctgttttctctggtttgcgccctgctttgaccgttgtagctgctgctgctactatgctgaaattgttacctcaaggtctttgggtaattattttcagttttgtcataaattgatttggaaccatttcaaatgcaaatccaagtatttattgcgtggcaacaacacacatatacatgtgtataagcttgtgtgtattgaggctgatggaaataagagagcgctttggttactgaattaaaaaaaaaaaaaaagggcggacgctctagaggatccaagcttacgtacgcgtgcaggcgacgtcataatcttctatagttgtcct

SEQ ID NO: 99573 - DNA, 1022 bp, Arabidopsis thaliana columbia
  unsure (1)..(1022): unsure at all n locations
atgatcctgccagctacnnnnnnnnnnnnnnnnnnnnnnnnnnnnnnnnnnnnnnnnnnnnnnnnnnnnnnnnnnnnnnnnnccacgcgtccgctttattcttccatatctcttccatttcgctctctatttcacatccccatataacataatatacaatcacacatatcatttctatatagtatttaatggggagacagccatgctgtgacaagctaggggtgaagaaagggccgtggacggtggaggaagataagaagcttataaacttcatactaaccaatggccattgttgctggcgtgctttgccgaagctggccggtctccgtcgctgtggaaagagctgccgcctccggtggactaactatctccggcctgacttaaaacgaggccttctctcgcatgatgaagaacaacttgtcatagatcttcatgctaatctcggcaataagtaagcctaataatcatatattaattccacattttttttgaattcttacttaatgatttgtgtcatataatatcaacggaggcttaaaattttcaaatttatattaaaaattcaaattttacgttgtaacaaaaactagagacttaagataaacattggtttgatcatcataaaatataaagtcaattgcatgtgatccaacatgtttagtgtattaatgtgtgttgtgtaaattatgccaaatggttccaaataagttggtcaaataagtagaataagttttgatttgcattgatttttcgttgaaatcaacttcaagctacttcaagacaaagtaacgtccttctcttccaaagataatgttaacttattttgtcaatcttcttgtttttttataccaagattgtaacatatatatcccccaaccctttataaaatattatttatttttgtnnnnnnnnnnnnnnnnnnnnnnnnnnnnnnnnnnnnnnnnnnnnnnnnnnnnnnnnnnnnnnnnnnnnnnnnnnnnnnnnnnnnnnnnnnnnnnnnnnnnnnnnnnnnnnnnnnnnnn

SEQ ID NO: 99574 - DNA, 561 bp, Arabidopsis thaliana columbia
  unsure (1)..(561): unsure at all n locations
nnnnnnnnnnnnnnnnnnnnnnnnnnnnnnnnnnnnnnnnnnnnnnnnnnnnnnnnnnnnnnnnnnnnnnnnnagaataaaaacactccctattaatactgttttattcattacaacgataacataaaaaccaaaaggtacgtatatatagtacacaaaacacagtaaaacaaaagtgacttaataccatcgtagtacaaaattacacaatgtcttcccatacttatacaacagcggaaatctgagggcttgacataaggtcgttaattcctttactgtttaatttttctgatgagatttcagcaccgttcaccactaatgccttcagatcagcgtctgtgattctctttttgtccttcgttaattctctgtatcgtgagaagatgtcggtgaatttctcatcactgatttcatatcccaactccttaagccggtcttttacagcatgacgtccgctaagctttccaggaacaatgccagaatttccagatttacggtccaaaatctnngggggaaggcccaaaggactcgnttttcaaatccaccngggatgcggcccat

SEQ ID NO: 99575 - DNA, 1364 bp, Arabidopsis thaliana columbia
cagatctttccaattgaaagcgaaccgtgaattttgagtctctttaccggaggagaaaaaatgcttggtggattatacggagatcttcctccaccgaccgatgatgagaaacccagtggaaactcctcttccgtctggtcacgcagtaccaaaatggctccacctacacttcgcaaaccaccagcttttgctcccccgcaaacaatcttaagacctctcaacaaacctaaacctatcgtttcggctccgtacaagcctcctccgaattcatcgcaatcggtgcttattccggcgaacgaatcagcaccttcgcatcagcctgcattggttggtgtgacttcatcggtgattgaagagtacgatccagcgagacctaacgattacgaggagtataagagggagaagaagaggaaagctacggaagctgagatgaaacgagagatggataagagaaggcaagtgtatccggaaagagatatgagagaaagagaagagagggagaggagagagagagagataacagtgatcctctcggttgatatctccggtgaggaacgtggaagagaccctgctagagtagtggtggaagtgttgggaagggaagatcctcgtctcctccctgggaatgttgatgggtttagtattgggaaatcgaagccgagtgggttaggagtaggagcaggtggacagatgacacctgctcagaggatgatgccgaagatgggatggaaacaaggacaagggcttgggaaatcagagcaagggattcctacgccattgatggctaagaagactgatcgtagagctggtgtcattgtcaatgctagtgagaataaatcttcttcggcggagaagaaggttgttaagagtgttaatatcaatggtgaaccaaccagggttttgcttcttagaaacatggttgggccaggacaagtagatgatgagctagaagatgaggtaggaggcgagtgtgccaaatacggtacagtcactcgtgtactgatattcgagatcactgaaccgaacttccctgtacacgaagcagtaagaatctttgttcagttttcaagacccgaggaaacaactaaagcccttgtagacctcgatgggagatactttggaggaagaaccgtacgtgcaacgttctatgatgaagagaaattcagtaagaacgagttggctccagttccaggtgaaatccctggctattaataactcctaagacaaagaagaaacttcatcttctaggagattcttgttagagaaagaaatcatagactgaggttttaaaaacatttgtaaagtacttagaaatcttgggttatctctttattgttgttcaataaagcttcacaaggatcaag

SEQ ID NO: 99576 - DNA, 411 bp, Arabidopsis thaliana columbia
tgagaaagcaggtggttaccgtctcttctttgtgctaatgccaataagatcgctataaacgcggctttaggttttgacagctacatggtaatgcgccatggtgctggccccacctctctgtctgatgatatgcagaatcttgacataaacaagacacatacacagagacttggttgttacttctgcaacgacgtggttgcacctcaggattcaatgactgatcgaactctagaccaacaatgcactgttacacgcccgggtctagctcctattgcaggagctctcgccgttgaactcttagtcggagtcctacaacacccacttggtatcaatgcaaaaggcgacaattcgagcttgagtaatacaggaaacaatgatgattcgcctctcgggatattacctcatcagata

SEQ ID NO: 99577 - DNA, 635 bp, Arabidopsis thaliana columbia
  unsure (1)..(635): unsure at all n locations
nnnnnnnnnnnnnnnnnnnnnnnnnnnnnnnnnnnnnnnnnnnnnnnnnnnnnnnnnnnnnnnnnnncttttttttttttttttcatcgaacatttttgcttacaattcatcatttgctataccgatacagaaatatatttatttataagattagggggagaattcaaattggctttgccaaaagagatgattggctttcatgatatgaagggagcacacaaatggatattaagttatggtgtaggcatcagactctgcagttttctccgacaattcctagcctctcttgtgtggtatcatatattactctctggtttttctgctgataatttccgatgatcccgacttcattttcatatgacagacttgctaaggccaagcagactagagatgcgtcaggcttgacaaagtagaacacaccagtgacatccacttcgagctcagcgttaccttggaagatcattttgataatgggaatgcttatgtcttcataacttgtgaggttaaagcaagtgtctaagattgaataaccaggagcngtaggaaacccggaaaantgtttnagaaactctatcttcacagctttgtaaatggaaggtggcaatcttgtgataaccgttcctgaatcgattag

SEQ ID NO: 99578 - DNA, 523 bp, Arabidopsis thaliana columbia
  unsure (1)..(523): unsure at all n locations
nnnnnnnnnnnnnnnnnnnnnnnnnnnnnnnnnnnnnnnnnnnnnnnnnnnnnnnnnnnnnnnnnnnnnnnnnnctttctttttttttttttttcccaaaacctttctaaaattataacaattgctaattctttaaattatacatcgaccccttcatctttacaccgcctcaataaatatccctcttattttttcaagcaccatttattcttcctctagtgaatctctctaacctcttagaatcaagattaacgtccagcttcaaaggatccaacgacagcttcgagcgtaaaaatacatcgaggttaaacccgctcccagtttcaatgtcctcgcgtcccgcagagctctcgggttgctgattggattggctatctttggttctattcatgtttctaagagtagtagttaatctgttgttgtcattgttctgaccaaagttcaagagccttttaacggtgtctaaagccgggtcaataatatccaagaatcctgtgacccacgaagcatcatcaacaacctc

SEQ ID NO: 99579 - DNA, 671 bp, Arabidopsis thaliana columbia
  unsure (1)..(671): unsure at all n locations
nnnnnnnnnnnnnnnnnnnnnnnnnnnnnnnnnnnnnnnnnnnnnnnnnnnnnnnnnnnnnnnnnnnnnnnnnnnnnnnnnnnccacgcgtccgcaacaactttgagtgagttttttttttttgtcatttacctttgtcgcttcgacgtgagacgagccgtggaagaagacgaaagggctcttaagctctctttactcttttcttctcctcctctttttgagatgggaagccctaacgccgccgccgagacggatctaacaaccgatgatttcatcggagacacacgacgggactctggttctgatacagagaccaacaccgattgtgacggagaagatttgcctcttcttctgctacctgctcctcccggccacttcgaagaaggagagagagttttagccaaacacagtgattgcttctacgaagccaaggttcttaaagttgaatttaaagacaatgaatggaaatattttgtgcattacattggttggaacaaaaattttggggcggaatggnntaagggcttggnncttgtcctgtttgaaaaccattcaggattggtgnaatatttgnggaancaggaaaggancaagggtttnnaaacagccaagggnttaagaagtncctntgggctttggaaaaagtgnncaaaagatggaaaccttggaag

SEQ ID NO: 99580 - DNA, 498 bp, Arabidopsis thaliana columbia
  unsure (1)..(498): unsure at all n locations
ctatagnagagttatgacgtcgcactgcacgcgtacgtagcttggatcctctagagcggtcgccctttttttttttttttttttttttttttttttttttttttttttttttttnaaaaatgaatgcactgagatataacgtttcaattcatatgaaggaatttcgaagaagaagaaaagaagaatcaacttgttgagcatctaaccttgtacaagtattttttacgaagttttatggctgggcgtatgcatcttctcactctaattgcaagcagcttggcattacaaatctttatcatgtcatcgatcgagcgagtttctttcatgattttatgccgattcatgattagaatagccgccacacaaaagactggaagagggtcatttcctttcccacaggttgaaactacccaagaggcactgggttcttttatttctagaccataaattgcttggtcaagccacataaactggatgaacctggtgggtttatcccca

SEQ ID NO: 99581 - DNA, 502 bp, Arabidopsis thaliana columbia
agctctctacgactcactattgggaaagctggcacgcctgcaggtaccggtccggaattcccgggtcgacccacgcgtggcgccacgcgtccgatccaggaaatctaggtagaatgtcagatatccttgcggtctatgcttgggttgatcctgcaactggttattgccaaggaatgagcgatttagtgtctccatttgtatttctttttgaagataatgctgacgccttttggtgctttgaaatgctcataagaagaacgcgtgctaatttccagatggagggaccaactggagtaatggatcaattgcaatcactatggcgtatattgcaactcacagataaagaaatgttttcacacctatcacgtattggtgctgagagccttcactttgcgttccggatgctgttagtgttgttccgacgagagttgtcttttaacaaggctctgaggatgtgggagatgatgtgggctgctgattttgatgagtcttttgctgaaac

SEQ ID NO: 99582 - DNA, 554 bp, Arabidopsis thaliana columbia
  unsure (1)..(554): unsure at all n locations
ccgcgccccccctcgaggtcgacggtatcgataagcttgatatcgaattcgcggccgcctgaggaagctgacgagactgaagagaaagaactcgaggagaaagatgcatttgcagaactgaagaacatggcagctgcttcgtcaaaagaggagatgtcaggaaacggagtgtcagctgaagctagaccttctaaggtagataatgctgttaaaaacggtggtttcattgcttatgagcgtgagggagttaagtacagggatcccaatgttcgtcttaatgactggaacgaagtcatggaggaatcaaaacctggaccactccttacaactcagtcagctcgttgcatggattgtggaactccattctgccaccaggagaactctgggtgtcctctcggtaataagatccctgaattcaatgaacttgtctaccagaacagatggcaagaagcctttgaatcgtctactttagacaaacaactttccagaatttactgggcggggatgccctgcaccactgtgagggtctcttgtgttttggataatttngaccc

SEQ ID NO: 99583 - DNA, 2040 bp, Arabidopsis thaliana columbia
  unsure (1)..(2040): unsure at all n locations
nnnnnnnnnnnnnnnnnnnnnnnnnnnnnnnnnnnnnnnnnnnnnnnnnnnnnnnnnnnnnnnnnnnnnnnnnnnnnnnnnnnccacgcgtccgcggacgcgtgggcggacgcgtgggcggacgcgtgggcggacgcgtgggcgaagtcatggaggaatcaaaacctggaccactccttacaactcagtcagctcgttgcatggattgtggaactccattctgccaccaggagaactctgggtgtcctctcggtaataagatccctgaattcaatgaacttgtctaccagaacagatggcaagaagccttgaatcgtctacttgagacaaacaactttccagaatttactgggcgagtatgccctgcaccatgtgaaggttcttgtgttcttggaataattgagaaccctgtttctatcaaaagcattgaatgtgctattatcgataaagcctttgaggaagggtggatggtaccaaggcctcctctcaagagaacagggaaaaaggttgctattatcggaagtggaccggctgggttagctgcggctgaccagctgaacaaaatgggccatttagtaaccgtgtatgagcgctcggacagaattggtgggctgatgatgtatggagtaccaaacatgaagactgacaaaattgacgtcgttcaacggcgggttgatcttatgaccaaagaaggtatcaactttgtggtcaatgccaatattggaaaggacccatcttactcccttgatggacttaaggaagagaatgatgcaatcgttcttgctgttggttccacaaaaccaagagatcttccagtgcctggtcgtgatctatctggtgttcactttgccatggagtttcttcatgcaaacaccaaaagtttacttgacagcaatcatgaggatggcaattacatttctgcaaaagggaaaaaggttgttgttattggtggaggtgataccggcacagattgcatcggaacatctatccgccatggatgtaccaacattgtaaacctagaacttcttcctcagccaccctcaacaagagctcctggaaacccttggccacagtggcctcgtgtattccgtattgactacggacatcaagaagctaccaccaaattcggaaaagaccctaggacctatgaggtcttaacgaagaggttcataggagatgacaatggaaacgtgaaggggcttgaacttgtgcgtgtgagttgggagaaggatgaaaccgggaggttccagttcaaggagatcgaaggctctgaggaaatcattgaagcagacctcgtttttttggccatgggtttccttggacctgagccaacacttgctgagaagctaggtctcgaatgtgacaacaggtcaaactttaaggccgagtatggccggttttccacaaccgtggaaggtgttttcgcagcaggtgattgtcggagaggccagtctttggttgtctgggctatctcagaaggacgtcaagctgcagatcaggtagacaaattcctcaccaaaacggatgatgacgaagacgccaagctacaacaagaccttaaccagatgaaacacaacactatcacaaactgaggtaaaagaaagccttactcatctgaagcaaaagtcgagagagaaagacaactgatgttactcttttagaggacacacaggcgtaaaggaccgacttatggcagagatgaaggaagagagttgcagaggaaaagtaccgaacttgatgatttagtagagagaagtaaaagtttaggtttgtttttgtttattatcgtccataaagtaataatgattcataagtacattctctttgtaggatttcagtagctttcttttgttaaagctttctgaaattgaaagccttttgttttttctctatggctgtttctaagtttgaattttaaggaattgtaatccagttcctgcttcttgttaaaaaaaaaaaaaaaaagggcgggcgctctataggatacaagcttacgtgcgggtgcatagcgacctnatagctctctatagtnnnnnnnnn

SEQ ID NO: 99584 - DNA, 718 bp, Arabidopsis thaliana columbia
  unsure (1)..(718): unsure at all n locations
nnnnntnnnnnnnnnnnnnnnnnnnnnnnnnnnnnnnnnnnnnnnnnnnnnnnnnnnnnnnnnnnnnnnnnnnctttttttttttttttttttagaaaaaaccatatatcattaatttatcacatcataaacagagagttataagtttgatgtcaaatcatagtttgttgtgagaaaagaaaaaaaaaaacataaaccttaaacatatactggggtcatcaacatatcacttactactacaacatttgacaacttgttccttcggatcatgcatgagttttacttttacaaacagattctgcaaactttaaaagaagtttctaatctcttctgaaaccgaacaaggtttttattagttacctccaagcacaagaagtgataagaggttgattcttccatcctaaatacaatgctccatctctttcttcaagtgtatacttctctgaataactctcaagcaatcctttgattgttgcgttcacatacgagctcaaaggatacggtttaaatcccgccatgtgaaaccgagacctccatttccctagtgggctcgtgcctctcttctctttcaacaccttcacaagctataagattcacaacctctttagccaaacaatgctgctcaacattgatcctttccttgtgatctctagcgagtttcacatctattgattcgaaaactgccaagtaatggttcattgtctcgacaaaccgggga

SEQ ID NO: 99585 - DNA, 431 bp, Arabidopsis thaliana columbia
ccggccactagttctctttattgaaccaagtaggagccataccagtatatagacaaatgtcaacttagtttacaattcgtggttgatacgaaggtaatacagattatgtacttctgagggtttcttacacgcagtggtattcttctttgcctcacagacacgaatcaatcgatagaaggaatagaaaacaaccattaagcacagaggataggctgagagaaaaggatgagctttcacaagttgccaccacattggcattacaggtacttaaccagcagccaaattacaagagcaagaccaacgattccaagcacagacaagagcatagacatgcatgagcaaccacttttcatgttcttgttcatcaaggcaaggctcttttgaacacgccgtagcgagagtcagtgatatccacatcgtatctaagtcat

SEQ ID NO: 99586 - DNA, 528 bp, Arabidopsis thaliana columbia
  unsure (1)..(528): unsure at all n locations
nnnnnnnnnnnnnnnnnnnnnnnnnnnnnnnnnnnnnnnnnnnnnnnnnnnnnnnnnnnnnnnnnnnnnnnnnnnnnnnnnnnccacgcgtccgcttttacctttttcttctgttcaggtttcatttcctctcagagtttgatgatggcaaaagaagttgcagaaggcgattagccggtcacaatgaacgaagaaggaaacctgcattctatttcctaccgggtaagcgccataagcttcttcgcacctctcaagatgtagtaggcaacaagtttctggagaattcatcattggtattgccagagtcatttcctggtagtctcttatacagagtaatagatgaagacgaccaccgtacaagtagactcgtgagtttcaaagatgaacctacttgttccatgtttcctactaatgagcaaaacagcagcagaacttatgaatctaaaccagcaatttattccacggaagtatcctccatttgggacttacatgagacggcggcatcacgctctactcgtgctctctctc

SEQ ID NO: 99587 - DNA, 500 bp, Arabidopsis thaliana columbia
aaaactctgcacgaggcgttttccggttgtgttactatggtgtcctgtaaggttgctacggtccacatgggtcagcctagaggatatgggtttgtgcagtttgacactgaggtttcagctaagaatgctattgagaagctgaatgggaaagtgttgaatgacaaacagatttttgttggaccttttcttcgtaaggaggaaagagagtctgctgctgataagatgaagtttactaatgtttatgtgaagaatctttcggaggcgactactgacgatgagttgaagactacttttggtcagtatggtagtatctcgagcgctgtagttatgagggatggagatgggaaatccaggtgttttggatttgtcaactttgagaatcctgaagatgcagctcgtgctgttgaagctctcaatggaaagaagtttgatgataaggagtggtatgtgggtaaagctcagaagaaatctgagagggaacttgagttgagccggagata

SEQ ID NO: 99588 - DNA, 1042 bp, Arabidopsis thaliana columbia
  unsure (1)..(1042): unsure at all n locations
taatacgactcatatagggaaagctggtacgcctgcaggtaccggtccggaattcccttgtcgacccacgcgtccgcggacgcgtgggaagaatctttcggaggcgactactgacgatgagttgaagactacttttggtcagtatggtagtatctcgagcgctgtagttatgagggatggagatgggaaatccaggtgttttggatttgtcaactttgagaatcctgaagatgcagctcgtgctgttgaagctctcaatggaaagaagtttgatgataaggagtggtatgtgggtaaagctcagaagaaatctgagagggaacttgagttgagccggagatatgaacaaggctcaagtgatggtggaaacaaatttgatgggttgaatttatatgttaagaaccttgatgataccgtcaccgatgagaagttgcgcgagttgtttgccgaatttggtacaatcacctcttgcaaggttatgcgggaccctagtggtactagcaaaggatcaggatttgttgccttctctgctgccagtgaagcttcaagagtgctgaatgaaatgaatggtaaaatggttggtggcaaaccgttgtatgttgctcttgcacagaggaaagaagaaaggagggctaagctgcaggcacagttttctcaaatgagacctgcttttatccccggtgtgggtcctcgaatgccaatatttacaggtggtgctccaggtcttggacaacagattttttacggtcaaggacctccaccaatcatccctcaccagcctggatttggatatcagcctcagctggttcctggaatgaggccggccttttttggtggaccgatgatgcagccaggtcagcaaggtccacgaccaggtggcagacggtcaggtgatggacccatgcgncatcagcatcagcagccaatgccttacatgcagccacagatggttgccaagaggncggagggtaccgnttancctttnctggntggtnagnaaacatgcccttaacgggtccaaattnncagggngggaantgtt

SEQ ID NO: 99589 - DNA, 681 bp, Arabidopsis thaliana columbia
  unsure (1)..(681): unsure at all n locations
ctctcttatccatttcctctctagacttccttaaatcgattctcccgaattcgagaacagagcctttttttctttaattccaactctttctctcttgttctgaattcgtggttcgtcggtattataaaaaaaaacatgacagggttctctgtgtctctttttgtgtcaaacttgtcaaatgtggcctcgtatttgtcgcccatcttcgagaacatcccctccaccaaggttgttcccgcacagatcgagaaagttgtctctttggtctctcgtaccggtcgcgatttgcagcgttacgatcacgctggctatcgtcaagtcgtcggatgtgtaccgtatagatacaagaaacaagaagtcaatggagttgaaacccaagtaatccaagttcttcttgtcagtgctcaaaagggcaaaggaatgttatttccaaaaggaggttgggagacggatgaatcaatggaggagctgctttnagagagcgntcgaaggagcgggtgtaacaggngncttgaagnaaaagctttgggaatgnaattcaaaannaaaangcattgnataattcccggtgggatttgttcttcttgcagcaagngttgccgtgcctnggggaattggcaccgagtgggnagtttgtacnaagaagtttcnaaattggggtaanncnctttcggttttncc

SEQ ID NO: 99590 - DNA, 502 bp, Arabidopsis thaliana columbia
  unsure (1)..(502): unsure at all n locations
nnnnnnnnnnnnnnnnnnnnnnnnnnnnnnnnnnnnnnnnnnnnnnnnnnnnnnnnnnnnnnnnnctttttttttttttttcagtgcaagactccatgagcttggaggttaagtgtcattaacaacattacaacagactaatggtcaaaatttggacttggcttctctacgtatttcttttaactaacaacagagtgaaactttcaacacacagattgcagttataaaaagaaggtcaagatgaagagttacttaggttgtgaactcgtaagcgtttgggacatcatgaactgggtgacctttctcatttcgctcaattatcctccgtgccaaccctacttgcttccccaccacaaagatgaaagcctttccttttcccctagcccctcttgctggtcttcctacacgtctcacgtattcactgggggccacgggggaagccaaaggagcaccacatgatcaccaccagagaaatctatccaccgggaggctctttcagggc

SEQ ID NO: 99591 - DNA, 894 bp, Arabidopsis thaliana columbia
gaattgtattaggtcacactatagaagagtctatgacgtcgcatgcacgcgtacgtaagctcggaattcggctcgagggatcaaacgggggatcaggatctactgtctcatcttctaaagagccttgtaagccaagctggtgaacatatagggaggaatttagttgggcttctacagggtggaggaggactccaggcttctcaaaatattggaaacttatccgctttgctctcactcgagcaagcccctcgagaggatataaaacatcattcagtgtctgaaacgccttggcaagaagtgtatgccaatagtgctcaagagagagttgccccggataggtccgagaaacaagtcaaagtgaatgattttgatttgaatgacatctacatagactcagatgataccacagatatagagagatcatcacctcctccgacaaatccagctactagttctcttgattatcatcaagactcgcgtcagtctagtccacctcaaactagtaggaggaattcagattcagcttctgaccaatcaccttcaagttccaggtggagatgcacagagccgtactgatcggattgtgttcaaactctttgggaaagagccgaatgattttccagttgccttacgaggacagattcttaactggttagcgcatactccaactgatatggagagctacattagacctggttgtatcgttttgaccatttatcttcgtcaagatgaagcttcttgggaagaactttgttgtgatctgagtttcagcttgaggaggcttctagatctttcagatgatcctttatggactgatgggtggctttatcttagggtgcaaaaccaactcgcatttgcgtttaatggtcaggttgttcttgacacatctttacc

SEQ ID NO: 99592 - DNA, 481 bp, Arabidopsis thaliana columbia
cccacgcgtccgcttcactctcttcttccccatcgaagactcgtcttcttctgcttcaatggccgaatttccagaaccgggcactgtaaaccctgactcggatctatcgaatggtcgagctgagaagcctgagatagacacttcggctccgttcgagtcagtgagagaagcagccactcgtttcggcggttttggtttctggagaccttctctcaataaactcccagatgcttctcaggaaaatatccaagaacctgatatcatgggactcaaagcacaagctttcgagctacaaagagaactaattgttaaagaacgcgaaacgctagaggtgttgaaggagcttgaggcgactaaagccacagtcttaaagctgcagcagaggaatgaagcttatgaggaggacacgttgagagaagaagttgacagtcatatcaagccagcgggtgtggttctaaaggatttaagccaggcgaagatg

SEQ ID NO: 99593 - DNA, 688 bp, Arabidopsis thaliana columbia
  unsure (1)..(688): unsure at all n locations
nnnnnnnnnnnnnnnnnnnnnnnnnnnnnnnnnnnnnnnnnnnnnnnnnnnnnnnnnnnnnnnnnnnnnnnnctttttttttttttttttttcaaccaattaatgggtggttcttttctctttattatcattcctcgtggatccagaaatgagaaatccatgcaaacttaacaaaaagaatcgactctctatgtaaagttttctcgattcaacaatagatcaaagattctgccagacattgggacacggctttaagaaaaagaaaataatgaaaggccatatcatatggagtaccttgattcttcagcaaaaatttctcaggacgaagcagagaatgtcaagaaaacccctgatctcgcttgatcgtgttcctgtttcttcaatatgtggcagtagttaagctccatacggaataggcttgttgggaagacgattccagccccaactgaagttctgaatgtctccaagaactttggagcagggaagtttctaaactcattctctgataacttcgccatattccctgcacaggcaaacacatgcccgtggattcctctctctcttaaccatctcactggcaaatcaaatgagagatccgcaaatgcagtcactgccgcatctcctccaacaaaatcccgttcactatcacctttcctctttggctcactgggaccaactcctctggtct

SEQ ID NO: 99594 - DNA, 329 bp, Arabidopsis thaliana columbia
  unsure (1)..(329): unsure at all n locations
ttccgaggctacgacccacgcgtgcgctgtatttgtggtctacctattctactcatccgtgaccgtcagaattcaaactgctgctgttgaatcaccgaagcttacagtgaagtcatctctaaagaacttcggagtcgcggccgtagcggctgctgcttcaattgctttggccggaaacgccatggcaatagaagttctcttgggaggaggggatgggtcgnnagctnntattnccaacgtcttctctatagctaaaggatagactattgagtgcacgaacagcgctattttcccacaccatgttgtactcaacgaatgcacaattcttt

SEQ ID NO: 99595 - DNA, 682 bp, Arabidopsis thaliana columbia
  unsure (1)..(682): unsure at all n locations
tcgccggtcgacgcaagcgactgtactgacgtcgtgttaacgagtcagtggtgctgcggaaattctataaaaaggaaacgaaaaacttaaaacccaaatcttatcactactctaaaagaatcttcatcatggcctcagtaacctcagccaccgttgcggtcccatcttgcatccggccttaaggcctcatccatcaaatcatccgccaccgctcagaatgccaagctgcttgctgttgcatcgaccgtcgcttacagtgaagtcatctcggagaagaacttcggagtcgcggccgtagccgctgcagcttcaattgctttggccggaaacgccatggcagtagaagtgctcttgcgaggaggggatcgggtcgtgagcttttacttcccatcgacttctctatacgccaaaggagagaagattgtgttgcaaaggaacatcgtctggatacccacacaatgttgtcttcgatgaagacgagatcccaagtggcgtcgacgtgggcaagatctcgatggacgagcaagatctactcaaacggtgcgggagagacgtacgaggttgctttgnccgagncaggggcttanagctttantgtgcgcanatcaggggntgggatggncggaaagcncgtaacnaaatgtngtgtangaagtnnggggcccgngccattaanggcctt

SEQ ID NO: 99596 - DNA, 619 bp, Arabidopsis thaliana columbia
  unsure (1)..(619): unsure at all n locations
caagctctaattcgactaactttatggaaagctggtccgcctgcaggtacctgtccccaattcccgggtcgacccacgcgtgcgggcggngcgagaaacnacagaaggggaccacataaaaactcataaactcgatcgaaccaaagctaaacgaaaaacttaaaacccaaatcttatcactactctaaaagaatctttcatcatggcctcagtaacctcagccacccttgcaatcccggcgggcaccggccttaaagcctcaaccatcaaatcatccgccaccgtcagaatccaaactgctgctgttgcatcaccgaagcttacagggaagtcatctctaaagaacttcggagtcgcggccgtagcggctgcagcttcaatngctttggccggaaacnccatggcaatagaagttctcttgggaggaggggatgggtcgttagcttttatncccaacgactttcttctaatagctaaagggaggagaagattgtggttcaaggaacaacggctgggatacccaacancaatggttggccttccgatgaaagaacgnagattccccaagtnggggtngnncccaagggggnccggggtttgntttnaaanaaagnnttgg

SEQ ID NO: 99597 - DNA, 625 bp, Arabidopsis thaliana columbia
  unsure (1)..(625): unsure at all n locations
tcgtgggtcgacgcaagactctaaagtgagtcatattaagggaaaacgaaaaacttaaaacccaagtcttatcactactctaaaagaatcttcatcatggcctcagtaacctcagccaccgttgcaatcccatctttcaccggccttaaagcctcaaccatcaaatcatccgccaccgtcagaatccaaactgctgctgttgcatcaccgaagcttacagtgaagtcatctctaaagaacttcggagtcgcggccgtagcggctgcagcttcaattgctttggccggaaacgccatggcaatagaagttctcttgggaggaggggatgggtcgttagcttttattcccaacgacttctctctaatagctaaagggagagaagattgtgttcaagaacaacgctggtatacccacacaatgttgtcttcgatgatgacgagatcccaagtggcgncncgtggcaaaattncgttggcggnaagnttncctacggtngggaaacgncgaggtcgtttcccgccanggggttaacgttnctgtggcaacanggggtgatgnggaaannccgnacaaaatggtngnaaagagggctggcaattaggttttcaatntnatntnaaaaggg

SEQ ID NO: 99598 - DNA, 943 bp, Arabidopsis thaliana columbia
  unsure (1)..(943): unsure at all n locations
gtctggatttccggttggacccgccgtccgcgctctttcaccacataaaaactcataaactcgatcgaaccaaagctaaacgaaaaacttaaaacccaaatcttatcactactctaaaagaatcttcatcatggcctcagtaacctcagccaccgttgcaatcccatctttcaccggccttaaagcctcaaccatcaaatcatccgccaccgtcagaatccaaactgctgctgttgcatcaccgaagcttacagtgaagtcatctctaaagaacttcggagtcgcggccgtagcggctgcagcttcaattgctttggccggaaacgccatggcaatagaagttctcttgggaggaggggatgggtcgttagcttttattcccaacgacttctctatagctaaaggagagaagattgtgttcaagaacaacgctggatacccacacaatgttgtcttcgatgaagacgagatcccaagtggcgtcgacgtggccaagatctcgatggacgagcaagatctactcaacggtgcgggagagacgtacgaggttgctttgaccgagccagggacttacagcttctactgtgcgccacatcagggtgctggtatggtcggtaaagtcaccgttaactaaaatgtgtgtgtgagtaagtgagggagtctcggactcaattagaggctcttctttcacattcttacattattacataaagtgttttgtaattctaaagagtgttgaatcgaatggaccgtgattgttgttgtactgtgactggttccataaatggtttttcttggtttatatatgtaacaaaaaaaaaaaccaaagggcggccgctctagaggatccaagcttacgtacgcgtgcatgcgacgtcaagatcttttataggtcgtcctaaaaaaaccgncccgcgcggcgggcgctgtaaatttcgccctc

SEQ ID NO: 99599 - DNA, 841 bp, Arabidopsis thaliana columbia
  unsure (1)..(841): unsure at all n locations
nnnnnnnnnnnnnnnnnnnnnnnnnnnnnnnnnnnnnnnnnnnnnnnnnnnnnnnnnnnnnnnnnnnnnnnnnnnnnnnnnnnccacgcgtgcgggtatgatggtcagggacctgaacattcaagtgcgaggttggaacgttaccttcagatgagtgatgataatccctatgtcataccagacatggaaccaacaatgcgaaagcaaattcaagaatgtaattggcagattgtcaatgccacaactcccgccaactatttccatgttctgcggcgacagatacacagagacttccgtaagcctctgattgtaatggcaccaaagaacttgctccgtcacaaggactgcaaatcaaatctctcagagtttgatgatgtccaaggccacccaggttttgacaagcaaggaactagatttaagcgattaatcaaggatcagaatgatcactctgatcttgaagaaggcatcagaagattggtactttgctccggaaaggtctattatgagcttgatgatgaacggaagaaggttggcgcaacagatgttgctatctgtagagttgaacagctttgtcctttcccatatgatctcattcagcgtgagctcaagagatatccaaatgcggagatcgtttggtgccaagaagaggcgatgaacatgggagcattcagctacatatctccacggctatggacagcaatgagaagcgtaaacagaggagatatggaagacattaagtatgttggtcgtggtccttctgctgcaactgccacgggtttctatactttccatgtcaaagagcaagccgggcttgtccagaaagccatcggaaaggaaccca

SEQ ID NO: 99600 - DNA, 526 bp, Arabidopsis thaliana columbia
  unsure (1)..(526): unsure at all n locations
aaccggaaaggttgcccccagttttcctctngngttgnngtttgccttcccattgccccatcgggggggcncagggttccccaatgcggnatcgtttggtccnagaagnggcgntgaccngggggcttccgcttcatttctccncggctntggccgccatgggaagcgtaaccngnggngtntggaagccattaagtatgttggtcgtggtccttctggctgcagctgccacgggtttctagactttccatgtcaaagagcaagccgggcttgtccagaaagccctcggaaaggaacccatcaattaaaaactcttcctttttagatgacttctcagactgataagagacaaaggagaaatctttgaaataagcactttgggtgatgcaaaagtgctacacaacactgtcaagatccgctgtccctttgtcactgttgtggtcccattgtttttgagcctggctcgccttgccagtcttaacattaacccaatatcttatattgatatacagttttgttattgctc

SEQ ID NO: 99601 - DNA, 873 bp, Arabidopsis thaliana columbia
  unsure (1)..(873): unsure at all n locations
nnnnnnnnnnnnnnnnnnnnnnnnnnnnnnnnnnnnnnnnnnnnnnnnnnnnnnnnnnnnnnnnnnnnnnnnnnnnnnnnnnnccacgcgtccgagattgtagagcatggaactccaattcccgtgtctaaaactgaagtccggaagaatgatcttaaccctatttggaagccagtctttcttagtgttcaacaagtgggaagtaaggacagtccagtgataatagaatgctcagactttaactccaatggcaaacacagtctgattgggaaagttcagaaatcgctttcagacttagaaaaacttcatttggcgggccaaggaatcaatttttctttgcctactggtgctggacaaaacaaggtgttaaagagccaactttttgtggacaagtttaccgagactgtccaccacacattcctagagtacttggcatctggatttgagttaaactttatggtagcaatcgatttcacagcttcaaatggaaatccccgcctccctgattctttgcactacattgatccttctggacgattaaatgcctaccagagagcaataatggatgttggagaagtgttgcagttntatgactcagacaaacgtttccctgcctggggattcggagctcgtccaatcgacgctccagtttcacattgctttaatctaaatggaagcagttcatactctgaggtggatgggattcaaggaatcatgacttcatacaccagtgcccttttcaacgtctctcttgcanggcctaccctttntggtccagtgatcaacgcttgctgcatgatcgccagcgcgtcgctagctcaaggttcacgganatattacgtcttactgatcataacagatgggtgtataact

SEQ ID NO: 99602 - DNA, 431 bp, Arabidopsis thaliana columbia
  unsure (1)..(431): unsure at all n locations
agacaggtaccgtgaactagctaaccgtgttgatgaagcgcttggtttcatgcacgctgctggattaacgctcgatcatcccataatgcaaacaaccgacttctggacttctcatgaatgtttgctcttgccttatgaacaatcactaacaacgcttgactcaacctctggtctctactacgattgttctgcccatatgatttgggtcggtgagcgaaccagacagctagatggtgcccatgtcgagttcttaagaggtgttgctaatcctcttggaatcaaggtgagtgataaaatgggatccaaaggagctagtgaagttgattgaggatcttgaatgctgacaataagcctgggaggatttacaataatcacaggatggggagctgaggaatatgagggtgagcttcctcnttttgatcagagaggtn

SEQ ID NO: 99603 - DNA, 967 bp, Arabidopsis thaliana columbia
  unsure (1)..(967): unsure at all n locations
atacgactcacattagggaaagctgctacgcctgcaggtaccggtccggaattcccgggtcgacccccgcgcccgactacgattgttctgcccatatgatttgggtcggtgagcgaaccagacagctagatggtgcccatgtcgagttcttaagaggtgttgctaatcctcttggaatcaaggtgagtgataaaatggatccaaaggagctagtgaagttgattgagatcttgaatgctgacaataagcctggaaggattacaataatcacaagaatgggagctgagaatatgagagtgaagcttcctcatttgatcagagaagtgcgacgtgctggacagattgtgacttgggtcagtgatccaatgcacgggaacaccattaaggctccttgtggtctcaagactcgtccctttgacgccatcttggctgaagtgagagctttcttcgacgtgcacgagcaagaaggtagccaccccggaggaattcacctagaaatgactggtcagaacgtgaccgagtgcatcggtggttcacgcacagtcacattcgacgacttgggttcacgttaccacacgcactgtgatcctcgccttaatgcttcacagtctcttgagctctccttcatcatcgccgaacgtcttagaaagagacgcatcaagtctcaaaaggcttttgccctctaatcaaataaacattgcttataataatatctatctatataaatgtgtgtgtgtgtgaacttaatacaatctcatttatctttgattcaaatcttgagtcaaaagaacgcttaaggtttctgttttaatgttgttagtgagtattatttccattttggatttaatataatcatggatggttgggtttttgaaaaaaaaaataannnnnnnnnnnnnnnnnnnnnnnnnnnnnnnnnnnnnnnnnnnnnnnnnnnnnnnnnnnnnnnnnnnnnnnnnnnnnnnnn

SEQ ID NO: 99604 - DNA, 545 bp, Arabidopsis thaliana columbia
  unsure (1)..(545): unsure at all n locations
nnnnnnnnnnnnnnnnnnnnnnnnnnnnnnnnnnnnnnnnnnnnnnnnnnnnnnnnnnnnnnnnnnnnntcccttttttggttttttttatgaaaattataatcttccaaaattattattgctaattggcataactcatagagaaagcctgaaagggaactcagtaataagaatcttcaaagctcttaaaagaaacaaccatttgggtcaaatgcaaatatttgtttcaacacaacagctccgaaaacgataattgctagaatcttatgatcaaataggtaactataattatgaaacaggcttcacggattggtcctcttgtccaagtagaatcagatgccgacatgagaggataagattctccttcatttccggttcttcttgctctcttccttctccctttctctcttcttataaagcttctcgattacacgtttggcttcacagttgggaaagttcgaaagatcgtaataatgagaagcaacatcaactagccattcaccacgaatgtctgtcacagttctgatgaaattccgggtagtcaa

SEQ ID NO: 99605 - DNA, 701 bp, Arabidopsis thaliana columbia
  unsure (1)..(701): unsure at all n locations
atgccttcaacatactgatncatgntatcacactaataacaacacaaactacacacaaggccagcatatgaacgtacgttcgctcgctatngctgtgtgtctaacgactcttnacttctcccatcttcttgnggntccctacctaacatcaccaccaaacaaaaactcaancctccccaagaaaaatgaatatattttntaaattagagaacttctaagaggttngtgnttctctttttttttttttttgggttttagttttggaattgacaccgtaggttcctgtcagaataatataaacactaattgtacacaatgcttttaaaaagcacccccaactccgaaaaaaattgtcatccctttttttagttgttctgttccgtctgcttctttcttcatcagactcttttaaagtcatttcgtctcgccagcacaagctataaccggaacttcccaaccattcagagtcttttatgctaaacaaaatagttttaaagatctttcactcacccgcctgttgcttctgatccacgggtttgacctgaaccgcagaggaaacagcgtgaacattagtgaaccctggaggcccaagctgatgttgttgagttttacccataccaccacctcctttcatgttattcgctgcagatgcagccgctatggctttcgctggatctgaagtggcggtgacagctcccgtg

SEQ ID NO: 99606 - DNA, 904 bp, Arabidopsis thaliana columbia
  unsure (1)..(904): unsure at all n locations
nnnnnnnnnnnnnnnnnnnnnnnnnnnnnnnnnnnnnnatagaagagctttgacgtcgcatgcacgcgtacgtaagcttggatcctctagagcggcctccaattgacaccgtaggttcctgtcagaataatataaacactaattgtacacaatgcttttaaaaagcacccccaactccgaaaaaaattgtcatccctttttttagttgttctgttccgtctgcttctttcttcatcagactcttttaaagtcatttcgtctcgccagcacaagctataaccggaacttcccaaccattcagagtcttttatgctaaacaaaatagttttaaagatctttcactcacccgcctgttgcttctgatccacgggtttgacctgaaccgcagaggaaacagcgtgaacattagtgaaccctggaggcccaagctgatgttgttgagttttacccataccaccacctcctttcatgttattcgctgcagatgcagccgctatggctttcgctggatctgaagtggcggtgacagctcccgtgactggaacagcaggtgctgaacctgactgttgctggtgtctttggatgtaatacccaccagaaggagatatggtgatctgttgctgttgatgttgatgttgagcttgcatataaggattagagaagaatagctgtgcttgcggctgcagcccatgctttggcaactgctgctgttgttgcgacttggatccagagctcgtggtcgggtttccgagaacagaaggaccattattccttccaccagcagatgacgccgcagatgcagnctgtaagttcttggacggctgagatgctgagtgagtagttgtggaagcttgtccacctttgtttcccgccgaggaagcagaagcagttgttcttgggcttc

SEQ ID NO: 99607 - DNA, 667 bp, Arabidopsis thaliana columbia
  unsure (1)..(667): unsure at all n locations
nnnnnnnnnnnnnnnnnnnnnnnnnnnnnnnnnnnnnnnnnnnnnnnnnnnnnnnnnnnnnnnnnnnnnncttttttggtttttttaataagcaaagcaaatttccattattcaactgttcacaaacaacaacacttgcacgcaaaaccagaaagacatcaatgggaaatgaggaagcaacacacaacaacaacaacaacaaaagaaaaagacaacgaggaagaaaacttgataaaccgagaaactctcagttctgagatgctttagacttcatcttcttcaggcttgcgccagattccaattccatcgcaggggcagagactaacttgagggcactgatacttctccaagaacttgagttccggaaagtaccttttgctcaaatccctccactccacttttagttttggaagaaacttcagacgtaaaacggtaactttgcatttcgaattctggctaggtagtgactttccaaatccagtaagtttgattcctcctttaatgtagagtttttccacattaagtagattatcaggctcaagccattcaggaagatgttcaccaggaaaacattgcaggtccagtttcttcaatgtctttggaagctctggcgctgtgggatctttctccttacggaacatggttgcagccctttccaagatcccaa

SEQ ID NO: 99608 - DNA, 1556 bp, Arabidopsis thaliana columbia
  unsure (1)..(1556): unsure at all n locations
atgtctnnnnnnnnnnnnnnnnnnnnnnnnnnnnnnnnnnnnnnnnnnnnnnnnnnnnnnnnnnnnnnnnnnnnnnnnnnnnccacgcgtccgattccggatccgttgtcgggtatgcccaaaaccgcctttttaggcaatttgctctgtgggaagccgttagatgcttgccctgtcaatggcactggaaacggtactgtgacgcctggaggaaaagggaaaagcgacaagttatctgccggagctattgtcggaatagtgatcggctgtttcgtcttgcttctcgtgcttttcttgatcgtgttctgtctctgtagaaagaagaagaaagagcaagtcgtccaatcgagaagcatcgaagcagctcctgttccgacctcatcagcagccgtggctaaggaatcgaatggtcctcctgcggtggtggctaatggtgcatctgaaaatggtgtatcaaagaaccctgctgcagtgagtaaagatctgacatttttcgtgaaatctttcggcgagtttgatcttgatggattgctgaaagcttctgcggaagtacttggtaaaggaacgttcggatcttcgtacaaggccagtttcgatcacggattagtggtggctgtgaaacgattgagagatgtcgtggttcctgagaaagagttcagagagaaattgcagggttcttggatccataagccatgccaatcttgtgacattgattgcatattacttcagccgcgacgaaaagctcggtgttttcgaatacatgtctagaggaagcttgtctgcgctgttacacgggaacaaaggaagtggcagaagtccattgaattgggatacgagagccaatatagcattaggagccgcaagagcaattagctacctccatttcgcgtgacgcgacaacatctcatggccacattaaatcatctaacattctattgtcagaatcctttgaagctaaggtctctgactactgtcttgcacctatgatcagccctacttctacacctaaccgcattgatggttaccgagctcctgaagtaaccgatgctcgtaaaatctcccaaaaggctgatgtttacagcttcggtgttctcattcttgaattactcacagggaaatctccaacgcatcagcagttacacgaagaaggagtagatttaccgagatgggtttcatcgatcactgaacaacaatcaccatcagatgtgtttgatccagagctcacaaggtatcaatcggacagcaatgagaacatgatcaggcttttaaacatcggtataagttgtacgactcagtatccagatagtcgtcctacaatgcctgaagtcacaagactcatcgaggaggtttctcgttcacctgcttcaccaggtcctttgtccgattgattgtatttttctttttcaatatatggggtctaaattgatcatttcaaaattgtttggtctaaatttgaatttctttaaaaaaaaaaaaaaagnnnnnnnnnnnnnnnnnnnnnnnnnnnnnnnnnnnnnnnnnnnnnnnnnnnnnnnnnnnnnnnnnnnnnnnnnnnn

SEQ ID NO: 99609 - DNA, 768 bp, Arabidopsis thaliana columbia
tgaactatagactagcttgacgtcgcatgcacgcgtacgtaagcttggatcctctagagcggccgcccttttttttttttttttctttttttgggaacttaagaatacaagaattcttgatctgatgttttcctactaagcgtctttgttttatgtaatatgttttagatttctgaatcatcttgattgatataataaactcagatctctatttcatgagatttctcaatgggattagataatgcaggtccttcccacagctccgcaagatcctttctccgccatgacatgaagatcaccggtcctaacgtagatggtaccagataaagtagagctggctgaggtgagtgggtcaagacacctgcagctagagccgccaccaagccaatggcatatccgggaagtgcataccaaatgtatttgtgtcccttggaagattttagatcaaaaatattcaccacatctctagtttttcgatggtcaaagcagaggaccaaagccaaaagcattgcagggatagccatgtcaccaagaccaagcatcatgaaatctgaggcactcacaccgggcaccacaccgcccaataggttccgaggaaacacaattttaacaggtagttccagtttctttgtgatcaattgcagtccaggaagattcaaactgttagccactgtgtgaactgggtttgatgcttgctgggttgccacggccaccataacgttagcaccaaagaatctctcagagaagaaaacccagatatgtcatatc

SEQ ID NO: 99610 - DNA, 547 bp, Arabidopsis thaliana columbia
  unsure (1)..(547): unsure at all n locations
nnnnnnnnnnnnnnnnnnnnnnnnnnnnnnnnnnnnnnnnnnnnnnnnnnnnnnnnnnnnnnnnnnnnnnnnnnnnnnnnaaaaaaagncaattgcattgatcaagatttcaggatcttaacttaatacatattggatgattctcctacatgtgaaaactcatctcaccaaatctgcaactaacaaaaaaacaaacagaagaagaataaagaaggacacaagaatttacattacaaacaacaaatacaacattctaaaacacacacaccaaacttttctttttctactacttcttgacttcttcttcaacaacaacatcagctttcgttacaaggatatccgctttttcgtcagcacattcctcgggaactatcgccattgactgcctattaccgcatattgtccaaaggtataacgcgaacatgggctcccaatgttccacaaaccgcccccaaaaccaatgcaccaagggttctccatatacattttcctttccccttaacttccaccgtcttctccccttccttaacagtcttggaaacgtcgt

SEQ ID NO: 99611 - DNA, 404 bp, Arabidopsis thaliana columbia
gagtctctcgtcgccgtttgtaattcctctgtgagcaaatcgacaaaatgggtcactctaatgtctggaactctcatccgaagaagtacggtcctggatctcgtttatgccgtgtgtgcgggaactcacacgggcttatcaggaagtatggtttgaattgctgcagacagtgtttccgcagtaacgccaaggagatcggattcattaagtaccgttaaagaggcctttgactgatgcttataatacacaaacatgttggtgttgatgaattggcccttcgaatcttttaagttgttgttgcattcttcttttaaaagtttaaccccttatttgggacaatgatctttttgggtttttggattaataattttgcttgttaaattataggcccatttttgggcatt

SEQ ID NO: 99612 - DNA, 693 bp, Arabidopsis thaliana columbia
  unsure (1)..(693): unsure at all n locations
gagggttttgaagagtctctctcgtcgccgtttgttattcctctgtgagcaaatcgacgaaatgggtcactctaatgtatggaactctcatccgaagaagtacggtcctggatctcgtttatgccgtgtgtgcgggaactcgcacggtctgatccggaagtatggtttgaactgctgcagacagtgtttccgtagcaacgctaaggagattggattcattaagtaccgttaatcaagcaccaacttcatgattgatgcttaatgatataaacatgaaggcgtcgatgggtatggcttttaagcttttgtagtttttgaaatttttacttttgagaaccattgttattttgggagttaattaagttgttgaacctcattaagcatgtcttattttggattaatgatgttttggctattcccgtatttttgttttatcagtcaaatttgactaaagaagaatttgcttgttatcagcctaaaaaaaaaannnnnaaaaaaaaggggggccgcnccagaggggnccaagcttacggaacgcgggcatgcgacggcaaagccctccnanagggcncccaaaatccaatcncnggccggcggttaaaacgccggaccngggaanccnggnggncccactaancgcttgagaaacccccttcccaccggggaancgaangcccnccgtncctccaagtg

SEQ ID NO: 99613 - DNA, 679 bp, Arabidopsis thaliana columbia
cggccgcccttttttttttttttttttttaacaatatgaattttttttgatgaataaaggaaacaattaaacgttggattacagataagactttacataatccaacttctatatgaagctactacaaacaagatttaaaacatcaaagaatccatctaatcttcatcttcaacatccttcaatatctctccacttaagatacactagcccagctctatagtgcgtgaacgcaccagcaactaccagaacatgaaacaactgatggctatgtcctgctatatcgaatttacccggcatccatctctctgggatcctagttgcataaaccagagctcctaacccataaagcaaacccatcaaaatctcataacctgtcgtgtgaagggcttcaggttggtcccaaaagattatcagcttgtgaagaatcggagctaagccagagaatcccattccaaaaggaacatgtcataatggtataagcatgcgtcccctcctagtccgtattttacgtcacttttcaagtttcaaacactcttttgcaaaatactcactccccctccctttctactatggacatatcttgcaggccaagaatgtcaagagcctctctctctctctctataagtttgttgataattgcgaaattgtagactctctcttttgtagcaatgtaaaaatc

SEQ ID NO: 99614 - DNA, 585 bp, Arabidopsis thaliana columbia
  unsure (1)..(585): unsure at all n locations
tgacctatagaagagctttgacgtcgcatgcacgcgtacgtaagcttggatccctctagagcggccgnccttttttgtttttttttctttaaccagtaatatgtagattaacaatatgaatcctttgttgaataaaggaaacaattaaacgtttgtttacagataagactttacataatccaaattttatatgaagctatctgttatttattacaacttatgaattatgataagcacgtttttaacaacatctccatcagtttcattattttgttgactatattaacattacataaccatataatatatatcacttttgttgattagaataatcaagctgtaactgcgtcgttttctactgatggagcatttccattagcattgttcttcatcatattaccacatcctccaccgcaattaccgcagccagtggaaccgccagtgcaggatccgccgccgcagccttctatctttgtcatcccaccgcacctaccaccaccaccacatccacctccacctccacatccaccacaacctccacaaccaccacagtgaccaccttcttcttcaatcatgttcccactt

SEQ ID NO: 99615 - DNA, 807 bp, Arabidopsis thaliana columbia
  unsure (1)..(807): unsure at all n locations
nnnnnnnnnnnnnnnnnnnnnnnnnnnnnnnnnnnnnnnnnnnnnnnnnnnnnnnnnnnnnnnnnnnnnnnccacgcgtccgtgactctgaagaactctacggtggtggtcgccgccgtcgatacccattccctgttcctcggtttccaatgggagcttcgaagttcgacgtttggacctctgaacctgcttctgtctctgagaggcgttccaagcttttaaacgaaatgggtcttagccgtgacccggttctctcccggttaaaacccgtttcagattcttccagctccaaagataccggagccgccggcttcgagatttctcgatcgatctcgtgtaatcaattggctcggcgagatcatggagagtgttctgaaagtgtcggcggttgtgcttcttgtatcgtgagatcgaaatccgacattaccactagccaatgtggtgatcgtgaccgtcgatatacgtctnctggtaatccttgttcttgttccgtctctaaactctctgttcatcattcttcacattcagagatcagtagaaccagctcgccatttgtgaattgcagtgtaggatcagttagtgctgattcattgcggttaaatggagattctgattgtgtactgagagagagtgtagtgaatgaggaagtggaagtgtgtactattaagaaatcttgatatgggaaagagtttgtggtgaatgagattcaagatgatggtacatggaagaaggtgaaggaagtggaactggaaccagatgacatggaggagttgagatgtggttgacttctccattgtcaggagctat

SEQ ID NO: 99616 - DNA, 929 bp, Arabidopsis thaliana columbia
  unsure (1)..(929): unsure at all n locations
atgatcctgnnnnnnnnnnnnnnnnnnnnnnnnnnnnnnnnnnnnnnnnnnnnnnnnnnnnnnnnnnnnnnnnnnnnnnnnnnccacgcgtccgcccacgcgtccgaatttgtgggatttccaagctccagtttttcgaatatggcggaagtaagtcttggtatgcttatagacattgtggacgaagagtggatgagggacactttgcctgatgatgatcttccattgcctccagtgcttgctgttaaaactgatgatactgaagaaaccagtatggctctttgtttttttctttgctttgctttacagtttacatagctttatgattcttaaggtctaaattctttggaatatagtcttttcttaaaactgctagctgtgaatccacactggtgatgcatttctgatccaagatgttaaacacccatattgagaccttgaaatgtcataaggaaagtaatggagacacatacgtcactttttgtgtatgtttcaaacatagtaaagctcaaatttgagctttgtttcagagggtttctgagatttaacaactttcacttccaagatacctatgaatcttcatataagcagcttgactaatataatccctcacattgtgattgtttcagatcaggaaactcagcaagcagatgctgaaacttggcgtgatctagctcttgatacccagtaatagcctcttaagtacaatggaaaattcttacaagtcttgtttctcgttgtgtatgatcaaaaccaaaactgttcctggctttgtatttttttttggtaaaaaaggggggcgaaccccccttttttttaaaaaaaaaaaaaaaaaaaaaaaaaaaaaaaaaaaaaagggcggccgctctagaggatccaagcttacgtacgcgtgcatgcgacgtcaagactcttcntatagtgtcacc

SEQ ID NO: 99617 - DNA, 661 bp, Arabidopsis thaliana columbia
  unsure (1)..(661): unsure at all n locations
nnnnnnnnnnnnnnnnnnnnnnnnnnnnnnnnnnnnnnnnnnnnnnnnnnnnnnnnnnnnnnnnnnnnnccacgcgtccgctaaaatgattgttgaccggcatgaggaatatctctacttaaatctggtcaaagagataatctcaaatggaaacttacaagacgataggacagggactggtacattatctaaatttggttgtcagatgaaattcaatttacgcaggaattttccacttctgacgacaaagagagttttctggagaggtgttgttgaggaacttctatggttcataagcggttcaaccaatgcaaaggtacttcaagaaaagggtatccgtatatgggatgggaatgcgtcgagagcatatcttgatggtattggactgactgagagagaggaaggtgaccttggacccgtttatggatttcagtggagacactttggtgctaagtacacagatatgcatgctgattatactggccaaggatttgatcagctcttagatgtaattaacaagatcaagaacaatcctgatgatcgacggattataatgtcagcttggaatccttctgatcttaagctgatggcacttnctccatgccacatgtttgcacagttatatgttgcaaatggagaactgtcatgtcaaatgtatcag

SEQ ID NO: 99618 - DNA, 2502 bp, Arabidopsis thaliana columbia
aaataagtaatcttgtgattgcaattgcattgcttagtgatcttctcaacttttatttgtgttcaatcttcagcattgctgcctttgtctcaaaggtggttctgtaaattttctcctaagccatcctcattgacaaacattttcaaggtttcaatttcaaccatggcaaacactctcaatggaaatgtgatcatgacttcaaagcctcagagtacttaccaagttgtggtagctgcaaccaaggaaatgggtattggtaaagacggaaaacttccatggaatttgcctaccgatctcaagttcttcaaggatttaactttgtccacttcggattctgctaagaagaacgctgttgttatgggtaggaaaacgtgggagtctattcccaaaaagtataggccactctctggtcgcctgaatgttgtcttgtctcgttctagcggtttcgatatagccaacactgaaaatgttgtaacttgcagtagcatagattctgctctagacttattagctgcacctccgtttagtctgtccattgagaaagtgtttgtaataggaggtggcgacatattgaggtgtgtgttctatagtcaagactctcccttttttcgtgattttaattctctttgatcgtgttatgtttgttgtattgtagggaagctttgaataaaccgagctgtgaagccatccacataactgagattgatacaagtatcgactgtgatacatttattcccacggttgacacttctgcatatcagccttggtgttcgtcgtttccaatatgtgaaaatggtcttcgattttccttcacgactcatgttcgtgtaaagagttcttctgccggtgaagcctctgatgagagtgatggatcaaaggttcttcaagttgattggaagaagttttcttctgttcttcctaaaatgatttttgaccggcatgaggaatatctctacttaaatctggtcaaagagataatctcaaatggaaacttaaaagacgataggacagggactggtacattatctaaatttggttgtcaggtgagttactacttcataatatgtatctgaatgtcttggttctggtttgcttatcaaaagttaacaaatttccatatctttggatccacagatgaaattcaatttacgcaggaattttccacttctgacgacaaaggtatgttcacttttacattgacttttcatgttttaagcccaaagagagtttgcttcgtcttccctgcatatccggactaacaagatctgtttgcatttcacttgaaagagagttttctggagaggtgttgttgaggaacttctatggttcataagcggttcaaccaatgcaaaggtaagaaaacagatcatttatcatcattttcatgccttaagcaccgtgattgatcaagatgtggagcatatgtagatgaactagattttttttttctttctgagaagtttgtgtaagtggcaggtacttcaagaaaagggtatccgtatatgggatgggaatgcgtcgagagcatatcttgatgggtaaactttaattcagcatttttctttcacaacttgaagctttgtggccattacactgataaattgaaagtttttaattttcagtattggactgactgagagagaggaaggtgaccttggacccgtttatggatttcagtggagacactttggtgctaagtcagtagcttctctcttatctcttgacactttctgagttttggcaaaacagatttctgtgtcgagacattttgttcatctctctctacaggtacacagatatgcatgctgattatactggccaaggatttgatcagctcttagatgtaattaacaagatcaagaacaatcctgatgatcgacggattataatgtcagcttggaatccttctgatcttaagctgatggcacttcctccatgccacatgtttgcacagttttatgttgcaaatggagaactttcatgtcaaatgtatcagcgttcagccgatatgggtctcggcgtaccgtttaacattgcctcatactcccttcttacatgcattcttgctcacgtctgcggtaaagttctaattcccactataaaaggagcaaatttgtgcatttcaaatatcagtcatcgtctgatagtttgttgacattatgcagatcttgttcctggtgattttatccatgtgattggagatgctcatgtttacaaaaaccatgtcaggcctctgcaagagcaacttgagaacccaccaaaaccttttcctgtgagtataaacaaacacatgatttgctgattcttcaatcttgtttgagtttgatgaatgcataatctaccaataattctttgcaactatatgcttatttatctttgggatatttacaggttttgaagataaatccagagaagaaagatatagattcttttgttgcggatgactttgagctcattggctatgatcctcacaagaaaatagatatgaaaatggctgtttag

SEQ ID NO: 99619 - DNA, 597 bp, Arabidopsis thaliana columbia
  unsure (1)..(597): unsure at all n locations
nnnnnnnnnnnnnnnnnnnnnnnnnnnnnnnnnnnnnnnnnnnnnnnnnnnnnnnncactatagtagagctatgacgccgcatgcacgcgtacgtaagcttggatcctctagagcggccgggcttgggtgttttccttggtacttccaacttcaagttttattcatcatgtgaattagaatagcacaacttcaaattttcttgaaaaccatatatacacatctctcattgctataattagatactaagaggagatgtgtctaaggcttgggccgccattggaacacatcctcctccactaaactccttggggtcatcatcactcttgtaaacatacttactcgctgcccacacgaaaagtcccatgttcactatcgaaatcaccactagaaatccataataggaatcaagcctcgaatcattcaaatttttcccaatccaactctttcctccacctttactggtgatcttatcaatcattggcaccaaaaagctggtcaagaaattcccaagaccgattccactcaggaaaaacgttggtccaaggctctggatctcctcaggggactgatcataagaaaaactcaagcaaacccaa

SEQ ID NO: 99620 - DNA, 620 bp, Arabidopsis thaliana columbia
  unsure (1)..(620): unsure at all n locations
tgnnnnnnnnnnnnnnnnnnnnnnnnnnnnnnnnnnnnnnnnnnnnnnnnnnnnnnnnnnnnnnnnnnnnnnnnnnnncttnntggggnngtgttttttttaattttttttttttttgaccatccagattgaactaaaaaaattgattgtacatttctctggattacaaatctgaatcagtatacaactcacacattgttcaaaaacattgagtacacaagttcagttcttcatcttctattctaccacattgatggaacataaacttgttctttcaaattctgtgtcgcgctttcagtagggaaacctctaactgcaccaattgtccactgcgctatgatcccagcagcaactgcaaacctgagctgtcgctccatcacatcctgatcctcaaacatctcaggacaagttgttagctttctcattatccctgcaacaacagcatcaccagaaccggtcctatcacaggtgaaaggagttataagcacatcttctgttccaatcacaacaccatcaaaagttggagtatagaatgaagccgagcggtccatcagcacaccatagctcagctgncatgcacangnctgnttcccngggggatggaaagcctcggttcgcga

SEQ ID NO: 99621 - DNA, 550 bp, Arabidopsis thaliana columbia
  unsure (1)..(550): unsure at all n locations
nnnnnnnnnnnnnnnnnnnnnnnnnnnnnnnnnnnnnnnnnnnnnnnnnnnnnnnnnnnnnnnnnnnnnncttttttgttttttttttaatgtaaacctcttatttataagagcaatacaacttttattgaaaagaatgagcagactatggctaatgagattttgttcagtatatacaagaagcattattgctctctacaactaattattctaagttagataaaaggagtaaacatatcgatttgcagacttcttcaactttgtgcctccatcagcagaaagagagctcagaatacccaatatttcttcttcttcttgccttctggtatcggcagctctccttcagggtagattgaattgtaatgaacctcagcccagaagcttaaacatataaggcgattagacttctgaaaatgaggcaagatctcaatgtgccatgtatccttgagtgaagttatcacaaacatccgaacaccaaacaattccgcagcaccctgaagagtaacgtgatcaccccattctccattccgtttcattgctttaagatagt

SEQ ID NO: 99622 - DNA, 555 bp, Arabidopsis thaliana columbia
  unsure (1)..(555): unsure at all n locations
atgnnnnnnggtgacctatangaagactatgacgtcgcatgcacgcgtacgtaagcttggatcctctagagcggccgccctttttgggttttttttggttttggtttccggttcaattataaacccggttcgattataaaagcaaaggagctgccttttggcatcaacatatattcagctacaaacagattttcagttaccgttacatttacacaaatgattgaacattgattattggacttttcttctttgaagattcacagagtgaaattttcttcttatgtagaattcttgtggagcaatgggtcagagacgacttgaggcttgaagtctggctttatgtactttgccaaaagatcggcatagacttcgtatcttgcagtcattctaaatccccacttgtccttgtattgccggcagagattgagatccatgtccgagatcaataaaccatcttttgttacgggacaaagacggtgtgcaagaagcatctggtgcagaaaaatggcttgacccatagaaatgcccgaaatcattgtgttgcggttttccatc

SEQ ID NO: 99623 - DNA, 865 bp, Arabidopsis thaliana columbia
  unsure (1)..(865): unsure at all n locations
nnnnnnnnnnnnnnnnnnnnnnnnnnnnnnnnnnnnnnnnnnnnnnnnnnnnnnnnnnnnnnnnnnnnnnncttttttgttttttttgacaatacatgtttttgtctattcacatatctaaaatgaagatgtgttttgcgtttctaagaaatgtagcccatttgcatggcatttgaaacaatggtaaggatatgattgaggttaaactggccacgtgtgattccatttgccaagtcgaaggagaagtgtacattacaagattcagagatatacaacaattagagcattttcttcaactttgtttgtcaaggtgaacgatgtcttctatggtttactcgctttaggatgtaatgccgcagtcttttgctaaaggcctccaatctttccaatttttcgtgtctaggcttctttgcatctgtttcacctccgttcttaatcttcttctccttactgtcttcttcttcttcttctctactagaatctcttggctttcgttccgtgtttacatcagcagttttctcgacctgatcaccctcgccagctggtcaaaactctcatcttccttcaggtgcctcctagtcgaagagcatctggccccagctttccctgttggagcttgtaaatgaacagccttcttcaaactgatcaatacgctttccctcgaagttttcagggtcgtccacgttgtgatcattatcttccacaagcacggtatctgtatctatcatgggcatagcttttgaaaggagcttatttcctgggctttttgggtaaaagggggcaggaggtgcaaaaaaaaaaacttgcaacatcgatacatgccgaacgaagaccagatattgatcttatacagaaaacttttatt

SEQ ID NO: 99624 - DNA, 479 bp, Arabidopsis thaliana columbia
ctcttctcaagtctcttcttcttctccgtccttcccaattcttccgttcaaacaaatttctccaaacccaaaccctaatttcctccgtctgtgaaatcaagggttttctctgatctgggttttgatcagaaatcagatctaggtttaattttcgaaatcaaattatgaggaagagagaaagagagaacccttgttcgatttgtgggcattaccataagtacgaggaaggagaagtatgtggagtctgtggtcactgtatgcctgtttcttccgatacggtggcgccgcaacaagtccacgtcagtgcttttccgtcggagattctccctgagtttctttacctcggtagttacgacaacgcttctcgctctgagcttcttaagactcaaggaatctttcgtgttcttaatacggttcctatgtgccagaatctctacaggaattcattcacttatcatggtcttgataatgaaaaagtt

SEQ ID NO: 99625 - DNA, 542 bp, Arabidopsis thaliana columbia
aatttaaagaaaatttttccattttttttttttactctatctctgggagggattctcttcaagctcaggcctttaggctttaggtttcttttgggagtcttcttgagctctgtaatcactctctagaagcttattttgcctcctaatgttattagggtgttgtactggaatctttaggatgaaccaaggaagatgagtctctcggtctttcaaaaaccaagtcttgtaatgaggagctgtccactgttgtaaagtaagtcattaagatggaatcctttgcaggttcttgtgaaattgttgaggagaaggatgcggtaaggttagccaaacattctagcagatattgtatgtcacctttgggatcaagtaaagatatggagcagcgtcctgcattgaagtcagggtaccaaggttctatggagtatgacattgatcagcttttccagtctataactataaaaccatcacctagaagagtgatgggctcttctttcatcatcttgagacgagcgcaagtgctggtacgagcaggagcacaagcc

SEQ ID NO: 99626 - DNA, 820 bp, Arabidopsis thaliana columbia
  unsure (1)..(820): unsure at all n locations
nnnnnnnnnnnnnnnnnnnnnnnnnnnnnnnnnnnnnnnnnnnnnnnnnnnnnnnnnnnnnnnnnnnnnnnnnnnnnnnnnnaccacgcgtccgcggacgcgtgggcggacgcgtgggcggacgcgtggggcagcgacaagcttcaagtcttttgtgatcttcctatttctgacgctaattcgaatccttcactcttcaaattgattctttcacggatcaaacaaattatctgagagtaccgattggtaagatctgagctttacgctatgaatttcttcaaatccgtcttcacggaagacctagatcctccagaaaccgaatccgaatccgattcaccgaaacacagcgaagagcatgaacatccagagcaagaacatccagagcaatctgaatctaacgacgacggtggatggagcttcggtggtctgatgaaaactctagccaccagatccgaatccgtgattgaaacctaccgacgagatctcgaagaatttggcacaggtttgaagaaagagatcgaggtggctcagggatcgcttggtacggtgggacatgcgattgatgagcttgggaacacggtgctaaaaggtacggctgagattattgctcaaggtaaggaagcgattttagccgctggtaatgaatctgattcttctgataacaatagtngtcagagttttggtcgtcgtgatagcttcagttcgnaancatataggccgtttcgattctcaagattccgtgcttgttccaaggaggtctcaacactttnctttttnnagagncttaagggnttcanattnnttncaaaaatntggggaa

SEQ ID NO: 99627 - DNA, 641 bp, Arabidopsis thaliana columbia
  unsure (1)..(641): unsure at all n locations
gctccctacgactcactatagggaaagctggcacgcctgcaggtaccggtccggaattcccgggtctacccacgccgggcggttccgaacagcattgatatgattgctctttcgtttgtccgtaaaggttcggatcttgttaatgtccgcaaggttcttggatctcatgctaaaagcataatgctcatgtcaaaggttgagaaccaggaaggtgtgattaactttgatgagatcttgcgtgaaacagatgcgttcatggttgcccgtggtgatctcgggatggagattccgatagagaagatcttcttggctcaaaagttgatgatctacaagtgtaaccttgcgggtaaaccggtggtcacagccactcagatgctggagtcaatgatcaaatcacctcggccaacccgagctgaagccacagatgttgcaaatgctgttcttgatggtactgactgtgtgatgcttagcggtgagagtccagcaggagcttttcccggaaatagctgtgaaaagtcatggtaagatctgcatttnaggccgaatccctnggtttnnttaaacnaaatnttttaaaggggnttncccgggaaactncttttcaatnggcccnttggggnttttaaaaanccggttnnggg

SEQ ID NO: 99628 - DNA, 537 bp, Arabidopsis thaliana columbia
  unsure (1)..(537): unsure at all n locations
nnnnnnnnnnnnnnnnnnnnnnnnnnnnnnnnnnnnnnnnnnnnnnnnnnnnnnnnnnnnnngtttagaagtctttttttgtttttttcttgtagttggaataatcttccaaacctaaatacattgtttcatttgtattcatacatcaaatgtatatatattttcttattttattttcttttttgacggctgaatgatttgtttttctgtccgaagacgaatctacggaaacgacgacgtttccagtggctgacatggtaggataaaaaattcggttcaatattttttagcaggtgagcgcttcgtatttaaccggggattggatggttgaaaccagccccggggttagtagattcccaaccgcagcgagatctctacagaatactccttggtacgcattggaatttaccggtttcgtttcagcgtttccggttctcttaatagaaccggatttttcaaccggtttgcgttcttcaatcttttgagcgtgagcaatggcgttcttcctctgctcctcggttatgatcgctgtcacgg

SEQ ID NO: 99629 - DNA, 784 bp, Arabidopsis thaliana columbia
  unsure (1)..(784): unsure at all n locations
nnnnnnnnnnnnnnnnnnnnnnnnnnnnnnnnnnnnnnnnnnnnnnnnnnnnnnnnnnnnnnnctttgcttttttttttttttttaggaatcaaatgtgtattcgattaaaccggttgtgacgctgtgttggttcgttcttaccgactaccgtacaggtcaaaagattttacttcaaacatagggatttcaagcgagagaaggaaacggagttaagcctttttttttttggggtgtgggattccacctaattaaggctaaatacgggtcaagttcccggcttgtgctatcccttcccaagaaaccccgtccattgagcgactcgattctcttttttatctcctggggattagctaggaaccggggctgcaactgttttgaaaccttggcgagtattttggtgtggcctagtatttatctggactttatgatccttacgagggctgcttcaaactaaggttatctgaattcctcaactctgtggctcggctcttgctactccggagctgtttcctttggggcaagcacagttccgatcttcactttgaaaaacttgttagtgaacttgtgatttacaacgaaaaaatcctcctctactatgtcttggcttatggggtgtttatttcttacgttttttgccctttacacaagctcacagggtgctatacagttgtttaaaaatattctggccgggtattcttgaaaaccttgtgtggaaactctttggtagcttgagacaatgcataatttgctgaacctaccattagaaactccccctttttgta

SEQ ID NO: 99630 - DNA, 490 bp, Arabidopsis thaliana columbia
taatacgactcatttagggaaagccggtacgcctgcaggtaccggtccggaattcccgggtcgacccacgcgtccgaaaacactctctcaacaaccatggcttcgcttccggtgaagcctctaccttccggccacttacagcttcatagccggaatcttattattccgccatcaatggtaaccgttggtttcaaaaggcatcacttcttaggagtctcttcttatggtttatgtattgatgaatctgtaaggcatatgagaagcctaaggtcgtcgagcaatcgtcggcgagtaagtaaaagcgccggcgtgtctatgccggtggcttcctctgatgattttccagcggtttcttgggagtcttggaagccggaaaagaccaccggtggctccgtcgctgagtgacgtcatctggcctgcagcaggagccttttgcggcgatggcgataatgggaagattaaatcaaatgctaacccctaaagggatctc

SEQ ID NO: 99631 - DNA, 542 bp, Arabidopsis thaliana columbia
  unsure (1)..(542): unsure at all n locations
nnnnnnnnnnnnnnnnnnnnnnnnnnnnnnnnnnnnnnnnnnnnnnnnnnnnnnnnnnnnnnnnnnnnnnnnctttntggggttttttttttttttttttggaaggatatcgttaaatcgacactaataatatttatacatatatgtaccaattaagttctactcaggaccgatgtacgttaaagaaaactgagtcaaatctgtacacttggctcaaaaactaggaaccaattgtctaaaacctgcctgaagaagttaaaatatctattgaagctctaatcatcttcggattagttagcggagctacttggatcgaatcctttatttgattctgttacagaggcagagaatacaggttcaagactttcgtttatgctctttgtttgtctctttaccctttttgtcctctgaggagtatcttcaccatttgcttcttcctttgctttctgaggagctctagctttcggatttgaagcagctctcctctttttattactggattttggcttttccggttcttccaaaggttcctgtccgttatc

SEQ ID NO: 99632 - DNA, 539 bp, Arabidopsis thaliana columbia
  unsure (1)..(539): unsure at all n locations
nnaggtgacctatagaagagctttgacgtcgcatgcacgcgtacgtaagcttggatcctctagagggccgtcctttttttttttttttctatgaattttttttatatacttaattaaaaattaatgcatccaaatctaacagcaccacataatgacagtaagtaaaactttaagttaattgactagttgtatcacggggagcctcagctctggcctcctcctcaatttttttgttaacgcatataaacctaatgctgggagccagagctgcgtgcttgcatacagagccagggctacaggggacagtttggaattgaagcagttgtgcatgttgtcgagaatagagatgcgtgatgaaactatcaagtcccggccagtaacaagatctggggcagcaaaatgatgacacacagcgcagaaccaggaggctggatcacccatttcactgcacttctcctcctcaagagctactggatctgtggaaaataaaaataaaatagtagagctagttcagcaacagaattcattcaatgaggaga

SEQ ID NO: 99633 - DNA, 548 bp, Arabidopsis thaliana columbia
  unsure (1)..(548): unsure at all n locations
nnnnnnnnnnnnnnnnnnnnnnnnnnnnnnnnnnnnnnnnnnnnnnnnnnnnnnnnnnnnnnnnnnnnnnnnnnnnnnnnnnnnnnnnnncaacgngcacaaaaaaacatacacaaacaaattaagagttacaaagtatcaagccgttcgcatagattctttacacagagcctttcataaattagaataattaatttccatttttaccccatgattttatcagttcttatataggctttgatacaaagagaaaaaatttagtagtgagttatatttttagcatgcttttccgacccggcaatccaatgctccggcgtatttggtaagcttagaaacggccataccatttttgggctttatcatctgttgcctagaatgcgaacacttgaaatgaggatttccagattgtctgaaatatgcattgttcatgaaaacatctttctcggatctccagttccagtttttccattcgctttctgaagcataatccctctttgtcacctctctgtagtgttgtttgggaggaggagcgatgaaccggtttccat

SEQ ID NO: 99634 - DNA, 753 bp, Arabidopsis thaliana columbia
  unsure (1)..(753): unsure at all n locations
agctccctacgactcactatagggaaagctggcacgcctgcaggtaccggtccggaattcccgggtcgacccacgcgtgcgaaacaattactacattttacaaaacaaatggcgaatctagctgcgtccacttgcctatactcatggctccttgttttgttattgagttcagtctcagcaatcatagatgaagatacacaggtgtatatagtctacatgggttcactttcgtctcgcgcggactacataccaacgtccgatcacatgagtattcttcaacaggtcacaggagaaagttcgatcgaaggtcgcttggtgagaagttacaagaggagtttcaacggcttcgcagccaggctcactgagtcagaacgtacattaattgccgaaatagagggagttgtgtctgtgttcccaaacaagatattacaactccatacgacgacgtcttgggacttcatgggggtgaaggaaggaaagaatacaaagagaaacttggccatagaaagtgatactatcatcggcgtcatcgcacttgggattttgcccgaatccaggagcttctccgctaaaggctttggcccccctcctaagcaatggaaaggtgtttgttcccgtggcaaaaacttcacctgcaaccaacaagttgattttggggcaagagncttcacangcgnaggtncaanggggccacttagttngccncgggtacaacanaacggnttcnccagcagcttggaantnnagtcaang

SEQ ID NO: 99635 - DNA, 643 bp, Arabidopsis thaliana columbia
  unsure (1)..(643): unsure at all n locations
nnnnnnnnnnnnnnnnnnnnnnnnnnnnnnnnnnnnnnnnnnnnnnnnnnnnnnnnnnnnnnnnnnnnnnnnnnnnnnnnnnnnnnnnnnnnnnnnnnnnnnnnnnnncagcacattcataaataacacacgatataattgaggtaacagagttgcaagttacaacaaacggcaaactcaagaagatgacttcaagtgttttgcaatatgaccattatataagttatggtatacatatatatttagatagatgtccataatatagaaaatatacaacattgttttgatgaaataatggcgagacggaaaatttctgatttgctttttgtcttccggattggtttacacttgagtttccccatcctccgggatcaaaagcattgggatctgaccgtgggtctacgaagtcaatcttgctcagcctcagacagcataggacttggttccgggcagctcttccgggtttttgagcctggatgggtaagccgagatcaagagtcccgttttttagccgatcccggaaggctcaagcccttccgngaatgnagctgaacgntgnacanccaggcatcccgagagttgggcccaaanagttngttaggccaaagggncgggttcctgagccgaaaancctccgcggnag

SEQ ID NO: 99636 - DNA, 761 bp, Arabidopsis thaliana columbia
  unsure (1)..(761): unsure at all n locations
tgannngttnnnnnnnnnnnnnnnnnnnnnnnnnnnnnnnnnnnnnnnnnnnnnnnnnnnnnnnnnnnnnnnnnnnctttttttttttttttttacaggtaataagaagaaggtctgcatatttctgaggggggaggtacattgtcttactggcgacaaaacaacccgttattgcgatacaagagatatcaatcgagtgtgataaatgcaagaaaggatatttaccgctggttaggtccttgctaagaatgattcaacttacaagggaacttgaagcagagttcctctgttgaagcaatttggacatagtagtgtcgatctgggtaagcacttcatcaggtttgtaccaagaacgaatcaacttaaaagtgaacttggagcagtgttcctctcttgaagcaattcggacagagaagaatcgatctgggcaaacacttcctcttttgagcggtttccctcgatcttaattgttatatcgtcgtacatagaaagcacatcactcacattttggttatgagtcttcagccgcagttttgccttctcttcgggatcatcaaaacgttgggtgagtctaacagcaatctcttctgtctctggaggcgaatacttcaagtggtagatctttcctgtgacaggatccaatcgacgcccaacaactctttcaattagaatttcttcaggaacctagttttattatcagtttgccggattttaagactgatttgccagaattaaacatttcagcaatctgttgcagaata

SEQ ID NO: 99637 - DNA, 440 bp, Arabidopsis thaliana columbia
caaacatacaaaaaaaaaacatttctttttataactcttctctagtcttctccaaatggaatggactagaggaagaatcctaggccgaggctctacagccaccgtatacgccgccgcaggtcacaattcagatgaaatcctcgccgttaaatcatctgaggttcaccgctcagagttcttgcaaagagaagccaagattctctcgtcgttaagttctccttacgtgatcggatacagaggatcagaaaccaagagagagtcaaacggtgtcgttatgtataatcttttgatggagtacgcaccgtatggaacgttgaccgatgcggcggcgaaagacgggggaagagtcgacgagactcgggtagtgaagtacacgcgcgatatactaaaaggattggagtatatacactcgaaaggaatcgtgcattgtgatgtaaagg

SEQ ID NO: 99638 - DNA, 623 bp, Arabidopsis thaliana columbia
  unsure (1)..(623): unsure at all n locations
nnnnnnnnnnnnnnnnnnnnnnnnnnnnnnnnnnnnnnnnnnnnnnnnnnnnnnnnnnnnnnnnnnnnnnnnnnnnnnnnnnnnnnnnnnnnnnnnnnnnnnnnnnnnnnnnnnnnnnnnaacttggaacacaataattttgaaataaccactttcgtttttgtttacgcggaaagagactatgcagggggtaagaaagaagacaacgttggggttaattttacaactctcttctgctaccggggaggtgaccacacaatcccaaacatgtttataatgcatcttggcattatacaataatgcatcttgcttcagaaattgggtccagcaaacggagccgaggctcacatgtaatctgacttatgggtcatggggggcgacatcctcggggttgacaagggtgaggggttcagacaaacttgggtgttccaagtaaagctgcaagcagaggggttcgctgttcaaagacttgactggcgttaaaactggggggttctgccactgctttgtgtctgttggaatccacagctctgcttctttgcttgaacccacttgaggaagtgacctcagataagccgttacctcccatctacaatttaggggaagaggtttgactagggatt

SEQ ID NO: 99639 - DNA, 539 bp, Arabidopsis thaliana columbia
  unsure (1)..(539): unsure at all n locations
nnnnnnnnnnnnnnnnnnnnnnnnnnnnnnnnnnnnnnnnnnnnnnnnnnnnnnnnnnnnnnnnnnnnnnnnnnnnnnnnnnnnnnnnnnnnnnnnnnnnnggacttccttgatctctttctctgaaggatttgcagacaacccttctttggcgagtaactccttaagttctttaatcagaatttcctcgcgtttctcctcaggagcctgcttggctttcctgtaaaccgatggagaaatactcattccacaagatttgatgatcgatttaaggggctcaacacgcttcccatagccagtcgttggagtttccggtttctttacagatttttctgaagatggtgccttttctcctgcgtcactgtcgctctgtgaatctgtttgttttgtcttctttgcagaggcaggtttctccttttcacgtttccgctttccggttccctctgactttgataattttcttttctccgccatcttcttttttacagctacttccttggcctcctcctcgtcttcaccatctgaatcaaacatttctt

SEQ ID NO: 99640 - DNA, 396 bp, Arabidopsis thaliana columbia
  unsure (1)..(396): unsure at all n locations
ttntccaanggccccttncctcattggctcccataagttctataatgaccctttacgaaggagatgtcatcttgacaggcacaccagaaggtgttggacctgtaaagataggtcagaagataacggccggaatcaccggtctatctgaagttcaattcgatgtggagaggcgtgtaaagcccttgagctaataagtggttttatttatctttcatacaaaaatgtcaattttataaaagcatctctaaaattttcatcacttactgtgtttcctaaggaagggagaaataaaactcgttactcattttatttgtaatctctataacaatggctctaagaccggtttaaattgtttatatgggagagtatttgtaaagttgtgatatttactgttgg

SEQ ID NO: 99641 - DNA, 533 bp, Arabidopsis thaliana columbia
  unsure (1)..(533): unsure at all n locations
nnnnnnnnnnnnnnnnnnnnnnnnnnnnnnnnnnnnnnnnnnnnnnnnnnnnnnnnnnnnnnnnnnnnnnncttttttttttttttttcaaacaaaagagtcaagaggatttagggtaaatcatgtgtgttctacatttataataagatcatatctatatatgaactattgaagatgatgaacatttttgtggccacacaaagctaaattgtaatcatccctcttttcaaaacccacaaatttgatgatgacttagccttccatgggaagacatctacactgcctaaagtgaagcatccatcttcatgttagtagatttctccttgacatgccacttgctctgtttttctacgtattgctgttttacatgggatgatgatgatgatcaaagtcttcttgagcatcactgggaatcaaagtcgggtttcgaagggtattcaagtccctgcagctccggcattcgccttagatcttcttctgtgtatcctgggattaaccagtatctcttatccattccaaatacctgttcaaag

SEQ ID NO: 99642 - DNA, 294 bp, Arabidopsis thaliana columbia
  unsure (1)..(294): unsure at all n locations
tngtgaatgttgtcacatattgcgtaacacaaattcaagcatatgaacaaataaggaattaagaggttaaaagaacacaatgaaatggagtaaatatgattaaatatgaataatccaatgatacatgaacaataaaattcttttaagaagttatgcgctacaatctcactctagcacgaacggacggagacagacgcgaacctcatgctcctctggtcccattcggtgtttagggactaaaacctctagtgttgttcctgtttcgtcccggtaagcttcaagcttggcgtcatc

SEQ ID NO: 99643 - DNA, 571 bp, Arabidopsis thaliana columbia
  unsure (1)..(571): unsure at all n locations
atagaagactatgacgtcgcatgcacgcgtacgtaagcttggatcctctagagcggccgcccttttttttttttttttgaaatggagtaaatatgattaaatatgaataatccaatgatacatgaacaataaaattcttttaagaagttatgcgctacaatctcactctagcacgaacggacggagacagacgcgaacctcatgctcctctggtcccattcgggtgtttaggcactaaaacctctagtgttgttcctgtttcgtcccggtaagcttcaagcttggcgtcatctggaatcctgttcggcagggagacttcgcggacaaattcccccggtgggcaatgctctggtgttggatctgttagcttaaatgttctatcatgtctcttgatgaatggctcacatgctgtacttacacatgatatcttcactattccatgtgctggtgtattcctccatgtcactttcacccttccggaatcaacaaatggcaggctcataactatcaagaaccctctgtcgtcttcatatatcgtttttgcggctgtgactggaccgtanacattctt

SEQ ID NO: 99644 - DNA, 669 bp, Arabidopsis thaliana columbia
  unsure (1)..(669): unsure at all n locations
nnnnnnnnnnnnnnnnnnnnnnnnnnnnnnnnnnnnnnnnnnnnnnnnnnnnnnnnnnnnnnnnnnnnnnnnnnnnnnnnnnnnnncttttttttttttttttacacacaaaccctctttattttaatcaaatgctatgtctaaatcatacaacctctctacttagcatcaagagctaaggttagtccatttcaaaagggttggttttaataatacattgccttcagaaccagtcaagggtggttttggattggctcaggggcaatctcagctccagaaaacccgttgctcgcgtgcagctggttattgttactgtgacccaatccccaaaagttagcagttttaacatcgtcttggttcatttgcttggagaactcttcatagttatactgcaacaaagctttccctccaaattcggttgggagattttcctcgtcgaaaaatgtgctcataagctccacgctttccgagttctttgggtaaacaaacttcaccttgacgaatgtctttgcatcaatgaagtacttcacaatcttccagaacgcctcaaagagtcttggaggattatagaggaaagctacagctagtctctcagggtagtgattttgcagaatattaatagtttctctggcagatttaataggcacactagtgctcattgaccaaccc

SEQ ID NO: 99645 - DNA, 520 bp, Arabidopsis thaliana columbia
  unsure (1)..(520): unsure at all n locations
nnnnnnnnnnnnnnnnnnnnnnnnnnnnnnnnnnnnnnnnnnnnnnnnnnnnnnnnnnnnnnnnnnnnnnnnctttttgtgttttggttttttttttttttttttatttgaaacttcaaaaacttcaaaaaacacagattttactacatctgttcttacaaaacccatttacacaagagccctctggaaagccaatgaaaaacctctaaactctgcaactctgttcttgtttttacatacactgatttagcatttgactacaagaacgtgggaaatcataagactaaattatgagaccttgtaaagacgcacaaactttagcttgcttcttctcttctttcatccatggggtatactggtatttcccagttcttattcttcttaggatcatcagttaaggggagatctgtttcgtactctttgaatgttttgaagtatgttttggtcccatcattaccagtctctccatcatgaataactggtattattctcgattataggatcccgaatctcgctaaag

SEQ ID NO: 99646 - DNA, 806 bp, Arabidopsis thaliana columbia
  unsure (1)..(806): unsure at all n locations
atgatctnnnnnnnnnnnnnnnnnnnnnnnnnnnnnnnnnnnnnnnnnnnnnnnnnnnnnnnnnnnnnnnnnnnnnnnnnnnccacgcgtccgcccacgcgtccgctaccagacaatcatctcaaaagcaggaagggagaacccaatcccgtggaacgaagtgaaatgcgtgctgtggttccttaacccagacagctatgctgatactcctgagaagcagaaaactattctgcagaatttcttcgagcacatggcaatcagattactcggcgataagctttacaaaatccgagtagttctcacaatgaacaacgtcagattctcactcttacaggttgagaagctagccagagaaagcttcttcttccttggagagtctttcccacacgattcagaaagctttggtgcattccaagacacattaacaatccagaagcctatgctagtctccagaccaatctcctatgtctttaatctccatccgccttctgacatccagtttggtaactacacctctcttcttcgcaaatctcttcacaacaaatgatctcttggtgagaaagaaaagacaaaaaaaaactcttaccttttgatacttttgtcgtctctgttcctaagtcatcatatgttttgtgtttcatggcgatcaagtgaatggccataaccatgtaattcatgtgacgatctcttacttttctatctgatgctatctttaattaaaaaaaaaaaaaaaaagnnnnnnnnnnnnnnnnnnnnnnnnnnnnnnnnnnnnnnnnnnnnnnnnnnnnnnnnnnnnnnnnnncacc

SEQ ID NO: 99647 - DNA, 1002 bp, Arabidopsis thaliana columbia
  unsure (1)..(1002): unsure at all n locations
tgannnnnnnnnnnnnnnnnnnnnnnnnnnnnnnnnnnnnnnnnnnnnnnnnnnnnnnnnnnnnnnnnnnnnnnnncttttttgttttttttcacaatttttgaacaactgaagatcatgagagtaacaaagctcttttgtacaaacaaaaaacccagagatggagcaaagtgaatgcaatacagatgaagaagccgtaaagcgatgagctaaacgacgacgattattaatcaatatagttgtaaaatcagctaaaaatgaagagaagttagaaaacaactccaagctaagtatgatactactggcttctcccttgttttttcacttgccttctcaacaaagctccaaagattcttctcagggactttctgtttctcttttgcatgattaactaatatgatgaaataacaacatatccataaccttcaacttctaagtttttttgtttccttttttaaaaaataaaatccattctagagattatgattttcttttgttgacttgctacctctttgaactcagaagggagcctccagtgacgagtcatcccaaacctcagcacttccattggatgcatcttcaacatcttcttccattgatagccgaatatactctctatgtgcaaaacggtcccagtctgtcaatgtcgggttctcgcgctcctgacgaatgaggaacggatcccgggtttcaaatgccataaatttgtttagattaaaaaggatgttgaagaccgtttccaagagagctttgaggcctttcaggtcatgcagcgttatatggctttcgttctcaggtccgatcatatcaatcatctgacataagatatcctcgaaaagaacagcctcttgcgccatgcactccattctatgcaactgctcttcataaaagaattgcatctcatttcgcgttataatcccatttgcatccaagtctatgcacttaaaccaatcggacgcgtgggtcgaaccgggaattccggaccggtacaacagacggcca

SEQ ID NO: 99648 - DNA, 862 bp, Arabidopsis thaliana columbia
  unsure (1)..(862): unsure at all n locations
acgattcctannnnnnnnnnnnnnnnnnnnnnnnnnnnnnnnnnnnnnnnnnnnnnnnnnnnnnnnnnnnnnnnnnnnnnnnnnctttttttttttttttttgaatagaaaggaaaggatatagatgaatgattttcgagaagagagttgaagccgggtaactcttccttgttttgactctcctaaaaataatttctcaagtggcaaaaacaaaacgacatttcatcgaattcaccgctcttttaacagtttgtaaactgcacctcagatttcatctcccaaaaactattctctctctttgctctatctgctcttcttcagctactaattgcgctgtttaccgttactgccatcgcattccccttcaccaaatccgttacgagcttcttctttcgccttcaaatctaattttccttctgttccgttgctgttgtcagccagttcttgatttgaaccgggtgggaggaacacaccagtgcctgggatgggcattcgaggttgtggtgctgtctggtgtcgtggatgaggcggcagcagtggccagacaggcggcccggttgggacaccacctgggaacggcattggaaaggcaagtggaggagaaggagggatgaaaatcggttgaacagctccgtttggtgggcggtgagacagactgggcaaaacacccggggacgggatcacaaacaggtagagtttacgtgggcccggttgggtgacggaatgtgctgaatttggaaacactgcttggggggagggcccccaataaagaagtttcatagggtttaagaatttcgaagaaaaacttaaggaggtcttcccggttggccttttaccgggttggccgttgaaaattggcaat

SEQ ID NO: 99649 - DNA, 769 bp, Arabidopsis thaliana columbia
  unsure (1)..(769): unsure at all n locations
nnnnnnnnnnnnnnnnnnnnnnnnnnnnnnnncccacggtctcgataagctggatatcgaattcgcggccgcagagaagagagtagaaaacgggtaacttttccttgttttgactctcctaaaaataatttctcaagtggcaaaaacaaaacgacatttcatcgaattcaccgctcttttaacagtttgtaaactgcacctcagatttcatctcccaaaaactattctctctctttgctctatcttctcttcttcagctactaattgctctgtttaccgttactgccatcgcattccccttcaccaaatccgttacgagcttcttctttcgccttcaaatctaattttccttctgttccgttgctgttgtcagccagttcttgatttgaaccgggtgggaggaacacaccagtgcctgggatgggcattcgaggttgtggtgctgtctggtgtcgtggatgaggtggcagcagtggccagacaggcggcccggttggtacaccacctgggaacggcattggagaggcaagtggaggagaaggagggatgaaaatcggttgaacagctccgtttggtgggcggtgagacggagtgggcaagacaccagtggacgggataacaacagggtagtgtttaggtgggcccggttgggtgaccgatgtgctgatttggcgatctgctccgcggtggtccccagttagagtttctcggtttagatttgatgaagctaatgagtatcccgtgctttcgggttgcgtgaattgcatac

SEQ ID NO: 99650 - DNA, 642 bp, Arabidopsis thaliana columbia
  unsure (1)..(642): unsure at all n locations
atagaagactttgacgtcgcatgcacgcgtacgtaagcttggatcctctagagcggccgccctttatggggtttttttttttttcttcaaagcaaaacatgtgttcatatagaaattatgcgtacgctacaatcaatggcattacaatgaaccaacctggtattcagattttaccaaatgacaatggacagaaaaaatatacaattttgaacagatcagatgcaaaagttgttctacagacagaaaaagggtaagacttgatgcatcttgttgaggagtttgggaagatgatgatgatgatgatcggtaggagtaggtggatctgagttcttggctttcttttttctcctaagctggaaaaactgctgcattgtctgagcgcattctgattcaagaactccgcgccggatttgtcatcttaggatggaatggatgaactggaggtggtggcttttctgaagcctctgatccatttccttcgcctccagggacagcctatccagctttcatctgtccgngagctnttgggggacccataaanggtttnncccttcttnagattctccgannatttgganggtctaggnttnnaagggggtgtttccnggcncntnacnngggtttangccctntgataaaaaa

SEQ ID NO: 99651 - DNA, 575 bp, Arabidopsis thaliana columbia
  unsure (1)..(575): unsure at all n locations
tcaatttnaannncagtccaaagttgcccaaagcaagaaaaggggaaaaccttcatnaaccttggtaagaagtttgggaaaattactnatgatgttgaccggtaggaagaaggtgganctgaagtccttgcctttctttttccccctaagctggaaaaacttgctgcaattgtctgagcgcatttctgattcaagaactccgcgcccggtttgccatcttaggatggaatggatgaactggaggtggtggcttttctgaagcctctgatccatttccttcgcctccagggaacagcctgatccagcttccatctgctccgagaagcttattgggagcaccccatgcaagagtgttgacccttgcttgaagtattctcccgcacacattgggcacggttctagtgttacatagagcgttgtatccgcgagcctccatgaacgaagtgctttagaaccctctcgaatgcaaatnatttctgcatgggcagttgaatcacgaagctcctctactaggttataaccacgggcaataatctttccatcatgaacaagcacagcaccgacaggtacctccc

SEQ ID NO: 99652 - DNA, 2015 bp, Arabidopsis thaliana columbia
  unsure (1)..(2015): unsure at all n locations
cacgcctaacctgcttcaatggaaaagtcatacatttacctaaccagaccttcttcgcatcttcggcttcttccttcgtgatctctcaaattctctcccttttaaagtcctaaatcaaaaccctaaacccataaatccaatccctccattcgaattattcactctctctctctctctctctcacaattactgatcggttctgaaatttgtagctatgcaggcaacggctttatcatctgggttcaatcctctaacgaaacgtaaagatcacagatttcccaggtcatgctctcagagaaattctctgtctttgattcaatgcgatataaaagagagatctttcggagagtctatgacgatcacgaatcgtggattgagttttaagacgaatgtgtttgagcaagctcgttctgtgactggagactgttcttatgatgaaacttcagctaaagcacgttctcatgttgttgcagaagataagattggtgtcttgcttttgaatttaggtggtcctgaaactcttaacgatgttcaacctttcttgtataatctctttgctgatccggatattataaggcttcctagaccatttcagtttcttcaagggactatagctaagtttatatctgttgttcgtgctccgaaatctaaagaagggtatgctgctattggtggtggctctcctttgcgtaaaataactgatgagcaagcggatgctattaagatgtctttgcaagcgaagaacattgctgctaatgtctatgttggtatgcggtattggtatccgttcactgaggaggctgttcagcagataaagaaggacaaaattactagacttgttgtactgccattgtatcctcagtattctatctctacaacgggttcaagcatacgcgttctccaagatttattcaggaaagatccgtacctagctggagtgccggtagctattataaagtcctggtaccaaaggcgaggctatgtcaattctatggctgacctcattgagaaggagcttcaaactttctctgatcctaaggaggttatgatattcttcagtgcccatggtgttccggtcagctacgtagagaatgctggagatccgtaccagaagcagatggaagagtgtattgacttgataatggaagagctaaaagccagaggggttcttaacgaccataaattggcataccagagtcgtgttggccctgttcaatggctgaagccatacaccgatgaggttcttgtcgaccttggtaagagtggtgttaagagtctactagccgttccagtcagtttcgtgagtgagcacattgagacacttgaggagatagacatggagtatagggaattagctcttgagtcaggggtagagaactggggacgggtacccgcgctaggtctcacaccatccttcatcaccgacttagctgatgcagtgatagaatcacttccttcagcagaagcaatgtcaaacccaaatgcagtggttgactcagaagatagcgagtcgtcagatgctttcagttacattgtcaagatgttcttcggttcgattctggctttcgtcctacttctctccccaaagatgttccatgcgttccggaacctatagaatctcgttggttttgtgttaagtcttttcttggagaaatgtcttggttaaattcaatatatatagtccaatctattgaagtactagtacaccagctctaataagctgatgtgggtaagtagttcaatagattggactatgtatattaaatttgactaagagataaactagagaatgggataaagatgagaacggtattagaaagttctttgaggaaatttagatgtattttaaattgaagatgcatttagctataaacatagtggctacgttcctcttagagatgaggagagaattatattctattattatttggtttcttttcttcgtttttgtatggtttcaatacttaattgtcaaaagtatcctataattttgttnnnnnnnnnnnnnnnnnnnn

SEQ ID NO: 99653 - DNA, 525 bp, Arabidopsis thaliana columbia
  unsure (1)..(525): unsure at all n locations
nnnnnnnnnnnnnnnnnnnnnnnnnnnnnnnnnnnnnnnnnnnnnnnnnnnnnnnnnnnnnnnnnnnnnnnnnnnnnnnnnnnnccacgcgtccgaaaaaaactagaaactctctgaatctcacaagaacattgcaaggtaaagaaaccacaagatcatcactcgaagtaaaaatggtgagcccatttagatctccatgttcttcacccaaaaaatcaagaaaagcaagcaagaacccttattcaaatcgtggacttgataaattctctgagcttctctccgagctagacgagaagaggcaaagcatctactcgaagaagctcgattccggtggcccgcctcttgttcgatttgtgttcacaagctccggtgagtgtgtccccgttgtgatcagatcatcttatcttcacaagaagaacaagaagacgaaagatgttgtagctgataaagtcaaaacagaagtcacggaagcataggcagaggaaatcaagatcacagagcctgaaacagagcaaaaacagagct

SEQ ID NO: 99654 - DNA, 808 bp, Arabidopsis thaliana columbia
  unsure (1)..(808): unsure at all n locations
nnnnnnnnnnnnnnnnnnnnnnnnnnnnnnnnnnnnnnnnnnnnnnnnnnnnnnnnnnnnnnnnnnnnnnnctttntggggtttgttttttttttttttttacgcaattcctaaataacattgcataaactttatatacataaatcttattgagacactcaaacactcacaaacaaatccacaaatactaataagtttctgcaagagcccttacaacacatacgtccagcttcgtagagcaacaatgcaatccaaaactacatccatatatagataaagaagacggtaattacgaaattgttatacttacatgaccgatcttgggtctcagttgttgaagaaaagtcgtcaaattaggaatgggaagtttctgaacgcatccttagaaagttcatgtgacaatctctcgaacaagccagtcgagacaaggataagcgaagtagaggatgagaaacgacggtagagccagcaagagagtgactagaatgtacatcgccaatatggctgcactggtcggtattgcatagagtattatcagcagaatatgacaactaatgggaactttgctgtccactgggcaaaggaaaccagggacctcctcagtgaagtttgtatgttgtcccttggaatgcgatgatcattaacagaacgtgatggttcaggttgactgcgatgatggcgattgtggagacatggagatggagtttcccttgtatgatcattgtttccatctgtttgagctccaccaggtgagttacgtctctctccattcatcctctcgaccatccaaagcacaaagtagttcttg

SEQ ID NO: 99655 - DNA, 550 bp, Arabidopsis thaliana columbia
  unsure (1)..(550): unsure at all n locations
ttgannnnnnnnnnnnnnnnnnnnnnnnnnnnnnnnnnnnnnnnnnnnnnnnnnnnnnnnnnnnnnnnnnnnnnnncttttttggtttttttttcaaagttcgatttatcgatacaattcttttttcctactagcattcatagtttcaaaaacaaaagtttcaaataattccaggttaaatttataatttttgagcacaaaagtggtttgacacttgcattaaaaaatcgtacaataactgaaaaagcaaacatttgtgtactgtgtagttttgactatagaggaaacaaaaacctactgttgattcctgctctgtacaacttcaagtcagatgaagacctcaagtgaatctcggtatctgcaggaacaaataaaacatctcccattgaaatcccatcggctgatgcttctgtagactttcttccttcaccttggagtacaagcagaagagaagggcctggaacagagggaaacaccgtcgaggctccactgggaagatcacacagatcaacttcaaactcttcgaaaggcggcaggtatcttgttatgt

SEQ ID NO: 99656 - DNA, 622 bp, Arabidopsis thaliana columbia
  unsure (1)..(622): unsure at all n locations
gagacttttaacactcagacctaaaccaacactcttcctctttctatctctctctcgccgatcggaagcagatttttctcaaaaggatggattcaacgaagcttagtgagctaaaggtcttcatcgatcaatgcaagtctgacccttcccttctcactactccttcactctccttcttccgtgactatctcgagagtcttggtgctaagatacctactggtgtccatgaagaagacaaagacactaagccgaggagtttcgtagtggaagagagtgatgatgatatggatgaaactgaagaagtaaaaccgaaagtggaggaagaagaagaagaggatgagattgttgaatctgatgtagagcttgaaggagacactgttgagcctgataatgatcctcctcagaagatgggggattcatcagtggaggtgactgatgagaatcgtgaagctgctcaagaagctaagggcaaagccatggaggccctttctgaaggaaactttgatgaagcaattgagcatttaactcgggcaataacgttgancccgacttcagctatttatgtattggaancagagctagtggtctncantnaaggtnnaggaggccaanngngctnatt

SEQ ID NO: 99657 - DNA, 506 bp, Arabidopsis thaliana columbia
  unsure (1)..(506): unsure at all n locations
nnnnnnnnnnnnnnnnnnnnnnnnnnnnnnnnnnnnnnnnnnnnnnnnnnnnnnnnnnnnnnnnnnnnnnnnnnnnnnnnnnnccacgcgtccgtatgacttcaacaatgatatctggctttgccattcgcttcgtgggctatgtttcaactccaccgctttccaacctgcaattaacatactgagggaagttgaggcatttctgagtcaaaacccaacagagattgttaccatcataatagaggattatgtgcacagacctaaaggcttatcaacactgtttgccaacgctggtttggacaaatactggttccctgtttcgaaaatgcctagaaagggagaagattggcctactgtgactgacatggtgcaagagaatcataggctcctggttttcacttctgttgctgccaaagaagatgaagaaggcgttgcgtatcagtggagatacatggttgaaaatgaatctggggatcccggagtgaagcgaggttcttgtcctaaca

SEQ ID NO: 99658 - DNA, 560 bp, Arabidopsis thaliana columbia
  unsure (1)..(560): unsure at all n locations
nnnnnnnnnnnnnnnnnnnnnnnnnnnnnnnnnnnnnnnnnnnnnnnnnnnnnnnnnnnnnnnnnnnnnnnnnnnccacgcgtccgagtgacattagtttgttgttgactactgtaagggttgggtttcgaaaagagacatggaggagtgttattaggttgattgttctcaagtacctccagtgtcaaacaaacattgacgattgattctcttcccataatttattgttatgcattacatatcacagtaaacggactttcagtcaacaccgcatttatttgccctcttcattgtttcacgtacgtaatcaaggaccaagggattttcttcttttggctaccatggccacaagatgcttttggtgttggaccactttgctcttctgctctcagctgcttaccggctttgcccgagcttcctctgcaggcggcgccaaagagaaaggactctcccaaactcccacctgggccgttgccctcgtctgtaccttcttcattcttgtctccgtcctcctcgagaaggctcttcacagagttgccacgtggttgtgggagaaacat

SEQ ID NO: 99659 - DNA, 546 bp, Arabidopsis thaliana columbia
  unsure (1)..(546): unsure at all n locations
attgannnnnnnnnnnnnnnnnnnnnnnnnnnnnnnnnnnnnnnnnnnnnnnnnnnnnnnnnnnnnnnnnnnnnnnncttttttggtttttttgagcaaaaacaaaagctatcaaatatatcaatagtacttgaagtagtctgcacaaaatgaaaaacaaatgttaaaaaggaaaaaaaaaaaaataaagctaaacgaaacgaacaaattattgcgaaattatccacgtggaaatagaaaactagattaagtgtctaaaatcaggagccacgtggttagtattattatgcattaagaaatcttcaccgttggatctgatatccatcagtagattctcacacctaagctgactcagcaaatgctcgtctctcatctccttctgtcgccggagctccatcactttccggtgagagttcgagtgcctcgccatcacgaacgtcggactcgacgccggtctatactccggcacgagcctccctgatttgtacctcactccgcaagcgttacaaagcgtcttcggacccatangtcccgtcctccattgcg

SEQ ID NO: 99660 - DNA, 790 bp, Arabidopsis thaliana columbia
attatatatataactcaacaaaatctctctgtccaatttccaaagtcaactcctttttggtttttgttttactttctgttttcctcttctctactctggaacaacaactacacacacacacaaaaaaaaacaattttctgtctatatatatattaaggatccaaattagggagagaccaaagaggaaattaataacaatcaatccaacaacgaatggagattgaagaagcgagtcgtgaaagtggacatgttgtgtgcggatcatggattcgtcgcccgaagaaagtaaactgggttcttatcgctaaagcttccaaacgccgtggctcatctgtttcttctcctgctctcctcaacatcttctcttttgaccccattactgcttctctttcctcctctcctttggcaacacacacgcttaaggatagtgatggtgatcctgtggctgtttcagtgcaccctggtggggattactttgtttgctcaacctccaaaggtggttgcaagttatttgagcttgtcggaggagcaacaggtattacgatcttagccaaagaactccttcctctccaaaatgctggactacaaaagtgtatggccttcagctttgatgggtctaaattagctgttgggggagtggatggatgtcttagaattatggagtggccaaacctaagtgtaattttggatgagccaaaggcacacaaatccatccgggacatggattttagtcttgactcagagttcttagctaccacatcaactgatggatcagctagaatatgggaag

SEQ ID NO: 99661 - DNA, 542 bp, Arabidopsis thaliana columbia
tatagaagagcttgacgtcgcatgcacgcgtacgtaagcttggatcctctagagcggccgccctttttttttttttttttttcaagaacaaccttaatttttcatggccagaattatcatttacagacactaattttgttaaacaacaacgatgcacttcaagatgtaaacgagaagaataacacaaactgatcgcgaatgtagtattaccataaaatgggtattgatattagttggtcagttcacagtcgcatatattacaaacaacaaatccccaaaccctctcaaagaatgtggcacatcctcataaaccacagaggccatttcagttcagtacgaagtgataccttgagtctacatggctctccacgtcccagaggaaagaaccaaacgtcacagcctccaacacaagcctcttcaatcccttgaagctgatcttgatatgctcgtccttcgaggaatcaatagtgccttgtggcgttatcacaatctctggccttccaaacaatgcttttgtatgcttctcaattatcccaaccgat

SEQ ID NO: 99662 - DNA, 546 bp, Arabidopsis thaliana columbia
  unsure (1)..(546): unsure at all n locations
nnnnnnnnnnnnnnnnnnnnnnnnnnnnnnnnnnnnnnnnnnnnnnnnnnnnnnnnnnnnnnnnnnnnnnnccttttttgtttttttttttttttttagaagaaccagatcatggagattaattatttgaaaaagagtttattatcaaaagaaaccaaagataattgtcttaactacaatgaaaacataaaatttacttaaacggacagtcacataaaattagacatgccgtgattttatttttcggttgcgcggttacaaaaaaaagtgatccatctaagagaagaacttgtaggtcttggcgttgataatgatggttctgagtcctccaattggggcaaggatcgtcaaaagaactcctactatgatgcagaaccagttagctgtccaagatagaccaaacctctttggtttcttgagaacgagccacataatgcatggaaggtagtaagttgttggggcaaaggcgaatcctccaaagaagccgagtagtccaccgaaaaacgggacgcatatcgcaacaatcatcgtgaaagcgacgtaaag

SEQ ID NO: 99663 - DNA, 593 bp, Arabidopsis thaliana columbia
  unsure (1)..(593): unsure at all n locations
atgattttcgccagctacaatacgactcacctaagggaaagctcgtacgcctgcaggtaccggtccggaattcccgggtcgacccacgcgtccgctaaaaccttaactttttgctcttctccctccgcctcaatcgcacgaagacgataatcgaatatggcggaactaaagctatcagagagtcgggacttaaccagagtcgagcgaatcggcgcacactcacacatcagaggactaggtctcgactctgccctcgagccgcgagctgtttccgaaggtatggtcggtcaagtgaaggcgcgtaaagccgccggtgtaatccttcagatgattagagaagggaaaatcgcgggtcgggctattctaatagcgggtcaacccggaacgggtaagacagcgattgcaatgggtatggcgaaatctcttggcttggaaactccttttgcgatgattgcaggaagtgaaattttctcattagagatgtcaaagacagaagctttgactcagtcttttcgtaaaagcgatttggtgttgaggctcaaaggaaggggccagtggttntttaaaggngaanttttttnggttcaaatttt

SEQ ID NO: 99664 - DNA, 919 bp, Arabidopsis thaliana columbia
  unsure (1)..(919): unsure at all n locations
tgannnnnnnnnnnnnnnnnnnnnnnnnnnnnnnnnnnnnnnnnnnnnnnnnnnnnnnnnnnnnnnnnnnnnnnnctttttggttttttttgaagtctatagtaatacaagttataaaaggggttaacactatcaagtgtacagattacaaatgcaaagctaccggttcgactaaagcaaagaccatccaacgcaacctactaatactgttactcatcttttaaaagtgtcagccatcaaactaaacctaaaccaactctagctcctgcaaatcccagaagcataacccagctctttctcttctctctttttgctaaaaccgaactaaaccgaacgttatgacaatgtggagcctgtcagaggagacccacatgtggtatctctctagaaacatttagatctaccattttggtcttgtctcgattctccttcaagctctttgcgatccatatctgcggtttcttctgggagacacccctttcctggacccaaaaggggcttaagcaatacccattgagttcacctcatatctcccttcttgtaacacatctggcactaaactcaagcaacccctccaaagcatcagcccgttgacgatacgatgatgggtcaaaccgacatcttcttgaactagaggatgtggtgtggcttgatgcccagctgttgcattctgatcagatgatgatgacccgtcgcttatgttatctaccatgttgagttggattccctgccacgtcgtatgagtttgaactgtgcatttgtcttttgttatagagcggtctgagacagaggagctnttagacgatgttttcctttgcatgggagtaaagaagatgtcttgttcatatggagctaatggaaaatggcatcttatcaacttgtggctcattaatggaatattctggagacttgacattct

SEQ ID NO: 99665 - DNA, 544 bp, Arabidopsis thaliana columbia
  unsure (1)..(544): unsure at all n locations
ttgannnnnnnnnnnnnnnnnnnnnnnnnnnnnnnnnnnnnnnnnnnnnnnnnnnnnnnnnnnnnnnnnnnnnnnncttttttgtttttttaaacgcgagagctcgagaaagaatcattcgatgatgatactttcatgttcacaagttttagacctaagacaacatgagaatcttgatcttcatcaagatttgaggttttggcattcatttttatagccaaaaaccagagagatccaaaagataaaacaacaagaaaaaaaatgaaacagagaacacaagacccttccggtttcttcaccgattcttcgatttaaaaggtcgaagaagaggtgttgacaacgatatgccgaagaggacgatccacatctccaccaccaccatgtttaacaaactcagctggtgtcaagaaactaccatggcaaatgcacattatcctcacttcctctccttttccatacttgtacagaatcccatcaacccgtcttccgtttggcccgtcccctttagtaaacacacaaggcatatcaaccaaaccagtagacg

SEQ ID NO: 99666 - DNA, 690 bp, Arabidopsis thaliana columbia
  unsure (1)..(690): unsure at all n locations
nnnnnnnnnnnnnnnnnnnnnnnnnnnnnnnnnnnnnnnnnnnnnnnnnnnnnnnnnnnnnnnnnnnnnnnnnnnnnnnnnnnnnnnnnnnnnnnnnnnnnnnnnnnnnnnnnnnnnnnnnnaaaacgctgaaagtactcggacaatttgaaaaacaagacgtcgcttacaaaacaaagccttttttccccactttttttgttccaagtctcaggctttgaatttgttcaaattccaaaaacaaagttttacttaagccttcagataacaacatagtatagaatctcataagcattaagactaaaactcaagatctctgactcaaagactaataactctggaacaagaatctctccctatctctctcatgtccagaatccagaatccttttccgtgtctcttccagaacacctcagaatttgaaatctttcttcttcttcccttccttggtcatgcattttcctcttcctactattctgctgcacatgctcgacgaccatgtcactcaagtccactggcttattgggcaattctcctcttctctnggctcctcanactgggagggaaaanatttccaangatccaggcttcngggggnaggggnatccacctggcggcttnggccctcaggaataancctttgggccggnttctgggacaggtaaaangaggggggggccngaagtcngt

SEQ ID NO: 99667 - DNA, 602 bp, Arabidopsis thaliana columbia
  unsure (1)..(602): unsure at all n locations
ggnnnnnnnnnnnnnnnnnnnnnnnnnnnnnnnnnnnnnnnnnnnnnnnnnnnnnnnnnnnnnnnnnnnnnnnncttttttctttttttttttggctagtgcaaaaactattaagttgagaattcaatggtacaccacaaagttccaagcttttggattgggaaacaaaaataaactataacatcaataaatagatacttcaaaaagtgtttaaagacaagatttgcagctctctcacattccctaaggacgaaagctctatcatttgatcaaaatgtcaggtcacaccggaaataaagtaacttcagtgagtcgaggtggagttggtgacccaatactgcttcacggcaatcaaaaccttctcaggaactaaaggaccatcctcatgatcgacaagcttcgcatcccatctcattccagcgatgattctcttcaccttgatcaatgtatccacatcatcccggattataaccgctccttctgggtcggagaattctatccatctctagaagaatatcatccgcattgcacttgtcctggaaaggtgagagggggtcgcgnggnnaggcaatgtctgggatgagggaagccnnccagcangt

SEQ ID NO: 99668 - DNA, 3232 bp, Arabidopsis thaliana columbia
  unsure (1)..(3232): unsure at all n locations
ccttttgcttcttctcctttacttccttttttttttctttccatcattttgtcacaaaccggaaaaaaaatctcaccggagaaaaaataaatctcaccgacgacgaattcgatcatggaggtgttatctacttcctcacctctaacgcttcactcccaccgactcctctctgcttcttcttcttcttcacatgtcacctccatcgccgcttcttcactttcttcattcgcttcttcatatctcggaatctccctttctaaccgcacgatccaccgcttctccacaactccgacgaacttaagacgatttcctcaaagaaaacggaagaaattcactccgatttcagcggttttcgaacggttcaccgaacgagcgatcagagctataatcttctctcagaaggaagctaaatcgttgggaaaagatatggtttacacgcagcatcttctcttaggtttgatcgctgaggatcgtgatcctcaaggcttccttggatccggtatcaccatcgacaaggctcgtgaagctgtttggagtatttgggacgaagctaattccgattcgaaacaggaggaagcttcttctacttcgtattcaaaatcgacggacatgcctttctctatcagcacgaaacgagtctttgaagctgcggttgagtactctaggactatggattgtcaatatatcgcaccggagcatatagccgttggactcttcaccgttgatgatggtagcgccggcagagttctcaagagattgggagcaaatatgaatttgctcacagctgcagcacttacaagacttaaaggagagattgctaaagatggaagagagccatcttcttcatctaaagggagcttcgagtctcctcctagtggtcgaattgctggttctggacctggtggaaaaaaagcgaaaaatgtactggaacagttctgtgtggatctgacagcacgtgctagtgagggtcttattgatcctgttattggtcgggaaaaagaggttcaaagagttatccagatactttgccgcagaactaaaaacaacccaattcttcttggtgaagctggtgttgggaagactgccattgctgaaggactagcgattagtattgcagaagccagtgctcctggatttctcttgacgaaacgcatcatgtccctggatataggattgctaatggccggtgcaaaagaaaggggagagctggaggctcgagtcactgctttgataagcgaggttaaaaaatcaggtaaggtcattctcttcatagatgaagtgcatacacttattgggtctggcacagttggaagagggaacaaagggtctgggcttgacattgctaacctcttgaaaccatcacttggaaggggtgaacttcagtgcattgcatccacaacccttgacgaatttaggagtcagtttgagaaggacaaagcccttgcaaggagatttcagccagtgttgattaacgagccaagcgaggaagatgcggtgaagattttgttgggccttcgtgaaaaatatgaagcccatcacaattgcaaatatactatggaagccatagatgctgcagtgtacctttcatcacgatatatcgctgatagatttcttccagataaagctattgatctcattgacgaggcaggaagcagagctcgtattgaagcttttaggaagaaaaaggaggatgcaatctgtatcctatcgaagccacctaatgattactggcaagagatcaaaacagttcaggccatgcacgaagtggttctctcaagcaggcaaaagcaggatgacggtgatgccatttcagatgagtctggtgaactagttgaagagtcttctttgccacctgcagcaggcgacgatgagcctatactggtgggacctgatgatattgcagccgttgcatcggtttggtctggaattccagttcagcagatcactgcagatgaaagaatgcttcttatgagtctagaagatcagcttagaggcagagttgttggtcaagatgaggcggtagctgccatatctagagctgtgaagaggtcccgggttggcttaaaagatcccgaccgtccaattgctgctatgcttttctgtggaccaacaggggttggaaaaacggagcttacaaaagctctggcagcaaattattttggctcggaagaatccatgctgagattggacatgagtgaatacatggagcgtcatactgtgagcaagctgataggctctcctcctggttatgttggctttgaagaaggtggaatgcttacagaagctatcaggagacgtccttttacagtggttttgttcgatgaaatagagaaagcacatccggatatcttcaatattcttctccagctgttcgaagatggccatctaactgattcacagggaaggagagtatcttttaagaacgcattgatcataatgacctctaatgtcggatcattggccattgcaaagggaagacatggttcaatagggtttatcctcgatgatgatgaagaggcagcatcttataccggaatgaaagctttggtagtcgaagaactcaagaactatttccgtccagagttgttgaaccgaatagacgaaatcgtcattttccgacagctagagaaggctcagatgatggagatcttgaacctgatgctacaagacttgaagtcgaggctcgtggcactcggagttggtttagaggtgtctgaacccgtcaaggagctcatatgcaaacaaggctatgatccagcttacggtgcacgaccactccggagaactgtcacagagattgttgaagatccactcagtgaagcctttcttgccgggagcttcaagcctggtgatacggcttttgtagttcttgatgataccggaaacccatcggttcggaccaaaccagattcttccactatacgagttacagacaaaacatcgatcgcatagtttcaccattggaggattgtatataaagattctttgattatactcactcgtcttatacttaaatctcaattgcttgttgcaaacttgtatatataaagatacatagtgattagtccgtgaggtaattgtattaagtatttgttattcctcgaattaaaactatcctttcattcctgnnnnnnnnnnnnnnnnnnnnnnnnnnnnnnnnnnnnnnnnnnnnnnnnnnnnnnnnnnnnnnnnnnnnnnnnnnnnnnnnnnnnnnnnnnnnnnnnnnnnnnnn

SEQ ID NO: 99669 - DNA, 966 bp, Arabidopsis thaliana columbia
  unsure (1)..(966): unsure at all n locations
tnnnnnnnnnnnnnnnnnnnnnnnnnnnnnnnnnnnnnnnnnnnnnnnnnnnnnnnnnnnnnnnnnnnctttttttttttttttaaattttataatcgcttaatctaaatggaccaccaacatattaacgtgtaaaacaatacaagaagatctcaaatcattatacctaacattcgacaaatcgcgaacatcaccgtttgaagtaaaatttaaagttacaattttaaaataaaagacatatgtaattctcaccaagcatatactaagagccgaaaaagaaaccgaaaattgatacatatgctggggataataaaatatgaattggcagctttcaatagctttcttggctttgaagcaacacaaagaacctatgcgtgttgttgttgagactttgttctcaagatacctccgaacaaaacaaaagctttaagcttaagctttcgatttggcctattatttctttcttttttggttatttaatttgtttctgaacttgcgttagatgaataccacagcttcttctggcaaatcaagagcttctcattggctgatgcagactctgtttgttctttacggcaactccatctcagctctttagcaacagatgcaattgaatctgcgaagtagctcgattcgcgtataatcgcatacccgctaggacgtaagatcctatccatttccagcattacatatttcatatcacacctctggctttcagatgtaaacagcccatctacgtgaagaagatcataagttcttggatacgtcgaaaaagcttcacaccagtcatgatatgttccgatcaatccacgatcaaacacaacgggaagtgtgtttgcagcataagaagagacgacattcatgacccacaaaggatcattgaccagagcagcagccaaacctccataagcagtgttcatatccataacattccgaattttgtcagaaccaatcgcgggtaacagc

SEQ ID NO: 99670 - DNA, 508 bp, Arabidopsis thaliana columbia
  unsure (1)..(508): unsure at all n locations
nnnnnnnnnnnnnnnnnnnnnnnnnnnnnnnnnnnnnnnnnnnnnnnnnnnnnnnnnnnnnnnnnnnnnnnnnnnnnnnnnnnnnnnnnnnnnnnnnnnnnnnnnnnnnnnnnnnnnnnnnnnnnnnnnnnnnnnnnnnnngggaatcaagagccatttctattactacacaatatacaagctgtttcatagttaaaaggacagagtttgggtttatttttttataaaatgaatttaatggggctttaccctaggaatctactatacacacaggcggagatcaatgaagacaaagtgtctatacaaagagaaagatcggttttcgcagtttttctcactcaaccagacgaggtcttaagctgaaagagacctgtgaagaaaaattgacaatgaactggttcttgccttgatctcaagttgaattgcaggtcatggatgttcaagatatactacccgatgtcaaaaagctctcgggttgatatataatcctacaagggaaatggctttt

SEQ ID NO: 99671 - DNA, 521 bp, Arabidopsis thaliana columbia
actatagaagagttatgacgtcgactgcacgcgtacgtaagcttggatcctctagagcggtcgcccttttgttttttctttttatcgaaactcgtatatatcaaatccatagagaaggaaacactaatcaaaacaaactgaacgttgaagaatcaagaaaccaaatgctcatataagaaaaactgatccaagaaatcagaagaaaaagaaaaatcgattcttcgtatagagagattgagagcattaaacgaataggagaaacctctgattggtcaagtagcttcagaggacaagatttcgagctctgcccaccaaagaggagaggatcttggagtagctttctcaggagttatgttgataacttgtttcagttgttccgctacatctttcattgaaggtcgttgtctctgttctgttttcagacattctcgtatcacatcgcagatcacttcaagctcctcttctttgaatgtctttaacgatggatctatcatctctcccaagtcgtctttttcaaggta

SEQ ID NO: 99672 - DNA, 426 bp, Arabidopsis thaliana columbia
ctttcatctccagatctgctgctgaagataaattagtcagcaatcgtcatagctatggcgattagggtttttcttacccttctcctcttcgtatcatctgcaattctatctttctctctttatgaagatcaagccggcctcactgattggcaccaaaggtacattgggaaagtgaagcatgcagtattccacactcaaaagactggaagaaagcgtgttatcgtctcaaccgaggagaatgttgttgcttcacttgatctcagacatggggagatattttggcgacatgttctcgggacaaaggacgctatcgatggggttggtattgccttgggaaaatatgttatcactctttcatcagaaggaagtactttaagagcctggaaccttcctgatggtcaaatggtgtgggaaacatctctgcat

SEQ ID NO: 99673 - DNA, 1160 bp, Arabidopsis thaliana columbia
taggaacacaactatagaagattatgacgtcgcctgcacgcgtacgtaagcttggatcctctagagcggccgccctttttttttttttttgtaacaatgtaaaactgaaatttctgaggtggtctacataagctttttaatgatctgaatgtttcaagaactaaattcatcaaaagaaagagagagattacatggagacgaagcgggctttgtacattgtgatgtacgccatatgccaatcacctcctccagatagctttgtgatgtcttcttcgcgttgcatgctcgggttgtcatcatcatattgaatccatttgccactctcttgcttgacccatgcaacataatgaccagagtctgcactcctgcccttgtgggtcaacacagcgaccaagtcatagattccagtcatgtgagtttccttctcagaagaagtaccttcctgtgggtttactgtggatgattctccacttccatttgcagacgcctctgcatcagtcattttcacatcactgtcctttgagccactcttagcactagtttgaagaccaagctttttaccttcctcctctttaagtttctggcgaggagcttccagtttcttccgaagacccccagagcaaaggtcaaatatacccaacaccagcggggaacccactttcctgaggatctttgctttctgattactcccccttttccaaaaaacccgcacgaactgaacagtcaagtaccttggcaaggaatcctataaggtgactccttgacgtagagtgcaggtacggccaagagcaggagatgttttttcaagttcccctttcagtccatgttttaatccttcatgcaagtggttcacttcatgtgatatatgacattttagagaatatacagattctgtctctgagctttcttcgccactttcttgacaatgcaacctgctctggagattgacaccaaatagagctttcacagcatcagcaccttcgctggaagttggtgcttttagggactgagaaagggtgtataacagttgtgtccaacattcttcagcatcctgctgcatgtgcattccattctgcaactgactaaactgaggatacttttttcgtaataccatccagaactgtgaaggccggacgcgtgggtcaacccgggaattccgg

SEQ ID NO: 99674 - DNA, 384 bp, Arabidopsis thaliana columbia
ctcttccctcctccgcttccaaaatcagcgagagagggagacacatagagagacagagagattgctcctaatcagaagcaatctcaccattgaatcatctattttctaccaaaaggaagcttcttttgcttttcattttgccaagtttccgtctaaatctctctactttaaaactccggcggccaacgtttccaccgatcctccgacttctttccgagtttcatcttctaacaaaggaacgaagaagctctcttcaccgtttgagtaacgtgatccggtctacaaagaaatcagtctgcgggagaaagtggaagaagactgaagatgaagagagctagagaagatgttcacactgacactcaaaagcgaaagcctgaagtttcg

SEQ ID NO: 99675 - DNA, 593 bp, Arabidopsis thaliana columbia
  unsure (1)..(593): unsure at all n locations
acgaatccttgtccttccttcctcaatcaaacaacaccttctttaatccagaacaaaaaaaaaacaaacagaagaaaaaaaaaaaaaaaaaactacaaaaaaaaaatctctgcccgcttctccgttctcggggttgcgtcaaaattgcaccaaattaatcaaaacctacccagaaatcatttttggtcacaggggataggcgggcagatttaaattttcttcttttgttcttctgtttgaatttgtattgattcgtgaaattgtgtttgtttgatggggtttttggtggatacgcaaaaggaaggaggtggacattcatggggttacgttagaagtttggttagaaggaaacaagtcgactctgctaatggccaatctcatggtcaccaacttgctagagccctcactgttcctcatctcgttgcaattggtgttggagcaacaataggagctggagtttatattccttgtaggacagttgcgagagagcattcaggaccttcncttgctttgnctttnctaattnctgnaattgcttcnnggctttctgcgnttttgttatgntnanctntctnagnggtgncccttnanct

SEQ ID NO: 99676 - DNA, 482 bp, Arabidopsis thaliana columbia
cacattttcacttgttaaaattttgttactttgctctatctgaaaccaaagctgccatctttctccttttgggttttgattagatctccgattttgggtttctatatattatgcgagctcacttttgttcgttctgattatctgacaatgatattctccaagcttggttcttccctcgctcgatcctcacgttctaagggatttgtgtacggcggtggtgtgagatcggcggtatttaaccaagggaggttacgagcgccgcagaatctcgaggcggccgtcaatcaggtggatggtggattagggtttttgaggcggcactttgcttcttttgctgctcgaaggggactagaagccggtgatttaagccgtgctttcgctaaccctagattgcgtgggttcttttctagtctaaccccatagaagaagaattatgagaactactatccaaaagacagtaaggaagcccccatgaatgagca

SEQ ID NO: 99677 - DNA, 496 bp, Arabidopsis thaliana columbia
atttagcagcgaagcgcacacaaagtttgcttgccttctgggcttcacgattctcacgacatctgtttatcttctccgatttccacgtccatggatctcagtcaatgttccttaatctctcttttcgattagtccaatctccactaatctctgacctcagatcgcttccgacgccgctgaactgtgtccgtcttgatctgtgtttaggagaaagcttctagggtttttgttttggttgctgagtagaatttgttggatctgaaacggaaatcaaaatgggctttttcagtacgatactaggattttgtggatttggagttgggatttcattgggacttgttattggttacgttctcttcgtctacttgctccccaacgacgtcaaggatcctgaaattcgttcaatagctgaccaagatcccaaagctatgctacggatgcttccagagatacctctatgggtcaaaaatccggatttcgatccgttttgacctgg

SEQ ID NO: 99678 - DNA, 428 bp, Arabidopsis thaliana columbia
accacgcgtccgcccacgcgtccgaaaagagaatctctcagaaggtgagcctccaacaaagcgtgaatctctctttctctctctatctctctatctccgagatcgcatcaccggaaatctccttctacggtggtggtggtgacagttgaccagagatggcggcggagaatgagagaaaatctccttcagcagtctccgatatgggagcttgggcaatgaatgtgataagctccgttggaatcatcatggcgaataaacaacttatgtcctcttctggattcgcatttagtttcgctacaactctcaccggtttccacttcgctttaaccgcattggtcggtatggtatcaaacgctaccggattctctgcttcgaagcatgtacctatgtgggagcttatttggttctccattgtcgctaatgtctct

SEQ ID NO: 99679 - DNA, 569 bp, Arabidopsis thaliana columbia
  unsure (1)..(569): unsure at all n locations
cgcgtccgcaagacgcgtgggcggacgcgtgggatttcaaacacaaaagtttcgtctccgatttaatctttctacgtcttggtttatgagctcaaaggagaagcccactctcggaggtacgcggattaagacccgcaaaaggaatattgctgctcctctcgaccctgctgctttttctgatgcactagttcagatttatctggataatgctggtgatctggaacttgttgccagaagtttagagtcatctgatcttaatttctcaagatacggtgatattttctttgaggttgttttcattggaggacgtactcaaactggttcagtgaaatctgatgaaggggaacgccacccttactctataatcgactgtgaaccaaagcgtgaagctattttaccatcagttgtatacatacagaaaattttccggaggaaagccttccttattaagaaccttgagaatgttacacggggattcttacagtcaccttgggggcttttttnaggaggaattagaggaaggaagcttcaatattcacagcacttcatttttcacaagaggtcccagg

SEQ ID NO: 99680 - DNA, 680 bp, Arabidopsis thaliana columbia
  unsure (1)..(680): unsure at all n locations
cgncgtccggtttaccgttnctgtaaccccaagggacggatttggacaatggtagctggtggaggagcaagggtcatccatgcggatacggttggagatctcgggtatgcatctgaacttggcaactatgctgaatccaggggagcccccaaagaagatgaggttttgcagtaccccagagccgttattgattgtcctacagcaaacccggatggaaaaagcagacccttgtcatcggaggcggaattgccaacttcactgacgttgctgctactttcaatggcataatccgcgctcttaaagaaaaggaagcaaagctgaaagcagcaaggatgcatatatttgtgaggagaggaggaccaaactaccaaaagggacttgctaaaatgcgagcccttggagatgatatcggtgtccccatcgaggtctatggcccagaagcaaccatgacaggtatctgcaaggaggcaatccagtacatcacagcagcagcataagcttctctcagtaccttctatgaccaaaactttgtctgtgttttagagcctttatttactgtggttaagattactcaagctataagatacttgcaatttcttgaaaacttctgttgttcgattctctttcccctaacgttttcttcagattcaataaataatcgttactttttaaaaaaaaaa

SEQ ID NO: 99681 - DNA, 1228 bp, Arabidopsis thaliana columbia
  unsure (1)..(1228): unsure at all n locations
cggacgcgtgggcgttcttggtgagctaactacccaacctgtgaagctacccccattctctctcaacgttttcgttttgaaatggcgaggaagaagatcagagagtatgactcaaagaggttggtgaaggaacatttcaaaaggctttctggcaaagagcttcctatcagatccgttcagattaatgaaacaactgatctaaatgagctagttgaaaaggaaccttggctctcgtctgagaagctggtggtgaaacctgacatgttgtttggaaagcgtggcaagagtggtttggttgccttgaaattagattttgctgatgttgccacttttgttaaagaacgtttgggaaaagaggtagagatgagtggatgcaaaggacccataacaacattcatagttgaaccatttgttccacacaatgaggagtattatctcaatgttgtctcggatcggcttggttgcagcataagcttttctgagtgtggaggaattgagatcgaggagaactgggacaaggtcaagacaatatttttaccaacaggtgcttccctgacacctgaaatatgtgcacctcttgtcgcaactcttccctttagagatcaaagctgaaattgaagaatttatcaaagtcattttcaccctattccaagatcttgatttcactttcttggagatgaatcctttcactctagttgatggaagtccttatcctctggatatgaggggtgagcttgatgatactgctgccttcaaaaactttaaaaaatggggcgacattgaatttcctctgccatttggaagagtaatgagtcctacagaaagctttatccacggactggatgagaagacaagtgcgtctttgaagtttaccgttctgaaccccaagggacggatttggacaatggtagctggtggaggagcaagtgtcatctatgcggatacggttggagatctcgggtatgcatctgaacttggcaactatgctgaatacagtggagcacccaaatgaagatgaggtttttcaagtaccgccagagtcgttacttgtttgtccttcagcaaaccccggatggaaaaancagagcccttttnaancggaggggganttccaacttaactacggttcttctnncttcaatngnaaaatcgggctttaaagnaaaggaggaanctgaacngcaaaggttcantntttttggggggggccacnccaaggcttntaatc

SEQ ID NO: 99682 - DNA, 805 bp, Arabidopsis thaliana columbia
atacgactcactctagggaaagctcgtacgcctgcaggtaccggtccggaattcccgggtcgacccacgcgtccgatccttttctctctctctctctcgattctagcttcatcgctgttccaaatttaggaagtttctgaggtgggtttctctttctttctttcctttctcgtcttttggctgcgtctgtttctaggttttgttctgagtcttgacaaaacccaaattccaagttcacatcttttctagttgttttcatgtttaagatttttggtcccttctgacttggacatagattctattgaggaattgagtagtaattgaaatggatctatgcctgctttactagttagttacaagtcaaatctctgaattgcttctgattaattgcagaaacaggtcacaggtctgtcttacatagttacattgatgggttgctcctggttatcgtgtcacaggagagaagctacagaagttgatggagaaatcgcagcgatagacaatgtaaagatatacaaatatagagagatacgtcaggccactgatgatttcagtgctgaaaataaaattggagaaggagggtttggttctgtgtacaagggctgtcttaaagatggaaaactcgcggctatcaaagtcctctcggctgagtcaagacaaggtgtaaaagaattcttgactgagatcaatgtgatatcagaaatacagcatgagaatttggttaagttgtatggatgctgcgtggaggggaatcataggattcttgtttacaatttccttgagaacaatagtcttgataagacgc

SEQ ID NO: 99683 - DNA, 1174 bp, Arabidopsis thaliana columbia
  unsure (1)..(1174): unsure at all n locations
aagatactccaggctctatccaactcattttagggaaggctggtccgcctgcaggacccggcccggatttcccgggccgacccacccgtccgcggacccttgggttccaggacggcgccacaagtctctcgtctgctctctcttgctcaaagacgcttcggtaccaagaagtcctgatctgaaagatacaatggcgtctggtatcgtcaaaggaggcggatccttatcggatgtatatagtagtgcgaaaaggattctactcaaggctcgcgacggaatcgagaggttagagaggttcgaatcatcttctatggattctcccgatctagcctcctccgtgaaacgagatattactgaggtccgatctctctgctctaacatggatactctctggcgctcaattcctgttaaatctcagcgcgatctctggagaagaaagactgaacaagttggagaagaagctgagtatttgaatctaagtctggagaaatacatgtcgaggaatcagaggaagatgttggaagctaaagagagagcggattttgctaaggtacgagccgacgtgggagaaaggagctcacaatttttgccagcatatttgaatgagggaagctcaagcctattgagctcctggtgaagaaaccccaaagaggaatgcttgcaagaggccgttttccagtgggggggctgtcctctccaaaaatgctgaacaaagggatcgtttgaagagtgcacagcgtaaagctttggatgttctgaacacagtagggctctccaattcggtactgaggctcattgagaggcgcaatcgtgttgatacttggatcaaatatgccggtatgatcgcaacacttgtcatattatatctgttcataagatggacacgctaagccgaagaaaatcaaacggcttagttgcacagatggttgtttatgccctgtaacaagacatttttggcatctgatcttagctcatcaagttgtgattgtaaaaatagtttcctttgcattgaatacaaactaaaactaaagctgaatcaaagtgacttttactatgttggcacagtaatgaaaaacaagagtcaaaaaaaagnaagnnnnnnnnnnnnnnnnnnnnnnnnnnnnnnnnnnnnnnnnnnnnnnnnnnnnnnnnnnnnnnnnnnnnnnnnnncaat

SEQ ID NO: 99684 - DNA, 588 bp, Arabidopsis thaliana columbia
  unsure (1)..(588): unsure at all n locations
nnnnnnnnnnnnnnnnnnnnnnnnnnnnnnnnnnnnnnnnnnnnnnnnnnnnnnnnnnnnnnnnnnaagattcttttttncncccacgcgtccccccacgcgtccgagttagtgtgtctctctcgccggccgatatggccgcctccgtagcaaactgctgcttctccgtcctcaatgcctccgttaaaattcaatcttcgtccatctcctcaccgtggtgtttcgtgtccgcatcgtcgttgactccccgagcttcctccaatattaagaggaaatcgtcgaggtctgattcaccatctcctatattaaacccagagaagaattacccaggtagagttcgagatgaaagttccaatcctcctcaaaaaatggctttcaaggcttttgggtcacccaaaaaggagaaaaaagagtctctttctgattttagtcgagaccaacagactgatcctgccaagattcacgatgcatcctttctcaacgctgttgtcaaggtttattgcactcatactgctcctgattactccctcccatggcagaagcaaaggcaatttactagtactggaagtgcttttatgattggagatg

SEQ ID NO: 99685 - DNA, 515 bp, Arabidopsis thaliana columbia
ctatacgactcacttagggaaagccggtacgcctgcaggtaccggtccggaattcccgggtcgacccacgcgtccggaaaaaaaaaccttcaccgtctctgctccgcgacgccgccttcgctttctcaaactccgatataatccttctcagagatatgtcagtaatggatgaatcaggcatgtttaacgttcaacaaaccattggaagtgtattgtgttgcaagtgtggtgttcccatggcaccaaacgcagccaacatgtgtgtgaattgtcttcgttccgaagtcgatatcaccgaaggtttacagaagagtattcagatcttctattgccctgaatgcacttgttacttacagccaccaaagacttggatcaaatgtcaatgggaatctaaagagcttttgacattttgtatcaagaggttgaagaatctcaataaggttaagctgaagaacgctgaattcgtttggactgagcctcattccaagaggattaaggttaagttgactgttcaa

SEQ ID NO: 99686 - DNA, 683 bp, Arabidopsis thaliana columbia
  unsure (1)..(683): unsure at all n locations
nnnnnnnnnnnnnnnnnnnnnnnnnnnnnnnnnnnnnnnnnnnnnnnnnnnnnnnnnnnnnnnnnnnnnnnnnctttttttttttttttttaaaataactaaacaatcaatgtttatataataaagctacgagagctgttcaagaagaaatggttttaagggtaaaaccaaagtatcgttgagacatacatttaacagaccctaaaaaccctaacttcgaaaaaccaaaaccatcttgtttgatctaattcttgttttttgttttagtttcgaaaaatccccgacgatagttaaatacttaaatcttaaaatccaaaaccacctcgagaatcccaaaaataaaagataaattttgaaagagagaggtttaggaaataaaataaaaataaaaagattgaaaaaatgtaattacgagaatttagaagtgttctcggcgagtttagccagcgattgcaagttgcaccgtactatagtatcagcaaagctacaagtctcttccttaccgttacccgcgggtacgtcaacgncgtatgactcaacgacacgtgtcctcttcttgccgtcggagtcctcctccgactcatgcacccgcgtcaccgacttgtagttcatgagtctgtggtccccaccaacgacgctgaaactgatgacgtggcgatcatcgtccatgatctcaagccctc

SEQ ID NO: 99687 - DNA, 506 bp, Arabidopsis thaliana columbia
  unsure (1)..(506): unsure at all n locations
nnnnnnnnnnnnnnnnnnnnnnnnnnnnnnnnnnnnnnnnnnnnnnnnnnnnnnnnnnnnnnnnnnnnnnnnnctttttttttttttttttaagcgaatatatggttactgttatatatttttaatttttttacccttgaaaatttagacaaaagaaattaaaaaaaaaaactccaaaattttttatttagggcttttccttaaaggagtgaagctaatccggtgacagccttcacttctctctccaccgccacgtcatcatcgccgtcggttggagaggaggaagaattaacaatcactctcggagataaacatttctcctcaaaaaccagctcaatctctacactatccacctccttctccaccgccgcatccgccgccgtaacatccgtcaccgtcaccgtctcatcgacaacaacaacggaagctcgcgtataagaagagagccatttagatcgcatgtactcagctttcctccacggaggaaaaggcattcctttcttctt

SEQ ID NO: 99688 - DNA, 511 bp, Arabidopsis thaliana columbia
  unsure (1)..(511): unsure at all n locations
gaatgtnnnnnnnnnnnnnnnnnnnnnnnnnnnnnnnnnntgcacgcgtacgtaagcttggatcctctagagcgtccgcccttttgttgtggcttttgtttcgtcaaaaagttgtttattactttccacaaagttgtaccaacagtgttaaaacttaagtgatcgtagtaaaagtaaaacagaaatcgtatgaaacatcatggagctaatcttgtatgacaaaatagtatagagttctcttctacctgggatgttatgttgtttacagatagacctcagaaaaagtaaaacaacactggagtttcagaacctatccaaaccaacagcagtcacgggttagttgcaagctgccaaatcttgaccatcccatcatcactagccgacgcatgcaaccgggtcccctcaccgggtgaccattggacagaggtgacatcattttcatgtgcttctttcttcttcagcaaaagatgttatgaaggtccatcaacagagtcatgttggctggccacaa

SEQ ID NO: 99689 - DNA, 581 bp, Arabidopsis thaliana columbia
cacgcgtacgtaagcttggatcctctagagcggtcgacctgggtttttattcccttttaaaccaaaccgaaatcaaatttcgacactctttacaaaggaaaacttgtgcgtttgttacaacaaaatgagaaaaatacagccgagagagagattacgtaaatattcttacactaacaacccaacaaactctctaccattcgggaaatagtgagcaaccaagtgggaaaaatggaatatataaattatatttacgttggggctgaagggtataaagaattttgatttgagaatgtgttggtgcttcatatcatctccgtggaggatcctgaatcaggttcatttcaactcccacgggttgggattctctgaaagttccaagcttttcagcctccctagctatccgaacatcggaaggtctgtaatactccactagaaacttgatggcgaatctaggaagcaatgatgtcacaactattgctagcaagcagaaccagaacatccatgtcttgcccacttggaaaattgcccagtaaccagggagtgtgggtataacatcaatcacaatgacacatatacaagct

SEQ ID NO: 99690 - DNA, 614 bp, Arabidopsis thaliana columbia
  unsure (1)..(614): unsure at all n locations
cgattnnnnnnnnnnnnnnnnnnnnnnnnnnnnnnnnnnnnnnnnnnnnnnnnnnnnnnnnnnnnnnnnnnnnnnnnnnnnnnctttctttttttttttttttgattcaaatatgaaattttaatagaaatattccaatgacaaaggtctttttagtcttgcaaacacacacaccaaacacgaaaataaaagattcaaatatgaaattgttcttaaccaacagcaacgcctccaattttttaagagatcaaagaaagaaaacaaatgatattcatattcttcaaagctttgaaagtaaaccagtctgaagagctttcggtgctacaacctctttgacttcactctccttagtctccaattcgcatggattcggtggcacatctactgccggtgagcagttgaaaaatccatgtggcattagtgtgaaaccaatatgttcgacgggcataaccggccaatcttcaagtctaggaacatgtgtgatcccaaacacgtaccaaagacgacgtcagatcttccaaggagcgattctgttccacccatgtggcaagaccttcaccagccgggggtttggttgggatcccccnggaactcccgcnggggaangggaccat

SEQ ID NO: 99691 - DNA, 660 bp, Arabidopsis thaliana columbia
  unsure (1)..(660): unsure at all n locations
nnnnnnnnnnnnnnnnnnnnnnnnnnnnnnnnnnnnnnnnnnnnnnnnnnnnnnnnnnnnnnnnnnnnnnnnnnnnnnnnnnnnnnnnnnnnnnnnnnnnnnnnnnnnnnnnnnnnnnnnnnnnnnnnnnnnacaatttaacaatcatattgcaacgagcccaaaaaaataatcatttacattatttcttttttctgttcacatttttatcacatgtttacagaattataaaattctcatgtcccggatttagtttgatctcattgacatgttggaaattgggatcccagcattgtacatgctacttccatcaatttacctcttcttggtttaggggctttcttgacaactggaacgccggttttcttctcgaccggagttttttcctccgggaacaaaacaccgtcaatcccttgaaccgaaatccgtccatcggtataaatatcaggatcgaacaaataagccgaaccatcaccatgaccgaacttaaccgaaccatctgcctcctggagcctctacttttatgaggaaaccggagtgaaccggaccggattttncccaaaccggngganagaattgggaaaaaaccccccttcnggtttggggatnccggggangnatggggaaanananaaatttggccntggggcccccgggttc

SEQ ID NO: 99692 - DNA, 691 bp, Arabidopsis thaliana columbia
  unsure (1)..(691): unsure at all n locations
cccaagcgtccgcagatccctttttctctctcttttctttccctctataaaatcgcgtcctgctatagtgagtttagaaagaaactgatagtagaaaaaaaaagagagaagaaaaatggtgttgacaatctatgctcctttattcgcttcttcaaagagagctgttgtgacattggtggagaagggagtatcattcgaaactgtcaatgtcgatctcatgaaaggagaacagagacagcctgagtatctcgcgattcagcctttcggtaaaatcccagtcctcgtcgacggagactacagaatcttcgagtcgcgtgcgatcatgaggtatatagcagagaagtataggatcacacggacctgatctttttggggaagactattgaagagagaggacanntagagcaatggttagacgttggaggctacaagttaccatccacccactatttgggttttaacgctcaacattgtctttgggaccacttatgggtttcccctgctgntgaganagttttttaaggagagtgaaggaggaagcttggagnagttncttggttgtcttttaagntcangnttcntaagaacgantactgggtggnnttnnggggagctntngttgtttnggttcacccccctccaccaatntnttttnggccctttggaaggtcattggccaanttngcanntt

SEQ ID NO: 99693 - DNA, 657 bp, Arabidopsis thaliana columbia
  unsure (1)..(657): unsure at all n locations
ccggttctatccaactcttttagggaagagctggtccccctgcaggtcccggtccggaattcccggttcgacccacgcgtccgaaaaaaaaagagagaagaaaaatggtgttgacaatctatgctcctttattcgcttcttcaaagagagctgttgtgacattggtggagaagggagtatcattcgaaactgtcaatgtcgatctcatgaaaggagaacagagacagcctgagtatctcgcgattcagcctttcggtaaaatcccagtcctcgtcgacggagactacaaaatcttcgagtcgcgtgcgatcatgaggtatatagcagagaagtatagatcacaaggacctgatcttttggggaagactattgaagagagaggacaagtagagcaatggttagaccgttgaggctacaagttaccatccaccactattggctttaacgctcaacattgtctttgcaccacttatggggttccctgctgatgagaaagtttttaaggggagtgagggaagcttccagaagtccttaatgcctttgaggccanttttctaggccgatacttggtggggttttttngcttgctgctttgcccctcccttcccggaccttttggcctttggaggccnttgccaaggtgggnttttccgtttt

SEQ ID NO: 99694 - DNA, 1036 bp, Arabidopsis thaliana columbia
  unsure (1)..(1036): unsure at all n locations
aggtacactatagaagattatgacgtcgcctgcacgcgtacgtaagctccggattgtggaaaaaaaaagagagaagaaaaatggtgttgacaatctatgctcctttattcgcttcttcaaagagagctgttgtgacattggtggagaagggagtatcattcgaaactgtcaatgtcgatctcatgaaaggagaacagagacagcctgagtatctcgcgattcagcctttcggtaaaatcccagtcctcgtcgacggagactacaaaatcttcgagtcgcgtgcgatcatgaggtatatagcagagaagtatagatcacaaggacctgatcttttggggaagactattgaagagagaggacaagtagagcaatggttagacgttgaggctacaagttaccatccaccactattggctttaacgctcaacattgtctttgcaccacttatgggtttccctgctgatgagaaagttattaaggagagtgaagagaagcttgcagaagtgcttgatgtctatgaagctcagctttctaagaacgaatacttggctggtgattttgtgagtctagctgatttggctcaccttcctttcaccgagtatcttgttggtcctattgggaaggctcatttgatcaaagataggaagcatgttagcgcttggtgggataagattagtagccgtgctgcgtggaaggaggtttccgctaagtactcactacctgtttaaacaaggagatgttgacttggggggtttgtgtgagctttgtgttctttgagggagttcgttttcgggtcgattgtcttgttgtttcaataagaaacggaactctgtctcatttgttgtctctggtttcttgtattctgtaacttttcaagcttttcaataagagtttaaaatcagagtgactcaacccctggtttttcccccttttcagtgtaggtctttgataaaaaaaaaaaaaacaaaaagnnnnnnnnnnnnnnnnnnnnnnnnnnnnnnnnnnnnnnnnnnnnnnnnnnnnnnnnnnnnnnnnn

SEQ ID NO: 99695 - DNA, 667 bp, Arabidopsis thaliana columbia
  unsure (1)..(667): unsure at all n locations
nnnnnnnnttcctctagagcggccgccctttttttttttttttttgcatgcaatatatatttatattttttcttttggttttggtgtggaaaatattgcaatcgttcgtacgtatatttttacaaaatattaaaaccaagcccatgcaaaacacatatacaccaaagtcaactttctttttcaaaagtcaccgaaccagaggttataaaactttcactcaagaagaggaaccagaactcggaggagcagaggaggaagaagaaaaaggttcttgatctgcgcatgacagcttctcgtgaggaccagcttcttctcgtccaacacctatcagatcaagataatacaaataatgagaaacaatgttgttcatctcatcgttatcgaatccgctgttgcagatttgatcgccgtaaagaacgtttatggtggctccaaaccccggagttcgttttgcagcagtgtcattctttgttggcttccattttccgacgaaaacatcgtgcgccgacggtaaatgcttcttcggtggcgtcatccaccgccaaatcgccgcttgaaacgctaacgtagcattgttctcgagatactctggatgactcagtagatccggacgcgtgggtcgacccgggaattccgggccggtacctgcaaacggacaattcaaatg

SEQ ID NO: 99696 - DNA, 497 bp, Arabidopsis thaliana columbia
gcacgcgtacgtaagcttggatcctctagagcgtttcgcccgtttgtgtaaatcctttttttcttacacgactaattataagcaaaaggttataaccacacgtgagccttagaccaacaatccaaccccgccgaaagctcaaacattggctctaaactaactaatcaccaactaaaaaaataaacaaaaacgaaatctctctaagcgggagaacaacgaagaagaatccctaagacgttctaggtgaccgcatcacacctccggcggacctcccctcgccgtccggtcaaaacaccgcgaacactcaactgctgcatagctccggcaaagtcgttaaagaaccgagagcgcgctctcgcgtataactcaacgaacggacgggttcccgggccggagaataaaccgcgacccgattcacggaacccgagaccttccggaatatcccggaaatacatattatcgaatttgttcggagtcataacgtcgttgaagacaga

SEQ ID NO: 99697 - DNA, 615 bp, Arabidopsis thaliana columbia
cgctaaccctaggtcatggctgggatgtacaatcaagacggcggcggaggtgcgcctattccgtcgtacggtggtgatggatacggcggagggggaggttatggaggtggtgatgctggatatggtggacgcggtgcctctggcggaggtagttacggcggacgcggtggttacggtggaggcggtggtagaggaaatcgaggcggtggaggtggtggatatcaaggaggtgatcgcggtggaagaggaagtggcggcggaggcagagatggagattggcgttgtcccaaccccagttgtgggaacgtgaactttgcaaggagagttgaatgtaacaagtgtggtgcacttgctccttctggtactagttctggtgctaatgatcgtggaggtggtggatatagccgaggtggaggtgacagtgatcgtgggggtggtcgtggtggtagaaacgatagtggtaggagctatgagagtagtagatatgatggtggaagtaggagtggtggtagctatggtagtggtagtcagagggaaaatggttcgtatggtcaggctcctcctcctgctgcagctattccatcctacgatggttctggaagttatcctccaacc

SEQ ID NO: 99698 - DNA, 509 bp, Arabidopsis thaliana columbia
  unsure (1)..(509): unsure at all n locations
ttnnnnnnnnnnnnnnnnnnnnnnnnnnnnngtcgactgcacgcgtacgtaagcttggatcctctagagcgttcgccctttttttttttttttttttagtggaaacgtttatgcattttaaaagaagcatataataatcgtataccaatgtaatcacattgagtagtttggactctcccttctatatttctcccaccaatgctacaaacaacagcaagttccatttccaatgtatccaacactggaagagttttttttttcctcaccatctacggcgtctcctcccataccaaaacgcgaacgcagccacagatgcagccacaacgactccagtagctgcgtgccatacatacaaaggcttctttatcatgaccacacttgcagattgcttcaccatctcagcgctcggaatatccttaacttcaggaactttctgctgactcacaaccgtgtgagcaaacccgagtccttctctttccaattcttccaaatcaatagtcacagctggt

SEQ ID NO: 99699 - DNA, 626 bp, Arabidopsis thaliana columbia
caattctcaaacaaaacaaaaaggatgaaaatgcaaacactaaacttcacttcttctctcttgttcttgtcttttatcttcctctcatgtgctctgcttatctcatcacaacaatctccatcacagccacattctgagcctccgtcacagctaccttttgagcctccggtagagtcaccattcttccctccgtcacagccaccaatattcgtgccaccgtcacagccaccttctttgcctccgtcacagtctcagtcaccttctctcgcttgcaagtcaactccataccctaagctttgccgtacgatcctcaacgctgtcaaatcctcaccgtcagatccttaccgttacggcaaattcactataaagcaatgcctcaagcaagcaagccgtctatccaaagtcatcaccagttacgcgcggcgcgtggaaagcaaaccaggctcggccacggccgaggaaataggggcggtggcggactgcggcgagttatcggagctgagtgtgaactaccttgaaaccgtcacgacggagcttaagacggcgcatgtgatgacggcagctctcgtctagcatgtgaacagtcttctcagtggtgtagtgacgaatcatcagacgtttcttga

SEQ ID NO: 99700 - DNA, 707 bp, Arabidopsis thaliana columbia
  unsure (1)..(707): unsure at all n locations
nnnnnnnnnnnnnntaggtgcaactatagaagagctatgacgtcgcacgcacgcgtacgtaagcttggatcctctagagggctggcctttttttttttttttttcttttgttattgccaaaccttgaatcgtttccagaccaaaacaaaaattctccgatgttcactacgaaaaacagacgacattaatttagctcaaaaaaaaaatacaataccagggtttgttaatgttgcatccctttctattcagcgctcttagacttcttcttcttcttcttggtgctgtgaccatcatcagtctcctcttctcctccagctttactcttctttggcttcttcttctctgatttctcgttctcctctgcaggctccatcctcctcttctctgtcttcttctttttctctgacttggcctcctccatggccacacacctcttcttcgttcttcaccctgtgccttcttcttcttgcttttcttccccgaggcatcaactgggctccttcccttcctctgctggcttagattctttatcacctccttcattacatccacgttcttgcgtgagcaacacctttgcatagagatttagcctttcctaacttggtcgcgaacctttcaccanaagcgtagttgaccatcagcaaaacatcaatccgggatgctataagcacttgtttcaagatacaagcgatacggccttgtctaac

SEQ ID NO: 99701 - DNA, 594 bp, Arabidopsis thaliana columbia
  unsure (1)..(594): unsure at all n locations
gattgtnnnnnnnnnnnnnnnnnnnnnnnnnnnnnnnnnnnnnnnnnnnnnnnnnnnnnnnnnnnnnnnnnnnnnnnnnncttttttttttttttttttttttcgaatgacactagttgctaagattcaataaaaaccttactaattacatctgaatcacctaagtgattttagattcaaagaaaggggaaaaaacacaaccctaagttaaaaaatgtaaagagcatatcaacaccaagacgcgacgaattttgcactttacagagatattgctagaaagaaaaagaagtcaaaaggataatgttaaaataagggattcctttgcggttttgttgattagctttgtagacttgtttgttgttgttgttgggggtcttctagttgctctggttgaggaactgtaacacctccattcattcttgctcgagcttctgcaaacatcctctgttgttccgctgccgcctcttcttccggcatctctgccccgctatccatcttcacactctctgggaaccccgcaggggnccaaattnatgttgcccaacgngggannaanttctctangatccccaagccngaccngnaagcttgnna

SEQ ID NO: 99702 - DNA, 525 bp, Arabidopsis thaliana columbia
  unsure (1)..(525): unsure at all n locations
nnnnnnnnnnnnnnnnnnnnnnnnnnnnnnnnnnnnnnnnnnnnnnnnnnnnnnnnnnnnnnnnnnnnnnnnnnnnnnnnnnnnnnnnnnnnnnnnnnnnnnnnnnnnnnnagcttcaaaggataaatccaactgaagcgagaataatgatcaataaagactgcttaatatctaaagccttgtacagaagtaattggagagggtccccacaagtcacagtgaaccctctcaagaggtctatttgaagtaaatgaagaagaaacaaatggcagcctagtgctcttcccaagctgacatgcttcacagagtgacttagaagtcttattgatagagatagagttggtcttgaccagttgctgcaggacttgaggatgaggatgtccaaggcgtctgtgccacactttatcacttgcggactgttgacgagtggagaaaaaagccttgaactgagagtcacccttcagacaatataaaccatcacaggtgcttcccattatgagaagcttcttggttgcctgatgagga

SEQ ID NO: 99703 - DNA, 496 bp, Arabidopsis thaliana columbia
  unsure (1)..(496): unsure at all n locations
taggtcacctatagaagatcttgacgtcgcatgcacgcgtacgtaagcttggatcctctagagcggccgcccttngggtttgggtttttttttttattttttttttttttgaaaattatggcccaattaaaggcttgcataatatctaaagccttgtacagaagtaattggaagagggtccccacaagtcacagtgaaccctctcaagaggtctatttgaagtaaatgaagaagaaacaaatggcagcctggggctcttcccaagctgacatgcttcacagagtgacttagaagtcttattgatagagatagagttggtcttgaccagttgctgcaggacttgaggatgaggatgtccaaggcgtctggcccacacttcatcacttgcggactgctgacgaggggagaagaaccccttgaactgagagtcatccttcagacaatataaaccnttacaagtgcttcccattatgagaagcttcttggttgcctgatg

SEQ ID NO: 99704 - DNA, 800 bp, Arabidopsis thaliana columbia
  unsure (1)..(800): unsure at all n locations
ttaggtgcacactatagaagactatgacgtcgcatcgcacgcgtacgtaagcttggatcctctagagcggctgcccttttttttttttttttttttagctagcagtcacaataaaattgatgatcctgaatatttcctaaaaggaaagcacaccatatgcaatcacatgttgctaccaagagactactagcatacacgagtatatggcccagagaaacaatttccataggaggattattacggacttaaaaagaaacaacaagggaaacagtgattacaacacaagattttaaagatgctgacaaacaaacaaacaaaaatctcacgggaagtggaaggtgaacgaataggagaggagagaaatggccataagagtcgtatgagacataacaaattagattaagcttatcctcagcggtagcttcgatacgaagggctgtacatgctgctctcagcacactgctccagctccttgggctgaggcaacctcgtggccagtcccagttccgtaggccttggcagccaccttagctgcaattacgagctggagattttcctgatattccctgaaagggagggtatatccatccccttcctccataggggtccctcccatcaggtccctcaagcccaaagcttctggatgcttgcccagaagcatgtcatccatgggcacgggtcggcccctganatttttagccccgggccccaaacccagggangntgttcgggtggtttccctgcccagggaaaanggtttcccccaaacctactgggggaatggggtccnttnaaaangg

SEQ ID NO: 99705 - DNA, 727 bp, Arabidopsis thaliana columbia
  unsure (1)..(727): unsure at all n locations
gccaccagaggcatgggcgtgaaatcgcgattcacctccactctcttggtgcaagagtcaccatcaattatgtctcgagctcatcaaaagctgaactcttggtttcagaactaaacgactcatctcaattaaagtcagcgatcgcagttaaagcagatgtgtcagacccggaccagatcaacancttgtttgatcaaacagaacaagagttcggatctaaagttcacatcgtcgtgaattgtgcaggtgttttggatccaaagtatccatctttatccgagacgacactagaagatttcgataacacattcacaataaacacaagagggtctttcttgtgttgcaaggaagcagctaaaagggttatgagaggaggtggtggaagaatcattatgatgtctacatcaatggttggtggtctcgccccgggttatggagtttacgcagcatcaaaggccgccgttgagacaatggtgaaagtgttggcgaaggagcttaagggaagccggataaccgcgaattgcgtggcgccagggccggttgcgacggagatgttttatgctggaaagagtgatgaaacggtgaaaatgcttgcaggggcttgtcctatggggaggatcggtgagtcaaaggatataacccgcgattgtagggttttttggccggttaatngtcggtnaaatngntttancggncaaggttttttngtgcccaattggngnctttt

SEQ ID NO: 99706 - DNA, 1217 bp, Arabidopsis thaliana columbia
cagctcgcaattaccctcactaaggggaacaaaagctgggagctccaccgcgggtgggcgggcgctctagaactagtggatccccgggctgaggtacgggtcgtttcctgtgtaagacttcacggtcatactcgccagattcatcgtgactacggatccagtcagctcgagtcgactggccggctcaatctttggttggatgtctaagacctgttcctggcagggactatatccgtagtttagcgctggtaagggaaaggggaaatgaacgagtatcatcatcatcatcatcgccgaaagaccaaaacgccgattgcgatttacttgttaaaaacgacgcctttgggatacggcgagaggagagcttttcagtgacgtcatgtcggttggctctgttacttctccgggaaccgttgatctacttttcgcttgtactccaccgtggctgttacgtgggctcgctagtggagcccaaggagtaatgggcttaggaagggcccaaatctcactcccttcacaactcgccgcggaaactaacgaacgtcgtcggttaactgtttacctgtcgccgatgaacggtgtcgtatcaacgagttcggtggaggaggtttttggagtggctgcgtctagatcgctggtttacacgcctttgttaaccggttcgagtggcaactacgtaattaacgggaaatcgattagagtcaacggggaaaagctctccgtggaaggtccgttggcggtggagctgagcacggtggttccttacacgattttagagagctcgatcttcaaggtgttcgcggaagcttacgccaaagctgcgggtgaagcaacatcggtgcctcctgtcgcaccgtttgggctctgcttcactagtaacgtagattttccggcggtagatctagcgttgcagagtgagatggtgcggtggaggattcatgggaagaatctgatggtggatgttggtggtggagtccgatgctcggggattgttgacggcgggtcaagtcgagtcaacccgattgtaatgggtgggctacaattagaaggctttatattggactttgatttgggtaactcaatgatgggctttggacaaagaacacgctctgatacaaattcgttgtaatacaggaacctgtgttatagaaacatacaaattgtctggtagatatcaacaatttgcggccgcgaattggatatcgtgctctaaaacc

SEQ ID NO: 99707 - DNA, 736 bp, Arabidopsis thaliana columbia
  unsure (1)..(736): unsure at all n locations
agacgcggcgctcttagtaatagctgcatcttggtattgtgaccctgcaggaggaccaactggtaacatctgcagaatcatgggcagacgtcacagatcgtggataggccgatttcttgggaaagaagagagacgaaacataaccagaggagactccgatcgcttcagagtttgagcagaaggttcatatttcagagccggagccagaggttaaacacgaaagtcttcttgaaaagcttcaccgaagcgacagttcttctagctcctcaagtgaggaagaaggttcagatggtgagaagaggaagaagaagaaggagaagaagaagccaactactgaagttgaggtaaaggaggaagagaagaaagggtttatggagaagttgaaagagaagcttcctggacacaagaaacctgaagacggttcagccgtcgctgcggcaccggtggttgttcctcctcctgtggaagaaagcgcatccagtggagaagaaaggggttcttgagaagatttaaggggaagcttccaggataccaccctaagaccaccgtngaggaggnggangaaagntnaaggnttngaagnttntccttaaagnttttnaggantaatgatgggtgatttcctttggttttttttttttaattgggtgnttgacnccctttnntttgnnatggnaagttnttgcctttttgggtcaatcctattnccccgaaatgggtttaaaanaaaannttc

SEQ ID NO: 99708 - DNA, 932 bp, Arabidopsis thaliana columbia
  unsure (1)..(932): unsure at all n locations
tgnaccccaaaggaaatnaanngggcttngggaagggcccaaaaannnttancncccctttnaaaaactcnncccngggaaaacttaacgaaacgtccgtcggcttaacttgtttacctggcgcccgtttgaacggttgccgtatcaacgaggtttcggttggaggggggttttggagtggctgcgtctaagatcgctggtttacacgcctttgttaaccggttcgagtggcaactacgtaattaacgtgaaatcgattagagtcaacggggaaaagctctccgtggaaggtccgttggcggtggagctgagcacggtggttccttacacgattttagagagctcgatctacaaggtgttcgcggaagcttacgccaaagctgcgggtgaagctacatcggtgcctcctgtcgcaccgtttgggctctgcttcactagtgacgtagattttccggcggtagatctagcgttgcagagtgagatggtgcggtggaggattcatgggaagaatctgatggtggatgttggtggtggagtccgatgctcggggattgttgacggcgggtcaagtcgagtcaacccgattgtaatgggtgggctacaattagaaggctttatattggactttgatttgggtaactcaatgatgggctttggacaaagaacacgctctgattcaacttcgttgtaatacagaaacctttgtaattgtaaccttctaattatctggtagatatcctcaattttgatctcttttgagggtactcttttcttacaatacctgctacaagcaatcatgcatttgtacaactaatagatctaatttaagaaacagctattacttaaaaaaaaaaaaaaagnnnnnnnnnnnnnnnnnnnnnnnnnnnnnnnnnnnnnnnnnnnnnnnnnnnnnnnnnnnnnnnnnnnnnnnn

SEQ ID NO: 99709 - DNA, 936 bp, Arabidopsis thaliana columbia
acgcggccgccaccgcatcccaaaccataacgcttaatccttaaaaaccgtccagatccatttccttcctctaaaactcatcacacacacttctaatggcttcttcttcttgtttgaatctcttcttcttctcttttctctccgctctaatcatttctaaatctcagatctctgattccgttaacggggtcgttttccctgttgttaaagaccttccaaccggtcaatacctcgcacagattcgactcggtgactcaccggatccagtcaagctcgtagtcgatctggccggctcaattctctggtttgattgttcctcaagacatgtttcctcgtcaaggaacctaatatccggtagctctagcggctgcttaaaggcaaaagttggaaatgaacgagtatcatcatcatcatcatcgcgtaaagaccaaaacgccgattgcgaattacttgttaaaaacgacgcctttgggattacggcgagaggagagcttttcagtgacgtcatgtcggttggctctgttacttctccgggaaccgttgatctacttttcgcttgtactccaccgtggctgttacgtgggctcgctagtggagcccaaggagtaatgggcttaggaagggcccaaatctcactcccttcacaactcgccgcggaaactaacgaacgtcgtcggttaactgtttacctgtcgccgttgaacggtgtcgtatcaacgagttcggtggaggatgtctttggagtggctgcgtctagatcgctggttacacgcctttgttatccggtcgagtggcactacgtatttacgtgaaatcataaagtcacggggaaagctctctgaaggtcgtggcgtgagctacacggggttctacacattaagagctgacacagggtcgggagctacccaactgggtgagcactcgtgctctgcgacg

SEQ ID NO: 99710 - DNA, 1076 bp, Arabidopsis thaliana columbia
cccacgcgtccgcccacgcgtccgcccacgcgtccgcccacgcgtccgcccacgcgtccgctgcttttgaatttcaaaccttcacataaaaaaaatacttttgaatccgtgtttcattcatcgaatctttttccgataactatggctgaggaaatcaagaatgttcctgaacaggaggtgccaaaggtagcaacagaggaatcatcggcagaggttacagatcgtggattgttcgatccacgcgtccgagaagaaagactaaacaaaaccagaggagactccgatcgcttcagagtttgagcagaaggttcatatttcagagccggagccagaggttaaacacgaaagtcttcttgaaaagcttcaccgaagcgacagttcttctagctcctcaagtgaggaagaaggttcagatggtgagaagaggaagaagaagaaggagaagaagaagccaactactgaagttgaggtaaaggaggaagagaagaaagggtttatggagaagttgaaagagaagcttcctggacacaagaaacctgaagacggttcagccgtcgctgcggcaccggtggttgttcctcctcctgtggaagaagcgcatccagtggagaagaaagggattcttgagaagattaaggagaagcttccaggataccaccctaagaccaccgtagagggaggagaagaaaggataaagaatttagaaggattattcattttaaaggatatttaagaaataaatggatgggttggaattttgcttttggttttttcttcttttttttttaatatggtggaatggatttgggaatccaatctttttttgggcttctttggggggaatgggggttaaaggcttttgggtttggggccttttttttattggtatgggaattaacccaaatattttcccttaaatttcttccctccctttgggaaattaagggggggctttttttaaaaaaaaccccaaaaagggaatccttccaaggggggatttctttaaatggggtatttggaaaatatttttttcatattttggattttaaaaaaaaaaaaaaaaaaaaaaaggggcg

SEQ ID NO: 99711 - DNA, 1013 bp, Arabidopsis thaliana columbia
  unsure (1)..(1013): unsure at all n locations
cagctcacttctgactttctatagggaaacctggcacgcctgcaggtaccggtccggaatttcacgggtcgacccacgcgtccgctgcttttgaatttcaaaccttcacataaaaaaaatacttttgaatccgtgtttcattcatcgaatctttttccgataactatggctgaggaaatcaagaatgttcctgaacaggaggtgccaaaggtagcaacagaggaatcatcggcagaggttacagatcgtggattgttcgatttcttgggaaagaagaaagacgaaacaaaaccagaggagactccgatcgcttcagagtttgagcagaaggttcatatttcagagccggagccagaggttaaacacgaaagtcttcttgaaaagcttcaccgaagcgacagttcttctagctcctcaagtgaggaagaaggttcagatggtgagaagaggaagaagaagaaggagaagaagaagccaactactgaagttgaggtaaaggaggaagagaagaaagggtttatggagaagttgaaagagaagcttcctggacacaagaaacctgaagacggttcagccgtcgctgcggcaccggtggttgttcctcctcctgtggaagaagcgcatccagtggagaagaaagggattcttgagaagattaaggagaagcttccaggataccaccctaagaccaccgtagaggaggagaagaaagataaagaataagaagattatcattaaagatattaagaataatgatggttgatttgctttgtttttttttttttttattgtgatgattgatcatcttttgcttttgtgatgtgtaagtttgttggcttttttgttgattacaatttcttattttctcttgtatatggtttttaaaaacaaaagatctcaaggtattttaatggtatgaatattttcatttgatgaagtgatatgcatgatataattttatgcnnnnnnnnnnnnnnnnnnnnnnnnnnnnnnnnntcnnnnnnnnnnnacat

SEQ ID NO: 99712 - DNA, 659 bp, Arabidopsis thaliana columbia
  unsure (1)..(659): unsure at all n locations
nnnnnnnnnnnnnnnnnnnnnnnnnnnnnnnnnnnnnnnnnnnnnnnnnnnnnnnnnnnnnnnnnnnnnnnnngacgtcgcatgcacgcgtacgtaggcttgggatcttttaagcgggccgccctttgggggaattctaattattatttttcaaagagaataagtttctgcacaaaataagaaagaatgttttttaaacacaaatttatgattaaaaaaaaaaaacagaatctcatccacatgaataacctaactctgattgattttttttggcccccaacaaaacaaaaaaaaattatgatccaacccgccggtttgaaaataaaattcccacatctcagttgtgtctccggtttggctaaaccaaacccattttatcggcaaagggttttcatcttctactacaaaagctacctttgattttctttcagactgggccggtcaagaccaatgaaaccttcctctactctctcctaatatagcaccaccattcgctgaaacgtcaatgcgaatgtcgatacaagtcgtaaggcgtccataatgcgtctaagggacaaggccgtttggaatcgagtcttatccagggcttgccactaccagaccaatgcagcaaactcacaggaccaggatgcaaatcacgacagctacctctaacattg

SEQ ID NO: 99713 - DNA, 1008 bp, Arabidopsis thaliana columbia
  unsure (1)..(1008): unsure at all n locations
gacaattagaaatttagaaccaaaacaaacgaaacttctctgcaatagccttctccaaatttcctcactttcacgcgtttcagtcttctctatataaacttgtttcatcaacccatcaaaatcccactcaaattctgtttcagtgttcttcaaattctcaatctttctctcaattcatctaaagggttcctcaaagtttcaatctttctctctgaatctaaaccatggctcgttgtagcaacaatctcgtagggatactcaatttcctagtatttcttctctcgatcccaatcttagctggtggaatctggctaagccaaaaagggtcaacagagtgtgaaagattcctagacaaaccagtgattgctcttggtgttttccttatggttgtagcaatagctggtctaataggttcatgttgtagagtcacatggcttcgttgggtttatctctttgtcatgttccttttgattctccttgtgttctgtataacagtttttgcctttgttgttactaacaaaggagctggtgaagctattgaagggaaaggttataaagagtataaacttggtgattactctacttggttacagaaacgtgttgagtatggtaaaaattggaataagattaggagttgtcttgtggagagcaaagtttgttctaagcttgaagccaagtttgttaatgttcctgtcaatagtttctacaaggnacatcttactgctcttcagtctggttgctgcaaaccttcagatgaatgtggtttcgagtacgtaaacccaacaacctgggccaaggnccacaaacgggggaccacacactaatccagactgccaaaacctggggcaaacgcaaaagnaaaagctctncttcgntttgtcaaatcttgtaaagcggggntactcggcaacgncaaaaancgctttggaggaaagttgcaattcgttaacancggcttccccttgcttcccaanantgcnncctnnttggtcntgnnttnaggacana

SEQ ID NO: 99714 - DNA, 606 bp, Arabidopsis thaliana columbia
  unsure (1)..(606): unsure at all n locations
ttaggtcaactatagaagagtctatgacgtcgcatgcacgcgtacgtaagcttggatcctctagagcggtcgccctttttttttttttttgtttttttttcagttaacagagtactttgttgaaccaaaccaacataaaatctcggagaatggcgtattgtagaatacagcacacagagtaattcagaacacgctaaaacaaagaatacaacctatatggtataaaaccaaaatttctcaagaatctaatgtaagaactcaaatctgctgagaaacattcccatctattgccatcaactggatagactaaccttttctaggcctagttccgtagcaactgctcgtagtaaaatttgcaccagctctctcacccgcatttcccttgataacacaatctcgcacagagagggaaaaaggacaagtaggtgtgcacgggtgtcacggttatcttcgcgtagaacgtttttcaggtagggttgcaacggaagacagatgcaacctcaggatgaatgctgaggcggtaaagtcttggagggnaaagatatcncttcagnnagtgtgggttgnnggtgccaagataattccgcgntaaatctcncaaatgat

SEQ ID NO: 99715 - DNA, 592 bp, Arabidopsis thaliana columbia
  unsure (1)..(592): unsure at all n locations
nnnnnnnnnnnnnnnnnnnnnnnnnnnnnnnnnnnnnnnnnnnnnnnnnnnnnnnnnnnnnnnnnnnnnnnctttttttttttttttttattccaatctaaatatatataatcatttgattaaggagaaatatagattagtggaatgtgtctaactatacaatatgaagataaaaacttgtagtcttatgctttctttcatttgcaaatccacagaccatacaaaaaataataatagtgaagagggctaaagtggaacaatctctaggtggttctgagacgttttctcgagaaccttcctggaatcttctatccggtcacacggcaaaatcggcatcagaaacttctaaaactttgtgggtaccaattgggttcacgcctgacttgaacatgttgccttcaatggacatttctttgaggaatggatgcctgtagaatgcgtcggggattctcccgggaaattgggtgtgatcaaggtacaggtaggccagttaaggatatgagcatggcaaagggaggtnccanaatttgtggaanccgggaacacccaagttgaagattgncccggcggnccccccccaaaggtnttccag

SEQ ID NO: 99716 - DNA, 1085 bp, Arabidopsis thaliana columbia
  unsure (1)..(1085): unsure at all n locations
ctcatcagtgtgaggacacagcagcgagactgctcgaggtactgctcaacaacgtgaagattagagattcaaaagccaccaagactgcaatcttgccattgtctcagtacctcttggatccacaaactcaagctcagcaggcgcggttactagcaactttggcccttggtgatcttttccagaatgaagctcttgctagaagcaccgatgcagcttctgcttgccgtgctttagtcaatgtccttgaagaacaacccacagaagaaatgaaagtagttgctatatgtgctctgcaaaatctcgtcatgtatagccgatctaacaaaagagcagttgccgaggcaggtggtgtgcaggtcgtcttggatctgatcagttccagtgatcctgaaacgtctgttcaggctgcaatgttcgtaaaactactcttctctaatcacaccgttcaagagtacgcatctagcgaaaccgtcagagcaataactgctgccattgagaaagacttatgggccactggaaccgtgaatgatgaatacctaaaagccttaaactctttgtttaacaacttcccgcgtctaagagctacagagcctgcaacactaagtataccacatctagttacatccctcaagacaggatcagaagcaacacaagaagctgccttggatgcattgtttcttctcagacaagcttggtcagcctgtcctgccgaagtttccagggcccaatcagttgctgctgcagacgncatccccctacttcagtacctaatccaatcaggtccaccacggttccaggagaaagctgaattcctcttgcagtgtttgccaggtactctggtagtcactatcaaacgtggtaacaacatgaagcaatccgttggtaacccgagtgtgttctgcaagataacactcgggcaacaatcctcctaggcagnccaaggtgatatcgncaggtcctaatccagagtnggacgggnaggttnttnatggtcattttgagagcctcccaaaggtcaaaaacttcccatttnatgaagggcaaaggaaaattnggaaaggntccttttgggaagtaacggtngc

SEQ ID NO: 99717 - DNA, 521 bp, Arabidopsis thaliana columbia
  unsure (1)..(521): unsure at all n locations
tgtnnnnnnnnnnnnnnnnnnnnnnnnnnnnnnnnnnnnnnnnnnnnnnnnnnnnnnnnnnnnnnnnnnnnnnnnnnnctttttttttttttttttttgaagtcaagtcaaagataaattaaaatctggattatggtcaactcaagattctactgcttcataatctttaatatatttgtatatacacaaatattaaaccatatagagaaaaaaactacatcacaaaaaatcacgtattcaataaacacacgcaaggtagcaataactcgttttctcgactgcaaaactttcccggaaaatgtatcttctttttatttagcatcgccataggaagaatctacgaggctgacgaacttcaccgtgccatcaccaccacacgttataaatccattcggacaaacttgtatgtcagtcaccccagcccggatgattccaccgtagcctctcgagtttggctgcagaaaagtgtgtctttcgtgtagtttaggccaatgatgaatcaactttgcagctttcgcatc

SEQ ID NO: 99718 - DNA, 594 bp, Arabidopsis thaliana columbia
  unsure (1)..(594): unsure at all n locations
ttgtnnnnnnnnnnnnnnnnnnnnnnnnnnnnnnnnnnnnnnnnnnnnnnnnnnnnnnnnnnnnnnnnnnnnnnnnnnctttttttttttttttcaaagactaagatttttatccataaaatgcctaattttgtaaaatccataaaagttgagtcggtttagaaaattgatttcatcatctactctaaaagccttaaacaaaacagtatcacaacgtttggtaataataatgtcttataacaacggtttagaaaaaacaccaaaccggttttaaattggttctcatcagttcttctttgtgagattaatgtcttgaggaaggagagtgtagtcgatgtgaaggtcctccaacattctcttaatggccaaagaaagttcggttcttctaagattcctctctctgttttcctgaaacgtgatggtgtggtcactgtatagggccatcttcagcttgttcatgttctctatctccttcaccaccaccgagtgaaccggtgcccaatgttgcgggttctgctccaagtactcggcgattctttctttgagatgtgctatcttagagacctggtgtcgagaaagagatagagaattcca

SEQ ID NO: 99719 - DNA, 511 bp, Arabidopsis thaliana columbia
cccacgcgtccgcacaattaacatttcctagcaaaaaccttaattgtgtttccatctcaggagtgattcgaagaaggaagtatctactagaagtcttcaactggtatatctcagagcaatggaaacacaattaaggtttttgctaggaaatgttaaattgggaagtcataagcggcatcagatatggttcttgaagaagtttcttttgggtccggagaaagaaacacttttgatagatatagtgagattcgtttgctgtgttattcatccaactaacgaaatcatcagatcagagatcatgccaagatgggctattataggttggcttttggaactgtgtaggcaaaatcatcacatcgagcgaagcgttatgctggctctgttttacgactggctcttctttgacgaaagaatcgataatattatgaatgttgaacctgctgctctcttgatggtatggtcaataccgcagtatccacacatcactcactccttacttgaattcttactt

SEQ ID NO: 99720 - DNA, 598 bp, Arabidopsis thaliana columbia
  unsure (1)..(598): unsure at all n locations
nnnnnnnnnnnnnnnnnnnnnnnnnnnnnnnnnnnnnnnnnnnnnnnnnnnnnnnnnnnnnnnnnnnnnnnnncttttttttttttttttgcattttgaagttattagattgaagggtgttattgtacaaataaccccaaaagaatttgaagaggatctctcaagtatacttgtgtgttgttcttgttacactgtaaaactctttataataggaaacaatatgtatgtatacatgaagaaacacaatgtaatcaagaatcaatggcatcaacaggaagtggaagttgttcttttcagacactttggtaccaatcctttctccaaacatctctttcaccgtatctcctccccttcctaacccggaaaccgaacccaagaacccgtcttccggggaaatttccacctcttctccggattccggccaccgggtttttagtggttcatcctgaatatctctaggctcaattgggcattgggctttaagccctcaaacctggtggaccggatttcaattttcngngggccccgcggnttanggggnaacggaaggtccgacccgaaaaggtancggaccgccnannaaaggtcgggggcggaa

SEQ ID NO: 99721 - DNA, 576 bp, Arabidopsis thaliana columbia
  unsure (1)..(576): unsure at all n locations
gaatgnnnnnnnnnnnnnnnnnnnnnnnnnnnnnnnnnnnnnnnnnnnnnnnnnnnnnnnnnnnnnnnnnnnnnnnnnnnnctttttttttttttttgtttccatttctgaattgattggatgtaaatttatccctattttcaaacaactaacacctataatcatatttcacaatattttttacactctcaaaaacatgaaaaataaagtgaggtaagaaaattttaccaaggcaaagaagagagacgtgaactccaagcttctcgtccttttcttccttcatctcgattacttacaaaagctttcttggtggatttgcttaactgaaacaatggatgcttacacaacctttgtaccggtccaatatttccattacccgatgaagtatctaaaacaccttcatgatcgtttctcttctttatattccaaaactcttcttcattgtcagcctctagcctacacagagtagccactctcaagaacttagggttattattgtttggtttctcagggcttaatatctcggagtgttgtgattcccattcttctgatggatcagatgtttgtttcttgagc

SEQ ID NO: 99722 - DNA, 752 bp, Arabidopsis thaliana columbia
  unsure (1)..(752): unsure at all n locations
nnnnnnnnnnnnnnnnnnnnnnnnnnnnnnnnnnnnnnnnnnnnntaggtcnnnnnnnnnnnnnnnnnnnnnnnnnnnnnnnnnnnnnnnnnnnnnnnnnnaatcctaaaactttttctttttctcgttttttttagtaatctttttattacagcattcaaattatagcagagtatgtacaatacaaggagaaaagattaaactaagatcagtgatcatcagctgtacataaagaagaaagatatgaaaataaaagaaagttaaagaagagacaaatgaaacccacaaatcatataaaggggctgtctggttttagattgtgttatttgaattcaaagtatttacattttttgttcttttttggggggaggggggtttcttccatcacgtctatctgctgccttaggaaccagcaaaaggatcaggaagcttgttgatgaatagcagggccaggaagcattgctattggccctatgaagtatttacatcctgaaaagagaccataagggtttgaagtagttggtgctgaaggtggtggtgaaattgaacttgatgccagaggtctcgagccctggtctggacagagaagatggggtttaccccccctaggggaaaacaaaacctgaaagttgtggagggaatttcactatttggcgctttatgtgggacaatttgcccaacaatgttttgttgccggcttgggaaaatatctgtgaacaaagccttaaatatcaaggacagggctttatttg

SEQ ID NO: 99723 - DNA, 506 bp, Arabidopsis thaliana columbia
taggtacactatagaagactatgacgtcgcacgcacgcgtacgtaagcttggatcctctagagcggtcgccctttttttttttttcttgtttcctttactttctgggttcttcattttattcttttgctttaaattcacactaattttccttcgctttagttaccactgtatctgtgtatagccttacccttatcatacactaaaactgcgcctggggcgtaatttagctgcaagaggattagccatctcacacgagagcctcagtttctcggacaagtcaacggtcttctcatcggacggcgtcagccattcaaactcatgcaaaagcgtcgcagtccaaaacgtcacggtggtcaaaccaagattcttcccggggcaaacccgacgaccggacccgaacggtgcaagcctcaaatcagacccaagaaccgagaactcaacctcaccttccttggctacaaaacgttcgggtttaaactccaacggattctcccacacgtgtgga

SEQ ID NO: 99724 - DNA, 580 bp, Arabidopsis thaliana columbia
  unsure (1)..(580): unsure at all n locations
ttcggncgccccccncaggccgntgttctttnccccggggaatggantgtggggccntcccgttntgctgacctnttcccggatccattgntttggcngtntggnaggtttctttggccncngatgctgctgngttttgancagggatccgttggaagaatgtattcccaagccccctcccgaatttggctttggaaagaatggtgagatggttaagaaatcaagtggaaacaggagcccgagatcgattgtggaaccagctaaggtatgcggaaaagccagcgaaatggggaaaccagagggttgctgctgctccgagaaacatccaccagcctctcgctgaagagatatgttgttaactagtcagagaagtcagagcagttcggtctgtgtatctttagccaccactgtacctttgtaatttttagtatttgcttccacaacaaaaatctgtaactttgtatctttatgatgttcattctcaaacttgctatcacaaaaatgtaaaaacataaaaaaaaaaaagtntaaacttttgaagggnaattgggnnctnggngtttnttttcccaaaaanatg

SEQ ID NO: 99725 - DNA, 620 bp, Arabidopsis thaliana columbia
  unsure (1)..(620): unsure at all n locations
atcctaatccgnttaccccgtgaaagtttaatagtacggatggaggaacttgagcaagttgcagcagatattttcctcggccaagatctagagttttgagaatggcgatggtatcaggaagacgatctactctaaaccccgacgcacctctttttattccggcagctgtacgacaagtggaagatttctcaccggagtggtggcaattggtgacaacttcgacttggtaccctgattactggatcagtcagcagcagcaaggcgcggatggtttctatgacaacggagagaatgagaatggtggaggtcatatcgatgtagctgatcttcttccagaatcatttgattttgatgatatgggagatttcctttgacactgatgctgctgaggtttgatcaaggnattccgatgggagaatgtattaccaagcaccttccgaatttggcttttggaaaaaatgggtgaaatgggtaaagaaatccaagtgggaccaggggcccnnnatccattgtgggcccanccaaagtattccgggaacccccccaattggggccccanggggtcctcntccccggaanatccaccacccccntnaanaantgtgnacagcngaagcngg

SEQ ID NO: 99726 - DNA, 781 bp, Arabidopsis thaliana columbia
  unsure (1)..(781): unsure at all n locations
cggtcgcgtgggcggacgcgtgggcggacgcgtgggtggcgatggtatcaggaagacgatctcaaaactctagatcttggccgaggaaaatatctagagttttgagaatggcgatggtatcaggaagacgatctactctaaaccccgacgcacctctttttattccggcagctgtacgacaagtggaagatttctcaccggagtggtggcaattggtgacaacttcgacttggtaccctgattactggatcagtcagcagcagcaaggcgcggatggtttctatgacaacggagagaatgagaatggtggaggtcatatcgatgtagctgatcttcttccagaatcatttgattttgatgatatggaagatttctttgacactgatgctgctgagtttgatcaaggattcgatggaagaatgtattaccaagcaccttccgaatttggctttggaaagaatggtgagatggttaagaaatcaagtggaaccagggagcccgagatcgattgtgggaaccagctaaagtatgccggaaaagccagcgaaattggggaaaccagaagggttgctgctgctccgggaaacatccaccagccctcgctgaaagagatatggttgttacctagtcagagaagtccgagccaagtccggcccgggtacctttagcccccactggacccttgtaatttttagtatttgctcccacaaaaaatctgaactttgggggccgaattcctgaacccgggggccccagtttaacggcnnnccggggggcccct

SEQ ID NO: 99727 - DNA, 965 bp, Arabidopsis thaliana columbia
  unsure (1)..(965): unsure at all n locations
cannnnnnnnnnnnnnntacgactcactattagggaaagctggtccgcctgcaggtaccggtccggaattcccgggtcgtcccacgcgtccgggtgaatgatcctaatccgtttagcttttaaaaaaataagaagacatatttatcaacttgatcaacttgagcaagttgcagcagatattttcctcggccaagatctagagttttgagaatggcgatggtatcaggaagacgatctactctaaaccccgacgcacctctttttattccggcagctgtacgacaagtggaagatttctcaccggagtggtggcaattggtgacaacttcgacttggtaccctgattactggatcagtcagcagcagcaaggcgcggatggtttctatgacaacggagagaatgagaatggtggaggtcatatcgatgtagctgatcttcttccagaatcatttgattttgatgatatggaagatttctttgacactgatgctgctgagtttgatcaaggattcgatggaagaatgtattaccaagcaccttccgaatttggctttggaaagaatggtgagatggttaagaaatcaagtggaaacaggagcccgagatcgattgtggaaccagctaagtatgcggaaaagccagcgaaatggggaaaccagagggttgctgctgctccgagaaacatccaccagcctcgctgaagagatatgttgttaactagtcagagaagtcagagcagttcggtctgtgtatctttagccaccactgtacctttgtaatttttagtatttgcttccacaacaaaaatctgtaactttgtatctttatgatgttcattctcaaacttgctatcacaaaaatgtaaaaacataaaaaaaaaaaaaaggaaaactttgcggaggcgaattcgatatcaagcttatcgataccgtcgacctcgagggggggccnnnnaacnnnnnac

SEQ ID NO: 99728 - DNA, 693 bp, Arabidopsis thaliana columbia
  unsure (1)..(693): unsure at all n locations
actatcgaagattatgaggtagactgcacgcgtacgtaagcttggatcctctagagctgccgcccttttttttttcttttttttttatgaacaaaagttagtttattaagcagttgaagaattttttttatcttcttacaacaaaatctaaaaatagtaaataaaaataacctaaagtatcaaaaacacataagtttccacggccataaaactatacacgacatgcctccctcaaaacttccaacttgagattttcttaaataatgcatttacatacagaagattcagaacttggagcagagtagcaatggacatgggagacaattcttcatttacttccctctggagaaatcatcccatgggtggtcttgaccaaagatttcgtcgataatgtttgaagttggaagcagatcaatgttcttagtccaacaatgatctggcagtattgaatcacaaggatcaaatgaatacgactggtccacaagatcattgcagtggcgccagtaattccccaatggtggnttcctcctcnatttccaactggggcatcgagagtagattcggtggggctgntcnccaagggcatggncgnanctccatagnataacccctccccttggcccctganngggtttttcgggttggcaccgngggggtcngnccnnaaaggggnggcnacccactgccccncnc

SEQ ID NO: 99729 - DNA, 382 bp, Arabidopsis thaliana columbia
tttctcgtgtaaggtgtattcaagagatttacaggggatgatgggaagtttcagcaatctcttacggaagatgctaaaggaatcctcagcttgtatgaagcggcacacttgggaacaacgacagattatatattggacgaagcgttcaagtgcacatcgagccacttgaagtctttattgccaggagggacgtgccggcctcatatcttaaggcttataagaaacacactttatctacctcaacgttggaatatggaagcagtaattgcaagggaatacatttcgttctatgaacaagaagaagatcacgataagatgctactcagattagccaagctcaatttcaagttattgcagctgcattacattaaagaactgaaat

SEQ ID NO: 99730 - DNA, 511 bp, Arabidopsis thaliana columbia
  unsure (1)..(511): unsure at all n locations
nnnnnnnnnnnnnnnnnnnnnnnnnnnnnnnnnnnnnnnnnnnnnnnnnnnnnnnnnnnnnnnnnnnccacgcgtccgcggacgcgtgggcggacgcgtgggcactatctatcctccataatatagtattcttcttttctctcctactttctctatagtaatggcttcgttacttctcacatcgtcgagtatgataaccactagctgtcgctccatggttctccggtcagggttacccatcggatcttcttttccctctcttcgcctgacccgtccatacgacaaggcgactctgttcgtctcatgttgctccgctgagtccaaaaaggtggcaactagtgctactgatctcaaacctatcatggaacggaggccggagtacattccgaacaagcttccccacaagaactatgtgcgtgtattagacacgacgcttcgtgacggtgaacaaatctcccggggcagcactctctcctcccaaccgggagaagattggngnnttgccaaggga

SEQ ID NO: 99731 - DNA, 531 bp, Arabidopsis thaliana columbia
  unsure (1)..(531): unsure at all n locations
cgattcnnntaggctcactatagaagtactatggcgtcccatgcacgcgtacgtaagcttggatcctctagagcggccgccctttttttttttttttttggatatttgtttttatttggatgtggttgcaaaatcgctacattacttctttccggacttagcagcagctcccttggctggggcagctcctcccttttgtcctgggagtttcttggtgacttccttgatgacaccgacggcaacggtttgtctcatatctctgacggcgaatcttccaagaggtgggtattcagagaaggattcaacgcacattggcttggatggaatcatcttaacgatggcagagtctccagacttgatgttctttgggaaggcttcgagctcctttccagaacgtctgtcaatcttggtgaggatttcgtggaacttgcaggcaatgtgagcagtgtggcaatccaagacaggggcgtatccgttgtggatttgtccagggtggttcatgataatgacttgagcattgaagaagtcagt

SEQ ID NO: 99732 - DNA, 954 bp, Arabidopsis thaliana columbia
acccacgcgtccgcttaaaaagccttctctctcttatctctctcaaatcttctagagagagaagggcttagtttttcttccgccatccggtgaatccggcaaagccatctggttgttaaaccagcttcagtccaacagcctccggctattatagaggaggttggttggcttttcactggcggtgttggctccctcagcaacgtcggccagttttctctccggcaacgatggctccgtagcaccgtttggctggctcctcttgtatgcggcatgttttcggctttctatgcgatggtgtccgcttttgtctctggtcattccaccgtcatctttccggtggttttggccagttatgtaccggtgttagatccggtttatttgtttctgttttacttttaataattctcattgagatgtgttggtgataatagtgatagcaatctcgatttctattgcttcttatccaatccactctcttttgagattcaatttgcaggaatattacagagatttgagttttaagatgaagaaaagaagttgattccttcgcttattatcattgccttaagctgttggtttaattggagtttcgattactttataccggcgaaaaatcagaagaatctatgtcgattgttatcggttgtgattccttcttcaccggaatcggtgctcggacgacaaaggaagaagtcggttcacttttaggcttctcatctcacacgtataggtctttctcctattgacgacacgtgatctgagatagagacaaattccagtttcttcttctgtaggaaatctctttgggccttgttgggtctaaataatttctgtaatcttgcattttgaataggcttttcttaggccttgtatgagttggatatgtttaatacaaaatttctcttgtgaaaaaaaaaaacttcactcaggttcatgtaacaagaaacaactttt

SEQ ID NO: 99733 - DNA, 528 bp, Arabidopsis thaliana columbia
  unsure (1)..(528): unsure at all n locations
nnnnnnnnnnnnnnnnnnnnnnnnnnnnnnnnnnnnnnnnnnnnnnnnnnnnnnnnnnnnnnnnnnnnnnnnnnnctttttttttttttttagtataaaatcataatctttcttttttcaaatttcaatatatacaagtaatctttatattcacgaagaatgaatcctttggtaataaaataaaaataaaaatatatagtttctttttgtaacaatcaatgggttttccttgttgttttagtcttcaacagcttcatcgaatacgattcacatgagaaaatggctcggcaactgcttttggtgcagctttttttgcagtctctggtactccaaaaacgttccaaaacctcagggtctcgtctcctgctgctgaagctacagtacaaccatctggactctgggccatatatagaactcttgatgtatgaccagtgagctcagccattttcaccatggatgggtacttccaaagtgtaagctgattctgtgtaaacccatgtgagctaagcaactctctttcattcttgc

SEQ ID NO: 99734 - DNA, 401 bp, Arabidopsis thaliana columbia
  unsure (1)..(401): unsure at all n locations
cccaagtgatataaatctataacaattcaagtattcaaccattcatcccaaatanccaggagncctcagtcccttgtaagttaacgggcttaaacatcaggctcaggcaggcaggcctcttgacattatctggaaataggttccttttttctgtcgactattgagtgtcaaccatattatttggaaacataaccatacaagtattaaaaacaattactccgaagtccctagtgatataaattcacaacaattcaaccattcatcccaagtaaccaaaagcctcagtcccttgtaaggtgtaaacgggtttaaacatcagcctcaggctacaaccggatacgatgaacatgttgcaacaccacacatggtctttgccatttccatctttgaagnaggccatt

SEQ ID NO: 99735 - DNA, 657 bp, Arabidopsis thaliana columbia
ctctgacttcgcatgcacgcgtacgtaagcttggatcctctagagcggccgccctttttttttttttttttatctggaaatagttttcttttttctgtcgactattgagtgtcaaccatattattgggaaacataaccatacaagtataaaaaacaattactccgaagtccctagtgatataaattcacaacaattcaaccattcatcccaagtaaccaaaagcctcagtcccttgtaaggtgtaaacgggtttaaacatcagcctcaggctacaaccggatacgatgaacatgttgcaacaccacacatgttctttcccatttccatcttgaagtagccattgtctccccattcacctccccatgagttctttataagccagtacgggacggccgcttcaactccataaccaactgctaacactgcatggtttacatccattggagtgtcaccacatgtattgctagtaaaaactcccttcttataaaacctgaattcatgtacaacctaaaacgcaacattaactgggccttaccagaaccgaccgaggtgctttaagttgaatcttttttgcacccccaggggtaattggtttgacaagaaattcaccgggtcttttgttaccaacgcggattttttttttcggcttgaaaaaa

SEQ ID NO: 99736 - DNA, 378 bp, Arabidopsis thaliana columbia
accacgcgtccgaaaagtttcgactcgtccaggggacttgatcggtctgagatcgtagtttcttcgcactccactagaatgggctcttctgcagaacaggtggagcgtacgaatgatatactcaatggtgattttataagccattggcataatttgcagtatggccgctcttgccagaattctcaacatccgcctgtgctgtatcctgctcctgttgtagtgccacctgcttatctccaggggcgtttaccatgggatggtcctggaagacctctggcttacaccaatgctgtgaatcaactcatgacctacggacctcgtcgtgtactcggttgctcctgtacaacctgttgcaaccaggccacccaccatttaccc

SEQ ID NO: 99737 - DNA, 552 bp, Arabidopsis thaliana columbia
gctctacacgactcactatatggaaagctggtacgcctgcaggtaccggtccggaattcccgggtcgacccacgcgtccggcattatttgaaaaaccagcgtttaaaaatctgatttgcaatggtcttgtacttgctgaggatgggaaaaagatggctaagaaattacggaattatccaccacctttggaagtcatagatgagtatggggctgatgctgtgcgattgtacctgataaattctccggttgtacgtgctgagccactacgcttcaaaaaagaaggagtactcggtgttgtcaaagatgtattccttccatggtacaatgcatatcggttcctcgttcagaatgcaaagagacttgagactgaaggtggtgtgccctttgttcctactgatctggcaactatacagtcagcagacattcttgatcagtggattcactcagctacgcagagtcttgttcgttttgtccgcgaggagatggatgcctatcggctgtacactgtggttcctcgtctcttgaagttcctcgacaatctcactaacatat

SEQ ID NO: 99738 - DNA, 527 bp, Arabidopsis thaliana columbia
  unsure (1)..(527): unsure at all n locations
cgnnnnnnnnnnnnnnctactatagaagagttatgacgtcgactgcacgcgtacgtaagcttggatcctctagagcgtccgcccttttttttttttttttatagatcaactacgtcctagtccaaaatctgtggttataactgtagtttataatagtaaaaataaaagcttacagtaaccctcttttcatcattgtaagattcataacaatgctcttaatatgaatatacaaatttcattttcaagagatatcgtaaagcgaaaacatattgttcaagaactagacttcgactggagacaatggaggaacatctactagcctttcaatttcttccaactggtcatatggagcaatctggctaaacccgtcgggccaggttatcgagacagcgtagtttcccattggtcgtatgtcctcaggttcgatatcttccgctacatcgccatattagaactttttgctctccagtccattcatccacactttgggcagatctatcatttcttctgacggttgcagggtgcag

SEQ ID NO: 99739 - DNA, 374 bp, Arabidopsis thaliana columbia
ataaaaactcactcactctcacttttttcatttcttcaacagaaaaaacctaaagctctcttttctctccagatttcgattcccgaggctcgagagaaaaccgtaaatcggcttctccgttcactcaatcaaccaaagatgcgtgagattcttcacatccagggtggtcaatgcggtaaccagatcggagccaagttctgggaagtggtttgcgccgagcacggcatcgatccaaccggaaggtacaccggagactcagatctgcaacttgagcgcatcaacgtttactacaatgaagcgagttgcggtagattcgttcctcgtgcagtgctcatggatttggagcctgggactatggatagtctcagatctgg

SEQ ID NO: 99740 - DNA, 457 bp, Arabidopsis thaliana columbia
ccgcctttctctctccctctcccttcttattcttctccttcttctccttcaccatctcgaggtcccaaaatcttcatcgagcagtctcattcatctcatcatgagagaaatcctccacgtccaaggcggccaatgcggtaaccaaatcggttccaaatttctgggaagttattcatgcggcgacgaacacggcgttgatccccaccggacgttatacaaccggtgattctcgccgccgatcttcagctcgaaccgtatcaatgtttattacaatgaagcttcttggtggtcgcgttacgttcctcgtgctgttctcatggatctcgagcctggtactatggatagtatcagatctgggtccctacggtcagattttccgtcctgataacttcgtcctttggtcaatccggtgccggaaataattgggcgaaaggtcattatactgaaggtgctgtac

SEQ ID NO: 99741 - DNA, 908 bp, Arabidopsis thaliana columbia
acgcgtgggtctctcctccatcatcgtcacttgcaaatccagctctccatttcttcatggtgggttttgcgcccctcacttcccgtggctcgcaacaaatgtgggactccaaaaacatgatgtgtgcagctgatccacgtcacggacgttacctcacagcctctgctattttcagaggacagatgagcacaaaagaagtcgacgagcaaatcctaaacatacagaacaagaactcgtcatacttcgttgagtggatcccaaacaacgtgaaatccagcgtttgtgatatccaccaaaggggctcaaaatggcggcgacgtttgtgggtaactcgacgtcgattcaagaaatgttcaggagagtgagtgagcagttcacggctatgtttaggcgtaaagcgtttctgcattggtacacaggagaaggaatggacgaaatggagtttacggaagctgagagcaatatgaatgatttggtcgctgaataccaacagtaccaagatgctactgctgatgaggaaggtgagtatgatgttgaagaagaagaggagggagattatgagacttgatccaccaaatcaaacattttacttaaaagacaaggaaacgactcttggaaatctctctatttaaatttgattgaaaaacattgaaaaaatgggaaatttgtttaaatgtgttttttgtttgagtaatttgttcaaagaaagtttgaagtttccatttattttgggtgtcttgtattttccatttgagataatacgtccttgcttctcaagctactgtgtagtatataaattttacacttctctcaaagaacaaaaaagaaaacaaacccatagagcggccgctctagaggatccaagcttacgtacgcgtgcaggcgacgtcataactcttctatagtag

SEQ ID NO: 99742 - DNA, 461 bp, Arabidopsis thaliana columbia
ggagtgagcaataataaaagctcacttactcacacttttattcatttctctgaaaacccttaaatctccggatttcgattcccgaggctcgaaaaaaccctaaatctcttctccgttcactcatccaaccgaagatgcgtgagattcttcacatccagggtggtcaatgcggtaaccagatcggcgccaagttctgggaagtggtttgcgccgagcacggcatcgatccaaccggaaggtacaccggagactcagatctgcaacttgagcgcatcaacgtttactacaatgaagcgagttgcggtagattcgttcctcgtgcagtgctcatggatttggagcctgggactatggatagtctcagatctggaccgtgtacggtcaggaccctttcggatctggatacttcgtctttggccaatccggtgctggtaccactgggctcagggtcactatttgta

SEQ ID NO: 99743 - DNA, 606 bp, Arabidopsis thaliana columbia
ggaataacagagacaattggttatattagctgtcactcccatctttcatattccttcaccatctctctctctctcgatcttgtgaaccactacacacactaacacaatgagagagatccttcacattcaaggtggtcaatgcggtaaccagattggttccaagttctgggaagtcatctgcgacgagcacggcatcgattccaccggacgttacagtggagacactgcagatctccagcttgaacgtatcaatgtctattacaatgaagcttcaggtggaagatacgttcctcgtgctgttcttatgggtcttgagcctggtactatggatagtatcagatccggaccgtttggtcagatcttccgtcctgataactttgtctttggtcagtctggtgctgggaataactgggctaaaggtcactacactgaaggtgctgagcttattgattcggtccttgatgttgttcgcaaagaggctgagaactgtgactgccttcaaggatttcaggtgtgccattccttgggaggaggaactggttctggaatgggaactttgttgatatctaagatcagggaggagtacccagaccgtatgatgatgac

SEQ ID NO: 99744 - DNA, 452 bp, Arabidopsis thaliana columbia
agaggttgatgaacagatgatgaacgtccagaacaaaaactcctcatactttgttgaatggattccaaataacgtgaaatcaagcgtctgcgatatagctcccactggtttgaaaatggcatcaactttcattggaaactcaacttcaatccaggaaatgttcaggcgtgtgagtgaacagttcactgccatgttcaggagaaaggctttccttcattggtacacaggagaaggaatggacgagatggagttcactgaagcagagagtaacatgaatgatcttgttgcagagtatcagcaatatcaagatgctacagtcggtgaagaggagtacgaggaggacgaagaagaagaagaagcctaaagaaaagatgattgattattacttttgtaaggctgtaagttcgtcgcactcatttccttttacctctttttctgaattgggattctct

SEQ ID NO: 99745 - DNA, 705 bp, Arabidopsis thaliana columbia
  unsure (1)..(705): unsure at all n locations
gaaggcgggcccccctgcaggacccggcccggaattcccggttctgcccacgcgtccgttctcttctcctttccctttttcacaatctctctctctctctctctttttagaccagtattatctctctgagcaagatgagagagatccttcacattcaaggtggtcaatgcgggaaccagattggttccaagttctgggaagtggtaatgcgacgagcacggtattgatcccacgggacgttacaggagatactcgagatctacagcttgaacgtgtcaatgtttactacaacgaggcatcctgctggaagatacgttcctcgtgctgttctcatggatcttgagcctggtactatggacagtgtcagaactggaccttatggtcaaatcttccaggcctgacaactttgttttcgggcaatctggtgctggaaacaactgggctaaagggcattacactgaaggagctgagcttattgatgctgtgcttgatgttgtgaggaaggaagctgagaactgtgattgtcttcaaggttttcaagtttgtcattctttggggaggagggaccnggtcctggaattgggaccactttcttaanttcnnaaaggttnngggggggatnntccnaatccgaatgntgatgacccttttcnggctttncccaattcccaagggctttgaaacaangttttttggcccannaaa

SEQ ID NO: 99746 - DNA, 531 bp, Arabidopsis thaliana columbia
aaaaactcttcctactttgtggaatggtttccaaacaacgtgaagtcaagcgtctgagacatagctccccgaggtctctcaatggcatcgacatttattgggaattccacatcgatccaagagatgtttaggcgggtgagcgagcagttcactgctatgttcaggaggaaagctttcttgcattggtacacaggtgaaggaatggacgagatggagtttactgaagctgagagcaacatgaacgatctagtctcagagtaccagcaataccaagacgcaactgcagatgacgaaggcgagtatgaagaagacgaggatgaagaagagatattggatcatgagtgagtgaaaagagctgatattaccgatttttaaatacctctcttatcttcttttcgtttggtcggtatatgtttattgagtttcatgtattgtttgtgatggtctgtgtgtaatagtgaggtcggatctacccttttatgcgtggtttttatatgaaattgtcagatagaagttttttatgctcttcct

SEQ ID NO: 99747 - DNA, 510 bp, Arabidopsis thaliana columbia
  unsure (1)..(510): unsure at all n locations
atcgatccaagagatgttcaggcgagtgagtcaccagttcacacctatgttcaggaggaaggctttcttgcattggtacacaggtgagggaatggacgagatggagttcacagaagcagagagcaacatgaacgatcttgtgtcagagtaccagcaataccaagatgcaacggctgatgaagaaggtgactacgaggatgaggaagaaggtgaataccaacaggaagaagagtactgagagtaatttagttataaaaaccgcttgaaaaaatcaatttagtcgtttgctactttttttcttttaaaaaaaaatgagaacctcaactaccagttgcaggtttatttctatgcttgtatttgactatatctggatgatgtttatgtactttgttttttaaatttggttcggtctttaaaaaaaaaaaaaaaaaaaaagggcggccgctctagaggatccaagcttacgtacgcgtgcaggcgacgtcataactcttctatagnnnnnnnnnn

SEQ ID NO: 99748 - DNA, 758 bp, Arabidopsis thaliana columbia
  unsure (1)..(758): unsure at all n locations
atgattcgccggacctaatacgacttacttagggaaagctggtacgcctgcaggtaccggtccggaattcccgggtcgagccacgcgtccgctcatcccattccctcgtcttcacttcttcatggttggttttgctcctctcacctcaagaggttcacagcagtaccgctccctcgactgtccctgagctcacccagcagatgtgggactgccaaaggaacatgatgtgtgctgctgaccctcggcacggacgctacctcactgccttccgctgtgttcccgtggcaagctgagcaccaaagggggttgacgagcagatgctgaacgttcagaaccaagaactcgtcctacttttgtggagtgggatcccccacaacggcaagtccagcagtctgtgatatccccacctacggggtctggaaaatggcgtccactttcaatttgggaacctcaaccttcgatccaggaagatgttcaggcgtgtggagcgacaacagttccccagctatgttacaggaggaaggctttccttcattggtacacaggagaaggcatggacgngatggagttcactgaagcaggagagtaancatggatgatnctttgtcgcaggggttccancagttcccagntnnntccagcccgaagaggagggttccgnggagggagaagggggggttcgggnctttaggtgttgnnaatggntccctnggttcgaaagntttttnnanaaggngttttactttttntttnccctt

SEQ ID NO: 99749 - DNA, 823 bp, Arabidopsis thaliana columbia
cagctctctacgactcactattgggaaagctggcacgcctgcaggtaccggtccggaattcccgggtcgacccacgcgtgcggtcatgccatcccctcgttttcacttcttcatggatggatcagctcctctcacctcaagaggttcacagcagaaccgctccctcacagtccctgagctcacccagcatatgcgggactccaagaacatgatgtgcgctagacacccaaggcacggacgctacctaacagactctgccatgttccgtggccaagatgagcccaaagggaggttgccgaccagatgctgaatggtcagaccaagacctcgtcctccttgtgtggagggggatccccaacaccggtgaaaccaacagcctgtgatatccccacctactggggtctgaagatggcctccactctcattggacactccaacatcgatccaagagatgttcaggcgaccgactgagcaggtcacagctatgtacaggaggcggaaggctttcttgctttggtacacaggtgagggaatggacgagatggagttcacagaagcagagagcaacatgaacgatcttgtgtcagagtaccagcaataccaagatgcaacggctgataaagaaggtgactacgaggatgaggaagaaggtgaataccaacaggaagaagagtactgagagtaatttagttataaaaaccgcttgaaaaaatcaatttagtcgtttgctactttttttcttaaaaaaaaaaaaaaagggcggccgctctagaggatccaagcttacgtacgcgtgcatgcgacgtcatagctagtctatagt

SEQ ID NO: 99750 - DNA, 1110 bp, Arabidopsis thaliana columbia
  unsure (1)..(1110): unsure at all n locations
tcactagtaggacgcgttgttcgtcgcaacaccctatagtgagtcgtattaatcagcttgtatagaacgctgatgaatgcatggtcctcgacaatgaagctctctacgatatctgcttccgtaccctcaaactcagcactcctagctttggggacttgaaccatttgatctccgcaacaatgagcggtgtgacttgctccttaaggttccccggacaattaaactctgacctcaggaaactcgcggtgaacctaatcccattccctcgtctccatttcttcatggtgggttttgcgcccctcacttcgcgtggctcgcaacaatacatctcactcaccgttcctgcgctcacccagcaaatgtgggacctccaacaacttgatgtgtgctgctgacccacgtcacggacgttacctcacaccctctgccatgttcagtgcagatgcccaagggagttccggccanttctgatttccagaccaagacctcgncnnctttgtggagtgacccccaaccaccgtgaattcgccagtctgtgacatcccacctactggtctgaagatggcatcaactttcatttggaaactcaccatcaatcccaagagatgttcaggcgagtgcagtgagcagttcaccagctatgttcaggagcaaaggctttccttccacgcgtacacaggtgagtcggaatggacgagatggaattcacagaagcggagagcaacatgaacgatcttgtgtcagagtaccagcaataccaagatgcaactgcggatgaagaaggtgactacgaggatgaggaagaaggtgaatatcaacaggaggaagagtactgagaataatttagttataactgctttaaaaacaaaaacaatttagtcgtttgctacttttcttttttttaaaaggaacacctcaactaccagttgtagtttttttctctgcttgtatttgacatatctggttgatgtttctgtacttttgttcttaatcttgttattgcctgtgatgtttctattaataaaaaaaaaaaaacaaaaanaaaaaaaaaaaacccaaaaaaaaagggcggcccctctagaggatccaagcttacgtacgcgtgcatgc

SEQ ID NO: 99751 - DNA, 675 bp, Arabidopsis thaliana columbia
gcaggtaccggtctcggattcccgggtcgacccacgcgtccggaacattcagaacaagaactcatcctactttgtggaatggatcccaaacaacgtcaagtccagtgtctgtgatattgcaccaaagggtttgaaaatggcgtctactttcattggtaactcaacctcaatccaggagatgtttaggcgtgtgagcgaacagttcacagctatgttcaggagaaaggctttccttcattggtacacaggagaaggcatggacgagatggagttcactgaagcagagagtaacatgaatgatcttgtcgcagagtaccagcagtaccaagatgctacagccggagaggaagagtacgaggaggaagaagaggagtacgagacttaagatgttgtcaatggctccctcggattcgtaagctgtgtaagcaagcagcattcactttcttctttccccttatcctgaatttttttcttcgtaatatctcttttattgtttcgttcatgtgtgttcgtttttgttattgaaaccctatatcggttctggatttgttaaacttttgcgtgtattgcttattgtttttgtcggtaaaaaaaatattgcttttgttctcttaaaaaaaaaaaaaaaaaggccgcccgctcaaaagaatccaagctaacgaacgcgggcatgcg

SEQ ID NO: 99752 - DNA, 597 bp, Arabidopsis thaliana columbia
  unsure (1)..(597): unsure at all n locations
attcaaagccaaggacaagaaaaaaaaaaaagagtcgcccattttcttctcatttttttttttgctcttgacgaagaaaccaaaaaaaaaaaaaatgagagagatccttcatatccaaggcggtcaatgtggaaaccagatcggagcaaagttctgggaagtgatctgcgacgaacacggcattgatcacaccggtcaatacgtcggcgattctccgttacagcttgaacgtatcgatgtctatttcaacgaagctagcggtggaaagtacgttcctcgcgctgttcttatggatctggagcctggtaccatggattctctcagatctggtccgttcggtcagattttccgtcctgataacttcgtctttggtcaatctggtgccggaaataactgggcgaaaggtcattacaccgaaggtgctgagttgattgattctgttctcgattgttttgaggaaggaagctgagaaccagcggtttttttttaaaaggttccccaagggtgcccaattcatatttggggggggacctggcccttggaattggggcctttnttggtttntaaggnnangagggntnccancccgatttgtgg

SEQ ID NO: 99753 - DNA, 766 bp, Arabidopsis thaliana columbia
  unsure (1)..(766): unsure at all n locations
gannnnnnnnnnnnnnnnnncacctcactcatctgnggcaaagccctggcacgcctgcaggtaccggtccggatctcccggctcgacacccacgcgtccggctcatcccattccctcgtcttcacttcttcatgggtgggttttgctcctctcacctcaagaggttcacagcagtaccgctgccctcacagtccctgagctcacccagcaaatgtgggactccaaaacatgatgtgtgctgcagacccaaggcacggacgctacctcacagcctctgccatgttccgtggcaagatgagcacaaaggaagttgacgagcagatgctgaatgttcagaacaagaactcgtcctactttgggagtggatccccaccaacgtcaagtcaacagtctgtgatatcccacctactggtctgaaaatggcttccactttcattggaactcacatcgatccaagagatgttcaggcgagtgagcgaccagttcacagctatgttcaggagaggaaggctttccttgcattggtacacaggtgagggcatggaccgagatggagttactgaagcagagagtaccatgaatgnncttntcgagggttccagcagtnccaagntnttcaacccgaggaggagggtcgntgngggagaggggggtcgggctttangtgttncaatggtccccggtttgnantttttanaagnagnatcatttttttncccaaccnnattttnttcgaaaaccttattttcgcaagggccgtttannc

SEQ ID NO: 99754 - DNA, 1120 bp, Arabidopsis thaliana columbia
caggtaccggtctggaattcccgggtcgacccacgcgtccggctgcttctttcaaggaagccatgaagatgggtgtggaagtttaccaccacttgaagtctgtgattaagaagaagtacggccaggatgccacaaatgttggtgatgaaggtgggtttgcaccaaacattcaggagaacaaggagggtcttgaattgctcaagactgctatcgagaaggctggatacactggaaaggttgtcattggaatggatgttgccgcttcagagttctactcagaagacaagacctacgacttgaacttcaaagaagagaacaacaatggctctcagaagatttctggtgatgctctaaaggacctgtacaagtcctttgtcgctgagtacccaatcgtgtccattgaggacccatttgaccaagatgactgggagcactatgctaagatgaccactgagtgtggaaccgaggttcagattgtcggtgatgatttgttggtcactaaccccaagagagttgctaaggcaatcgcagagaagtcttgcaatgctcttcttttgaaggttaaccaaatcggatctgtaaccgagagtatcgaggcagttaagatgtcgaagaaagcaggttggggagtgatgaccagccacagaagtggtgaaaccgaggacacattcattgctgacttagccgttggcttgtccactggacaaatcaaaaccggtgctccttgcagatccgagcgtcttgccaagtacaaccagcttttgcgtattgaggaggagttgggatcagaggcaatttacgctggagtcaacttccgcaaacctgtggaaccctactaaatggagcttttagaagcaaagtggtcttctttgtgacgaggagaagatgacctgagtttgatcatttgctttaattaaataaaacgttctgtttttgtttcttctttgtttggtttcttacgtcttttgttgaaccctttttgggaaaagttactcatttttgtaagggaaacatgagaatgctctgcctttgtcgaggacggtagccccttatttcaatctaatttcggctttaagggcgaccgctctagaggatccaagcttacgtacgcgtgcgtgcg

SEQ ID NO: 99755 - DNA, 746 bp, Arabidopsis thaliana columbia
  unsure (1)..(746): unsure at all n locations
nnnnnnnnnnnnnnnnnnnnnnnnnnnnnnnnnnnnnnnnnnnnnnnnnnnnnnnnnnncccacgcggccacgcaataaacagagggagtcgccaaattttctcatcattttctcgagaaaatagactaaaagcgattcccgagagaaagaaagaacaaaaaaaaaacatccgagtgaaaatgagagaaattcttcatattcaaggaggtcagtgcggaaaccagatcggagctaagttctgggaagttatttgcggcgagcacggtattgatcaaaccggtcagtcatgtggcgatacagatctacagcttgaaaggatcaatgtctattttaacgaagctagcggaggcaaatacgttcctcgtgctgttcttatggatctggagcctggaactatggattctctcagatctgggccgtttggtcagattttccggcctgataacttcgtttttggtcagtctggtgctgggaataacttgggcgaaaggtcattacacggagggagctgagttgattgattctgtgcttgaggttgtgaggaaggaagctaaaaactgtgatggtcttaaagggtttcaagtttgtcattctttgggaggaggaactgggttctgaatgggaacacttcttatntctaagattagagaggaatatccagatcgtatgatgatgaccttttcgggcttcccatctcctaagggctctgatccagttgttgagcatacaatgctactctttccgt

SEQ ID NO: 99756 - DNA, 1101 bp, Arabidopsis thaliana columbia
  unsure (1)..(1101): unsure at all n locations
ccgggccgacccacgcgttcgagcgattctcactaaaaccctcgaacacatcgcctttatctctttctctagatctactcgctatggctactatcaccgttgttaaggctagacagatcttcgacagtcgtggtaatcccaccgttgaggttgatatccacacgtcaaatggtattaaggttacagcagctgttccaagtggagcttccactggtatctatgaggctcttgagctgagggatggaggatctgactaccttggaaagggtgtatctaaggctgttggcaatgtgaacaacatcatcgggccagcacttattggaaaggacccaactcagcagactgctattgacaacttcatggtccatgaacttgacggaacccaaaacgagtgggggtggtgcaagcaaaagcttggagccaatgcgattcttgctgtgtctcttgctgtctgcaaagctggggctgttgtcagcggcattcctctatacaagcacattgccaaccttgctggtaaccccaagattgtgctaccagttcctgccttcaacgtcatcaatggtggatcccatgccggaaacaagcttgctatgcaggagtttatgatcctccctgttggagctgcttctttcaaggaagccatgaagatgggtgtggaagtttaccaccacttgaagtctgtgattaagaagaagtacggccaggatgccacaaatgttggtgatgaaggtgggtttgcaccaaacattcaggagaacaaggagggtcttgaattgctcaagactgctatcgagaaggctggatacactggaaaggttgtcattggaatggatgttgccgcttcagagttctactcagaagacaagacctacgacttgaacttcaaagaagagaacaacaatggctctcagaagatttctggtgatgctctaaaggacctgtacaaagtccctttntcggntgaggtancccaatcggtngtnccatttgagggaccccntttttganccaaggatggncttnggggaggcacctattggcttaaggattggnccccccttgnggtgttgggaacccgaagggtttcaagaatttntccgg

SEQ ID NO: 99757 - DNA, 968 bp, Arabidopsis thaliana columbia
  unsure (1)..(968): unsure at all n locations
actaatcgactcatttagggaaagccggtacgcctgcaggtaccggtccggaattcccgggtcgacccacgcgtccgcggacgcgtgggctgtccctgagctgacccaacagatgtgggattcaaagaacatgatgtgcgcagcagacccgcgccacgggcggtacctaactgcctcggccatgttccgtggcaagatgagcacaaaagaagtggacgagcagatgatgaacgttcagaacaagaactcttcctactttgtggaatggatcccaaacaacgtcaagtcaagcagtgtctgtgacatagctccaccgaagggtctctcaaatggcgtcgacatttcattgggaactccacctcgatccaagagatgtttaggcgtgtcagtgagcagttcactgctatgttcaggagaaaggctttcttgcattggtacacaggtgaaggtatggacgagatggagttcactgaagctgagagcaacatgaacgatcttgtctctgagtaccagcagtatcaagatgctaccggctgatgaagaaggagaatacgtaggaggaagaagatgagtacgagcctaagaagaaacttattgaagaaacagatgataagaacacctcaacttccagttgctgtttacttttaaaactctcttctattaagttcttatagtttctgtaaccatcgcttgcgttattagtagttatgatactctgcgtaggctaagaggatttcatccctcaatattcaaacaatctattttgctaaatcaaaatccatccatagtattttttttctttgtttcattatataaccttttgttaattttgactatgtgaattcggtgaagacttcaccatctttcaaataaaaaaaaaaaaaaaagggcggccgctctagaggatccaagcttacgtacgcgtgcatgcgaggtcatagtcttactatagtgtcnagttaaattca

SEQ ID NO: 99758 - DNA, 1672 bp, Arabidopsis thaliana columbia
  unsure (1)..(1672): unsure at all n locations
atgatcttnnnnnnnnnnnnnnnnnnnnnnnnnnnnnnnnnnnnnnnnnnnnnnnnnncgcggtacccggtccggaattcccccgcgggcccgcccacgcgtccgaaagctctcttttctctccagatttcgattcccgaggctcgagagaaaaccgtaaatctcttctccgttcactcaatcaaccaaagatgcgtgagattcttcacatccagggtggtcaatgcggtaaccagatcggagccaagttctgggaagtggtttgcgccgagcacggcatcgatccaaccggaaggtacaccggagactcagatctgcaacttgagcgcatcaacgtttactacaatgaagcgagttgcggtagattcgttcctcgtgcagtgctcatggatttggagcctgggactatggatagtctcagatctggaccgtacggtcagacctttcgacctgataacttcgtctttggtcaatccggtgcgggtaacaactgggccaaaggacactacactgaaggagctgaacttattgattctgttctcgatgttgttcgtaaggaagctgagaactgcgattgtcttcaagggtttcaggtgtgtcattcattgggaggaggaactggatctggaatgggaacactgttgatatctaagatccgagaagagtatccagacgaatgatgcttaccttttcggttttcccatctccaaaggtctctgacactgtggttgagccttacaatgcaactctctctgtccatcagcttgttgagaatgctgatgagtgcatggttcttgacaatgaggcctttacgatatctgcttccgtaccctcaaactcactactcctagctttggtgacttgaaccatttgatctctgctacaatgacggtgtgacttgctgtcttaggttccctggtcaactcaactctgacctcagaaactcgctgtgaacctcatcccattccctcgtcttcacttcttcatggtgggttttgctcctctcacctcaagaggttcacagcagtacagtgccctcactgtccctgagctgacccagcaaatgtgggatccaaagaacatgatgtgtgctgctgacccacgtcacggacgttacctcacagcatctgccatgttccgtggaaagatgagcaccaaagaggttgacgagcagatgctgaacgttcagaacaagaactcgtcctactttgtggaatggatcccaaacaacgtgaaatccagtctgtgatatcccacctacgggtctgaaaatggcttccactttcattggaaactcaacatcgatccaggagatgttcaggcgagtgagtgagcagttcacagctatgttcaggagaaaggctttcttcattggtacacaggtgaaggaatggacgagatggagttcactgaagcagagagcaacatgaacgatcttgtcgcagagtaccagcaataccaagatgcaacggctgatgaagaaggtgactacgaggaggaagaagaggaatacgaacaggaagaagagtactgagagttaattagttataaaaaccgcttgaaatatcaatttagtcgttggctacttcttttcttaaaaaaaaaatgagaacctcacctaccagtcgcagggttatttctatgcttgatttgactatctggatgatgttat

SEQ ID NO: 99759 - DNA, 1790 bp, Arabidopsis thaliana columbia
ctcactggcaaaaaagaaagaaaaaaaattcagaagcctttgttttcatcgatgaataaattaacaaacaaaactaaaaaataggatattcgctggccgaatcgcgtcgatccacatcgcaggtgagggttcctgcaatttatccctcgtggtctctgaatctcagatcgtcgtcaacgaatcctccattttctgaatcaaaattttctggaaacaatggggagcttggggacgatgctgagatatccggatgacatatatccgctcctgaagatgaaacgagcgattgagaaagcggagaagcagatccctcctgagccacactggggtttctgctattcgatgctccacaaggtttctcgaagcttttctctcgttattcagcaactcaacaccgagctccgtaacgccgtgtgtgtgttctacttggttctccgagctcttgatactgttgaggatgatactagcataccaactgatgaaaaggttcccatcctgatagcttttcaccggcacatatacgatactgattggcattattcatgtggtacgaaggagtacaagattctaatggaccaatttcaccatgtttctgcagcttttttggaacttgaaaaagggtatcaagaggctatcgaggaaattactagaagaatgggtgcagggatggccaagtttatctgccaagaggtagaaactgttgatgactacgatgaatactgccactatgttgctgggcttgttggtttaggtttgtcgaaactcttcctcgctgcaggatcagaggttttgacaccagattgggaggcgatttccaattcaatgggtttatttctgcagaaaacaaacattatcagagattatcttgaggacattaatgagataccaaaatcccgcatgttttggcctcgcgagatttggggcaaatatgctgacaagcttgaggatttaaaatacgaggagaacacaaacaaatccgtacagtgcttaaatgaaatggttaccaatgcgttgatgcatattgaagattgcctgaaatacatggtttccttgcgtgatccttccatatttcggttctgtgccatccctcagatcatggcgattggaacacttgcattatgctataacaatgaacaagtattcagaggcgttgtgaaactgaggcgaggtcttactgctaaagtcattgatcgtacaaagacaatggctgatgtctatggtgctttctatgatttttcctgcatgctgaagacaaaggttgacaagaacgatccaaatgccagtaagacactaaaccgacttgaagccgttcagaaactctgcagagacgctggagttcttcaaaacagaaaatcttatgttaatgacaaaggacaaccaaacagtgtctttattataatggttgtgattctactggccatagtctttgcatatctcagagcaaactgagtgatccatgtaagcgagtctgattgtatcaccatcattcaagatgttcagagcaaatttgagtgatgaagtaatctaggttgattcttattcacgccactgaatcctaagcaagattgtttccagaacaaacagagtttaagcatggtttagtctaaaaccatggattctattttagttactaccttcgttgtctaaacgtgcatttgttcatctatttttattccttgtgtttaaagttctttctttgtttaaaaaaaaaaaaaaaagggcggccgctctagaggatccaagcttacgtacgcgtgcaagcgacgtcatgctgttctataatagacgtt

SEQ ID NO: 99760 - DNA, 815 bp, Arabidopsis thaliana columbia
  unsure (1)..(815): unsure at all n locations
nnnnnnnnnnnnnnnnnnnnnnnnnnnnnnnnnnnnnnnnnnnnnnnnnnnnnnnnnnnnnnnnnnnnnnnnnnnnnnnnnnccacgcgtgcgcggacgcgtggggcctgagtttcaatccagatggaaagactgtgctttgtggattgcaagaaagtctcaagattttctcatgggagccaattagatgtcatgatggagtggatgttggatggtcaagattgtcagatatgaatgttcacgagggaaagcttcttggttgctcatacaatcagagttgtgtaggcgtgtgggttgtagatctctcgcgtactgagccatgtatggctggagacactgcgcaatcaaatggtcatccagagaaacgatcttgctcaggaagagatccagtagttctcaatgataataactcaaagacagttctcgggaagctgtccgtttcccaaaatgtagatcctttattgaaggaaacaaagtctctaggaagattatctgtttctcagaactctgatccttcgacaaaagaaacaaagtccattggaaggtcatcaacatcacaaaattcagagtcctcgatgaaggaatcaaagcctctcgggaggttgtcagtttctcaaaattcagacgtttctaaagagtcaaggacgttttcatccacaggaagtttaccaggcactcctcatagggtcagttcgaccaatgtatcaaaagccacttcgggtgtttcaacagccgtctctaatgctgcaacgtcaaggaggaattttacaaaagctaacccataggcgaatcctgtcaataaggcagcagatttt

SEQ ID NO: 99761 - DNA, 588 bp, Arabidopsis thaliana columbia
  unsure (1)..(588): unsure at all n locations
taggtacnnnnnnnnnnnnnnnnnnnnnnnnnnnnnnnnnnnnnnnnnnnnnnnnnnnnnnnnnnnnnnnnnnnnctttttttttttttttagaacaaatgaaaatttcttgatttattttttaaatgaggaagtacgtataattaaatatgtttacatataatatgttgttcatcaatttcattctttgctaagcaaaccaccatagaaaggaatatcggtttgaggcaaccatgtatctcccatggtgaagttgtagaccgtgaagttcatggcttctgccaagttcaataaattgtaccctaaccactgcactctctggttcgtgttagcacctggtccaaagttactatactcaccgtagtagattgtgtctagtccaattgtaccgttccattcgagccatccgactggttgaacaatgtcactaatgtatgattgcatgaaaaccgtccttgagtatggcttccacggtctccctaagaatgtcatggcagatttaggctcagctgcaagatctggggcggcttttattgtacaattgatgatagagattccggtattctggtttggatcgagtcttccatg

SEQ ID NO: 99762 - DNA, 630 bp, Arabidopsis thaliana columbia
ggataaacaaacaaccaggcatttgtccacctttcattttaagcattaaccatcttatctttgcgccttggaacttccccataattacaccacagactagtcttgattatcggttatttttcttattacacgagggtaaattagggaaaaacacttctggagcctttatcctcatgtccaaccaaaatctttacacaattcctagttcttaagaaaaaagtggaaattttcctttaaatttagtttaaaactcatacaaatccttctactcgaccactggtactctccgtaagctacttgctgaattcgattattgattttgggcgtagaagaagatgaaggcatcgatgaagtttcgtgaagagcaaaagcctctttttagggctaaagttcctttaagcatcttaggtttaccctttcaatctggaatcgtcgccggagaatccaaggagctcagtctcaatctctccactttcttcgaatctggcccttctctcaaagtcgcttaccgtccaaacgattcgtggaatcctttctctctaatcgtcaaaaccggatcgggatcgttcggttctccgatttcaagctctatgctcatgagcgctgaattcaatctcctaggtcaaggaa

SEQ ID NO: 99763 - DNA, 689 bp, Arabidopsis thaliana columbia
  unsure (1)..(689): unsure at all n locations
nnnnnnnnnnctatagaagatctatgacgtcacctgcacgcgtacgtaagcttggatcctctagagcggccgccctttttttttttttttttgaatggtaacaaaaaattgacattcaaaccaacatgttttgtcagattgagggggcagaacaaagatgaaagaacttttgatgcatgaaagaattgatggaatcttcgtaaatgttgaatatcacacactatccctaaagaaaattgcatttacatcgttccttcttctccctatttacaaaaaaaaaccacaatggcatttcactgtctcacctctatttctctctcgtctctgctgcaacaataatgatgcgcttaacgtctcttttgcgcgaggatcttctggatcttccatgtccaagacagcaagaaggccacaagtccaagtcccacacttccccatagtgtcactacccacaatggcatttctgttgggtacaatccacttccaaacttgatgcagatgagaaggttctactatgcatatccccagtggcagccaacagaatgcttccacctttttcacaggttttctgtcttgagntatgaattgtactcccgtgttgttggatcgntatgggcacccanggtnagcntttngggntnnctggggttggggggggtccncaggttaacttgagaanatttgttcagtng

SEQ ID NO: 99764 - DNA, 1037 bp, Arabidopsis thaliana columbia
  unsure (1)..(1037): unsure at all n locations
cttcacttctctctccttcaacaaaattttctacctttgtttcttctctcagatttcataaagaaaagatttaatctttcattggaatctgtgagtaacagaggataagcgaatatgggttcaatctctttatccaattctatgcccataactcgacttccactacttacatcactctatcatcaaagcttccttccgatttcttcttcatctttctctcttcttcctctctctaatcgtcgtcgctcctccactttttcaccgtcaatcaccgtctctgccttcttcgctgctcctgccagcgttaataataataactctgttccggcaaaaaatggaggttacacagttggggatttcatgactccgagacagaatttgcacgttgttaagccctctacgtcggtcgatgatgcgttggaacttctggttgagaagaaagtcacgggattgcctgtaattgacgataattggacactggttggtgttgtttctgattacgatttgcttgcattggactccatctctggtcgcagtcaaaatgatacaaacttgttccctgatgtcgacagtacctggaaaacgtttaacgaactacagaaactgatcagtaagacatatggaaaagttgttggagacttgatgacaccgtctcctctcgttgtccgtgattctgccaatttagaagatgcagccaggttgcttctggaaacaaagttccgaagattacccgttgttgatgctgatggaaaactgattgggatccttacaaggggaaacgttgtaaggggctgcgctgcagatcaaacgggaaaccgagaactctacatagctaggaagcagcagtgatggagcagatctgaatctgccatagttaatagcgaaatctatttattccattgatataagtatatatgtaaccattctctgtcaattttcggttttcagaagcaatttttgttactttaggagtaacatttctcagactcggaactgnagccaaatggtatatttgatacatatatgtttattgtagc

SEQ ID NO: 99765 - DNA, 525 bp, Arabidopsis thaliana columbia
  unsure (1)..(525): unsure at all n locations
cggttcttnnnnnnnnnnnnnnnnnnnnnnnnnnnnnnnnnnnnnnnnnnnnnnnnnnnnnnnnnnnnnnnnnnnnnnnnnnncttttttttttttttttgggaataagatttttctatcagtaggatgcaaatatttccaacagggaaaacatagttaaacacatgagtttttttttcctaagacattcatgggtgaatggcgtttaatacaaaacatctgcgccgtttcacccttaacactagagtttcggtacaatactaaatacaacatcaacctaagcatgtcgatacacaaccaactaaaacaaagaacccaacggaagattaaaatagcattaaaggaagttaaaagtgaaaaggatcttttcttccctatcagagttctacagcaaggagtcataagtaggttccctagatacacacactagtagttcctagttaattaagtcagaccagaagatatcacgactgcttgtacatatggcgcctcagcatctcatttatccccacagctgaaatgctt

SEQ ID NO: 99766 - DNA, 563 bp, Arabidopsis thaliana columbia
  unsure (1)..(563): unsure at all n locations
nnnnnnnnnnnnnnnnnnnnnnnnnnnnnnnnnnnnnnnnnnnnnnnnnnnnnnnnnnnnnnnnnnnnnnnnnnncttctttttttttttttttaaagttttatgactcctttattagcatgaaaatatcatacttccaaaaagtaaacccgttatggggctgaccaagaaacgggaagcgagttatttagaaacaacagaacaaaggaacgcagaagaagagcgacgtgttaagtctcagaaccagcaatgcacaatgccctttagttcaagttgatgacatcgtaaatgaaactggcacgtttcagttagcaaggacgcttttaaactgagctatcgattcaatagccttgtcaaactcactatcttccaatgcaaatgaaaaccggcagtaaccagggattccagtccaggaaccgctgtttaagcaaacaccggtatggctgaggaacacatccctcatatttgaatccgtaagctcgacgatttcctgtccatctcctgctttcagctttacttttttgtgagaaagctttggnttgcnccattggatccngcngggg

SEQ ID NO: 99767 - DNA, 672 bp, Arabidopsis thaliana columbia
  unsure (1)..(672): unsure at all n locations
nnnnnnnnnnnnnnnnnnnnnnnnnnnnnnnnnnnnnnnnnnnnnnnnnnnnnnnnnnnnnnnnnnnnnnnnnnnnnnnnnnnnnnnnnnnnnnnnnnnnnnnnnnnnnnnnnnnnnnnnnnnnnnnnnnngggggaacaaaaaaaatttcctttttgggatcctaagactttcgaactcgggatcttccacttccttttttcctaagctaagggttttatccccaaaaaaagaagaagaaaacttcaccaagccaagatcaaaaaggggtccccgaccagagaaatggggggggcatcaaagagcaatttacaggtgatcagtgttgagcgtgtgggaactgtaagcttttgttatttatggccatggaaacttgcttaatggcaacaatggaggtggaggctctgcggcttctccttcttctcgcctagtttgtatcagatgagtcctgagactacactcttctatctgcatgatcgcagttgaggccagaagatcttcgcattttccttgcatagaactctcttttgttactacaacagcgagttctgttaccattatgttcatctcctccacctttgagagtaaagaccaaatggccgatcccatagcctgcattacatcgagggccgaggacatagctgctttcaaagattctgtgtccgcctttgt

SEQ ID NO: 99768 - DNA, 513 bp, Arabidopsis thaliana columbia
  unsure (1)..(513): unsure at all n locations
gtcaaaaaatatatatctgttaagccaaaaaacagtcctaaaattaaattttgttatgatttctacactaaatgatactaaagaataaaccccacatcagagcttacatgtgatttgggaacaaaataaatttcctttttggtatcctaagactttcgaactcgtgatcttccacttccttttttcctaagctaatgtttttataccaaaaaaaagaagaagaaaacttcaacaagcaaagatcaaaaaaggatctcgacaagagaaatgtggggggcatcaaagagcaatttacaggtgatcagtgttgagcgtgtgggaactgtaagcttttgttatttatggcccatggaaacttgcttaatggcaacaatggggggggagtctctggggccttccccttcttctcgcctagtttggatcaggggggcccggagcctaccccttccaaccggctgaaccgcgttggggccnnantntccgctttccnggcaaaaaccccctttggtacca

SEQ ID NO: 99769 - DNA, 682 bp, Arabidopsis thaliana columbia
  unsure (1)..(682): unsure at all n locations
cctgaaattatattcaaagccatcaggagaattctttggttttgattggcacgatccaaagacacacattttgtcaaatcattttcgacgactgttattaataattaattcgttaatgacgcaccgttagtcaactccgcttcgtattaattactcctccgatctctttcttattcttctccggcgacacttcccttgcttctccctcttaggactctctctacgaatctgtaagcttcaaattcttacgccacactccgagattcgcttctgattattgtatgaatttttgagctccaaggatccactgccatgtatttatgctgctaaagcttgaaggcagtagtggaatcaccattaagttctttgctttgtaatttagcttgatttgagaataaacaaatgggaaaagcatcaggcttgcttctgtttctcttgggttttgggttctttgttgtcacatataaatctttctgacactttataggtcacaataggtcctgggtggtgagnaaattcagatgggaagncccactttctgggttcccggttggttcaagaatggccncctaaaataattnaggggaaagnccaagngggttnttccagnaaccctttttcaanggttgnccttaanaaagtttcaaggtngcaccnttttaatnaaggnggncangttncg

SEQ ID NO: 99770 - DNA, 498 bp, Arabidopsis thaliana columbia
  unsure (1)..(498): unsure at all n locations
nnnnnnnnnnnnnnnnnnnnnnnnnnnnnnnnnnnnnnnnnnnnnnnnnnnnnnnnnnnnnnnnnnnnnnnnnncttttttttttttttttaagaagccaaagaaggttccattattaacactcgagtttattacatgaacatgatacacaaacatgtttagacccatgagagaaacaacagaagcaaataacattacaatagtacaaaactacaaggcctttgaagagcttaagagccagagagattagaaaaaacaaaaaagatgacaagttatgggattgatagcaacagaagagtaataatgagacaagagagagtggggacatagattttcacctaatgaaaggggaaagatttaattttcaacaggtaacaccactcccaaaaattcaatatttggccttttggattttttttaattcacacccaacaccaaccagaccttaaaagagatttttttattactcacgaggtaagaatattttttaccgatcat

SEQ ID NO: 99771 - DNA, 1086 bp, Arabidopsis thaliana columbia
  unsure (1)..(1086): unsure at all n locations
tgatctccnnnnnnnnnnnnnnnnnnnnnnnnnnnnnnnnnnnnnnnnnnnnnnnnnnnnnnnnnnnnnnnnnnnnnncacgcgtncgccacgcgttcgctcgatttgaagagagaaaattcgttcgatttcgttttctcttcttcttttggattttcccggaaaattttggaatcggtgagtctctatcgattactggtcaaccatgaatatctttagatttgctggcgatatgagtcacttgatcagtgtcttaatccttcttctcaaaatctacgcgacgaaatcttgcgctggaatctctctcaagactcaagagctctatgcgcttgtgttcttgactcggtacttggatctgtttacggattatgtatctctgtacaacagcatcatgaagattgtcttcattgccagctctttggctatcgtttggtgtatgcgtaggcatccacttgtgaggaggtcatacgataaggacctggacacatttcgtcatcagtatgttgtgttagcgtgttttgtactgggacttatcctgaatgaaaaattcacagttcaagaggtgttctgggcgttttctatctacttagaggcagttgctatccttccccagttggttctgctacaaagaagtgggaatgtcgacaatttgactgggcaatatgttgtctttctcggggcgtatcggggactctatattatcaactggatctatcgctatttcacagaagatcatttcactagatggattgcttgtgtgtctggtcttgtccaaacagctctctatgcggatttcttctactactactacataagctggaaaaccaacaccaaacttaagcttccggcttgaaaagaacccgaatttttttgcaatagtatcaaaatccaggaagttacagcaatggtgacattagaaaagaaagacatggttaacatttgggtcctccctctttctaacaatgagttgaaaattgaatgatgcaggattgttgtttaaaatgtgtttttttttttagtctttaatgcacattgtaactttcccgacgattttagacattgagaagaggcatcgttttatcaaaa

SEQ ID NO: 99772 - DNA, 511 bp, Arabidopsis thaliana columbia
atcaactatttccttcttcctttgctcttagggttagggtttattttgttctttctctatatccttcaatcaatgtgaaaaaaaagctctcccttttggcagtttccgatgtttggtcgccattcgattatcccaaataaccagattggtaccgcctctgcttccgctggtgaagaccatgtctctgcctccgctacgtctggtcacattccttacgacgatatggaagaaatccctcatcctgactctatctatggtgctgcctccgatttgattcccgatggctctcaattggttgctcaccgatccgatggctctgaattacttgtttctcggccaccggaaggggcgaatcagcttacgatctcgttccgtggacaagtttacgtttttgatgccgttggtgctgacaaggtggatgctgtgttgtcgctggtgggtggttctactgagcttgctcctggtccgcaggtgatggaactagctcaacagctgaatcatatgccttgtg

SEQ ID NO: 99773 - DNA, 547 bp, Arabidopsis thaliana columbia
atagaagagcttgacgtcgcatgcacgcgtacgtaagcttggatcctctagagcggccgcccttttttttttttttttgaaagtttgaaacttttttttctccccacatgaagaagacgaaacagagagagatgattattactgcacaaagtaaaaagacaacaacaaatccacatgaatattacacaaactttttatctcaacaagtctttcagtttctcactcgtttttagcagcttcagcttgtctagctccaacagaaaagaactctgtgatgacttcaagtggcatgcctttagtttccgggactttaatgaacacaaagacccatgaaatgcaacatacgattgcgtacattccaaacacaccagctagtccaatggatttgagcagcacggggagactgtaagtgacgattatgtcacagatccagaaggtgagtgcgcagatggcgatgcagattccgcggactcgagttggaaaaatctctgaacagaggatgtttggagcaggaccgaaacccatcacgaagaagcagaagtagagc

SEQ ID NO: 99774 - DNA, 467 bp, Arabidopsis thaliana columbia
  unsure (1)..(467): unsure at all n locations
gtttcagtatatctgctccaaagaggactggcttatccgctaatgcgccttcaacttcaagaagcgttccttctggtggacaaaagctacctccaaggaggatcaacggccttcctgggactgctccttcaacttcaaaaaatgcagccaccagacaaaaacatgtaatgtaacttatatagcttttttacagatcattttttcttcgagtgtatcatttacatggctacttcaagtttcaagaactccgagttttgaaactctggcttgatgatatcctagtttgtaacaatagatcttcaaaagtttttacaatgatttaataaagtgctttgttttctaaaanaaaaaaannaaaaaaaaaaaaaaaaannaaaaaaaaaaaaaaaaaaaaaaaaaaaaaaaaaanggggggcggccgctctaaaggatccaagcttacgtacgcgtgcatgcagacgcatagt

SEQ ID NO: 99775 - DNA, 907 bp, Arabidopsis thaliana columbia
  unsure (1)..(907): unsure at all n locations
cggattctannnnnnnnnnnnnnnnnnnnnnnnnnnnnnnnnnnnnnnnnnnnnnnnnnnnnnnnnnnnnnnnnnnnnnnntcttttttttttttttttttttttctttaatgaaaaagaatcttattaaataaatagagttccgtgaatataataaacaatatttccagtcgtatggtaaatattctccttcgttaaacattattggtctatgtccaaactccatgcctatgccttgctaagcacggtaggtatactctgttcattcctgaagaaattatctggatcagccgctgttttaacctttactaatcgatcaaaattatctccaaaatacttccttccatacacttctccttcctcataactattcgtaccatgatcattcacacctatatcgacatctcggtaattcaagtaagcatttctagggttcttgctcacaaacccggtcatgaaactataaagaacgttagcctgattcaagaaacccttctctatctcgacagagttttcttgccaagtcaccgagtactgaatcttaaaaagcttgcttcggtgcggaaacggcgtcgcgttaaccgtaacctccgccattttcccaccatacggattaaaaacaagcccgattttccccagctcagtcatcttcttggacaaagactcaatcccatctctaggaatctcactcgcaacgtaatccgatttcctctttccgaaattcgctctatcaagattccgatcgagaaacactttaggatcaatctgagtagggttaacacgattatcccaccataaagctgactgaaaccaagtcatctccgaacagttctccttctttaaactcaattcaggaaactccttaccaagcaaagcaacaacttcctctgctctgcctaaaaacaga

SEQ ID NO: 99776 - DNA, 656 bp, Arabidopsis thaliana columbia
  unsure (1)..(656): unsure at all n locations
cgnnnnnnnnnnnnnnnnnnnnnnnnnnnnnnnnnnnnnnnnnnnnnnnnnnnnnnnnnnnnnnnnnnnnnnnnnnnnnnnnctttttttttttttttatgaaaatctgatcattggaaaccgaacaagtgttagttgaaaagtttacaaaacacagtttaatcaatcaactatcaaatcccaacttccatttacacaaacaaagggcactccctgttttttttttttttcagacttaggttacttttgccccaagaaacaaaatttatcgactgaagcaaataatggggagaaagatccacagttggaaactataaaggtgtagtcatataagttaggaagtttaatcaaagttctgctctgcttttacttctcttcatcttcgccttgaatctcgacttcaccattagtgtctctactgtgtttatgaagtttccaatggccatcacaaccagaagaatgccacaaaccaatacctgccattcagcgactacccccatcaacactgtcctaagcaactgggatcccccgtaggcttcaaagccctgtaaaggggccaaaatgggaaataattagcaatagtggcccatctactccagccgtttccccaaagccatacgacgtccatccttttagcctttccaagtcaatgcgag

SEQ ID NO: 99777 - DNA, 503 bp, Arabidopsis thaliana columbia
cgcctgcaggtcccggtccggaattcccggtttgacccacgcgtccgctctttctgaagctttatctaataaatctcttcgttgatccttcctttccattaacgagatttcgaatcgagaccagatctgcgtgaagatgatagagaagtgtataggagcgcatcggtttcggagattacagagattcatgcgtcaagggaaagtgacgattctttgtctcgttctcaccgtcatcgtcttacgtggcacaatcggagccggtaagtttggtacgccggagaaagatatcgaggagatccgtgagcatttcttctacacgcgtaaacgcggcgagcctcaccgtgtcctcgtcgaggtctcttccaaaacgacgtcgtccgaagacggaggaaatggtggtaacagctacgagaccttcgatatcaacaagctattcgttgatgaaggagacgaagagaaatctcgagaccggactaataaaccttattctcttggtcccaaga

SEQ ID NO: 99778 - DNA, 762 bp, Arabidopsis thaliana columbia
ccttttgaacaagcactaacgtcgattgcacgcgtacgtaagcttgaatcctctaaagcggccgcccttttttttttttttttttttttttcttttttttttttttaattaaatggttcgggcataatctaatgaatatgcaactctattaaacttcctttcttatgaaggtaaaaaaaagaggaaaacgtaatagagcgtttctaatttctaagtggaaaggaatcaaagagtaactaaaaggagaaaaacagtctctaaggtcaaaaactaggtcaagcaaaaaagaaactgtacaaggcaggccagaaaataatgccttgaatcgtgtaactgttgatgatcagaagaactagtaacggggctttctgaagggagtaaagaaagatatgcagtgcttgtccttgctagggtcctcatctccaacctgctttgttttcaccacatcctgctctgagattctcgcccttgtaaggtgttttttttactcgggagatcacactacgacgtttacctctttcattatctgtggaagcatttctatgatttcctcaaacaggggtctctgttctgggtcttgatgccagcatctctttagaagccccttcacttttgggggtgttttctttgggattttgggccgaagccccttttggacaacgccaacagctgctttgtgtggagtcaagaaagcatatgggatgtcaccagtcagaagttcccatagcactatcggataactgaacacctctgccttgggat

SEQ ID NO: 99779 - DNA, 519 bp, Arabidopsis thaliana columbia
  unsure (1)..(519): unsure at all n locations
cgattaaannnnnnnnnnnnnnnnnnnnnnnnnnnnnnnnnnnnnnnnnnnnnnnnnnnnnnnnnnnnnnnnnnnnnnnnnncttttttttttttttttgaaaaatattatatattcgataaaattcagtctaaagagtatacaaatgtggactgttacacacatgtattgaggcatatatagcaacttgagaaatcagatcaaccatgaaatcacgcaatacaaacaaattatatgacacacctgattatataaataagtatcgaatttaagttgtaaaaccacaatctctaattaagataccttttagtttgtccttgtacttctccacgatcatcgtcttgagcacagactatgcatgcagttaatcctgaccgttggtagtccttttaatcaatctccacgtcgtaagtcgtaacatacgttaatgatccgacaaaacacacaaaaatctcacaagagatcattagaaggacccgagaaatccgaaccaggcccaaagtactgatttgtttgatt

SEQ ID NO: 99780 - DNA, 690 bp, Arabidopsis thaliana columbia
  unsure (1)..(690): unsure at all n locations
atttatataacgttttgaatttcataaacctagtggctagtgatatgatactctcaagaaacctacccacctaaaaagagagaaaaacaaaacaaaagaatagtaaggcactaaacactaaaactaccacttctcttgtatcgccgacaaagctttgttcagtggcaaagatgatgaatcatttgcttttggctcttttccttgttggaaccatcgccttaccagatagaggaactcaacaattgaccaacgatggcctcaccggcgcgaggcgagagatactctctttcttagaccaaagacttgcagtggtgtacccagtgatccagagattcaagtcactcatcactctcgacccttataacgtgaccaagacatggattggttcagacatctgcagttatagaggcttncactgtgacaatccctcccccacaacaaaacccgcagttaactgttgctttccatcgggttttcaattggctttcaggctcttctggtcccatccatcgggagggttttatcggttcaatttgggtggcccttggttcttgtttcaaggttaaccnaaaacaatttttggggggncgggngccttcccaagntagnnaacncccgggnttttttttgaccttggcatttggaacaattggttacccggnaagttncgcnagtntttttgnantccgg

SEQ ID NO: 99781 - DNA, 442 bp, Arabidopsis thaliana columbia
ctgctctgccatggctcccgcactatctacttcttgctcctccgtcatggctttctcaacatcaatcgcgcttcgttaccatcatcctcaaatgtctctcaggaactctcttcgcgctcccaaatcgccttcttttgtcaggcttcccctcggaaaggtgttacagagcaggattgtgatacgtgctgcttcgtctgcggctggtaatccacagtctgatgctgactttaatccgtatgaggttcttggtgttaaccctatagagggatttgacaagatcaagcaaacttatggaaggaaacttaaagatgctcagaggagcggtgatgaagccactgctgctctaccttgagaaggcatatttgagaaggcatatgataagctcatgtatgcccagttgatgaataggaaaaagggggtgacttttggtttcgtttaaggt

SEQ ID NO: 99782 - DNA, 974 bp, Arabidopsis thaliana columbia
  unsure (1)..(974): unsure at all n locations
gacgtcgcatgcacgcgtacgtaagctcggaattcggctcgagcttttgatagcgggagaaggcatatgataagctcatgtatgcccagttgatgaataggaaaaagggtgtgacttttggttcgtttaaggtttccaaggacattaaatatgctgataagcagcccattataccatggggtccaaggttttccaggtcctccaagaatgatatgttgatcaacctagcaatatcagttgtgtttagtgcatggattgcgataaaacgtaatgttgaatacaaaccgctgcagttcatgtcttttgtatttgtttacagaatttttgagaaattaaaatcctttgaagcaccttcatctccaatatataacgaggaaggcgaagaaagtggccggggattgagaatgggaaagaggcttcttcgttctctttccttagtttttggctctatactcttagcatctttggcatacactgggttcttaaatggcatcgagtacatgggctactccatacccatggttctttacaacaaccaggaacttatagtgacggcgtcatcggctttcatgctctatgttatagcgtcgttttacagataatgcgagagtccacaggagaattggtcagttagaagcttttggagaagttatgctgtattataggatgttgctgggagatgaaaagtttattttctacagagagatggggttatctttataacctttcttttgtgtggaaaatcaagtaaattttgcaagagagaaatcccttagaatctaagtcttgtctatttacgtttaatgctgaggatcgcatgtggaaggttttttaatttttgtattggagcaataatatgcgtgaagtgaaaaatcttgagataaaaaaaaaaaaaaagnnnnnnnnnnnnnnnnnnnnnnnnnnnnnnnnnnnnnnnnnnnnnnnnnnnnnnnnnnnnnnnnnnnngtacctaa

SEQ ID NO: 99783 - DNA, 461 bp, Arabidopsis thaliana columbia
cccacgcgtccgcggacgcgtgggttcgtcctcccccagaaaatagagaggaaaaaaggaaaaaaagtaatcatcgattcgctttcacaacctggaaagctcgaaaagaggaaaaaaattctaaagagcttatcaagctcacttcatacacctagatcgatttagggttcgtttgatttttttttttctgtgattgcgacagctagagatctatctctggtggattttgggtttatgttccatggcggatcgcggatctttcggatttgctcctcgattagatatcaagcaattgctgtcagaagcacaacacaggtggctgagacctgctgagatttgtgaaattcttcggaatcatcagaagtttcatattgcgtcagagcctcccaaccgaccacccagtggttcactctttctcttcgataggaaggtgctcagatatttccgaaaagacgggcaca

SEQ ID NO: 99784 - DNA, 421 bp, Arabidopsis thaliana columbia
acccacgcgtccgcccacgcgtccgcaaaaaccaaacaaacaaacaacaaaccagaagttttatttttgttaaagagtaaccaaaaaaaaaaaaacagagtaccttcttcttcacacacataaaaagagacggtaccaaaaaataaaaacagagcaaaccacaaaaatggggaagcatttattccgatcatctcctccaccggagaaaccaacagctcatctctctctcgcggaatcagctgttcaagaatgtatgagcaacatcaacaccgtcatatcaaaatggacttctccggctgcttcttcctccgacgacttcctcttctccaccaacagtcgtcgtgaagcagaggagtttgttacagccgttagacatctacaaagcacgatgcatcgtttggtttccgttaacccttcctcg

SEQ ID NO: 99785 - DNA, 409 bp, Arabidopsis thaliana columbia
  unsure (1)..(409): unsure at all n locations
tacacagtgatggcttcgtctctcaccactagattatcggcggtaatcggatctcgacggagttttccgatcgtcggagcgttttgcgttctgtcaactctctcaatctcttctctttcttcttcatctcccttcaaatcgggttgtgcacagtctttctctgttgttcctctcttaaggtctaagtttagcagtaaggctttttcttcgtcgatcagaatggaggagagcagcaaaactgtgcccagcattgttgtctatgtcactgttcctaacagagaagcagggaagaagttggctaacagcattgtccaggaaaaagctttccagcgtgtgttacattgtgcctggnatttgaatcggtgttcgattgggngggnanggttcanagtgttcaaaggagnnnctg

SEQ ID NO: 99786 - DNA, 526 bp, Arabidopsis thaliana columbia
  unsure (1)..(526): unsure at all n locations
nnnnnnnnnnnnnnnnnnnnnnnnnnnnnnnnnnnnnnnnnnnnnnnnnnnnnnnnnnnnnnnnnnnnnnnnnnnnnnnnnccacgcgtccgcggatttgttggctttgacgatgttgaaaccgccgggtgagtttggggcggatattgttgttgggtcgggtcagaggtttggtgttccgatgggttatggtggtcctcatgctgctttcttggctacttcacaagagtataagagaatgatgcctgcgaggattattggtgttagtgttgattcttccgggaagcaagctttgcgtatggctatgcagactagggaacagcatatccgcagggataaagctaccagcaacatctgtaccgctcaggccttgcttgcaaatatgactgctatgtatgctgtttaccatggaccagaaggcttaaaatctattgcacaacgggttcatggtctcgctggtgtatttgccttaggattgaagaaactgggaactgcacaagtccaagatcttcccttctttgacact

SEQ ID NO: 99787 - DNA, 520 bp, Arabidopsis thaliana columbia
  unsure (1)..(520): unsure at all n locations
nnnnnnnnnnnnnnnnnnnnnnnnnnnnnnnnnngcacgcgtacgtaagcttggatcctctagagctgccgcccttggggttttcctttttttttgccacaggaattaagtttgcctgaattaagtttgcctgaatcaagtttgccacaggaattagaagtaaactgttaggacttcggaaatctactaaagaacctagagaatacattccaaatatatcctcatttcaagctaaacagcttaattaaaccattgtgtcaatgttgctcctcgcttgattgaagctccttgtaagttgtaaccttgtaaaggcactcacagctaaatctgtcaattcattgcagaagcagggtcggtcaaatggtatgcaggtagattaactgcttgaatagagattacaaacctatatattataaacgtggcttgcttcaatgcttaaacaaaggtattgggttcaagtctagctaatccacattcaaccagacaacccatagatattacgaacgatcacacagtatgt

SEQ ID NO: 99788 - DNA, 528 bp, Arabidopsis thaliana columbia
  unsure (1)..(528): unsure at all n locations
atgatcctnnnnnnnnnnnnnnnnnnnnnnnnnnnnnnnnnnnnnnnnnnnnnnnnnnnnnnnnnnnnnnnnnnnnnnnnnnnccacgcgtccgcggacgcgtgggaaaaaagcaaaagactcagctaaaaagcgacctactagagaggaacgggagagaaacaaaagcaatgggaagaagagttcttatgctgatcaacctgtatcatttgtgtcaagtggcataatcgattctgagatagctgttgcaaaaacctcagttgaaaaagttgcaaaagaggtagctgaaactactccgggaacctctaatggagcagacattggagcatttgaggtacataccagaggttttggatccaaaatgatggctaaaatgggattcatagatggaggtggtctaggaaaggatggtaaggggatagcacagccaatagaagctgttcagcgtccgaaatcacttgggttaggtctggatttctccattgacactgaagacccgagtccgtcaagtaataacaataacaacgc

SEQ ID NO: 99789 - DNA, 593 bp, Arabidopsis thaliana columbia
  unsure (1)..(593): unsure at all n locations
nnnnnnnnnnnnnnnnnnnnnnnnnnnnnnnnnnnnnnnnnnnnnnnnnnnnnnnnnnnnnnnnnnnnnnnnnnnnnnnnnnnnnnnnnnnnnnnnnnnnnnnnnnnnnnnnnnnnnnacatggtacttattggttctgtgatcaatcaggacttttataaatagaagacatatggcacaaacaacaacacacaaatatgttcacctggagattattccaccgggcaggaaacccgtgaataaaaattcaaagaatggttctatttctatgacatcctaatgtgactgaaaaacgaaagaaagaagatagaactctcgggttttcgatcttcttttatcgcctcctcaagtgtggtggtgtggtatatccttcgaagaaatctagaacgatggtctcgatatcttcaaccgaatatttcaaatagttctcagggtgtcttccactctctatatgacccctgaaccttccaagaaacgatctataagcaggggttagatgcccggtagcgaaatcggggtcctctnnaagctgagcacntggaccgncacggggnngngcctgngaccnctcgacatggatgatgctaacccct

SEQ ID NO: 99790 - DNA, 1013 bp, Arabidopsis thaliana columbia
  unsure (1)..(1013): unsure at all n locations
nnnnnnnnnnnnnnnnnnnnnnnnnnnnnnnnnnnnnnnnnnnnngacgtgtttctgtttttctctccacgcgtccgtgttgttctcgattaacgaaaaagacttgtcgttctcaattcttatcgatttaagaacaaatcatctaacgaagattacttccgaagatcagaaacaaacacaaactgtgaatcgttgtttgttaattctctttaaaatcgccagaagaaagagatctccgttttctacagaagaaaagcaagagagtaagaatgggatcggaacaaaacgatagcacaagcttcacgcaatcgcaagcttcagagccaaagctatgtgttaaaggatgtggtttctttggatcaccatcaaacatggatctctgttctaaatgttacagaggcatttgtgctgaggaagctcaaacagcagttgctaaagctgctgttgaaaaatctttcaagccttctcctcctcgtagtctcttcatagcagaacctcctgctgttgttgtggaacccaaacccgaaaaggcggcagttgttgttgtctcggccgagccatcttcctcggcggttcctgaggcgaacgagccatcgagacctgcacgaaccaaccggtgtttgtgttgtaacaagaaggttgggatcatggggtttaagtgcaaatgcgggagcactttctgcggcgaacatcggtacccggagactcatgattgcagctttgatttcaaagaagttggacgtggagagattgccaaagctaatcctgtggttaaggctgataaaattcaaaggttctgaaatatggaagttttttctaagtattttggtggtaattactcatttgtatttgaaccgatttgggggttgtcttggatggttttaatggattgtttccaaagggatagaggatgatgaatttggttccgtaataaagtgaatcgaaaagggcggccgctctagaggatccaagcttacgtacgcgtgcaggcgacgtcaagactcttctatagt

SEQ ID NO: 99791 - DNA, 592 bp, Arabidopsis thaliana columbia
  unsure (1)..(592): unsure at all n locations
cgnnnnnnnnnnnnnnnnnnnnnnnnnnnnnnnnnnnnnnnnnnnnnnnnnnnnnnnnnnnnnnnnnnnnnnnnnnnnnnncttttttttttttttttttgtctaataaacaaatttatttcattaatcttccaattttgggaagaaaaaaacaacactatgaaattacaaaggaacagaacatctgcaatataagtctatcccccaaattaattcagattatgcaaaagctaatacaaacactatagaaaattacaaacattacaacttacaatgacaaaccgcaaaaaccgtttcttcttcatcatcatcatccaatccatttaacgattaaatatcaaagttctccatctgaatactgctctttaacggcacatagtcaccaagatatccaccaagatgatcgtgcaacgcagatttatcaatcggctgatgatgaaaactcttacaaacatagtaaaacacactctgcacaagcagcccaactagattcacaatcactagaatcccaaccaagaaaccaccaacaacaatcttcgtaaacaacccgaaatcatcacctccatgaaccacaacaccaccgaaaacacca

SEQ ID NO: 99792 - DNA, 670 bp, Arabidopsis thaliana columbia
  unsure (1)..(670): unsure at all n locations
nnnnnnnnnnnnnnnnnnnnngaggagatagtgacattctttattagaaaagaaagaagacttattgaacatagctcgcttttctttttttacataaaccaatatatgaaattaaaattgtcttcttcgttttgcactttggagcgtttaacagttgtagaatccattagtctcccataattaatatgtttaaggataaatggttaggcaatttcgggagtttcccaaaggtttttctccgatatgactacatcgatgcaaaatccgaaatgcttcctctaaatacttgaaacttggttcgatccttaaaccctccaaatctttgtttaaccgtctgagtccctgtcaaggaacggtaacggtacggtcttcactgccctaaattggccgacattgtttaagtgctcattctccactctgtaaaagttccagtggcctcgacgaatgacttcaagtgacgccaagaagaaatctagcaaatgagactgaacaggactgaccctgaatctcataattgtctcgatccaagcaactcgcaacaccaaattcaacgcaatggagaggtagtagaagttcttgttccggagaaccaaattgtctcttagccatggatttttcgatttagggtttagaagaccccaatccttgacaaagtcccagtataattggt

SEQ ID NO: 99793 - DNA, 512 bp, Arabidopsis thaliana columbia
  unsure (1)..(512): unsure at all n locations
atgatttnnnnnnnnnnnnnnnnnnnnnnnnnnnnnnnnnnnnnnnnnnnnnnnnnnnnnnnnnnnnnnnnnnnnnnnnnnccacgcgtccggacagtgacttgttcctccctaaagagagaaaggatgtcctcacttctactgcttgttggactgcaatggctgctctgcttgtttgtctcaacttcacaatcggtccaattcaaatgctcaaactttatggaattccttactgggtaatgcgccgctgttactcccctgtttcagcctgagcaatttgtgtattatttcctctgccttactcaaaaaggtttttatgtcaaatacagataaatgtaatgtggttggactttgtgacttacctgcatcaccatggtcatgaagataagcttccttggtaccgtggcaaggtaaaatacatattctctgcttccactgttctttgactacatcgctctttcttttaaggttaaagccaactggtgtgtaaatctcatgattctcccaaaaca

SEQ ID NO: 99794 - DNA, 1621 bp, Arabidopsis thaliana columbia
cgagagatagacgacgacgacaaggatcaaccaacacagaatccatctctctatctctctacgttatctcttcattcagagagtgcaaatagaacgacagagactttttcctcttttcttcttgggaagaggctccaatggcgagctcggttttatcagaatgtggttttagacctctccccagattctaccctaaacacacaacctcttttgcctctaaccctaaacccactttcaaattcaatccaccacttaaacctccttcttctcttctcaattcccgatatggattctactctaaaaccaggaactgggcattgaatgtggcaacacctttaacaactcttcagtctccatccgaggaagacacggagagattcgacccaggtgcgcctcctcccttcaatttggcggatataagagcagccatacctaagcattgttgggttaagaatccatggatgtctatgagttatgttgtcagagatgttgctatcgtctttggattggctgctgttgctgcttacttcaacaattggcttctctggcctctctactggttcgctcaaggaaccatgttctgggctctctttgtccttggccatgactgcggacatggtagcttctcgaatgatccgaggctgaacagtgtggctggtcatcttcttcattcctcaattctggtcccttaccatggctggaggattagccacagaactcaccaccagaaccatggtcatgtcgagaatgacgaatcatggcatcctttgcctgaaagcatctacaagaatttggaaaagacgactcaaatgtttaggtttacactgccttttccaatgctcgcataccctttctacttgtggaacagaagtccagggaaacaaggttctcattatcatccggacagtgacttgtttcttccaaaagagaagaaagatgttctgacatcaactgcctgttggactgcaatggctgctttgcttgtttgtctcaactttgtcatgggtccaatccagatgctcaaactatatggcatcccttattggatatttgtaatgtggttggacttcgtcacttacttgcaccaccatggacatgaagacaagctcccttggtatcgtggaaaggaatggagttacctgagaggagggctcacaacattagatcgtgactacggatggatcaataacatccaccacgatattggaactcatgtgatacatcatcttttcccgcagatcccacattatcatctagtagaagcaacagaagcagctaaaccagtactaggaaagtactacagagaaccgaaaaactctggacctctgccacttcacttactgggaagcctcataaagagtatgaaacaagaccatttcgtaagcgatacaggagatgtcgtgtactatgaggcagatccaaaactcaatggacaaagaacatgaggacatactgcagtgaaccaggcagacaagttacataaattcatcttggcccattcattatgttctttttgttttggtgtaaagccttttcgagattaaaaaagcattaatttgtagaaacctgtggtaaaactctcgatcaaatgaaataagatatgatcagtagaatacatttc

SEQ ID NO: 99795 - DNA, 1946 bp, Arabidopsis thaliana columbia
ggaaagctggtacgcctgcaggtaccggtccggaattcccgggtcgacccacgcgtccgcagagacagagatagaaattgagagacgataagcaaagtagaaaacacaagtttctctcacacacattatctctttctctattaccaccactcattcataacagaaacccaccaaaaaataaaaagagagacttttcactctggggagagagctcaagttctaatggcgaacttggtcttatcagaatgtggtatacgacctctccccagaatctacacaacacccagatccaatttcctctccaacaacaacaaattcagaccatcactttcttcttcttcttacaaaacatcatcatctcctctgtcttttggtctgaattcacgagatgggttcacgaggaattgggcgttgaatgtgagcacaccattaacgacaccaatatttgaggagtctccattggaggaagataataaacagagattcgatccaggtgcgcctcctccgttcaatttagctgatattagagcagctatacctaagcattgttgggttaagaatccatggaagtctttgagttatgtcgtcagagacgtcgctatcgtctttgcattggctgctggagctgcttacctcaacaattggattgtttggcctctctattggctcgctcaaggaaccatgttttgggctctctttgttcttggtcatgactgtggacatggtagtttctcaaatgatccgaagttgaacagtgtggtcggtcatcttcttcattcctcaattctggtcccataccatggctggagaattagtcacagaactcaccaccagaaccatggacatgttgagaatgacgaatcttggcatcctatgtctgagaaaatctacaatactttggacaagccgactagattctttagatttacactgcctctcgtgatgcttgcataccctttctacttgtgggctcgaagtccggggaaaaagggttctcattaccatccagacagtgacttgttcctccctaaagagagaaaggatgtcctcacttctactgcttgttggactgcaatggctgctctgcttgtttgtctcaacttcacaatcggtccaattcaaatgctcaaactttatggaattccttactggataaatgtaatgtggttggactttgtgacttacctgcatcaccatggtcatgaagataagcttccttggtaccgtggcaaggagtggagttacctgagaggaggacttacaacattggatcgtgactacggattgatcaataacatccatcatgatattggaactcatgtgatacatcatcttttcccgcagatcccacattatcatctagtagaagcaacagaagcagctaaaccagtattagggaagtattacagggagcctgataagtctggaccgttgccattacatttactggaaattctagcgaaaagtataaaagaagatcattacgtgagcgacgaaggagaagttgtatactataaagcagatccaaatctctatggagaggtcaaagtaagagcagattgaaatgaagcaggcttgagattgaagttttttctatttcagaccagctgattttttgcttactgtatcaatttattgtgtcacccaccagagagttagtatctctgaatacgatcgatcagatggaaacaacaaatttgtttgcgatactgaagctatatataccatacattgcattatcttagataaaaaaaagttctagcaaaaagtataaaagaagatcattacgtgagcgacgaaggagatgttgtatatatactacaaattaagcagatccaaatctctatgtttccgatactgaagctttatactaatacaatatacattgcaataaaaggaataaaaaaaagggcgaaagctctagaggatcccagcttacgtaggcg

SEQ ID NO: 99796 - DNA, 402 bp, Arabidopsis thaliana columbia
ctctaataattctccagaacattttgcacattccgtttcactccgtgttgttggatcccccaaaggtaaaacctttttccccagattatttctatttcgttcctctcttctcgatttcgactgattttccgtttttatgctcttctcttttccattttgaactccaattttgattctttaaagaaaatgagttgctttgggtgttgtggggaggatgatgatatgcataaaactgctgattatggaggtcgtcataaccaagccaaacactttcctccaggaaatgatgcaaggcaccaccaagcctctgaaactgcacagaagggtcctccagttgtgaagttgcagcctattgaagtacctattatcccttttagtgaactcaaagaagcaactgatgat

SEQ ID NO: 99797 - DNA, 737 bp, Arabidopsis thaliana columbia
  unsure (1)..(737): unsure at all n locations
gtgacattanatccagcaatgtcctcctctttgaagatgatgttgccaacattgctgactttgatctctctaatcaagctcctgatatggcagctcgccttcattccaccggggttcttgggacttttggttaccatgcccctgaatatgcaatgaccgggcagtttaaatgccaagagtgatgtctacagctttggagttgtcttactcgaacttcttacaggccgaaagcctgttgatcatagactacccagagggccagcaaagtttagtcacatgggctacacctaaactgagtgaagacaaggttaaacaatgcgttgatgcaagactcggtggcgattaccctccaaaagctgttgctaagttagccgcggttgctgcgttgtgtgtgcaatatgaagcagattttaggccgaatatgagtatcgttgtcaaagctcttcaacctttgttgaatgctcgagccgtagctccaggggaaggagtacattagccacctctgtctcggcgtttctcttcttaccagaaaatttgatttttacatatacacgatataccagtcaaaacttaatttatgtgcatagaaatctctgtaatgttttttaaaaaactaatatttttacattaaatccgttacccttattattaaaaaaaaaaaaaagggcggccgctctagaggatccaagcttacgtacgcgtgcatgcgacgtcaagactcttctatagtgctccta

SEQ ID NO: 99798 - DNA, 1001 bp, Arabidopsis thaliana columbia
atgatacttcagctctctacgactcactattgggaaagctggcacgcctgcaggtaccggtccggaattcccgggtcgacccacgcgtgcgcccacgcccacgcgtccgaataattctccagaacattttgcacattccgtttcactccgtgttgttggatcccccaaagaaaatgagttgctttgggtgttgtggggaggatgatgatatgcataaaactgctgattatggaggtcgtcataaccaagccaaacactttcctccaggaaatgatgcaaggcaccaccaagcctctgaaactgcacagaagggtcctccagttgtgaagttgcagcctattgaagtacctattatcccttttagtgaactcaaagaagcaactgatgattttggatcgaattctctcatcggtgaaggctcttatggaagagtatactacggggtattaaacaatgatctgccttcagcgattaaaaagttggattctaacatacagcctgacaatgaattccttgctcaggtttccatggtttctaggcttaaacatgataactttgttcaacttcttggctactgtgttgatgggaattcacggatactttcttatgaatttgccataagtggatctcttcatgatattcttcatgggagaaagggtgtgaaagagcacagccaggtcctgtcttgtcgtggtatcaacgagtcaaaattgcagttggagcttgcagaggccttgagtacttgcatgataaagctaatcctcacatcattcaccgtgacattaaatccagcaatgtcctcctctttgaggagatgttgccaaattgctgactttgatctctctatcaagctcctgatatggagctcgcctcatccacccgagtcttgggactttggtaccatgcctgatatcatgaccggcagtaatgcttaaatgccaagagtgatgtctacagctttggagttgtcttactcgaacttcttacaggtcgaaagcctg

SEQ ID NO: 99799 - DNA, 535 bp, Arabidopsis thaliana columbia
  unsure (1)..(535): unsure at all n locations
ttaggacgcactatagaatacnttgacgtcgcatgcacgcgtacgtaagcttggatcctctagagccggccgctccctgcgttttttttttttttttgcgtctgtaactcaaagactttgattgattttcacttccaaatgttaaaacttgaacaatagtaataagtaaggacaaaactttcacaccacaaaacgattatgtgaagtgaataccagacttgttgaacaaggaaagaagatacaaaaactcttgttgtgatagctttgaagatctcttctcctcgaaaccaccttccttcaagacattcataactttctccttgaactctgatgtttctcctccgtctccttccccctcatccatctccatatcatcggcatccatttcgttgtcgtcatcttccattcccatgctctggtcaccaagatccatggaggtggtgttcaaagcaggttctccattgttctgcaacgaagctagtacggcctgaagagtcttgaagttcttcttcagcatggaaagaacagacttttg

SEQ ID NO: 99800 - DNA, 529 bp, Arabidopsis thaliana columbia
  unsure (1)..(529): unsure at all n locations
atgatcctgccagctannnnnnnnnnnnnnnnnnnnnnnnnnnnnnnnnnnnnnnnnnnnnnnnnnnnnnnnnnnnnnnnnnnccacgcgtccgcagctccgtacgatcacaaggattcactgatttctaagcttttcatagaaagaagaagaaaaaggcggaattcgatggtggatgcgattcaagtagctgagctgagaagattcgtcgagcagttgaaattgaatccttcgattctccacgatcctagtctggttttcttcaaagaatatctccgaagtttaggagctcaagttccgaagattgagaaaactgaaagagattatgaagataaggctgagacaaaacccagtttctctcctaaacatgatgatgatgatgatgatattatggagtctgatgttgaactcgacaactctgatgtagttgaaccagacaatgagcctcctcagccgatgggagaccctactgctgaagtgaccgatgaaaatagggatgatgctcagtcagagaagagcaaagctatgg

SEQ ID NO: 99801 - DNA, 1310 bp, Arabidopsis thaliana columbia
  unsure (1)..(1310): unsure at all n locations
nnnnnnnnnnnnnnnnnnnnnnnnnnnnnnnnnnnnnnnnnnnnnnnnnnnnnnnnnnnnnnnnnnccacgcgtccgcggacgcgtgggcggacgcgttcttctatcttctccgtcatcgttctctctctctcctctcccggagatttttactcaggcgttcttctgtggatcagaggtgaaaaagatgaatcattgcaaccttcagcagaacgccttcatgtctcgtgaggagatgatgggatttgaccgtaaggatcttgttgtttgtcctaagcctcgacgtgttggtttactcgccaacaacgttattcgtcctcttagattacatatgagtcaagctgcagccgacttgtgtgattctaaagctggtgctgagcttttggaaatcattcgtagaaaggaggataatggaacaatagggcagttactatcatcatccccaccgtattttcccggttcaccaccgagtagagcggcgaacccattagcccaagatgctcgttttcgagatgagaaactcaatccaatctcaccaaactctcctttccttcagccatattcggcaaccgggtttccatctccatcttcttcctcatcatcgtcgtcttcccgtggttgtgttagaatgaaatttggactcaactcgcctgcagttagagtagaaggatttgattgcttgaaccgtgaccgtcaaaactcgagcatccctgccatggcttagtagacaaacaacaaaaaaacaagtgtacatagagattccggaatcgttcgttcgccaatgcctaacagaggaggatttgattactactgctgcaactattactactaccatttttgaaagtaaatgaatatgtttttgtttttcatcttctcctaagagagagagagagggaagaggaaggaggaagatgaagatcagttaccgtcgccggtcaccgtttaactgttttattcaggttagtgtttgtatataaagatgcagtatttaaaagaagagtcgaatctatgtattcgtttggtgtttttctgggtcgggcggatctttagtactgtttcatatataactaagagggaagattagaagatgaagaagctgtaaaattttcttgggaagaaaactctggtttctatcttctcgttgtaatatagataatcaacttggatttatcttctttcagattcaccattgtatatagtaatgtttatttttcttggggtctagaggaaccaaacttaagtacgcgtgcatgcgnnnnnnnnnnnnnnnnnnnnnnnnnnnnnnnnnnnnnnnnnnnnnnnnnnnnnnnn

SEQ ID NO: 99802 - DNA, 535 bp, Arabidopsis thaliana columbia
cgactcactatttggaaagctggtccgcctgcaggtaccggtccggaattcccgggtcgacccacgcgtgcgctgtacgacagttcttggaagtatgttattccaaggatgatttacgacgacgtcgttcacgtcctgcatttgtttcattattacgtacattatgttttaaattacgtgatgatactggattatcgggaatcttttttgatgaacatccagagaataaaaatcgtcctcctgattttcttcttttcacagcacttacaacacttatcaatagtgacacggatgaaggacgacatgcattagaaggtttactttgtatcatacaattaccacatcctaaaattgccaattttattgtagatcaaacaacattttgtatgcgattggtaaaaggattagaagaacgatataaacgtgtaccattgacatttgataccaatgtgactgaattaccaatatcacatccacatattgcctctatgcttgatcgatggacatatattgatacagtatgtcgttcagcatt

SEQ ID NO: 99803 - DNA, 588 bp, Arabidopsis thaliana columbia
  unsure (1)..(588): unsure at all n locations
acgcccgcggcaccggtccggggttcgcgccacgcgcccgtctttccactgagcgcataacttttttgagacaagagactcctctctctctctctgctctctttctctccccctctctccggcgatggttgttgctatggaccaacgcaccaatgtgaacggagatcccggcgccggagaccggaagaaagaagaaaggtttgatccgagtgcacataccaccgttcaagatcggagatataagggcggcgattcctaagcactgttgggttaagagtcctttgagatcaatgagttacgtcgtcagagacattatcgccgtcgcggctttggccatcgctgccgtgtatgttgatagctggttcctttggcctctttattgggccgcccaaggaacacttttctgggccatctttgttctcggccacgactgtggacatgggagtttctcagacattcctctactgaatagtgtggttggtcacattcttcattctttcatcctcgttccttaccatggttggtaagttacttatntttattcttttctactattaatttctcttttactggggtatttgtaattat

SEQ ID NO: 99804 - DNA, 1486 bp, Arabidopsis thaliana columbia
gtcgacacatcttctctctttatataaacaaatctcacataccccaaaaattcatcaaaccctttcttcaccacattattttcactgagcgcataacatttttgagacaagagactctctctctctctcttctctctttctctccccctctctccggcgatggttgttgctatggaccaacgcaccaatgtgaacggagatcccggcgccggagaccggaagaaagaagaaaggtttgatccgagtgcacaaccaccgttcaagatcggagatataagggcggcgattcctaagcactgttgggttaagagtcctttgagatcaatgagttacgtcgtcagagacattatcgccgtcgcggctttggccatcgctgccgtgtatgttgatagctggttcctttggcctctttattgggccgcccaaggaacacttttctgggccatctttgttctcggccacgactgtggacatgggagtttctcagacattcctctactgaatagtgtggttggtcacattcttcattctttcatcctcgttccttaccatggttggagaataagccaccggacacaccaccagaaccatggccatgttgaaaacgacgagtcatgggttccgttaccagaaagggtgtacaagaaattgccccacagtactcggatgctcagatacactgtccctctccccatgctcgcatatcctctctatttgtgctacagaagtcctggaaaagaaggatcacattttaacccatacagtagtttatttgctccaagcgagagaaagcttattgcaacttcaactacttgttggtccataatgttcgtcagtcttatcgctctatctttcgtcttcggtccactcgcggttcttaaagtctacggtgtaccgtacattatctttgtgatgtggttggatgctgtcacgtatttgcatcatcatggtcacgatgagaagttgccttggtatagaggcaaggaatggagttatctacgtggaggattaacaacaattgatagagattacggaatctttaacaacattcatcacgacattggaactcacgtgatccatcatctcttcccacaaatccctcactatcacttggtcgacgccacgaaagcagctaaacatgtgttgggaagatactacagagaaccaaagacgtcaggagcaataccgatccacttggtggagagtttggtcgcaagtattaagaaagatcattacgtcagcgacactggtgatattgtcttctacgagacagatccagatctctacgtttacgcttctgacaaatctaaaatcaattaatctccatttgtttagctctattaggaataaaccagcccacttttaaaatttttatttcttgttgtttttaagttaaaagtgtactcgtgaaactcttttttttttcttttttttttattaatgtatttacattacaaggcgtaaagttttgttatttctcttttct

SEQ ID NO: 99805 - DNA, 783 bp, Arabidopsis thaliana columbia
gagaaaataaagaagacgaagacgaaacctgaaaccaaagccaaattctctcgattaacagaaattcctttggatctatcgtcaatggacctaatacctcagcagctcaaggccgtaactcttacacacgtccggtaccgtcccggagatcagctcggacatttcctcgcctggatctctctcgtcccagtcttcattagcctcggtggattcgtctctcatttccttttccggcgtgagcttcaagggatcttcttcggtataggtctcgtgatctcacaattcatcaacgagtttatcaaaacatctgtagagcaagcgcgtcccgagacatgtacgttgctcgaagcttgcgattcacatggatggccatcaagccactcgcaattcatgttcttcttcgctacgtatttcagtttgatgggatgtaaaggaattggattctggtttggtttaagaagcagatggattatgaatcttcttcattggtctttagctgttgttaccatgtattctagggtttatttaggttaccacacggtggcgcaggtttttgctggtgcggctcttgggggtattgttggtgcgagttggttctgggtggtgaattctgtgttgtatccattttttccggtgattgaggagagtgtattggggagatggctatatgttaaggatacttcgcatattcctgatgtgttgaagtttgaatatgacaatgccagagctgctaggaaggatatggattctgctaaatctgattaatttggctaatttgatttg

SEQ ID NO: 99806 - DNA, 526 bp, Arabidopsis thaliana columbia
atagaagagcttgacgtcgcatgcacgcgtacgtaagcttggatcctctagagcggccgccctttttttttttttttttttttttttttttttttaaataaaaagaagaaacaatttattatcaccaaaagaattaaacaagaaaataatactctttggggaatcttcaccttaatgactcagatcaggttttgactattaaagaacatcttatatatcaaacataaactaaacattagtattaatcttctggagtattgggtttactctatattaacaaccatcacagaagttcatcaagaaacgtcttccctttatatttctcgaccttaaatcccatctcctccatccgcaaccgctctgtctcgagctcagcgagctctgctttcatctcctcgaccctcaacctcgcctccgctacttccttctcaatccgagccaaatcagcttcttgaatctccatttcttgtttcttagacctcaccaatccttcttgcctctccttctttgagtctgtgttctcttg

SEQ ID NO: 99807 - DNA, 2097 bp, Arabidopsis thaliana columbia
  unsure (1)..(2097): unsure at all n locations
gnnnnnnnnnnnnnnnnnnnnnnnnnnnnnnnnnnnnnnnnnnnnnnnnnnnnnnnnnnnnnnngtaacaattacatctgctgattcagaagatgaagcagaggattctgatgatgaaagcatggagaccattatcctgggcgacaaaagaatagggatcaaaacaagtgttctagaggaaaaggccacggcttgtaacatgctttgttgctatgctgatgagttaaaagaaggattttttccttggattgatcaggttgcacctacattggttcctttactgaaattctattttcacgaagaagttagaagagcagctgtttcagccatgccggaactaatgcgctcagccaagctggcaatagagaaaggggaatctcaagggcgagatctatcatatttgaagcagctttctgactacattattccagccatgctggaagctttgcataaagaacctgatacagagatctgtgtgagtatgttggaagctatcaatgaatgcttgcagatctctggaaatcttttggatgaagggaaaattagatccatagttgatgagataaagcaagttatgaccgcaagctctagtaggaagcgagagaggggagagagggcccatgctgaagactttgacgctgaagagggagagcttattaaagaggaaaatgagcaagaggaagaaatttttgatcaagtcggtgaaatattgggaacattggttaagacattcaaggcctcatttctacctttcttcgatgaactgtcctcttacttaactcctatgtggggaagagataaaacagcggaagagagaaggattgctatatgcatttttgatgatgtagcagaacaatgccgtgaagctgcctttaaatattatgatacctatcttccatttgtactggaagcttgcaatgacgagagcccagaggttcgacaggctgctgtttatgggcttggcgtttgtcctgagtttggcggctctgtattcaagcctcttattggagaggctctgtcaagattaaatgttgtgatacagctgccaaatgctcggcaatctgaaaatgccatggcatatgataatgctgtatcagccgtgggaaagatctgccaatttcaccgtgatagtattgattcttctcaggtacttcctgcgtggttgaactgtttgcctataagcaatgatgtccttgaagccaaagtggttcatgatcagctctgctcaatggttgaaaggcaagatgtagaccttttaggccccaataaccagcatcttccgaaaatcttaatagtttttgccgaggtacttacaggggaagatgtggtgacacaagagacagcaggtcgtatgattaaatatattaaggcaccttcaacagacactgccaccatcgggcgttggcctcaacatggtcaacgctgaaacccgaacagcagctcgctctccaatccatgctttcctcctaaattcaatccaatccgatctctctgtttatttttacagttttgtgagctctgttttcaccacaaagcgtcgtcagttttgcatttatgtgtttacaaaagtgtttcttcttcttttgcatttttcatctaattcttttgggagggatgatgatgggtcggtccatccttcagaagttacaaaatgaaaatttctatctttatggtaggaagtgtatattaggagggaaggatgaaattgttagtgaaatgtgtcattgggtatggttccccaaatacacaggtctgctgttggtgtcggtgttggtttgggtttgagagtgggatgaagttttggtgctttatacgagaaggaacaaaacagaaagatttgattttgaatttttgtttttgtatgcaattgggaattttggaagaatgattcttttctctcattgcctttgttgatttgtactcttttggacactcttctttggccttttcttaataaaagaaatgtcttttttaaaaaaaaaaaaaaagggcgaacgctctagaggatccaagcttacgagcgcgtgnnnnnnnnnnnnnnnnnnnnnnnnnnntgtcctaaaaannnnnnnnnnnnnnnnnnnnnnnnnnnnnnnn

SEQ ID NO: 99808 - DNA, 538 bp, Arabidopsis thaliana columbia
  unsure (1)..(538): unsure at all n locations
nnnnnnnnnnnnnnnnnnnnnnnnnnnnnnnnnnnnnnnnnnnnnnnnnnnnnnnnnnnnnnnnnnnnnnnnctttttttttttttttttttccgtaatgtagaaacttgagagactttttagtacagtcataagttatcaaatgatcctaccaaaaagaaaagaaaagttttacagaataaactgaagtgtgtgacaaattctaaacttccaatgaaaacaccagaacgtttataaaagtgatccggaatttcatcgggaatcttcttcgggatcccgctgccatgaatcctgagattctgactgtaggttaatgatctgagaaactagaagcttcgagatcccacttatcgctgcctggacctcatctggttcccttgagcctctccaagccgaggactgcgagctcaatgagtactcgcctgctgcaacttgtgtcttctttgacgttgcaagaaccttctccaaatctaactgtgataatggcctagggtccaaacatggtttcccctttctctctgcatctaggatttctctg

SEQ ID NO: 99809 - DNA, 539 bp, Arabidopsis thaliana columbia
  unsure (1)..(539): unsure at all n locations
ggattgtttaggtgacttatangaagactatgacgtcgcatgcacgcgtacgtaagcttggatcctctagagcggccgccctttttttttttttttttaaccaaaagcaatcagaaagtttccaaggactaaagcaaaataggtgtggcattcagtctagccgagccgaggatagcgtgattaaaagatacacatagataactaaaacaaaacaaggatcggatctgataagtcaaattcctagggggactttgttcaaagacttcattgttcatcccacttgtcacacggctccaagagttggacattgcaactatatatatccttgtactcttctatcatgtccaagataagatcatccacttgagggtcgtttccaaacggtgaaggatcatactcttctctatagatcttcatctccttcaaacatggaaagttgtccaagaaatgctctatcaggtgcatctctttcattggtactctaaactctttaatctctaccacttttactggaaaaaatttgagcgaacggcctttat

SEQ ID NO: 99810 - DNA, 760 bp, Arabidopsis thaliana columbia
gacgcctgcaggtaccggtccggaattcccgtgtcgacccacgcgtccgcagaaatagagaaaaagtttcaatctttcttcatcttcttcctccaaaatccttgatttctaaaaaggagaagaagagaagagaacgcgattaccttgattcaccctcctccttcaggtttgggaggctcgaatactcaggaaatgaaaggggcaagtggtgctgttaagaagaaaccccaggtgttgaacgaagctggtgaggcggagacggcggtggaaacagtcggagaaagccggaaaattagtggagacggtgggtttggcagtgacgacggcggagggggaggtggaggtggaagtggagagtcgattcttcgcgagattggtgatgataggcctacggaggatggagatgaagaagaagaagaggacgaggatgaagatgatggaggtgatgaggaagatgaagaaggagaaggagaaggtgggcaagaggaaaggccaaagcttgatgaagggttttatgaaattgaagctattcgtcgtaagagagttcgaaaaggcaaggttcagtatctaattaaatggcgcggatggcctgaaactgccaacacatgggagcctttagagaatctccagtctattgctgatgttatagatgcctttgagggaagtttgaagccaggaaagcctggtaggaaacggaagcgcaaatatgcaggtcctcattctcagatgaagaagaagcaacgtttaacatttacattac

SEQ ID NO: 99811 - DNA, 523 bp, Arabidopsis thaliana columbia
  unsure (1)..(523): unsure at all n locations
nnnnnnnnnnnnnnnnnnnnnnnnnnnnnnnnnnnnnnnnnnnnnnnnnnnnnnnnnnnnnnnnnnnnnnnctttttttttttttttagaaattaacatatgatagattaaaaaatactcaaaaattaaacaaaagttgacattaactgtccaaattttatgaggattcagattcaatgtagacatgaaacaaatagagagtggagaagaatcttaacataatctaaatgccactaaacatcaaagttcatacgattgtctactgttacagcattttttacaacatattaagcgactctgcctatttttgtcggcgggtgaacaacgcattacgatctgcctttttctttgatctttcacaagaagctggttccgacagagagatcaactaaatccttgagaatcgaatatcgggttgtcccaatctggtgagcaagttcaagctgttcctccaatggaagcatctcgtaatggcatagtaactcgcagtcaactatgctgtcaggcccagatcgtcgagcct

SEQ ID NO: 99812 - DNA, 533 bp, Arabidopsis thaliana columbia
  unsure (1)..(533): unsure at all n locations
ggatagannnnnnnnnnnnnnnnnnnnnnnnnnnnnnnnnnnnnnnnnnnnnnnnnnnnnnnnnnnnnnnnnnnnnnnncttttttttttttttttttgattgttttttcaaacgcaaacctcatttttattttttgaataaactatcatgaaatttaaaacatttacacataaacaaattcaaaagtcgatgcatgtattatatacacacaaacgtaatcataatcttaaaacaatcgtattaaatacatcttcaatcctaaatgcaaacgcgatcaacgatcagtaagtttgttcgccgtgtttgagggaagagaacactgcctttagttcctacagaatagagggaatcgctatttataccttgtcggccactgaattcctctcaagggtcagggtatcagttgagcgactagcaatgtccgtctttcgattcgatacattctctgtttagaaccctgagccgatctggacttgcttagcttaataccatgagatagcaaggtctgcaagtggaggcatttccttggctt

SEQ ID NO: 99813 - DNA, 543 bp, Arabidopsis thaliana columbia
  unsure (1)..(543): unsure at all n locations
aatgtattaggacanntaggtgacctatagnaagactatgacgtcgcatgcacgcgtacgtaagcttggatcctctagagcggccgcccttttttttaacatttgaactcatgcatcaattatttgcttttaatcattacatagtgtcacgaaggacaagagaatgacaaagaaaaaaagaacataaaaaaacatatactagtaaccaaactatgggtcaaacacaaatcaaagaattattgccagatttgttagattctgtgtagagaggcccagaagacaaaagcaatataaatcccacatctttctttctgcttcttatgccacaatctgctgctcatggtctatatacatttgctctgcccacgacggcagcttaaacttgtctctactcgctgcaccattcaccgtattcccaaccctctcattcactctctctggtgcattctctttcaccagtgagttcacccacgacacatctggctcgtcactgtagtctctagcagggcgtgacacactgttgttgttgtttccatgaatgcc

SEQ ID NO: 99814 - DNA, 488 bp, Arabidopsis thaliana columbia
  unsure (1)..(488): unsure at all n locations
actcngaaggttttacccagttttggatnccggggccnngnagtttanccnttcccatgcccatgtgtttgttccccatgttgtgcccatatatggtnccgtattnccagntancggtccncataacgagtcagacaagattgcacgagccgtccgggttaaattgcctcttattgaggttggtcccaaggtttttgtttaaatccaattaagatatttggaggcagctctgggaggtgcaacgctttacgagagcccattctatgtatctccaaaccagattcgagctttggagaaaagaaataaagctgggaaatttgctaagaaaataaaggcaaaagcaagaagaaagatgcatgaactctcaaacccattggagcctgatgaatttgcagacatgtggaacgatgaatgataaaagtcgaccaaagtttcttttttgctattgtcaacttctaaattcacaaaatcaacgcagttttgtcttt

SEQ ID NO: 99815 - DNA, 838 bp, Arabidopsis thaliana columbia
  unsure (1)..(838): unsure at all n locations
atagannnnnnnnnnnnnnnnnnnnnnnnnnnnnnnnattccgtttnnnnnnnnnnnnnnnnnnnnnnnnnnnnnnnnctttttttttttttttttttttttttttgccgccactttttttttttttttattataaatcaccatgtttacaaaacacatatagttaagttaaccgttactttctttagcttatctctaagtcttggaaacaagaagaaaaaaaagagcatcaaaaggttcagttatgcttttttgtgtatttgggatttagggtgttctttgagctgataaggatcgactgaaggagctaaccagagacccaccagaatgatcaagtgtagacacaatagcaaacccgaggaggacggtgttgatggataaacattccaacagagctcaatgccgaggaacatgatcaagcgcagccaagtgggaaacggtgttctccatagtagataaggtagcgaatagaagtaccatgagtagaactggtagtgcagagagcgagcaaatacaatgccgatgaaattcccaacaaacatggccgtgacgacatgttctttcgtaataatccgtgaggctgatacatcactgaacgagagtgaagacggaagtgtcaagaagaaatgcctagaacgcatgaagcctataatcccgccttcatgcttgcaccacttattatttgcgaacgccacaaggagaaaaaggtgagcaattgagcaagccatacctgcaaaattcttttggaaccacaaaaaactccgtttttgggaaacaaaattntggaaggtttaaacaggacccaagaaaatggaaatggaaaaaaccaccgttccca

SEQ ID NO: 99816 - DNA, 456 bp, Arabidopsis thaliana columbia
acgcgtccgcacacaattgggaatggacattgtccacagatcacaaaccgtctctacaacttcaccggaaaaggagatagtgacccgaacttagacacggaatacgcagtcaaactcagaggaaaatgcaagccaactgataccacaacggctctagaaatggatccaggaagctttaaaacgttcgatgaaagttacttcaagcttgtgtctcaaagaagaggattgtttcaatctgatgcagctcttttagacaatcaagaaactaagtcttatgttctcaagagtttgaatagtgatgggtctactttctttaaagactttggtgtctccatggtaaaaatgggtcggattggagttttaacgggtcaagttggggaagttcgcaagaagtgcagaatggttaattatgtatattttatatagatatgtctgtgagattgtttatgattatgt

SEQ ID NO: 99817 - DNA, 490 bp, Arabidopsis thaliana columbia
acgtcgcatccacgcgtacgtaagcttggatcctctagagcggccgccctttttggggtttttttttttttttttttatgaacacatttcaatttatattgcatggaatcaacaatttacttaagaaaacgttgagagtgatgaaaccacgattaattcagacttcaatatcactttctgtactccgatcatcacgctcaacaatttaatcacttccctaatcaaattaactgcatagtaatcatttaaattactatggtgctggacctccttgatgctaattattatggcgagacgaagaagccagagcgaccatggagctagctagcttattaatggcttccactaatccattcatgccttctctattcatctcaacattagattcttcgatcttgagtctcctctcttgtacgttcatcacttctttatgtctccgatcttgtctctcctcactctccctaatcgcgtttgcgatcactgacacact

SEQ ID NO: 99818 - DNA, 448 bp, Arabidopsis thaliana columbia
accacgcgtccgctttctcttgctaaactccatcatcttctctttcttttttttcacttgtcccatttttttatattttcatctttctcttttggagtttcttcttctactgactctactggtaggtgtatggatttgtgagagaagaaaaaaaagcacaatctttgaatggactggaatttcaaacttagctctggttatttatctggattcgatcaagaaccagatttatcaccaatggatggttcgatctcgtttggtgggtcgtcacagtcaaaagcggatttttcatttgatctaaaacttggaagaaacattggaaactcttcctctgtttttggtgatacagagcaagtgattagtcttagtaagtggaaagatagtgctttagctaaaccagaaggttcaagaagctcgagttcaaagagaacaagagggaatggtgttg

SEQ ID NO: 99819 - DNA, 568 bp, Arabidopsis thaliana columbia
  unsure (1)..(568): unsure at all n locations
nnnnnnnnnnnnnnnnnnnnnnnnnnnnnnnnnnnnnnnnnnnnnnnnnnnnnnnnnnnnntctttttttttttttttcactgaaaccgattcattgatatggatccaaaacaaaccgctactaaagtttcactgatttttaacattgagattataaacatcaaaaacctacaacagtataaactaaccaacacaagaaaccgcgttgttctttatgttttcagtcccatctaatgcggcaaccacgagcatgaagcgtctcgagcaattccgatgagagcaagaatctgagaggtgcgagaagtttaagcttcttgagcctattgcaacaggctcttagagcaaactcaaacccttctacagtcacacggctcagatgaactaagtcaacgtcttgaacccgactcagattgctcatcaacatgcatagagccgcatcagacaccgagctatggcacatgtttatctgtcgtaggtctttcgagaagtaagcgagcgcccaaaaacccgaatcatcaatattctcgcagagtttaacgtccaagtaacccaatttcttgcagccgga

SEQ ID NO: 99820 - DNA, 607 bp, Arabidopsis thaliana columbia
  unsure (1)..(607): unsure at all n locations
nnnnnnnnnnnnnnnnnnnnnnnnnnnnnnnnnnnnnnnnnnnnnnnnnnnnnnnnnnnnnnnnnnnnnnnctttttttttttttttgtcgtaatgtcgttaaatattgtaaaaccttttttctgaagtatacgccactacaaaaaaactgttgtataaataaaaatccacaaaaaaggcagaagaatatctagctctctctctcaatctgtctgtctctgctctctctatcttccattgaatatagaactttctatcaagcacataagaacttgaagaataattataaagtttccaaccgaaagtatgtacaaaggaagaagattgtctttccttttcttctgctttgctccagaggagactagagagacctatcagttcagtttgtgttggatttgacggtgaactgaaacgagaaaatccacgtacgaagccccacccgatcccctgtcctctaccatatacgattggaacaacatatttccagctggatctcctttcttgcacaatttaatgcgtaggtaagaacttctttgcctccttatttcattcaccacggcattgaccctctttgatagctgattatcatacttttgcagcacatact

SEQ ID NO: 99821 - DNA, 539 bp, Arabidopsis thaliana columbia
  unsure (1)..(539): unsure at all n locations
nnnnnnnnnnnnnnnnnnnnnnnnnnnnnnnnnnnnnnnnnnnnnnnnnnnnnnnnnnnnnnnnnnnnnnnnnnnnnnnnnnnnnnnnnnnnnnnnnnagaagagaagaagaatttcattataatacttttgaattcatacggaaacatcatttctcaacaagaaccaatacctttacatataaaacgataaaagatagagaatctaaaatgcagagtttgcaagagagccatctttcaagccttgttcatggagcagatgacataagagacttggctggtgaaatcagagcaacagcacctcttccaagtttcgaatacttcttcaacacaccacgtagcttgctctcccccgctttcgagtgaatgaaagctaaaagctttgagcaatccatgagctgagattcggagtagcctgtgtggaatttcagtgtatcagtccaagtaggagtcttgttcaagcaacaccttgctgtgtagaccgctgatgcagcaagcatggaaggacagaacattaaactgtcgtgatgcatcaaaccc

SEQ ID NO: 99822 - DNA, 654 bp, Arabidopsis thaliana columbia
  unsure (1)..(654): unsure at all n locations
taggtgaacctatagaagactttgacgtcgcatgcacgcgtacgtaagcttggatcctctagagcggccgcccttttttttttttttttgattcttaattgccttcatttccggtttaggtaaccggtcatagaggtttgtggtataaaaacaaagttatggtgtgttttacactttacagagtaagaaactgtaccgtctaacaagagattggttctatttggtattatcacaatgatttacaaaggcctcaaaagtgggtaatcttcaagtagttccctttctgacaatgcgtcggcttcgttctgcggtgtccatagtacttctactgccattattttgtttcttggtattgacccgagtttcagtaaggcttccttcagatctgtagttccgtttattggtggcagtttatgtataccctctgcagccatcaagatggttaccacaatatattcattgctgaaaccgctagctttccgaatcttcgagctttgtctctttatgctattcacgttaacaaggggctcctcatcaaattttccccggtctccaatggggggtgggttaaccggtctcccctttccaaaaccgggncacancncnggtganacaangatnagaaacagggggccanaagnaatgtgcccgttc

SEQ ID NO: 99823 - DNA, 537 bp, Arabidopsis thaliana columbia
  unsure (1)..(537): unsure at all n locations
ttgacgtcgcatccacgcgtacgtaagcttggatcctctagagcggccgcccttttttgtgtttgttttttttaaccaaagatattaattattacacgacttttaaaagtgaagtcataatccattgttcacgacaagcttcatattaagttgaggaggttttgtccgaaaaaaccaacaccaaaccaaatcaaataatcctttagtcacaaaaatcaaacaattttttttataaagaaagaagaaaaaacgatcctatacaagagagactatcctccactcttcgttcttcctctgcacttctgtcactttggtcgtttgaaactagagttaaggattgttgtcttgaaaaaaacataccaataatcaaatttagcgaaaacacccgaaaggctcctaagctttttggcttcttcagtttctggcgcaatcggggcgactttcacctttgccattttcctatcctttggccccggtgggcctgagacccaaccgtgggtctaggggaacttgtttcccatggggaancaggcacgg

SEQ ID NO: 99824 - DNA, 833 bp, Arabidopsis thaliana columbia
  unsure (1)..(833): unsure at all n locations
cccacgcgtccgcccaccttctctctccctctctataacaaacattaatacacacaccaaaaaaaaacctgtttatgtctcaaagatctctgattcctcattcttcttctatagcttttggtctccattctcatctcttaatctccagtgagatcagctccaattctaactggtctctctaaataaaaaacagaaataaaaatccaacctttttcaattttcgttcaattttcccggaaaaaaaagcgatccttttgatttttcgatttctccaagtaacaattcaaaatgggtctaaagggttttgctgaaggaggaatagcttcgattgttgcgggttgttcgacccacccgcttgatctaatcaaggtccgaatgcaacttcaaggcgaatcagctccgattcaaaccaatctccgaccagctcttgcttttcagacttcgaccaccgtcaacgcgcctcctctacgtgttggtgtaatccggagtcggacctcgtttcaattaggggagaaggcactgcgtgctctgttttccggcggctccgcccccgttcttcgtcaaactctgtattcaacggctcgtatgggtttatacggcatcatcaaaggnggattggaccgacccgggaacaaaaaacggtgcctttaaattgaaaaaaattcggtgccggagccatttgccgggnnaaatcggagccgccgtttgggatncttctnacggggcgnttgttaaggttaaaacngttngtcnntttcccttaccttttngagaactcaaaaacgtttttncnggtnncgaaatattcgggnaagngttngccttttggnggc

SEQ ID NO: 99825 - DNA, 370 bp, Arabidopsis thaliana columbia
ataaaagggcttctctctggggggaatttttctttacaaaattctcaacaaagccataaaagaaaggcccaatacccgaagaaaccgagacttacaaggcaaaggaccaaacacaaactctctggaatcactgcacaaacatatcctacttatggtggcttcttttctctcaaatctcaaaatgaaccttccgtttgttccggttgtcgcgtctctgatatagaatcagagatttctgaatctgctccttgagatcttctcagcttagaaacaagaacccacatattagcaagctcattctccagatatgcttctctctgttttggttcttctaatatcctttcaagctcagcttctctttgttcttttt

SEQ ID NO: 99826 - DNA, 619 bp, Arabidopsis thaliana columbia
  unsure (1)..(619): unsure at all n locations
ttcttttgtctcttcttctctaaaattctcttgctcccaaaaactaaaaaaccaaaaaaaccaaaaaatgtacgcaatgaaagaagaagactgtcttcaaacatttcacaacttacaagactatcaagaccagtttcatcttcatcatcatccacaaattctcccctggtcgtcgacatctttaccttcttttgacccactccatttcccatctaacccgacccgttattctgacccggttcactacttcaacagaagagcttcttcttcctcttcttcttttgactataacgacggttttgtctctcctcctccttccatggatcatcctcagaaccatctaaggattttatccgaagctcttggacccatcatgcgtcgtggctcgtcctttgggttcgatggtgagatcatgggaaaattgagtgcacaagaagtcatggatgctaagggttttagctggcttcaaaagagtcatagtgaagcttgtgagaagaaggcggggggggtttcaccacttttttttgtgcggggttgtttccaacacaaccaaannggcaaaggtttttttgttagngggggnttccacaaatnnngggggnaacggnnaaatttcagt

SEQ ID NO: 99827 - DNA, 450 bp, Arabidopsis thaliana columbia
gacacactatagaagtagcttgacgtcccatgcacgcgtacgtaagcttggatcctctagagcggccgccctttttttttttttttttaacacaacccaacctttttctattaaaactgggaatcatttcgtttcttttctttcttcctataggaacagacatatatgaatgaagttataatcatcatcagattcagacccatgagtttccattattatcctatttattgccaggtaacttcagttggggcacatgtcgtcgtggcatgaaccctctgccatagacacagccatagccatcatcatcttgtccctcaaaactctctggaacaatgaccagaggtggaggaggaggaaaggtggggaagccctcgcctggcatgtaagaacctacatagctggtgctgcttcctgtttctcccatctcgtaatgatgacgatgatgatgat

SEQ ID NO: 99828 - DNA, 752 bp, Arabidopsis thaliana columbia
  unsure (1)..(752): unsure at all n locations
aacaattgaccgcagatttgggaacgatgggtatggacttgagagttgttccggcggaggaatggttgaatcgagggatagattcgagtcacgacggtgaacatgacctaggcctaatggttacagattttctggaaacgggaggtggtagcggtggtgctggttcctggtgcagcagcgacagcgattctggattcccagatccttcttacctttccgataagattcagtatctcaagtactctatggctcaacacgaaaccgaggttctctcggtggttcgtacattgatgcttactattaaggagaaagatctacactctgtgaaatccggtacatgtaacgctagttgcatcaggttttatctcgctaagcttttgagactttctggatatgatgcagctgtatgttcagctagatggcaaggtggtggcaaagttcctggtggagataatgagtatatagatatcatattgagtgatactgaagttggtcaagatgatcgtttgattgttgatattgatttcagaagtcattttgagatcgctagagctgtggattcttaccaacgggttaatggatccacttcctgtgggttatgtagggacctgttgcaaagntttaaanccagttccctcaaggaaattggtttatgccagcggaattcctccttaaggcaggttcaataccgtcacccccntgggggntttnacccncctgggncccaanggnttncccnccaaanggnatct

SEQ ID NO: 99829 - DNA, 898 bp, Arabidopsis thaliana columbia
actatagactagctatgacgacacatgcacgcgtacgtaagcttggatcctctatagcggccgccctttttttttttttttttttctctgttgtgaatggtcaaaaagcaaaacaacctctcacaagaacccaaagtagagaggtttaacttaatatggttcctttcttcaaattcttctttttctttgttcttctgaaattgttttgagccagaggcggtaactttacacagtttttttctaattcccaatgcttattgcaaaacgaaccaatatggtaacattacataccgatccctcaaccacccggtttcttcgtcttccccatgttttcatcagctgattgcctcttcctttgaattgttaccaccaaaaccaatagctcaatcttcaaactcatcatctatatatacatcagggcaaaggcagattcgtaatgcattgcacatttaccggttcatggataacccggtggattctgggatcaatcagtgcccatgcttttggattggccttgtgagttgcctttgggaataaaccatgggtctgaataatggaactacaaagcttaagtagcttggtggccgtggttaaccctgattacacccgttttgatcacaatacaagtttgcagaagaccacctacagaaggggggacattttttgaactatttggaacagacaaaaatcgcagggcgtgtgggcaatttaaaccccctatacccccaattgttaggtttggttgaaattctgaccgaatcttcttcccgttgcccagggtagaacaacggttattcactttcggttaaaagggaatttaattattgccggtccagcaccaaccttattttttaacaacgtaaacccatggggatctttttttgtttcaccattttac

SEQ ID NO: 99830 - DNA, 535 bp, Arabidopsis thaliana columbia
agaagaggaacggtatttaatacacttacaaatttgatattggaagaaccaaagatgccctggacagcattcttcatgtttttcaacagaacttgcactcgtctggttgtctttttcctcgttattctgtaattttgttcctttcaggtgttgtttccggaattcggaatagttctttgttgttgtgcttattatactggttagtttgtgagaatgtgcattgttggaaacaagaagggaaaccgatcattgaaggaaataggaacttttttgatgactacatgtttcattgctaattaccaatccgttcaagtttgccaggctgaatatggcagacagttgcttaagcctgtaacgtagtctagcgtctggagttttcggaaattggggttttgagcggctatctacttttgatttcgaaaaaatttactgtgagttgttaaagagtctggtattctgaagagctgtctgtgggggagcttctggtttggggggtaagggctctggtggaaactcgtgatatctttagtatgat

SEQ ID NO: 99831 - DNA, 554 bp, Arabidopsis thaliana columbia
  unsure (1)..(554): unsure at all n locations
atcattctctctttagatcttcttcttcttctcctctgtaacaacaaaacaaaaaaaccactctttcgaatttgatcagattcttctaaagctttagtttttacgcatcaccgattcatttgatccaaagggtttttgatttcttctacgagtttgtgagaagaggaacggtatttaatacacttacaaatttgatattggaagaaccaaagatgccctggacagcattcttcatgtttttcaacagaacttgcactcgtctggttgtctttttcctcgttattctgtaattttgttcctttcaggtgttgtttccggaattcggaataagttctttgttgttgtgcttattatactgggtaagtttgtgagaatgtgcattgttgggaacaagaaggggaaccggtcattgaaggaaataggaacttttatgatggccacatggtcattggcaaataccaatccgtcaagttgcaggcggatattcagcaggtgctaanccgaacgagcngcgctgnggttcgaatggggtncgnanccttgatcnaaatagc

SEQ ID NO: 99832 - DNA, 491 bp, Arabidopsis thaliana columbia
ctatagaagtactatgacgtcccatgcacgcgtacgtaagcttggatcctctagagcggccgcccttttttttttttttttttttaattcaaaaatacacttaaccacatgtcaagtatcgccataaatatttcccaacagaattataaacaacaacacttaacagtaacacccttgtaaattggactgttgtccaaaaccataaaaccatttttggttcacagataaatcaacctttggtgtagatggggagatacttaaagtcattaatcattatagggtacatgggaattcaccatcgaccacttcattctatgatccatggtttgatccatttggttttcagccttcttcccaatcgacggcggcttcctcttcttcttcttcaccacccggaagcttctgcctccacattccaggccaccttatagttcccttaaccggtaccgggagccttttttgccaatctaactcctccttaattttgggtt

SEQ ID NO: 99833 - DNA, 510 bp, Arabidopsis thaliana columbia
ggcgaactatagaagtactatgacgtcgcatgcacgcgtacgtaagcttggatcctctagagcggccgccctttttttttttttttaataagagcttttcttttcttccctttaaggaagggagtttagactatacacatcaaatatgaatttgaagaagatactacaactacataatgttaaccccaaaaccaaaacacatctctttctgctgggcctttcttctataccttcttctctgaggcttataaaatggagtaggctcggattacctcgatgatcggtgctctacaaagcggacattttccctccgtttcttacaagctcatttgcacattttggagcaaggacacatgtgtccgcatctataccagagagcatcaatgggggtggcacaacaaacgcaacaaggtcctttgcttacatggctccatcttgaaccatcctctgatggttccgcactcataccttggtcacctggcagacggtttaagggctgaaagacccttt

SEQ ID NO: 99834 - DNA, 377 bp, Arabidopsis thaliana columbia
tctatttaaaaaagaaaaaaaaaaagcaaattaaaaaggaaatccctaaaaacaaacgagcgtattgttatgaaggaggacgaagaagaagaagcagtgatatcgaacggcatgaacgacgacgacgatactaacaatattaacaacagttccactgaatttgataacaatcgtatcggagacggagacgataacagtaatctgaatcagatcaaacaagtatggggaacgtgggaggagttggtgttaacatgcgccgttaaacgtcatgctttttccgattgggactccgtcgctaaggaggttcaagctcgttcccggagttctctcatcgtttccgccgtcaattgcaggcttaagtatcaagatctcaaacg

SEQ ID NO: 99835 - DNA, 730 bp, Arabidopsis thaliana columbia
  unsure (1)..(730): unsure at all n locations
nnnnnnnnnnnnnnnnnnnnnnnnnnnnnnnnnnnnnnnnnnnnnnnnnnnnnnnnnnnnnnnnnnctttttttttttttttactttatttgcttcggtttaatcgaaccataattggccgattcgatttctagatttggtgcggagaaataagtaattgaagatcggtctttcttagtaagcaatatagtcttgttaaaccggaataacttgagggaagaacaagaaaacaaaaagcaatgtagaaaataaaaccgaaccaaagtaatcaagattcaagacaacacccggttctgtgcggagaaaagaaaccggccttttgtttttgtgacatgggtttggtaataacacttgaaactgaaaccggttcgtctttaaatatgccggtacgccacaccatgaccatgaatgaatctcgcattctcttcactataaacttcaggctacttctctagcgcgagagagatggtttcgctgagtagctgttcccttcccgcacatgtgacttcgttctgcttcttcgtggcagattccgggtatttgtgcgtggtaggtcctgtgttgtatctttcacgtctcccttgtggttaccacggccccaatctcactatagttttaggccctatatggtccaactgctattgatattcttagtacttcggaaagatcattagcgtaacggttctacacctatttcctacttctattctgctaatatgttcttacgcct

SEQ ID NO: 99836 - DNA, 789 bp, Arabidopsis thaliana columbia
  unsure (1)..(789): unsure at all n locations
tcnnnnnnnnnnnnnnnnnnnnnnnnnnnnnnnggctgattgagacnnnnnnnnnnnnnnnnnnnnnnnnnnctttttttttttttttgaagaaaattcttatcataatgattttcttgtgacaaacacacgtaaacagaaaatccacattgattagaaaaaaataaagccaaagcattcgtgtttgaaccatttgaaaaagacaacaacaaaacattcgttggacaaacaagcccgttacaatttttcgttcatgtatcaatgtgccctgccctctttagtttgtagttgttgcagcctcctccaccagattacttcctgcaacatcaaccacaaatctgtaacgaacatcgttcttgcgaagcctctcaaacgcaatgttaagctcatcgatcttcacagtttcaatcgtcgacgtaagccctttctctttgcagaaagccaacacttcttctgtctctttaatgctccctataaagctccctgatatcactttcctcccaagaatgacgagaggggtcacgaactgaagaggagtgttgataacacccatgagaatcaatttcccgtcgagtttaagacaagccaagtaagggtcgagagggtgaaacaccggtacggggtcaatgatgtagtccaggggaatctgcgagtctttgcatctctgctggatcagagctcaccacatagtcgtcagctcctaaatggtcgatagcttcttctttttttcttatctgaggagcttattacagtcacatggtgtcccattggtttagctatttttacacc

SEQ ID NO: 99837 - DNA, 505 bp, Arabidopsis thaliana columbia
  unsure (1)..(505): unsure at all n locations
gcannnaatacgactcactaagggaaagacggtacgcctgcaggtaccggtccggaattcccgggtcgacccacgcgtccgctttgaccgttcctcttctttttattcatcaacatcatcgagctttctactacttggattcctacttcttcttcttcttcctctgattctctcccattccaatcaatctctagggttcttcttcagcaatacttcagaagctggttttggccatggaacccaatgggtacaggaaagaaagaagaaaggaacaacatttggggagaatgaatggtggtggtggtgatgttgagactgatcttgatccatggactgcatgggcttacaagcctcgcactatctctcttctccttattggcgcttgttttctcatttgggctagtggagctcttgatcctgacagcactacatctgatgatcttgtcacttctgtcaaaaggggagtgtgggctatgatcgctgtctttcttgcttactctttgct

SEQ ID NO: 99838 - DNA, 813 bp, Arabidopsis thaliana columbia
  unsure (1)..(813): unsure at all n locations
nnnnnnnnnnnnnnnnnnnnnnnnnnnnnnnnnnnnnnnnnnnnnnnnnnnnnnnnnnnnnnnnnnnnnnnnnnnnncttttttttttttttttttaaacatgataatatctttactattataagacaaattctcgaattaacagatacaacaaaagaagaacaattacagaaaatcaaacattatttgacatgatcaaaatgaaagacaaacgaaactctccacaacatgatcacaatttacagaaaccggaagtattatatataattaagactgtaattccgatcagttattgtcggaagaaggagaaatatccggcgcgggagatggagcatgggagataccgtcatcggcacgcatgaagtcaaatcttttgatgagtatattagcgacgagttcgttagccttatcggtgggatgatactcatcccaaaacacatacttacttctgtctttacacaatgtcgacgctggaatacacgttagcgcaggccggattctgtagaacgagcaacacggcgaatccgagttatcaaacccgtatttttttgggttagtgatgacgtcgttgacgaggtcataggcttcaccaaacctgtagcttgcgttagggagcttggtctcgagatctaggagcattgtggtggcagctttngtgatctcttgcaagatactcgctttttttgacatttcatccaggctagagcttttgagtggatacacccattggtctaaacaacacattagctcctcgtcctaactatgaacaccttgagtgagattcagtgttcattaagagcgacaaggttgatc

SEQ ID NO: 99839 - DNA, 685 bp, Arabidopsis thaliana columbia
  unsure (1)..(685): unsure at all n locations
tgatacttcagcgtctctacgactcactattgggaaagctggtccgcctgcaggtaccggtccggaattcccgggtcgacccacgcgtccgcgtttgcttacatctcgttccacacctactccattgagggtcttttggagaacgagtacctcggggaagtgtttgcggtcggagaagtgaggagtatatcgggttaccaagcaatccaaggaaattaccaaatatctccagacacaaatgccaaatggaggaacatgcttgtgttgctagcgatggcttttggctaccgtcttcttgtttatgttttactacgttttggcctaaacaagaatgtgtctggtcgtttactgcttagtcataagaaaaataacagctctaggtagatgagtgattgtttttagataatataactttagcctcttatgtaattttggtaggtgaaaatgaaaacagttcaattctttcttttttttctagaaatttgggtagataacacctttttgaatatttatatgcatctttggtacttttttagactcatttgggttgaaaaaaaaatattttaagataaaataaaataagcacttcatttttacaaaaaaaaaaaaaaagnnnnnnnnnnnnnnnnnnnnnnnnnnnnnnnnnnnnnnnnnnnnnnnnnnnnnnnnnnnnnnnnnnntccta

SEQ ID NO: 99840 - DNA, 619 bp, Arabidopsis thaliana columbia
  unsure (1)..(619): unsure at all n locations
angntncaaacngatcgnttttccttcccggtaatcagntcnccttttaatttcctcaattacggttcancangcngttnccccatcccccacctacaacagtcttcngcaacangaggccccccttatcccatactctcccggngatcatcccaggctcatcccaaggctctcctatcgggttaccccagcgtacaacggttattgtaatggtccagttcctgctccagctcctccagtttaccacccacaccatcatcaacaccaccaattccaccatcagcaacattactactgaattagaagacagtgtgacaacaaaacaaggaagaagattggtaataaccaacaaatccctgatactgtgacaactgctactactctggtgttctccctctctgggtctattgtcttcctacgtcgtcgtttttgtctgtaatatctctttctcagcctaactctcttagtaacttagcttatatcctctggtgtgtttattattaatcgcatataaaacaaaacccaagcttttgtaatgtttaatatcccgtcccccaaaaaaaaaaaaaaaaaaacaaaaacagatcaaaaaaaaaaaaaaaaaaaaaagggcggccgc

SEQ ID NO: 99841 - DNA, 772 bp, Arabidopsis thaliana columbia
  unsure (1)..(772): unsure at all n locations
cagcttatacactattaggaagctgtccctgcagtaccggccgattccggtcgacagcgtcgccacctcgccaccgtcgccacctcggatttgtcattggattgtaaggaaatttgcttgttagaaagcttgttgttgatctgcgtggcgtanacaganntgcctaagcttgcggttttctggttggtttgggtgatcaaatgcctgacatgattgaagaattaatcagcagggggccaacagcttgatgctgttcattttacttatgaagttgggcttgtggataagttccttctgttcctttgctcanagcttatctaagggacgcaaagaagtcagcagcttctatcatggaggactctagcaatactggccgagctacgcatctcgtggcgcgcaaggagcaatcagcacttaaggcggttttaaaatgcatagtagtagtacaaactcgaggaagagttccctccagagaacctcaagaaacggttggatcagctagagaagaccaaaaccgagaagagaaagccagcagctgttcctgccaacaaaagaacccgagccagctacaacggtccaatgccaccagccaaagccgggcgtatcacaaacgcatacgtctcttccttcccgttcatcagatcaccctcattgtttctttgcttttagtataagtagtttacttttatatgatcaaaatgcgaaagaatagttgctttctcaaacttttccacatgaaaaagggttccaaaagagaaccgtatttcaaaaa

SEQ ID NO: 99842 - DNA, 1557 bp, Arabidopsis thaliana columbia
cgtccccgatctctttcgtcttaaaatcggatgccgagtagcgtttttcggaacactttgtgacggcgaggaagaaggagttggagaatctccggtcaaagattccggcggcgttggttgattgtgtagatccggcgatgttagtgcttgaagcgatatctgagggtttttccggtggatacaagaggagataaagttagcaatgattatggatgggcttgtgttgtgattcttgagagtttaacacctgtaattgttgatccagtgattgggaaatcgaggttgcttgttactccgagtgttaaggagaaagctaaggagattgctgagacgtggaagaagagtttggaagagagaggaaggatagagaatgtgaagactcctgatgttcatacgcttttccagcatcttgttacatttggaattgttaaaagtgaagatcttgctttgtatagaaagcttgttgttggatctgcgtggcgtaaacagatgcctaagcttgcggtttctgttggtttgggtgatcaaatgcctgacatgattgaagaattaatcagcaggggacaacagcttgatgctgttcattttacttatgaagttgggcttgtggataagttccctcctgttcctttgctcaaagcttatctaagggacgcaaagaagtcagcagcttctatcatggaggactctagcaatactggccgagctacgcatctcgtggcgcgcaaggagcaatcagcacttaaggcggttttaaaatgcatagaagagtacaaactcgaggaagagttccctccagagaacctcaagaaacggttggatcagctagagaagaccaaaaccgagaagagaaagccagcagctgttcctgccaacaaaagaacccgagccagctacaacggtccaatgccaccagccaaagccgggcgtatcacaaacgcatacgtctcttccttcccgttcatcagatcaccctctcactctcctcaatacgcttcaccagcagcttacccatccccacctacaacagtctacagcaacagaagcccaccttatccatactctccggagatcatcccaggctcataccaaggctctcctatcggttacccagcgtacaacggttattgtaatggtccagttcctgctccagctcctccagtttaccacccacaccatcatcaacaccaccaattccaccatcagcaacattactactgaattagaagacagtgtgacaacaaaacaaggaagaagattggtaataaccaacaaatcactgatactgtgacaactgctactactctggtgttctctctctctgggtctattgtcttcctacgtcgtcgtttttgtctgtaatatctctttctcagcctaactctcttagtaacttagcttatatcctctggtgtgtttattattaatcgcatataaaacaaaactcaagcttttgtaatgtctaatattcagtcaacaaacttatattagggcggccgctatagaggatccaagcttacgtacgcgtgcatgcgacgtcaagctaatctatagtgt

SEQ ID NO: 99843 - DNA, 633 bp, Arabidopsis thaliana columbia
  unsure (1)..(633): unsure at all n locations
nnnnnnnnnnnnnnnnnnnnnnnnnnnnnnnnnnnnnnnnnnnnngcacgcgtacgtaagcttggatcctctagagcggtcgccctttttttttttttttagtgaaatggttaggatatataaatcaccaagagtttcaacaatctctcgtaaatactgtatgtatataaaaaggttttctgtttgttctttatggcttttgagtacaatcaagtatgactctatacatatacatacttatctaaagacttgcaaagtaccttataacagctgtaacctgcctctcactcggtctgtgcgatggtaggaaagattcaccacatgagtcttgacttgcgacggaactgcttccttgtgatacaccaaggaccaggaaagatgctcaaattactaataagctttgccccatgccatgatgtgtccacgccgtaaggaggaggtattactctgattccgttacttatagatgaaggaaggtgatcttgcagttctctctctagcctctctgagaggccaggcaaacacgcgctttccccagttagtactacagtcttgaaccaactttcggcacctggaagtcctgctgctcacaagggcccataccaagcgagacggcctggggcaaactaattg

SEQ ID NO: 99844 - DNA, 638 bp, Arabidopsis thaliana columbia
  unsure (1)..(638): unsure at all n locations
cgactgattgagacgnnnnnnnnnnnnnnnnnnnnnnnnnnnnnnnnnnnnnnnnnnnnnnnnnnnnnnnnnnnnnnnnnnctttttttttttttttttaagaaaaggcaagcttcaagaacatgattatggcgtgttcttgaaataaaagtatgcgtaattccaactattagaagcaatgtctttctttaacaataacgatacaaatcacatttagggacaagctaaaaacatgattaactattatgtcttctaacaacactttttttttttctgcagtaacatcacttggtgatctgctgatctggggatatcaaggttgctaacatgagtctcttagcattgatctggtgattctgaggaatcattgcgtcagtgcaaagaaaagatttcatgtgtttgtacatctgttttggttgctctggattaatcgtatggcctgtgtttttcaggaacaccaatttggccactgagttctcctaacactggtttgaatacatgaggccacgccaatttggaatgctaggtgttggctctgagccagtgtccttgctcacccgcataccttctttaatttcttcccccgcgcccttttttccccctctgtcgttcacatacccccctacgttgtggtacga

SEQ ID NO: 99845 - DNA, 477 bp, Arabidopsis thaliana columbia
  unsure (1)..(477): unsure at all n locations
cgatctattgaggcgnnnnnnnnnnnnnnnnnnnnnnnnnnnnnnnnnnnnnnnnnnnnnnnnnnnnnnnnnnnnnnnnnnctttttttttttttttgtaaaaccttaataatactatgctttaaaaagggggaatatcatgacttgtattcgttcatacatgaaaacatcaaaaatagccctctagcaaaacgcttccacctaattgcttagactgcaaatctttcacatgctttgattctaaccacttcatcgacgcgatctgtctctcatcttttgtgctccattccggcaagacctcaataattactttctgcaatagtttctgctcaaatccatctctcagaagaacttcaaggtctttgacgttccccctcaaatctaacaagacactgcatagtccacgggttgtacaataattccaaatggaatccaagttaatcttttccatactacggntttcgacccggtactact

SEQ ID NO: 99846 - DNA, 609 bp, Arabidopsis thaliana columbia
acactatagaattactatgacgtcgcatgcacgcgtacgtaagcttggatcctctagagcggccgcccttttttttttttttttggtcgaaaagagcttcttttctttattggaaagcacttaaacaatcttacagatctgtttaatcagttttacacaggttaacacaacctgttactgaccaattcctaatctacccaactcacaacacagcaacagctatgtatccctctttgttcactcaccaagaaccctaatagcttctagcttagatcttgagattcacaaagcttgtgagataagacggctacctaacctaaagtctagcttccgattatataggtaacgacacaagcgtcattaacctatttcctaattctaagatatcttcaaatcttctttccatgatttgcttatatcttgaatgacttgttcatcacgttctggaaactccagcaaccaaacgcagctcgccacgtcatcatcatttgagtctcgttgcttcccgaatacagcttcccttcatgtgcttcacagagtcgccttgtgctcaaacatctatatatcttcattctccccctttttacttgaatgtgacaactcaagctc

SEQ ID NO: 99847 - DNA, 597 bp, Arabidopsis thaliana columbia
ggtgggggggggtagaaatacgccgaggcactcattctgactcattattgggaaagccggcacgcctgcaggtaccggtccggaattcccgggtcgacccacgcgtccgcggacgcgtgggcgcgaaacagagtaaggctcactttgttttagctttctcctctacttcgataatgccgtttgctccttccttgttgtcatcgtcttcctcagtctctcaatttcttcccagattccccaacgcgactagattcaatgtaactccacggagcagagccgccaccgtcgtcgcggcatccgtcaccgacctagccggggtcgacagtacaacaatcgccgtactcggtggaggatccgtagcagcactcgcggcgatggtttccttaacggatccggagaggaggcggaaattgcaggcggaggaagttggcggaggcgataaggaggttgtgagggagtatttcaatagcacggggttcgagaggtggaggaagatctacggtgagactgatgaagtgaatcgagtacagaaggatattcgactcggtcatgctaagacggtggagaacacgatgcttatgctgactgaagatagat

SEQ ID NO: 99848 - DNA, 415 bp, Arabidopsis thaliana columbia
agtcttaatttatttgctttactaatgaaaaacgagaaaatacgtaataaagattggagcagtgagtattattctcttattacagactccattattccttcctttgagcaacatctatttgaggcagttcttgatgtcaatcacgaaacggtacttgatgtccttcttcaccactctttcgagagcttcgtttatcttttgaatgggaatcacctctatgtttggataaatcttatgagctgcacagaaatctaacatttgctgtgttattttgggtccccccggttacacttccagcgagcattctcataccaagattgagattggcaggactgattttaatttcacttgggaaaccaaccaatacataagttccagcaatcttcaagagagacatgtaaggatcaaacgcgtg

SEQ ID NO: 99849 - DNA, 567 bp, Arabidopsis thaliana columbia
  unsure (1)..(567): unsure at all n locations
tccccaacaaaaaaangcccagtttaaacccangngncttatcaccgtgtcccagccaancagcccggccctccanngccaacanaaaccctntcggcnnaatcngccccttcgtggggncgttcacaccctggctacatccagggcaagttcatcccccccagaaggtgagctagaggttgagtgtgaccgccgacgtctacgttcttggatcctgctgaggaagctggaanccgatttggccttactcttgcccgtggctggttcttggttcgagctgtgctggtaaagttggtgtctggatctgttgatcagtctgacccagagtttcccttgatgatgaacagattggcgaagggtttgttctcacttgtgctgcttaccctacctctgatgttaccattgaaacccacaaagaagaagacattgtttaagcctcacctactcaccagcttttgatggtttaaaaatcatgtctttataattgagtttgttgttacaaaactattgttatctgttgttattgttcctggtttggctcaccatcaatcgatgacattttaaact

SEQ ID NO: 99850 - DNA, 564 bp, Arabidopsis thaliana columbia
  unsure (1)..(564): unsure at all n locations
actttatctcccaaaacacaaaaaaaaaaaatggcttccactgctctctcaagcgccatcgtcggaacttcattcatccgtcgttccccagctccaatcagtctccgttcccttccatcagccaacacacaatccctcttcggtctcaaatcaggcaccgttcgtggtggacgtgtcacagccatggctacatacaaggtcaagttcatcacaccagaaggtgagctagaggttgagtgtgacgacgacgtctacgttcttgatgctgctgaggaagctggaatcgatttgccttactcttgccgtgctggttcttgttcgagctgtgctggtaaagttgtgtctggatctgttgatcagtctgaccagagtttccttgatgatgaacagattggtgaaggggtttgttcctcacttgtgctggcttaacccaactctgatgtaccattgaaaccacaaagaagaagccattgttaagcctcacctactcaacaagcttttgatggttaaaacatgccttaatggggtggggtaaacatgnacgtgaatgccggtggccacact

SEQ ID NO: 99851 - DNA, 662 bp, Arabidopsis thaliana columbia
  unsure (1)..(662): unsure at all n locations
acgactcactattgggaaagctggaccgcctgcaggtaccggtccggaattcccgggtcgacccacgcgtccgcaactttatctcccaaaacacaaaaaaaaaaaatggcttccactgctctctcaagcgccatcgtcggaacttcattcatccgtcgttccccagctccaatcagtctccgttcccttccatcagccaacacacaatccctcttcggtctcaaatcaggcaccgttcgtggtggacgtgtcacagccatggctacatacaaggtcaagttcatcacaccagaaggtgagctagaggttgagtgtgacgacgacgtctacgttcttgatgctgctgaggaagctggaatcgatttgccttactcttgccgtgctggttcttgttcgagctgtgctggtaaagttgtgtctggatctgttgatcagtctgaccagagtttccttgatgatgaacagattggtgaaggggttggtcccacttgtgctgcttaccctacctctgatggtaccattgaaaccccaaagagaagacattggttaagcctaccaantcaccagntttgaggggtaaaaacaggccttaaaaatgggttggtggaaaaacaatggaaccggggaatggcccggttggcccacaacgggatttannaaat

SEQ ID NO: 99852 - DNA, 634 bp, Arabidopsis thaliana columbia
  unsure (1)..(634): unsure at all n locations
actttatctcccaaaacacaaaaaaaaaaaatggcttccactgctctctcaagcgccatcgtcggaacttcattcatccgtcgttccccagctccaatcagtctccgttcccttccatcagccaacacacaatccctcttcggtctcaaatcaggcaccgttcgtggtggacgtgtcacagccatggctacatacaaggtcaagttcatcacaccagaaggtgagctagaggttgagtgtgacgacgacgtctacgttcttgatgctgctgaggaagctggaatcgatttgccttactcttgccgtgctggttcttgttcgagctgtgctggtaaagttgtgtctggatctgttgatcagtctgaccaagagtttccttgatggatgaaccaagattgggtgaaggggtttgttccccacttggggtggctaacccaacccctgatggtaccattggaaacccccaaaggaggagcaatttgtttaagctcccctactctccagcttttgatggttaaaaaatggcttaaaaatagngtnggnganaaaaaaattgaacccggggnaattgncccgggntgggccnaaaancnggggntttaacctaaaaaaaaaaaaaaaaaggggggnccct

SEQ ID NO: 99853 - DNA, 692 bp, Arabidopsis thaliana columbia
  unsure (1)..(692): unsure at all n locations
actttatcncccaaaacacaaaaaaaaaaaatggcttccactgctctctcaagcgccatcgtcggaacttcattcatccgtcgtcccccagctccaatcagtctccgttcccttccatcagccaacacacaatccctcttcggtctcaaatcaggcaccgttcgtggtggacgtgtcacagccatggctacatacaaggtcaagttcatcacaccagaaggtgagctagaggttgagtgtgacgacgacgtctacgttcttgatgctgctgaggaagctggaatcgatttgccttactcttgccgtgctggttcttgttcgagctgtgctggtaaagttgtgtctggatctgttgatcagtctgaccagagtttccttgatgatgaacagcattggtgaagggtttgttcccaacttgtgcctggcttancccaacctcctgatggtaaccaattggaaaccccccaaagacgcaaggaacacatttggtttaaagcctcacccaanctcaccaaggctttttgatgggttaaaaaataccatgggcctttaaaacattgcgaggttggtcgccgtcaccaaaacccattcgggacccnggtgnaannggcccccggggttggggcncccancaaanccgggnggaatttttaaaccttnaaaaaaanannaaaaaaanggggggggccgcc

SEQ ID NO: 99854 - DNA, 2161 bp, Arabidopsis thaliana columbia
gtcgactgaagtgtgaaggtggagattatgtattcacttgttgatttggtatacattctatgtaaggttcaattatttacgttatataattataatggagtaatttacagtaattgggttaaaatggtttgattcggtcaggttgatacggtttggaagttaaacccggcctagatatgatgttacaaccagtccacatcttttatgattttagtggaacaaacgaagagttatttagacgatacaaacaaggtccgaataagtgtgagctgtcccaagtaagaccacgtaatactcacctcaacaagatagtgttcttaaagtgtgtcaaacacaatcacacacacacaaatcataaaacacaaagacgataatccatcgatccacagaatagacgccacgtggtagataggattctcactaaaaagttctcaccttttaatctttctccacgccatttccacaagccataatcctcaaaaatctcaactttatctcccaaaacacaaaacaaaaaaaaatggcttccactgctctctcaagcgccatcgtcggaacttcattcatccgtcgttccccagctccaatcagtctccgttcccttccatcagccaacacacaatccctcttcggtctcaaatcaggcaccgctcgtggtggacgtgtcacagccatggctacatacaaggtcaagttcatcacaccagaaggtgagctagaggttgagtgtgacgacgacgtctacgttcttgatgctgctgaggaagctggaatcgatttgccttactcttgccgtgctggttcttgttcgagctgtgctggtaaagttgtgtctggatctgttgatcagtctgaccagagtttccttgatgatgaacagattggtgaagggtttgttctcacttgtgctggcttacccaacctctgatgttaccattgaaacccccaaagaagaagacattgtttaagcctcacctactcaccagcttttgatggtttaaaaatcatgtctttataaatttcacattttgggttgagtttgttgttactaaaaactattgttatctgttgttattgttcctggtttggctcaccatcaatcgatgacattttaaactatgcaactgcaaattctgcaacactttcgatgagaatctaacattatcgtttaaacattggaaatacattttcttgaagtctagctagctttggtttgtagttcttattctgaactcaacaatcatcaaagtatcaagaaaaatccgatttgcgagcaattgtgaaatcttagattgataaattctctagaaagaactatacatgttatttgtagctatagaagaaactatggaatcttatactctaattaagcccaaatggcaagagaagacatgagtccagctcctaggaacaacattacataagatacaatttgaagcctaaagttacacctcatttttgtactcaagaaatcagcagctatgagatccactaaagccatgtacacaagaattccggctgagagcgagtccaagataccttcagtgaccaatgctccgacactgtgagaattgaaagacgacgccactgcggttccaatcccgatccctatcggggttgtgagggcgaaaaaacaagccattatggtcgctgatttgttcctgaattgcgcttgggagatgcatccaccgagcgcaaatccttcaaagaattgatggaaggatagtgctgcgattagaggccggattgtgcaaggagactgagatactccaagggatagaccgatgattatggaatgtgacacaattccaagctccagaacctgagaaacaacgatatgcctagctccattaacagcatccaaacccccgtgtacgtgtccatgtccgtgtccatgcccgtgcccatgagcatgagcatgaacaatggcgattttactgtggccttcacatgaatcatgaccaggaggatgactatgtttatgatgagcaggatgagcatgaatggccacaaatgggaattccaccattgtcttcttaaacaaaaacaatttcccatgaattcgttccctttttccaatcagggggaaccaccaataaccccggtggattggttaacggggccaaacgggttaaaccagaatcgaataagcttccccttt

SEQ ID NO: 99855 - DNA, 622 bp, Arabidopsis thaliana columbia
tctcagaatccctagaacacactctgattaacgaatcaaagatcgatttgggattgcgatcgatcgaggaagaagatgacggaggcgatgataaggaagaagccaggaatggcgagtgtgaaggatatgccgttgcttcaggatggtccaccaccgggtggattcgcaccggtccgatatgctcgccggatctccaacacgggtccaagcgccatggctattttccttaccgtttcaggtgcttttgcttgggggatgtaccaagtcggtcagggcaacaaaatccgcagggcgttgaaaggaagagaagtacgctgctcgtagagcaattctacccattcttccagctgaagaagatgaaaggtttgtgtctgagtggaagaagtatctggaatacgaggcggatgtaaatgaaggatgttccgggatggaaagtcggcttagaacgtgtacaattctggtcgctttatgcctttctcttacctgcgatatcttctgtcctctttattcacccttcctccctctcttttattttactttcccccttcttttcttttcttatccttctctttcttttcccatcttcctctcctcttcttctttctctcctttctctctctct

SEQ ID NO: 99856 - DNA, 708 bp, Arabidopsis thaliana columbia
  unsure (1)..(708): unsure at all n locations
ccggtccggaattcccgggtcgacccacgcgtccgatcgatttgggattgtgatcgatcgaggaagaagatgacggaggcgatgataaggaagaagccaggaatggcgagtgtgaaggatatgccgttgcttcaggatggtccaccaccgggtggattcgcaccggtccgatatgctcgccggatctccaacacgggtccaagcgccatggctattttccttaccgtttcaggtgcttttgcttgggggatgtaccaagtcggtcagggcaacaaaatccgcagggcgttgaaggaagagaaatacgctgctcgtagagcgattctaccaattcttcaagctgaagaagatgaaaggtttgtgtctgagtggaagaagtatctagaatacgaggcggatgtgatgaaggatgttcctggatggaaagtcggtgaaaacgtgtacaattctggtcgttggatgcctccagctactggagagcttcgtcctgatgtctggtaaattatcaatggctccttttgatgatgatgaatgaatgtttgtttaagcattttagaaccttgatgtttcttgtctctctttttccatcgtataataagagaattgatacatacacagttcatgtattgctggtacggtactgaagtaccttttctgtttttttccctcnnnnnnnnnnnnnnnnnnnnnnnnnnnnnnnnnngagaa

SEQ ID NO: 99857 - DNA, 827 bp, Arabidopsis thaliana columbia
gcccttcgttgttcatcggaatccctagaacactcgatttcagcaaaatcaaatcggattcagtgatcaaaagtcaatttggtcgagaagaaattgagcgttgaagatgacggaggcgatgataagaaataagccaggaatggcgagtgtgaaggatatgccgctgcttcaggatggtccgccaccgggtgggttcgcaccggtccgatatgcccgccggatatccaatacgggtcctagtgcaatggccatgttccttgccgtttctggtgcctttgcttggggaatgtaccaggtcggccagggaaacaaaatccgcagggcattgaaggaagagaaatatgctgctcgtagaacaatacttcccattcttcaagcagaagaagatgaaaggtttgtgtctgagtggaaaaagtatctggaatatgaggctgatgtaatgaaagatgttccgggatggaaagttggcgagaatgtgtacaattctggtcgctggatgcctccggctactggggaactccgtcctgatgtgtggtgatttcctagtttctctcaaatgcatatgatgatgatgaatgatgtttcgctgaggattgatatgttcttgttatatctttttttcttcgggtaataagagaatgattcaacagacagtattcttcttgtattggttttctcttaagtgtttcaatcgtaatatgaggcaaaaacagtttcatgattccaaaaaaaaaaaaaaaaaaaaaaaaagggcggccgctctagaggatccaagcttacggacgcgtgcatgcgacgtcatagctcgtctagagtgtaacgaaagt

SEQ ID NO: 99858 - DNA, 924 bp, Arabidopsis thaliana columbia
  unsure (1)..(924): unsure at all n locations
atgatacgtcnnnnnnnnnnnnnnnnnnnnnnnnnnnnnnnnnnnnnnnnnnnnnnnnnnnnnnnnnnnnnnnnnnnnnnccacgcgtccggtttgtcttaacgtacaagataatttgaaaggtagacgtagacgttggatacttatttggtaggctcttaagaatcttaggtgtatctctttagtttgaaggttagattcagaatctctgtagattcattagtagctttttctgtgtgatctttgtgttgtatatatatagatcgaattgattttagctggtgaaaggtgaagttgtggtatgaatatgaagaaacagattatggatgagtctgtaaagtcattgatgctgcctcctcctccaccgcttcttcctccatctcagggatatggatcaagaaagatcgatggagacagcataaccaataaacagatcaagaagttctggagacagaagcagatcattgaagaggatcatctctattctgctattaaggctgcagctcgtgtcagagctcgtaatctctctgatgaggactacaaacgctttgaagaaagcttggacatggaggacctggaaaccgaagatcatcagggattgaaagactggtggacaaagagcaaatacgcgtacttgaaccagccggctcttggatctgcagattcactgaagagaaagaggttttcgacttatacaccaaactgtttctcgttcaagccttgcaatcctctttacgcaacttcgctcaatgtcttttgaaccatgagcagcaaactctgcaagatcaatcgtcttgcatatatgtatatatttgttcgtgtgtgtctctgtacatgtcatgtgttattgcttctatattaatggatctggactttggtgtggttgttgatttgtaactgttgaataaaatctttctatggacc

SEQ ID NO: 99859 - DNA, 487 bp, Arabidopsis thaliana columbia
  unsure (1)..(487): unsure at all n locations
nnnnnnnnnnnnnnnnnnnnnnnnnnnnnnnnnnnnnnnnnnnnnnnnnnnnnnnnnnnnnnnnccacgcgtccgggatcatctaaacccttaaagcttctctttttcttcttcaagtcatctgtcttttggtgacttactctgttctgtggagaaacactagttttacattcgagagtttggaaaagttattattatggtaagtcaatcagctggtcaaacaagatttcgaacattcaagtacgagaacaacggagactctagcagaccaacaattgtagtgagagttattgcttgcttccaaccgatggataattgtcaggctgaatactttagacatatactcaaaccagtgacgtagttggtttgtgagcttgtgtttgtatttttggagctggcacctttttttctttttgcctctactttcttatacgattgtttcaagaaaaatcaacaagtgttgcgttccacacatttgagcaacagc

SEQ ID NO: 99860 - DNA, 584 bp, Arabidopsis thaliana columbia
  unsure (1)..(584): unsure at all n locations
nnnnnnnnnnnnnnnnnnnnnnnnnnnnnnnnnnnnnnnnnnnnnnnnnnnnnnnnnnnnnnnnnnnnnnnnnnnnnnccacgcgtccgcaactatcttcttctcactctgttttcgtttagagagattttgcagagatgtcgagacgagcaatggtgataaagatgccaatacttatgatactgatttcatcaatggtgatgacgatggtcgagtcttcgagatcagttaataatggtcatgacgattctgagatcttacgaagacacttgctcactaatggcctcggagtcactcctcccatggggtggaatagctggaaccattttagctgcaacatagatgaaaaaatgatcaaagaaactgctgatgctttggttaccactggcctctctaagcttggctacaactatgttaacatcgatgattgctgggctgaaatttctcgtgacagcaagggaagtctggtgccaaagaagtcaactttcccttctggaattaaagcggttgcggattatgttcacagtaaaggccttaagcttgnngattactcagatgccgggtatttcacttgcagtaaaacc

SEQ ID NO: 99861 - DNA, 528 bp, Arabidopsis thaliana columbia
  unsure (1)..(528): unsure at all n locations
nnnnnnnnnnnnnnnnnnnnnnnnnnnnnnnnnnnnnnnnnnnnnnnnnnnnnnnnnnnnnnnnnnnnnnnnnnnnnnnnnnnnnnnnnnnnnnnnnnnnnnnnnnnnnnnnngataaaaggataattttattccgaacacaagggtttgtttgtttaacagagtacaagctatgaaatgcttctatcactgatattctaatatcttaggaaaaacaatttgaaagggaacaaatggaaggggaatctctcccacaacaatgtctgcaaaaactgaagatggaaaggaaaatatgactgaagcagcaagtttactttatggctagatgtgaaactccattctcaggattcttgggtatcgtccacacaaattcaggcgtatccattctcgggcctgcgactggtctggatatgtatatcctctcaactggagagctctcaggtcttgactctggaggatgttcatcaatgacttcgacattgagccttggcattttctgacttagaagcttgcaagcaccaaaactta

SEQ ID NO: 99862 - DNA, 726 bp, Arabidopsis thaliana columbia
tacactatataagagctatgacgtcccatgccctcagcttggatcctctagagcggccgcccttttttttttttttttttgcttctatcactgatattctaatatcttagtaaaaacaatatgaaagggaacaaatggaaggtgaatctctcccacaacaatgtctgcaaaaactgaagatggaaaggaaaatatgactgaagcagcaagtttactttatggctagatgtgaaactccattctcaggattcttgtgtatcgtccacacaaattcaggcgtatccattctcggtcctgcgactgttctgtatatgtatatcctctcaactggagagctctcaggtcttgactctggaggatgttcatcaatgacttcgacattgagccttgggcattttctggacttagaagcttgcaagcaccaaaacttaccaaagcaagatgacatccaaagggatcgctggggctctagcttggcagcgtgctccagtagtgcagtgtctccaaaagggcagtcccggatcccaggcttctttaaactctcacagcccgacaacaagtgatgaagcatcaaatcactgtccccagcaaatgctattgatagcatcctaaccttcttggcatgtttcccaatgtatttgaaggccttgtcagagagaagaccagagacggagagccgtcgaagatccctgcatccctcagctatggctttgaatcctttatcac

SEQ ID NO: 99863 - DNA, 426 bp, Arabidopsis thaliana columbia
aaaaaaactaacctttgtctaaaacccagaatctggtaaaccttcacactcaaaaatgttttactcgcattgtctagtatcgagaaaaggacctttaggagctatttgggtcgctgcctatttcttcaaaaagcttaagaaatctcaagtcaaagctactcatattccttcttccgttgatcaaatcttgcaaaaagagttagatgcgttgacatacagagttttggcgtatcttcttcttggtgttgtaaggatatattccaagaaggttgactttttgttcgatgattgcaataaagcgttgatcggtgtaaaggagtttgtggctaaggaaaggaacagagaattgacaggtgtatcattgcctgcatctatcgagtgtttttccattgctttacctgagagatttgaactagatgcttttga

SEQ ID NO: 99864 - DNA, 632 bp, Arabidopsis thaliana columbia
  unsure (1)..(632): unsure at all n locations
cacttcactcgtccttgaaacttgagcttcaattacaaagaatggctgcttcaagtgctgtcaccgcaaactacgtcctcaagccacctccattcgcactggatgctttggagccgcatatgagcaaacaaactctggagtttcactggggaaaacatcacagagcttacgtggacaacctcaagaaacaggttcttggaaccgagcttgaaggcaagcccttagagcacattatccacagcacttacaacaatggtgatctcctccctgctttcaacaacgctgctcaggcgtggaaccacgagttcttctgggagtcaatgaaaccaggtggtggagggaaaaccatcaggagagcttcttgcttttgctttgaaagagatttccaccttctttatgagaaagttcttatgaaggggttcaaatgctgcctgcagccaactcaggtttggagcttggctggggcctggcttgcttattccaaatggaaaaccccaagggngtgaaaacctcccaatgctgttggaatccccttgtgccgggctctttcccattggtcaccattgatgctgggggatcgttcncctgggttccaaaccaggcccgtgttaaaatcttggcaacttggnttc

SEQ ID NO: 99865 - DNA, 980 bp, Arabidopsis thaliana columbia
  unsure (1)..(980): unsure at all n locations
agattccactggcgtgtgctctcctcacttcactcgtccttgaaacttgagcttcaattacaaagaatggctgcttcaagtgctgtcaccgcaaactacgtcctcaagccacctccattcgcactggatgctttggagccgcatatgagcaaacaaactctggagtttcactggggaaaacatcacagagcttacgtggacaacctcaagaaacaggttcttggaaccgagcttgaaggcaagcccttagagcacattatccacagcacttacaacaatggtgatctcctccctgctttcaacaacgctgctcaggcgtggaaccacgagttcttctgggagtcaatgaaaccaggtggtggaggaaaaccatcaggagagcttcttgctttgcttgaaagagatttcacttcttatgagaagttctatgaagagttcaatgctgctgcagccactcagtttggagctggctgggcctggcttgcttattcaaatgaaaaactcaaagtagtgaaaactcccaatgctgtgaatccccttgtgctcggctctttcccattgcttaccattgatgtctgggagcatgcttactaccttgacttccagaaccgaagaccagattacataaagacattcatgaccaatcttgtgtcttgggaagctgtaagtgccagacttgaggccgccaaggctgcttctgcttaagcaaatttctgaacaatttgacttcagtgacagtgagttctgcatcaccgaagtctcttataaaatattggtcgctgtaataaggacacagctctcttgttgtgtatgtgtcacagagttcttcattttgcttgtgtaatgaacaattaaacatgctcttttctgagtgtgtgtgcgttttgtgtgtgtcaaatttttcatcgtctcctttattaaactcaaattggcacccttacacaaaatanncanaaatatataaaaactatatactatat

SEQ ID NO: 99866 - DNA, 516 bp, Arabidopsis thaliana columbia
cagctctctacgactcactatttggaaagctggcacgcctgcaggtaccggtccggaattcccgggtcgacccacgcgtgcgcccacgcgtccggtgatctagcagagagaatcaatgaacacgtcttgccattagaggagaccaaccatttctctcctctctcttgaaaaatctataaccgatttctgcaatggcgacttcagattcgaggtcttctccttcatcatccgacaccgaattcgccgatccaaatcctagctccgatccagagacgaattcggagcgtgttcaaagtcaattagagtcaatgaatttatctcaacctagcgaagtctctgatggtagccacaccgaatttagcggtggcggcgatgataatgatgatgaggttgcatcggctaacgggaacgaaggcggagttagcaatggaggtttattgcgtgaaggtgtggcgggaactagcggaggagaggttttgttaagggcggaaaatccggtggaaatggaagcaggtg

SEQ ID NO: 99867 - DNA, 521 bp, Arabidopsis thaliana columbia
agaagagctagacgtcgcatgcacgcgtacgtaagcttggatcctctagagcggccgccctttttttgtttttttttttttgttcatcccacagagttagtcgtcatttcatatcaccattcaacaacaaactacatcacttagaagttacatatgcattatgcaatcaaataaagcaatccaaaacacacagtaaactaaaaagaaaaaaagcatcaacttcacttgcttccgacgggttcgagctgcaaatgggtggctgcacaactccattatctccctttgaatccgtagcactagatccctcaaactcactctttatgcttcctgacttgggttcatcagcaaccacttttattatctctgatgcttcttcctccttaattatgtacacaccatctccttcttcttcttcatcttcatcttcatcttcttcttcttcctcctcttcttcatcttcttcttcctcttcattggctttttctttctcgccatcttcggcttctttgctacatcttctg

SEQ ID NO: 99868 - DNA, 601 bp, Arabidopsis thaliana columbia
  unsure (1)..(601): unsure at all n locations
agctctctacgactcactatagggaaagctggcacgcctgcaggtaccggtccggaattcccgggtcgacccacgcgtccgatcgaatcaaaatctcaaacctttttcttcatttcttcccccctctctctctctcactctgtttctgatgggtctccgattcccacctaaggtgttggaacatatcctctccttcattgattccaacgaggaccggaactctgtttctctggtctgcaagtcatggtttgagacagaacggaagactaggaagcgagtctttgtcggaaactgttacgcggtcagtcctgctgcggttacacgacggttcccggagatgagatctttgactttgaaggggaagccacacttcgctgactataatctcgttcctgatggttggggtggttatgcttggccgtggattgaagctatggcggcgaaaagttcgtctcttgaagagatcagaatgaagaggatggtggtgactgatgagtgcttagagaaaattgctgcttcgtttaaggattttaaaaggcctgtggtggtttcctttttaaagggttcgttactgatgggancnctgcntttcangtacctt

SEQ ID NO: 99869 - DNA, 424 bp, Arabidopsis thaliana columbia
gatcatgcaaagagtgttttgattttcaagtgtaagcacatcatttctcactttaccatcttttgttctaaatgtctcgcatactagtagaagatgataatgcaacaccgtttcattccatggagattattagctcatctttgactttaggccaacttctcaagaacgttagcgacgttcgtaaggttgaagttggtgacgaaactcctgttcatgaattctttgacagggatggttcttcacttgacggagataatgatcatcttatgcgtcctgttcctttcgttctatctttcaacaaccttacttacaacgtctctgttcgccggaaacttgactttcacgacctggttccatggaggaggacatctttctccaagaccaagactcttctagacaatatctccggtgagactcgtgacgg

SEQ ID NO: 99870 - DNA, 566 bp, Arabidopsis thaliana columbia
cccacgcgtccgcaatgtctctgctttctccagaagatgatacttacgttgtgtgtcaattagctgtacaacgtcttcttcacatgttacacgaacactccacttacgaaacgaaatagttatctcttcctgaagagtggaattctttctcgaatcttagaaaattccatttagaactaaagacgagagagagatccagtttctcgtcccagttaagctatggccatgttcaaaaccttatcttttttgttccttttgtgctttcagatacatggaacggtggctgcagatgaaaattccttgttttcattcaatggttttgtaaaatctccgagctttgacaagagggttgctctgtttggagattcgaagctggtcaatgacagttctttgattcagctgactgactcagtgactcgaagcgttggtcgagtcgtttacaagaaacccatcaatcttttcaaaggtaaacagaggaattcgagatctttctctactcacttctcgttttcttccatgtccaacgagattggtgatgatgtaatggcttttgtaatggttccatc

SEQ ID NO: 99871 - DNA, 647 bp, Arabidopsis thaliana columbia
  unsure (1)..(647): unsure at all n locations
tntttctatntggncccnggcnggttctagatgnttcccntcgctnttgcggtctgncccagccagggnaaaggaatggggccccgggtgcttgtgtcaattttccnggggnntcccccgggtggtggacagttaccggttgcaagagcatttggagataagagcttaaagttacatctgagctcagaaccggacataacacaccagacaattgatgatcacactgaattcatccttttcgcaagcgatggtatttggaaagtattatcaaaccaagaagcggttgatgctatcaagagtatcaaagatcctcatgcagctgcaaagcacttgatagaggaagctatatctaggaagagcaaagatgacatctcatgtatcgttgtaaagttccactaatcttctcttcttcttatcaaaagctattttgtctataagttaccatcaagttgcaagatagagaaatatatgctcaagctgtgtctgtaaaaacccagtaatgaggtttcccagaagatgtaatatattatcgaaatcgcaacagccttaagataaaagaaaaaaaaaaaaaagnnnnnnnnnnnnnnnnnnnnnnnnnnnnnnnnnnnnnnnnnnnnnnnnnnnnnnnnnnnnngaatcgnnnnnnn

SEQ ID NO: 99872 - DNA, 897 bp, Arabidopsis thaliana columbia
  unsure (1)..(897): unsure at all n locations
atgatctnnnnnnnnnnnnnnnnnnnnnnnnnnnnnnnnnnnnnnnnnnnnnnnnnnnnnnnnnnnnnnnnnnnnnnnnnnnccacgccgtccagctttgacaacattcttaaagagaaggatttttggactgacacagagaatgctataaggaatgcctacagatcaacagatgccgtgatattgcagcagtcccttaagcttggtaaaggcggatcaacagctgtaacgggaattctaattgatggtaaaaagctagttgttgctaatgttggagactccagagcagtgatgtctaagaatggtgttgcgcatcagctatctgtcgatcatgaaccaagcaaggagaaaaaagaaatagagagccgaggtggctttgtgtcaaatattccaggggatgttccacgagtggatggacagttagcggttgcaagagcatttggagataagagcttaaagttacatctgagctcagaaccggacataacacaccagacaattgatgatcacactgaattcatccttttcgcaagcgatggtatttggaaagtattatcaaaccaagaagcggttgatgctatcaagagtatcaaagatcctcatgcagctgcaaagcacttgatagaggaagctatatctaggaagagcaaagatgacatctcatgtatcgttgtaaagttccactaatcttctcttcttcttatcaaaagctattttgtctataagttaccatcaagttgcaagatagagaaatatatgctcaagctgtgtctgtaaaaacccagtaatgaggtttcccagaagatgtaatatattatcgaaaaaaaaaaaaaaaggggcggccgctctagaggatccaagcttacgtacgcgtgcaacgacgtcatgctgttttat

SEQ ID NO: 99873 - DNA, 841 bp, Arabidopsis thaliana columbia
  unsure (1)..(841): unsure at all n locations
ttgtnnnnnnnnnactataggagccctatagcgtcaccagcacgcgtacgtaagcttggatcctctagagtcttccgcccttttgtgttgccctttttttttgagagccagagcttcattgaaggttcgttgttcggtcaaaataggaaaacatacaagaagcaacgaacaaggttctctatggtcagactgtcgaaggggttccgcaacagttgttccttgctgagggactgctagcgtacagggatagaacgcagcggggaaattaggaactcacttggacatcatcatcttgacaaactcctcatagttgatctgaccatcaccatccacatcagcctcgcggatcatttcgtccaccttcttcatcagtgagcttttccccaagatttgtcataacatgtcgtaactcagcagcagagatgaagccgtttccatctttgtcgaaaacacggaaggcttccttaatttcttcttctgtgtcagtgtcatgcattttcctgctcatcaaagtcaagaattccggaaagtcaatggttccagatccgtcttgatccacctcattaatcatgtcctggagctccgcctcggtgggattctggcccagagaccgcatgactgtgccaagttcttttgtcgtgatggttccatctccgtccttatcaaagagggagaaggcttccttgaattcggcgatttgttcatgcgtcaaggcttctgccatctcttccggtttttctttctcgcgcgcctcgtgggggtcgacaaagngaattccggaccgggtacctgcaggcgtacggtctttccctataggagtctgtannnnnnnnnnnnnnnn

SEQ ID NO: 99874 - DNA, 1266 bp, Arabidopsis thaliana columbia
aatcaggttccacatttggctttgcacaccttccttgatcctatcaatggcggatctgaaatcaaccttcctcgacgtttactctgttctcaagtctgatctgcttcaagatccttcctttgaattcacccacgaatctcgtcaatggcttgaacggatgcttgactacaatgtacgcggagggaagctaaatcgtggtctctctgtggttgatagctacaagctgttgaagcaaggtcaagacttgacggagaaagagactttcctctcatgtgctcttggttggtgcattgaatggcttcaagcttatttccttgtgcttgatgacatcatggacaactctgtcacacgccgtggccagccttgttggtttagaaagccaaaggttggtatgattgccattaacgatgggattctacttcgcaatcatatccacaggattctcaaaaagcacttcagggaaatgccttactatgttgacctcgttgatttgtttaacgaggtagagtttcaaacagcttgcggccagatgattgatttgatcaccacctttgatggagaaaaagatttgtctaagtactccttgcaaatccatcggcgtattgttgagtacaaaacagcttattactcattttatcttcctgttgcttgcgcattgctcatggcgggagaaaatttggaaaaccatactgatgtgaagactgttcttgttgacatgggaatttactttcaagtacaggatgattatctggactgttttgctgatcctgagacacttggcaagatagggacagacatagaagatttcaaatgctcctggttggtagttaaggcattggaacgctgcagtgaagaacaaactaagatactatacgagaactatggtaaagccgaaccatcaaacgttgctaaggtgaaagctctctacaaagagcttgatctcgagggagcgttcatggaatatgagaaggaaagctatgagaagctgacaaagttgatcgaagctcaccagagtaaagcaattcaagcagtgctaaaatctttcttggctaagatctacaagaggcagaagtagagacatactcgggcctctctccgttttattcttctgacatttatgtattggtgcatgacttcttttgccttagatcttatgttcccttccgaaaatagaatttgagattcttgttcatgcttatagtatagagacttagaaaatgtctatgtttcttttaatttctgaataaaaaatgtgcaatcagtgat

SEQ ID NO: 99875 - DNA, 532 bp, Arabidopsis thaliana columbia
  unsure (1)..(532): unsure at all n locations
nnnnnnnnnnnnnnnnnnnnnnnnnnnnnnnnnnnnnnnnnnnnnnnnnnnnnnnnnnnnnnnnnnnnnnnnctttagttttttttttgattacattgaagtaaaatgttgttttggggatgtgattaatttcaatccgaagtaggactataaataacaatggggctacgaacagagtgacgtgggctcttccacacgagcaagccggacacaatcttcccaggagtcatttgtttggccttcaccaccactttgaagcttctcttttgtgaagcctttgaaaatgacaaactctgtggctccaccgtgatttctactcctttcggtgctcggacggtggcggtgtagaccgacgacggtggtcccacgttggtgactctccgcctgaacacagccaatgtggacgttttggcggatctcaacgtgagttggattgctgggtagttgagggaatcgtggccgagtccagggacaatggaggaacagctcacggagcgtggacccaccattggagctagagtgggtgcgttgt

SEQ ID NO: 99876 - DNA, 549 bp, Arabidopsis thaliana columbia
  unsure (1)..(549): unsure at all n locations
taggtagcactatangaagactatgacgtcgcacgcacgcgtacgtaagcttggatcctctagagcggtcgccctttttttttttttttttttagaaacttctttatatatattataaagaatttcgacaatctctgatgctcacttttagatcaaaaccctaaaaaggggtgagagaatcttgattcaatgccctaaattgacagcttcaagcaccaaaaattgagagagcttttttgggcaaaacacttttctttctccatttgtgtctcaagctatacttccttggtctgaggtgtcttcgttgtaataaggtgttaacttgccatccttgtcatctcttatcttgtgtaggctatcttcgtctccaccaccaatttcttgcaacatcttaaccacacgcctcatggaaggtcggttaatgggcaacggactcgtgcagaggagtccaacgttgaggattttgcttatctcttctttgaaacaagagtcgagtttcgggtctatcacatgctctatgcctttttggtccaatgtagagcaaaccca

SEQ ID NO: 99877 - DNA, 579 bp, Arabidopsis thaliana columbia
  unsure (1)..(579): unsure at all n locations
nnnnnnnnnnnnnnnnnnnnnnnnnnnnnnnnnnnnnnnnnnnnnnnnnnnnnnnnnnnnnnnnnnnnnnnnncttttgttttttttttttaatgaagatcactattacgagagaagtgtatctttctttacaaggtatgtgtatatactgatggaatttgagatatatctctaatttgaactttgagcagctttttaaataattgtaaaaataaacgatatgtttcataaatcataattagcacgctctgagtttctcaagaggaacatgaaccttaagaatgttcatcctcaagcatttttaaagccaattcagctaaccaatgaaccgttctgctctgtcggctcactccaaccgtgccagagaaaacatcaaagttctcaagctcagccgtagtttccagaaccttcacgagctctttctccatacccaaatccctgaacatcccaacgttctccacatcatcttccatcatccatatcgcaagctcgatcacaaacctcctgattcttggaaccttgattgctggcttgtcatgctttttcagaatcgaaaccagtgagtttgcaagttcttgc

SEQ ID NO: 99878 - DNA, 520 bp, Arabidopsis thaliana columbia
  unsure (1)..(520): unsure at all n locations
nnnnnnnnnnnnnnnnnnnnnnnnnnnnnnnnnnnnnnnnnnnnnnnnnnnnnnnnnnnnnnnnnnnnnnnnnnctttttttttttttttacgtagatgatttgaaccattaaagttaacattttgaatgcttttcaattacatctagaatttttcataaatcatgatagtaaaatacaaacatataatatttctaaacaagaaactcttcactgatggatgcgattgccttcttaacaatgatttgatacattctttgtgttggatggacagcgtcccaaaaaacgtatttggtaggatctttgcatacttgcatatctttgcatgtctctccatattcgtatgtacctgttccacaacagcctagcgaagcctcgacgaaaccaaattttctcggatttttaatggcttcttggatggtcgaataagcatcaacgtagatggttttcaaaccgattttagactgaagaagctctagatttttgatgattttggcgttaaaggagaaagcgatttggtt

SEQ ID NO: 99879 - DNA, 675 bp, Arabidopsis thaliana columbia
  unsure (1)..(675): unsure at all n locations
gaaagtcaccccggggcatncccacccnggntgtgcccccggncagccngcaatcccaccngcctttaaccccggaatcctggccggtttcaaaaaccatggtggtaaaatccaaccttttaatttttctaaaccaggaactcttccctgatggatccgattcccttcttaccaatgattggatccatcctttgtgttggatggccagcgtcccaaaaaaccgtatttggtaggatctttgcatacttgcatatctttgccatgccctctccatattcgtatgtaccctgttccacaacagcctagcgaagcctcgacgaaaccaaattttctcggatttttaatggcttcttggatggtcggaataagcatcaacgtagatggttttcaaaccgattttagactgaagaagctctagatttttgatgattttggcgttaaaggagaaagcgatttggtttagttgatctacacaagttttttggcctcgtaggtatttaattaaaggcatgcatcccatgggaggaactcccactaccaccaaccttttagctccaagcctatgcaacatcttggcgtcgtaaagcatacggtgggagagaaactcgatgtattgctcaaccgtgaattgcttttgtcgagtaaaatcgactaagtaattttgaagaaagtcat

SEQ ID NO: 99880 - DNA, 559 bp, Arabidopsis thaliana columbia
  unsure (1)..(559): unsure at all n locations
nnnnnnnnnnnnnnnnnnnnnnnnnnnnnnnnnnnnnnnnnnnnnnnnnnnnnnnnnnnnnnnnnnnnnnnnnnnnctttttttttttttttaccactcgcaattgggatccattgcatagctaaagatctagttccatcaaatcttatgtgaaaacatacatccggtttaaactacacacaggtttagactaaatccgtttacctataacagctaaaaccggtttcataccaagtctgagctacaatccaaaatcatagttatttatgctcattcatcggaagctgaggcagactgtttcagacaatcacgcatgatctctccaagttttgaactagcatccaagcaaagctgcattgcctcgttgatattaggtgttgtccattcaccagtgatggttagctgagtgatttcataacgagatggcatgcacgtcatcataaagctgccatcttcacatccttcctcctctgtaaccgggtctatcataaggcttttgcctatgcaagacactgaaacagctgtgataaggtcatacatcataattccggcatcagct

SEQ ID NO: 99881 - DNA, 662 bp, Arabidopsis thaliana columbia
  unsure (1)..(662): unsure at all n locations
cccacgcgtccgcggacgcgtgggctgacattggcaaacccggctggatccctcgtgttctcgggtatgatcgcgagtagcatatacgaccgggaagcagaaaggcaagctcacggctccgtgtttgatccagatgacgcccttagatgcaatggttctatctgtttcttcttgacatcactcataatgtctggattctgcatcatcgcttgcatgttgagtatgattcttgtgcgtcgtaccaagtctgtctacactcatctctatggcaagacccgcacctaagatctctgttcccttttatatatgatcgtgctcagcttcttattctttggtttttgtcttcaattctacgatccagatgttttcgtctctgtatcgatttttttgtttgtttctgtatcgattttgttgttggtagtcaattttgtaattgatttgtatgttttttgtattcatatccacggcaacatctaccatgagtagacttacacaaagatctttagacagtcgcatatatgaaataaatttctgcttgttttccaaaaaaaaaaaaaaaaaaaaaagnnnnnnnnnnnnnnnnnnnnnnnnnnnnnnnnnnnnnnnnnnnnnnnnnnnnnnnnnnnnnnnnnnnnnnnnnnacattcnnnnnnnnnnnnnnn

SEQ ID NO: 99882 - DNA, 570 bp, Arabidopsis thaliana columbia
  unsure (1)..(570): unsure at all n locations
nnnnnnnnnnnnnnnnnnnnnnnnnnnnnnnnnnnnnnnnnnnnnnnnnnnnnnnnnnnnnnnnnnnnnnnnnncttttttttttttttttttcacaatggaacagaacttgttgtgtaagtcttcagggatgtccttgaaacatatactataaagtgggcaaaagacttatgaaacctacttaaacatcagcacttcactgtttactttgtctcacacgtaaagcaaatgcaagtaaatcaatgcagtcaaaactctaagcaacacagccaatcccacagcattaaggtctacttcataagaaacttgtacctgtcagtatgtgtttcttattccatgaactgaagctataccaataatcagtgtgcaccatatcagttggacactttgtcaattcaacacatacacgctttagcctgaacttttctttgatctgaaatatactcacgaactctctgagttttacttcgcatgggctcaatcatattttctgtcttgtgaattatctcttttgacagatgaccctccagaaaactgaacaatgctcctaatgtcatctttcttagatct

SEQ ID NO: 99883 - DNA, 531 bp, Arabidopsis thaliana columbia
  unsure (1)..(531): unsure at all n locations
ctannnnnnnnnnnnnnnnnnnnnnnnnnnnnnnnnnnnnnnnnnnnnnnnnnnnnnnnnnnnnnnnnnnnnnnnnctttttttttttttttgtggttcaacgccatcctttactgggggccataatccacaaagaggggattctaaaattagcaatcaacattacagagcaacaacaactaatctcacgttgttcttgtcctaatcctcgccatcatcaatgcgtgttcggaagaggtagtcttcgccttcaagttcatcttgatatagggatattgatggatcattacatttctcatcttctttctcatcattacatctctttccctttcttaagatatagaagaaataatggaagccatcgccaaaagtgttgtactccatggaccaagtaaacttaggatccttaaacagaggacgcctgaaatgcggctggccaaaagtaatggaaatgaaaatgccatctggtttcaaaacccggtgaactccatcaagggttgccatgactttgctaacagtttctggacgggg

SEQ ID NO: 99884 - DNA, 547 bp, Arabidopsis thaliana columbia
  unsure (1)..(547): unsure at all n locations
atgatcctgccagctannnnnnnnnnnnnnnnnnnnnnnnnnnnnnnnnnnnnnnnnnnnnnnnnnnnnnnnnnnnnnnnnnnccacgcgtccgggctgagctgataaggaggagaatcgagcagggccagctatggagaatccagagtccgttggtcctccttctgctttaacctacctcgatcctcactactgggacgagagattctcttctgaagaacactatgaatggttcaaggattactctcatttccagcatctcatcatatccaacatcaaaccctcttcttccgtattggaattgggatgtgggaactctcagttgtgtgaagagttgtataaggatgggattgttgatattacctgcattgatttatcttccgtggcggtagagaagatgcagagtcggctgctaccaaaagggtacaaagaaataaaagtggtgcaagctgacatgctagacctcccatttgacagcgagtcttttgatgtggctattgagaaagggaccatggatgtactgtttgcggatgctggtgatccttgg

SEQ ID NO: 99885 - DNA, 742 bp, Arabidopsis thaliana columbia
catatagagaagagcaaaaccctaaagcccactcatcttctcaattcccagatcatctacaatagtcatttctcttcgatttcttcaaactctcatcaaatcgtttatctgttctaaatttcgaagaagacgatgagtacaggcgcaggaagcggaacaaccaaaggtggcagaggaaagccaaaggccaccaaatccgtctctcgatcatctaaagccggtcttcaattccccgtcggaagaatcgctagattcctcaaatccggtaaatacgccgagcgtgtcggtgccggagctccggtctatctctccgctgttctcgagtacctcgccgccgaggtgttggagctggcgggaaacgcagcaagggataacaagaagacacgtatagtaccaagacacattcagcttgcagtgaggaacgatgaagagttaagcaaacttctgggaagtgtgacgattgcgaatggaggagttttgccaaatattcatcagactcttttgccatccaaggttggcaagaacaaaggagatattggatctgcttctcaggagttctgaggttcttagacttcttagttcagttctcttgtttggattcggaacttgtaaaatagaccctgatggtgttttttggggatcaaattaggttttaaagctaagtatatttggcttttgcctaagtatgtttaattagtgaatgatatgatatttcggaacgaatcatgtatcaatggaactg

SEQ ID NO: 99886 - DNA, 527 bp, Arabidopsis thaliana columbia
  unsure (1)..(527): unsure at all n locations
nnnnnnnnnnnnnnnnnnnnnnnnnnnnnnnnnnnnnnnnnnnnnnnnnnnnnnnnnnnnnnnnnnnnnnnnnnccacgcgtccggttttgattgttagatggatgatatagcggagcttgaatggttatcaaatttcttagatgattcttctttcacgccgtattctgctccgacgaataaaccggtttggttaaccggaaatcggagacatcttgtacaaccggttaaagaggagacctgcttcaaatcccaacatccggccgtcaaaaccagacccaaacgagccagaaccggagtcagagtctggtctcatggttcgcagtcgttaaccgactcatcttcaagctctacaacatcttcgtcgtcctctcctcgtccttcaagccctctatggctcgccagcggtcagtttcttgatgagccaatgactaaaacacaaaagaagaagaaagtttggaaaaacgctggtcagacgcatacgcaaacgcaaacgcagacgcggcagtgtggtcattgtggagttca

SEQ ID NO: 99887 - DNA, 566 bp, Arabidopsis thaliana columbia
  unsure (1)..(566): unsure at all n locations
cgattctannnnnnnnnnnnnnnnnnnnnnnnnnnnnnnnnnnnnnnnnnnnnnnnnnnnnnnnnnnnnnnnnnnnnnnnctttggttttttctttttttttttttgggnaaaaaaacgaatatccaataatattatttatccaaatttttatatatcattgggcaaaaaaaatgatttaaaattatcaaaaaaaaagaagagaataaaaatactttcatcttttttttttttttacagaatacgagaaaccctaataggcaaaccgttaggaaaatcaacaaaaggaaaagcaaatgggttatcatcttctgctaattcccaattgaatttaagaactggatgatgaataaacactgccttttctaacttggctagctctgaaccagcacatagccttggccctcctccaaacggcatgtagttgtttccccacgtcgaaaaactaccacttcctgaggatgacccttccgtggttttgctggtgccattctccaaggattaaagagattaggttggtcataacgagaattatccaaatgtacggctgagatcaccggtaacact

SEQ ID NO: 99888 - DNA, 523 bp, Arabidopsis thaliana columbia
ttaggtgcactatagaagagttatgacgtcgcccgcacgcgtacgtaagcttggatcctctagagcggtcgccctttttttttttttttttttttttttttttttttttttttttttttaaaaaggatgaactttttatacataggataattatttagaattgatttacaagaccaaaataacattgactgaaaacgtcgccgtatacatgattgtctatgttcaagaggtagaagatacagagttgggggagaggttggaaagcggtcttacttcatagagattctcactttctcctttaccgacttctgccgggatgtttggtccaaagaaggaagggaatttcgcctgtcttttttcaaaatctgacaacgtcagagctttggcctcaaatacaaggaccacacagtaccgaccatcggtcaggacctcttcccttatcagctgtaagataggggcactacgtctcgggattcctcctcccagcccatattgaaagattcgttttagtgcttcttccaaa

SEQ ID NO: 99889 - DNA, 792 bp, Arabidopsis thaliana columbia
acgcttatacgatcagtctcccacattcacacttccaccacccacgcgtacgctcgtccacatctttctcctttggcggcaatctcaacgacagatagagagaaacgatggcgtcgaactcgcttatgagctgtggcatagccgccgtgtacccttcgcttctctcttcttccaagtctaaattcgtatccgccggagttccactcccaaacgccgggaatgttggtcgtatcagaatggctgctcactggatgcctggcgagccacgaccaggttaccttgacggttctgctcctggagactttgggttcgacccacttggacttggagaatctccagcgaaccttgagagatacaaagagtcagagctcatccactgtagatgggctatgctcgctgttcctgggattttgggaccagaagcattaggatatggaaactgggttaaggctcaggaatgggcagcactaccagggggtcaagccacttacttgggaaacccagtcccgcggggtactttgcccacaatcctggccattgagttcttagccattgcatttggtgagcacccaagaaagatggagaaagaccctgagaaagaaaaagtccccgggaggcgcaattgacccttttgggtactcgaaggacccccaaaagctcggggaattggaaagttaaagagaacccagaccgggcgggtttgcgcctgctgggcggttggtagggaattcctgggggggcaaccagtgcggcctttaccccggggggccaggggacccattggggaggaaa

SEQ ID NO: 99890 - DNA, 1057 bp, Arabidopsis thaliana columbia
ctatacgactactatagggaaagctggcacgcctgcaggtaccggtccggaattcccgggtcgacccacgcgtccgctcgtccacatctttctcctttggcggccaacacaacgacagatagagagaaacgatggcgtcgaactcgcttatgagctgtggcatagccgccgtgtacccttcgctgctctcttcttccaagtctaaattcgtatccgccggagttccactcccaaacgccgggaatgttggtcgtatcagcatggctgctcactggatgcctggcgagccacgaccagcttaccttgacggctctgctcctggatgactttgggtttgacccacttggacttggagaagcttccagcgaaccttgagagatacacagagtcagagctcatccactgtagatgggctatgctcgctgttcctgggattgtgccaccagaagcattaggatatgctaaactgcgttaatggctcaggaatgggcagcactaccagggggtcaagccacttacttgggaaacccagtcccgtggggtactttgcccacaatcttggccattgagttcttagccattgcatttgttgagcaccagagaagtatggagaaagaccctgagaagaagaaggtacccgggaggcgcatttgaccctcttggatactcgaaggacccccagaagctcgaggaattcaaagttaaagagatcaagaacgggcggcttgcagctgttggcgtttgtaggattctgtgtgcaacagtcggcttacccggggacaggaccattggagaacttggcaactcacttggcggatccatggcacaacaacattggcgatattgttatccctttcaactaatgaatgtaaaaatagaaatatgtgtaccttatgagctttatgtgtatcaaaaacactgtgtaatgaaagacagatttgtgaattcctgtaatttgtcttggtgatcgaatgctcgtgtgagcttgaattcaaaaaaaaaaaaaaagggcggccgctctagaggatcccagcttgcgtacgcgtgcctgccccgt

SEQ ID NO: 99891 - DNA, 1119 bp, Arabidopsis thaliana columbia
  unsure (1)..(1119): unsure at all n locations
cnnnnnnnnnnnnnnnnnnnnnnnnnnnnnncctgcgccggcgttccagccgagcgggcaagaaacaatgccacacgcgtccgctcgtccacatctttctcctttggtggcaaacacaacgacagatagagagaaacgatggcgtcgaactcgcttatgagctgtggcatagccgccgtgtacccttcgcttctctcttcttccaagtctaaattcgtatccgccggagttccactcccaaacgccgggaatgttggtcgtatcagaatggctgctcactggatgcctggcgagccacgaccagcttaccttgacggttctgctcctggtgactttgggtttgacccacttggacttggagaagttccagcgaaccttgagagatacaaagagtcagagctcatccactgtagatgggctatgctcgctgttcctgggattttggtaccagaagcattaggatatggaaactgggttaaggctcaggaatgggcagcactaccagggggtcaagccacttacttgggaaacccagtcccgtggggtactttgcccacaatcttggccattgagttcttagccattgcatttgttgagcaccagagaagtatggagaaagaccctgagaagaagaagtacccgggaggcgcatttgaccctcttggatactcgaaggaccccaagaagctcgaggaattgaaagttaaagagatcaagaacgggcggcttgcgctgttggcgtttgtaggattctgtgtgcaacagtcggcttacccggggacaggaccattggagaacttggcaactcacttggcggatccatggcacaacaacattggcgatattgttatccctttcaactaatgaatgtaaaaatagaaatatgtgtaccttatgagctttatgtgtatcaaaaacactgtgtaatgaaagacagatttgtgaattcctgtaatttgtcttggtgatcgaatgctcgtgtgagcttgaattctaagtgatgaaccttttgtccccacaaaaaaaaaaaaaaaaaaaacccaaaaannnnnnnnnnnnnnnnnnnnnnnnnnnnnnnnnnnnnannnnnnnnnnnnnnnnnnnnnnnnnnnnnnnnnn

SEQ ID NO: 99892 - DNA, 1316 bp, Arabidopsis thaliana columbia
actccattcataattttgactccactttccaaaaaaaacaaaaaaaaataaatactaatataaaaaattctcaaatctaaaatttcagatttcagaaatcgccatggcttcagtgactctaggttcatggattgttgttcaccaccacaatcatcatcatccatcttcaatccttaccaaatccagatccagatcttgtcctataactcttactaaacccatctcctttcgatcaaaacgcaccgtttcatcatcttcttcaatcgtttcttcttccgttgttacaaaagaagacaatctacgccaatctgaaccatcctctttcgatttcatgtcgtacatcatcaccaaagccgaattagtcaacaaagctttagattcagctgttcctctccgtgagccactcaagatccacgaagcgatgagttactctcttctcgccggtggcaaaagagttagaccagttctctgcatcgctgcttgtgaactcgtcggaggtgaagaatcaaccgctatgccagcacgttgcgccgtcgagatgattcacaccatgtcgttgatccacgacgatctcccttgtatggataacgacgatctccgccgtggaaaaccgaccaaccacaaagtgtttggtgaagacgtcgctgttttagccggagacgcgcttctctctttctctttcgagcatttagcttcggcgacgagttctgatgttgtttctccggtgagagtggttcgagccgttggagaattggctaaagcgataggaacagaagggttagtggcgggtcaagtcgtggatattagtagtgaagggttagatttaaacgacgtcggtttagagcatttggagtttatccatttgcataaaacggcggcgttgcttgaagcttctgctgttttgggagctattgttggtggaggaagtgatgatgagattgagaggttaagaaagtttgcgagatgtattggtttgttgtttcaggtggttgatgatatcttggatgtgacgaaatcgtcgaaagagttagggaaaactgctgggaaagatttgattgctgataagttgacgtatcctaagattatgggtttggagaaatcgagagagtttgctgagaaattgaatagagaggctcgtgatcagcttttagggtttgattctgataaggttgctcctttgttggctttggctaattacattgcctatagacagaactgatttgtgttcgattccttttgtcgggaatcattattagattggaattgtagaaatctcggacaggttctctagagtttgttggtgtaatcgtatccgg

SEQ ID NO: 99893 - DNA, 520 bp, Arabidopsis thaliana columbia
cgcgtccgcatatccacttgtttttagccttctcaatcattctctcttctctctccctctctgttctcaaactccattttagtagcaagcttagatctcctccttccacagtcactttctcttctttctctgcttttgtttcttcaatcgatttgcttcagatttccccagattatatagaattcgatgtcaagacacagaattcacatgggttttgtctaaaaatcataaaaatcatatctttttacggatttgaagatgaatcagaattcctctgttgcggaggcgacgcttcagcttaattccggtgaaaaaccatcgccgggatcgattccgtttatctcctctggtcaacacggaaacataagcacttcagcgacgagttcgacaagcacaagctcaggtagtgctcttgccgtagttaaatccgccgtgaaaaaaccaactaaagatcggcatactaaagtcgatggtcgtggacggcgaattcgtatgccggcgatgtgcgccgctagagttt

SEQ ID NO: 99894 - DNA, 409 bp, Arabidopsis thaliana columbia
cggacgcgtgggcggacgcgtgggatttagggtttttctctcccccgagcttgcttttccgttgggtgaacgactaccgttgattttcttcgtttttttggataccgattcgattctctctcaccgatttttgaggttctctatttttcgtggataagaagataaagttattgtttattgataagttttctgctgggaagttgcaactttttctagatttaggacgttacaaatttcaatcatgagtgcatcatgggcagatgtggctgattcagagaaggccgtttctcagtcaaagcctccttatgttcccccacacctacggaacaggccatcagagcctgttgctgctcctttgccacaaaatgatcatgcagggtatggtggtcaaccagctgggtctcgttgg

SEQ ID NO: 99895 - DNA, 660 bp, Arabidopsis thaliana columbia
  unsure (1)..(660): unsure at all n locations
taggtgcacctatagaagatctatgacgtcgcctgcacgcgtacgtaagcttggatcctctagagcgtgccgcccttttttttttttttttttaaggaaaagaatgcttgatcattgacaaaaattacagagaaagctacagaatttacttgaaatcaagaatgtgtgaagagtttatcgtttaaaaggaatctaccatagattataaacaatacgaatggtgccttccttctcctgtggctttcattgctgaaactactgtaccaaacaagtcctttgccctttttgtgtggaccagagacctctgataattcggttacgttccgcttaaccggttaaggcttccagcacgaaggtggtatgccttgcttctcaaaccattcaggcatgcggaaccgatcataaagtgtcggtcgtacatcgtcttcctctgacagttgcttcagaagcggtagaataacatccaagagctgagtatcatttggctgccctgcggaaaatgcaatacatggaattccatttgatggttgcaacaaaaagctgaaaggattgttgccaacaatactgccacacatatctttgngncttananncctcngggatccgggatgcgggngnttnanggncnaanncggtgggggnctccgganaccacaaagg

SEQ ID NO: 99896 - DNA, 550 bp, Arabidopsis thaliana columbia
  unsure (1)..(550): unsure at all n locations
agctcnnnnnnnnnnnnnnnnnnnnnnnnnnnnnnnnnnnnnnnnnnnnnnnnnnnnnnnnnnnnnnnnnnnccacgcgtccggcagagcatagagaaaaacataacaatggaggttgagaagacagagaagaacattgcagaggatgatgagtctaagatcatctacagaggatggaaagtcatgcccttcatcattggaaatgagacatttgaaaaattggggattgttggaagttcatcgaatctggttatatacttaacgacggttttcaacatgaagagcatcacggctgcgaaagtcgtcaacatctacggtggcacaagcaactttggcaccatcgtcgctgctttcctctgtgactcctactttggccgctacaagaccctatctttcgccatgatcgcttgctttctcggttcggtggcaatggatctaacggctgtgattcatcccctgcatccagctcaatgcgctaaggaaataggaagcgtgtgcaatgggccatccattggacaaatcatgtttctcgccggagcaatggttttgc

SEQ ID NO: 99897 - DNA, 672 bp, Arabidopsis thaliana columbia
aagacgatgttgcgggtttacaagaggcagctggagccagatttagccagattgagttgattggaagaggctcttttggtgatgtctataaagcgtttgataaggacctcaataaagaagttgccattaaagtaatcgacctggaagaatcagaagatgagatcgaagatattcagaaggaaatttcagtattgtcacaatgtcgttgcccatatatcaccgaatactatggttcttaccttcatcagaccaagttgtggatcatcatggaatatatggccggtggctctgttgctgatcttcttcaatctaataatccgttggatgaaacatcaatcgcttgtatcacacgcgatttgcttcatgctgttgaatatctgcataatgagggaaggatccacagagacattaaagctgcgaatattttgttgagcgagaatggcgatgttaaggtggcggactttggtgtgtctgctcagctaacgcggacaatatcaagaaggaagacttttgtaggaaccccattttggatggcaccagaagttattcagaactcagaagggtataatgagaaggcagatatttggtcgctcggaataacagttattgagatgccaaaaggagaacctcccctagctgaccttcatcccatgagagtgctttttatcattc

SEQ ID NO: 99898 - DNA, 505 bp, Arabidopsis thaliana columbia
  unsure (1)..(505): unsure at all n locations
gaatttagaaaacaatnngattaatngactttgttatncggttttaggaggttactcatttatctttcttctcacacttggtcgtttgttttaacaaagataaactactaacaagagtacaaactacaagacataacaaaacaaagtggaatagaaaaaagattttgacccgttgactaaaaataaaaaatcttcaaaacacagagaagaaaaaccaaaaaagaattagcctctaaaacgacgacgctttttcaacgctttccattcttttcctcacgtcgaagaaaacgacccatttgtcggaacaacactctgacgactatctcctactcctcctactactactccgccgttagctcttctagcgccgctgcgtcctgaaatcttgttgttatgcatccacactttgaaaacgcttttatcaactccaatctcccgacaaaactccttaaccaccacgtcatcagctttcggcatcctccacccaactctctccgagaactcg

SEQ ID NO: 99899 - DNA, 361 bp, Arabidopsis thaliana columbia
ctcgagccgaatcggctcgaggtttttagggttttagcggttgctctctcggaagccagagagaagagggaagaggaagtctaattcctctgcgttttttgcaattagggttttctcaattggaatcgaaaatggtgacagacaagagcaagaaggcgaaaaccgaagaagaaaacgtcgagcaaatcgatgcagagcttgtcctctcaatcgaaaagcttcaagagatccaagacgacctcgagaagataaatgaaaaggctagtgatgaagtgttggaagtggagcagaaatataatgtgataaggaaacctgtttatgacaagcgtaacgagatcatcaaaaccatccctgatttctg

SEQ ID NO: 99900 - DNA, 503 bp, Arabidopsis thaliana columbia
  unsure (1)..(503): unsure at all n locations
nnnnnnnnnnnnnnnnnnnnnnnnnnnnnnnnnnnnnnnnnnnnnnnnnnnnnnnnnnnnnnnnnnnnnnncttttttttttttttttttcaaatgaatctctccctcatccaattggtttgcacaactatgaacaaagcttgtgagagttatgtagcaccatgtggctttcatatctaagaggtaagaaaaggttgaaactttacacactgaatgtcaggcaatgaacattacagaggagggtgtttaatttctttcaaactcaaccgtatccgtaagttacatcgcgtttcgctacaacagagtcaaatggtatttcgactctttccttaacaaggcaccgtgcttctccatcttcaatcacaagaactttccctggtggacattggttaggtgttctcttccctctggtagctcggtgcgggagaagtccaaaaaggttcaaggaagcgcctcttttcctcatctctggaccatatcctgatgcagacaatagagagata

SEQ ID NO: 99901 - DNA, 824 bp, Arabidopsis thaliana columbia
actcactatagggaaagctgctacgcctgcaggtaccggtccggaattcccgggtcgacccacgcgtccggttggttctctagtaatgctatggtctccgaatgtttatgtgttgctcttaggaaggttgttagatggatttggggttggtcttgtggtcacacttgttcctatttatatatctgagactgcaccacctgagattaggggactgttgaatacgctaccgcagttcactggctctggagggatgttcttatcttactgtatggttttcggaatgtcgttgatgccatcacctagctggagattgatgcttggtgtccttttcatcccttcccttgtctttttcttcctcacggtcttcttcttgcccgagtccccaaggtggctcgtgagcaaaggtcgaatgcttgaagcaaagcgggttcttcagagactgcgtggtcgcgaagatgtgtctggtgagatggctttgttggttgagggtcttggaattggaggtgaaacaaccatagaggaatatataattggtcccgcggatgaagttactgatgatcatgatatagctgtggataaggatcaaattaagttatatggtgcagaagaagggctgagttgggttgctaggccagtcaaaggaggaagcactatgagtgttttgtctcgccatggaagtacaatgagcaggaggcaaggctcattgattgatcctcttgtcacactgtttgggagcgttcacgagaagatgccggacactggaagcatgaggagtgccttgttcccacattctgggagtatgttcagtgttggagggaatcaac

SEQ ID NO: 99902 - DNA, 502 bp, Arabidopsis thaliana columbia
  unsure (1)..(502): unsure at all n locations
nnnnnnnnnnnnnnnnnnnnnnnnnnnnnnnnnnnnnnnnnnnnnnnnnnnnnnnnnnnnnnnnnnnnnnnctttttttttttttttctgttttctttagctagtagttgtatatcatggcgaaagaaaaaaaatccaagtcatcacacggatctataatttttggtttttaactatgtatcaaaaacttattaagctgggaggcaaatcataaggtaatgaagatgaaaaacaagactttctatagaaactttgtgccatagaaaccattaggaaccggaattggcatggcccggttaatgggaaaaggtgactgcataaccggaatatcggtaggcatgactgcgtaaggctgatgtccattggctgcaaatggttgtggagcatatagatgcatcggttgaccagttgcgattagactctgatgctttggatactgaaactgttggggagtaaagagaggacgaggaggcaaatgtgagttatgtggtgctccttgaac

SEQ ID NO: 99903 - DNA, 627 bp, Arabidopsis thaliana columbia
  unsure (1)..(627): unsure at all n locations
atagaagagctatgacgtcgcacgcacgcgtacgtaagcttggatcctctagagcggccgcccttttttttttgacttatgatcccaaaaacaaattcccaagttcatggaaaatgtacaatttttacaacaaattacataaatgaacagcttgtgaatcgaaccatggtctctctttcttttcttttgtcgatatgattatgaaacctaaccaagacggcgtataacaaattatttttacgtaagttttttttctttaggcttagcttaaatttccatcaaagtaatgaatcgagataagtgtagtctctggttcgaccatactccaagagacttccataagtcctgtcccaaacaccgatgaagagagattcagtatctgggctaaacgatatcccagaaatctctccaaagaaatcaatctcttgctcctttttgtatcctgatttttgtgtcatagatatgaacgaaatctgctggctcggcatgggaacgnaccggccgncantgggaccnatnggccggangggncaaggnancttttaggaagcgctggtccgggngtcctggggccaaangaaggcttgctggtcctggggangtaaccggttggggcaaggggngaat

SEQ ID NO: 99904 - DNA, 453 bp, Arabidopsis thaliana columbia
gcggccgccctttttttttttttttttttttaatcttattatttcaactcatttatttttgcataccggtttccttacagagattgtaaatccaaaatttattaggtcaaccatttaagtaaactatataatttaggatacaattgtgagaattaattcaaaaaacaacaatcttctaacaataacttagcccctgattaaatcaggaaacattttagttttaattatccttaatctgctattaaccgatatactactaccatgtttctttaaccgggaaatatcagaaactcggaacaacaccgaatccgcaataaactccgacgtctccaccatcattctctctcgaatctgttctcttagcaaaacgtcctttgattctcggcctcatctcagcgtaagctttacgcgacgcatacctaatcgtcttctcaaatttccgattcttcctct

SEQ ID NO: 99905 - DNA, 578 bp, Arabidopsis thaliana columbia
cgattgatttggtgacactatagaagagcttgacgtcgcatgcacgccgttccttagcctggattcttttgaaccggcggcccttttttttttttttttggttatcttaattgcctaacctaattatttttggcttaccatttcctaccaaaaatggtaattcaaaattaataagtccacctttaggtaacctatttaatttaggatacaattgtgagaattaattcaaaaaacaacaatcttctaacaataacttagcccctgattaaatcaggaaacattttagttttaattatccttaatctgctattaaccgatatactactaccatgtttctttaaccgggaaatatcagaaactcggaacaacaccgaatccgcaataaactccgacgtctccaccatcattctctctcgaatctgttctcttagcaaaacgtcctttgattctcggcctcatctcagcgtaagctttacgcgacgcatacctaatcgtcttctcaaatttccgattcttcctcttctctctatacctcaaaacccttgcttccctctccgccggtgataactgcacagctg

SEQ ID NO: 99906 - DNA, 390 bp, Arabidopsis thaliana columbia
aaaattacagacagagaagagagagatcactatggctgtcggagatgatgatctggagaacagaatgtcggcgaaagatcgaggaatcggaagcagaggcggtgatcggaatcgaatcggaccaccgcctctgccggtagccttgtcgtcggcctcctgaatttggcgataacgcgttgtccgccgcggtggacgtcgtggcttgttccgatgttcgttgtggctaacgttgcggttttcgtcgtggcgatgttcgttaataactgtccgaatcatttcgagtctcaccgtctcagaggtcactgtgtcgccaagtttctcggtagactctcctttgagcctctccgaactaatcctctctttggtcgatcttctcacacattggagaag

SEQ ID NO: 99907 - DNA, 428 bp, Arabidopsis thaliana columbia
atcacttatcaactccaaagtagagatgattactctaaatgttggtctttttgatgcttctttgtcccaacaatcctggattagctcttgtaacccgaaaggatatgattttgttggagcattgaatggtggacgttcatcttcaatatatgctttaggaacttcgcggcctttctatcccatgaaaggggttcacaaccttcctaccatctcttggaagattaaagcgaaagagaatacatctacttttgtatcatactcttcattcctataaacctctggagccatatatcgccatgaactgtccaagcatgtaacaacaggtctgtcttttttaactgtcttcttaactaccagcagcttgctgactccaaagtctgcaactttcagatgtcccgaatcatcccgcagtatgtttggaggttcta

SEQ ID NO: 99908 - DNA, 659 bp, Arabidopsis thaliana columbia
  unsure (1)..(659): unsure at all n locations
cgattcnnnnnnnnnnnnnnnnnnnnnnnnnnnnnnnnnnnnnnnnnnnnnnnnnnnnnnnnnnnnnnnnnnnnnnnnnnnnctttttttttttttttagctcagagatctcattattttacttcgccactgcgtaaaaaataatacacaccaccgtgttcattctggttaagaaaaacagtcatgatgtcatatataaatacaaaagacctaaaaagtatttgacattttttcatccttttaaggcaattaaagaaaaacaaacccaaagctctttgcagtcactcatctgttgaatgagcctgatgagcggttactaccaccgggattcacataatctcgctttgtaaacaatctgaatcttggaaggcatcttcctagcatcaccttccagctccttttgcgtgcaattcgatcacttatcaactccaaagtagagatgattactctaaatgttggtctttttgatgcttctttgtcccaacaatcctggattagctcttgtaacccgaaaggatatgattttgttgggggcattgaatggggggcgnccanctccaanaaaggcttaggganttcgggggcttcnancccaggaaggggtccnaacntntannaccntggaaggtaagnggaaggggaaccncncctttggtnna

SEQ ID NO: 99909 - DNA, 614 bp, Arabidopsis thaliana columbia
  unsure (1)..(614): unsure at all n locations
cggcannnnnnnnnnnnnnnnnnnnnnnnnnnnnnnnnnnnnnnnnnnnnnnnnnnnnnnnnnnnnnnnnnnnccacnngcgtccgcttttaaccatcaccctataagtggttataactagtaacttgaaatagaaacactctatctctaaaagaggcaaccaaacaaacaaggtctagctttttataaccaaactctgcttctgaacagagttagtcaaagagagagaagccatggaagctatgaaggagactgtggaggagagcttgagagagatgagagagacgtttgcgagtgggaggacgaggagtctgaagtggaggaaggcacagatcggagctatatacgagatggttaaagacaacgaagacaagatctgcaatgctctgtttcaagatttgggcaaacacagtactgaagcttttagagatgagcttggtgttgtcttgcgaacagctactgttgcaatcaactgtcttgataaatgggccgtccccaaacatagcaaacttcctctgttgttctacccagcaaaagggaaagtcatatcggaaccctatgggacgggtcttgttctgtctaactggaatttttctatatctttgtctctggat

SEQ ID NO: 99910 - DNA, 506 bp, Arabidopsis thaliana columbia
  unsure (1)..(506): unsure at all n locations
cgattcnnnnnnnnnnnnnnnnnnnnnnnnnnnnnnnnnnnnnnnnnnnnnnnnnnnnnnnnnnnnnnnnnnnnnnnnnnnctttttttttttttttttatatcttaaagaacttataataacagtaccatgttccccacatgttccatagatcaaaacataaaaacccaaaacataaagttctcggcttttcagtatcatcttaacttcgtcttaggataagggtacaagacacaaccataatctagagaagactagcaaaagagtgacgaatcaatcactggcttggtgaacggtcttcgtcatactggcccccatgcgggctttggctcctgcttctggcgggttcaggagtgtagcttcttctgcttctcctcggactcctgcttcttctagggctacggcttatgcttcttcttgggctaacgctcctatttctttttgggcttgggctcctgcttcttcttgggctacggcttatgcttcttctagggctggggcttaag

SEQ ID NO: 99911 - DNA, 581 bp, Arabidopsis thaliana columbia
  unsure (1)..(581): unsure at all n locations
atcgacttacttagggaaagctggtacgcctgcaggtaccggtccggaattcccgggtcgacccacgcgtccgaaaaagcaatttctgagcgtggaggacaaggcaaaattcggtgtgcaaggcactggatattgggacccttgtttcctcgtgagagaattttcaatcctagggcttaaagagcacgttcctagtataaagctgattcacagatgcggagattcttgattaaccaagctaaaggtctcgtcgaccattctcgtcgtcaacatcaccacaaaagtccaagctttctctctcctcaacctcgtccccttgcttcttctcctcctgctctgtctcgtttcttctcttctacttcggagatgtctgcttctgattccacttcttctcttcccgttactcttgactccatcaatcccaaggttctgaaatgtgagtatgctgttcgaggagaaattgtcaacattgctcagaagttacaagaagacttgaagactaataaggatgcttatccctttgatgagataatctattgcaacattgngaatcctcaatctcttggtcagctgcctataaa

SEQ ID NO: 99912 - DNA, 1032 bp, Arabidopsis thaliana columbia
  unsure (1)..(1032): unsure at all n locations
nnnnnnnnnnnnnnnnnnnnnnnnnnnnnnnnnnnncacacgcgtccgcggacgcgtgggcggacgcgtggggccaagctaaaaatctcatagatcagagtcgtcgtcgtcaacttcatcatcacaaaaatctcagctttgtctctcttattcctcctttttctgctccttccgattcttcatcgcgccacttgtcttcttcttcttcttccgatatgtctgcttctgattcctcttcctctcttcccgttactcttgacaccatcaaccccaaggttatcaaatgtgagtatgctgtccgtggagaaattgtcaacattgctcagaaattgcaagaagatttgaagactaacaaggacgcttatccctttgatgagattatctactgtaatatcgggaatcctcaatctcttggtcaacagcctataacattcttcagagaggttcttgctttatgttcctacacagccctgttggatgagagtgcaacacacggtttgttcagttctgattcgattgagcgtgcttggaagattctggaccaaattcccgggagagcgactggtgcttacagccacagccagggtatcaaggggttacgtgatgcaattgctgatggaatcgaagcccgtgatggtttccctgctgatcctaatgatatattcatgacagatggtgcaagtccaggggttcatatgatgatgcaacttctcataacttcagagaaagatggaatcctttgtcctattcctcagtatccattgtactcagcttcaattgcccttcacggtggaactttggttccatactaccttgatgaagcatcaggatggggtcttgaaatatctgagctgaagaaacaacttgaagatgctaggtcaaagggcatcactgtgagagctttggctgtcattaaccctggaaacccgacagggcaggttctttcggaagaaaaccagcgtgacgttgttaagttctgcaagcaagagggtttagttcttttagcagacgaggtttatcaagagaatgtct

SEQ ID NO: 99913 - DNA, 513 bp, Arabidopsis thaliana columbia
  unsure (1)..(513): unsure at all n locations
cnnnnnnnnnnnnnnnngacactatacaagactttgacgtcgcacgcacgcgtacgtaagctgggatcctctagagcggtcgccctttttttttttttttgaaaaaaacaaggtacattcacatctcttatttgaaagctacatgagtcttatcttaaacgtacagaagaaaaatagtaaaaaggaacttttgtcctcacttactactactactcattactgtactaactcttctctttgtatcacgtttcattacaacattcagatatcagctaattaggatgatggtttgtctaactctatttgttgctggttttgactgcaactgggtctgaacaataagggcagttcccaaacagaacatcaaatgactgtcttgttgttgtgatagaccttaaccagtctgtgaggcagaggctatggaaagacttgttgcaactgatgttttcacatgtgtaatctgttcgtgtcccacttctagctccgagctcctcatcggtgggtagaaactgc

SEQ ID NO: 99914 - DNA, 706 bp, Arabidopsis thaliana columbia
  unsure (1)..(706): unsure at all n locations
cgnnnnnnnnnnnnnnnnnnnnnnnnnnnnnnnnnnnnnnnnnnnnnnnnnnnnnnnnnnnnnnnnnnnnnnnnnnnnnnnctttttttttttttttttttttttaacaaaaccatatttgataatatgtagaaaaaaaactaaaataaaaacatgtatataggtttggatcaagtcaagggacccagaagacagtccggtttgcttgccggttcgatttagaagacaatagtttaaccaacacaagctattaatattacaagacacaaaacccaaaagaagacttttaactcaagaaagcttaaaaagaaataaaataaaacaaagcctattggcgttgattgatgattgatttgactcagtgaagcctagtgagttcttcaactctcttacacaactcctccacttgaacattcatggatttcgatatatcctccatcttggtttctactcagatccagaaacgattcgattaagtcaccatcccaggaattcctcgcttccgggggtcctttccncggtaattaaacgactccatggccggggggtaatccggcgnnncctttaacacttttccaaactgncggaattccccaagaaggnaatggtntgggggagggaggttttacccancncccatgggtgnncaagngaagnnggggttggcatccggaccgggcccntaaagncnggggttggnaatcca

SEQ ID NO: 99915 - DNA, 513 bp, Arabidopsis thaliana columbia
  unsure (1)..(513): unsure at all n locations
cgattcggnnnnnnnnnnnnnnnnnnnnnnnnnnnnnnnnnnnnnnnnnnnnnnnnnnnnnnnnnnnnnnnnnnnnnnnnnnctttttttttttttttttctagaaaagatggactttagattatttacttttcagtaaattagtatgaacaacattacatattcaaaaataaagtacgtaaaaacaatttatttggctcatgcaaaagatgaacggaagttttctggtaatgattcttgacttttgcggtaaatggtcttcacgaaagcagcgaaacgttccaatcctccacgaataatcttctccataaacggtttcattgcaaatgcaactggagcaaaagcatttggaacttcatatgaaaaactaatctctactaaacacgaggaagggcctcttgggaaaaagcgaacactgcctctattttcaaagccttcgatagatctccaatgtatctttcgatctggaattggctgtaaattttgtgcgagaaagtgatattcaatattctg

SEQ ID NO: 99916 - DNA, 817 bp, Arabidopsis thaliana columbia
ggtgcactatagaagagttatgacgtcgcacgcacgcgtacgtaagcttggatcctctagagcggtcgcccttttgtttttttttttacttgagaaagctatcggatcagtcagaacttccaaaaaaacagctgcaatgtacagaaaagttcacagcacaaccaccatctgatgccgggtaaaccgccaggagttgacagttgcgcatcgtcgagagaggaggggggggtacggcagggacagctcggtggcttggtgagtaatgtccctcggtcactggaagtacagggtcatcgacgctcggggtgcggggttcggtgtgggcggctcagtcctcctccgcggggccagggggctccacctcgtacttccgcaggcggtcgcggacgtcgcgcagcagctcgttcttctgggccagcatggccttcatgttcttgaactgtggcgcgtcgttgaccttgccctccgccaccttgttggccgcctccagctccttgtcctttgcctccaatcttgcattgagatccttcacctcggcagacagcgctcgcagctgtgcggccttgtcgtccttcgcggcgaggtccttcagctgctgcagctcctccgccagggccgtcttctgcttcatcatcgtggtgtactgctcctggatcttacgcactttttcctggagcgcctttccttcctcttcgctcaacagcggacccttggcctcctgcacaggggcctcgaccggacgcgtgggtcgacccgggaattccggaccggtacctgcaggcgtacgagctttccctaactgagtcgtattgtagct

SEQ ID NO: 99917 - DNA, 515 bp, Arabidopsis thaliana columbia
  unsure (1)..(515): unsure at all n locations
nnnnnnnnnnnnnnnnnnnnnnnnnnnnnnnnnnnnnnnnnnnnnnnnnnnnnnnnnnnnnnnnnnnnnnnnnnnnnnnnnnnnccacgcgtccgtattttttttcgaacctccacaaatggcctctgtgatgtcaggatgcctgcggcagtctggtcgttggatgcgacccctccaggcgggcgctgcccgcagcctcttcaccgtgcccaagaccatgaaggccgctgtggtggagcagttcggcaagccgctggccatccgggaagtgcccgtcccggagccagggtacggccaggtgctcatcaagatcatcgcgtcgggcgtctgccacacggacctgcatgtgcgcgatggggactggtacgtgaagcccaacctgcccatcatccccgggcacgagggggccggggtggtggtgaaggtgggccagggcgtgtccaccctcaaggtgggcgaccgcgtgggcagcgcctggctgcacgactcctgcggccactgccactactgccgct

SEQ ID NO: 99918 - DNA, 711 bp, Arabidopsis thaliana columbia
ctatgacgtcgcatgcacgcgtacgtaagcttggatcctctagagcggccgccctttttttttttttttaaagaaaatttttggcgtagtaataattaaatgctgattttaaaaatatctggtttttggaccaaagctagttattagctggattccaacagaagatgaaggaaaaaaacatcggtacgtacttcaaattttattgtacgattcacaaagcctaataagaaatctaacagggagtcttaattagcatcagaaacagagctttatattctaaaaccgcacatcatccggttgatatctttcatataaagttttatctaacgacgtcgttctggtgaccaatgcggcaacgaagggctgaaatgagcagacacaactctagagtcaagcagctccatgataggtgtgaagctcacgcacctcggtaccttatactgattaatcgatgcgcctctcgagatggcatagtccatgagctcctcaaacgtaccgttccgtaccacacgtatctccaacgggccgatcgatttatcagcgacccggctttgtctataaaccgagtttaaagattcctccatctccaaacagcacttagccatgacttttttgctcataaagagcattgttttgatctctaccaagtagcttcccagtagatttacgtaatgaacccggtatagatctttcgtttccggcgtaagcttt

SEQ ID NO: 99919 - DNA, 886 bp, Arabidopsis thaliana columbia
ttgggtgggccccaatggcgggccaacagaaaggggcttgaacaattggaaccaagatccaccaccttccaaggaggtccaatgcaagcctcccattgaataaggggtgtgaaaggcttcaaccgcaacattggggtaacctttaatactgaatttaatccgattgcgccctcctcgagataggcattagtcccttaagctcctccaaacgtaccgttccggtcccacacgtttctccaacggggccgatcgatttatcagcgacccggctttgtctataaaccgagtttaaagattcctccatctccaaacaagcacttagccatgacttcttcgctcataagagcattgctttgatctctaccaagtagctcccagtagattacgtaatgacccggtatagtcttcgtttctgcgtagcttgtgtactcgatcacacgtgttccttgctctgcaaacaacctcgacgcattctccactgctttttgtagctcagcctcgtcggttttatcggattctacgcttagcagaacattctttctccgtatgaatttgaactgtggagcggaattatggaaccccgtgacacgaagaatgtcgccaactctgtaacggtagagccccgcgtaggtcgtgatcacgagttcgtactcttttcctacctcaacattagcaagctccacaagtgacgtttcgtctaatgatgcttctgctgctccatctccatcgtgattatgtgggaggaattcaaagtaggccatgtttggcatgattgtgtaagaaacctccgaaggtttacacatcggctttaggttaatcccgaaataactttcggacgaagcacggacgcgtgggtcaacccgggaagtccggtccggaacggcaa

SEQ ID NO: 99920 - DNA, 518 bp, Arabidopsis thaliana columbia
  unsure (1)..(518): unsure at all n locations
cgattnnnnnnnnnnnnnnnnnnnnnnnnnnnnnnnnnnnnnnnnnnnnnnnnnnnnnnnnnnnnnnnnnnnnnnnnnnnnncttttgttttttttttctacaaacttcgattcccaaactcaattctgccaacatatatcagtctcaatttgatcaatgttccacgatctgtaataatgcaactaaggtagagtattatatatccgaccaacataaaaaatatcattacctattattgcttgcactaaaacacggaaattaaaacaaaaactcgcaagtcagcagagaaaccaatggatgagagtgaccatcaatccgcatagctaaccagacctctctttcctggtggagaaggtgagtgagaagggctgagtgattctgcaggagaggtgcgtcctcctctgatgggggatctctgtggcccgagacgggatttcaggtcttggctaattggctgcctctttctagggctctggctacggctacgatgcctcggactctggctcctgcttccgtc

SEQ ID NO: 99921 - DNA, 636 bp, Arabidopsis thaliana columbia
actttctcacatctactcgatttctgaatcgcgaacgcagcgagcgatccggaatcgagagagagagctaccaatttttccaacttgttcggttccttataaagctgtttactttcccttgcgaattctctctctctctactataaagcaatacccttttctttcttttttggtaacccccaaaccctactttgtccagcgagaaaggaagaggggtttcgtctgattccgctaaatctctagtctttatctaaagatcatggattccgatgatgatatgcacgatatggactcggtagattatgattattacagcggcggcacctatgatgacaacgatagtgatgaaactgatttcgggtttggtgaggctgacaccgacgatgccgccatcatcgcctcctatcgctctaagagtaattatgttgttctcaaggaagaagatattcgcaggcatcagaacgatgatgttgggcgagtttccgcggtcctctccataaccgatgtcgaagcaagtactttgcttcttcactatcactggagtgtcaggaaagttaatgatgaatggtttgcggatgaggagagagttcgcagaactgttggcatattagagggacctgttgttacaacacctga

SEQ ID NO: 99922 - DNA, 513 bp, Arabidopsis thaliana columbia
  unsure (1)..(513): unsure at all n locations
ttaggacannnnnnnnnnnnnnnnnnnnnnnnnnnngaaaaaaaatactctacatattattaaatctagataactgttttctcctcgttcgtttcaagtaatctcaaattattacgagaggaagatacaactgagaagctgaggacaaaagactggagagacactccatcctgtctagctctaaccttaacttatgacttactagctaaaacaatttcataagacacaatcggccaaaagataaaataaataaatataaaaagcctatattgtgatacaaaaactcacagcaaatgcatcctctcaacatgagactgcagcaaccatctgttaagaggctctccgcttccaacgaaacaacctgagtttccactctccgtgaaaaacggtgaaccaaagatgttcagcagctcctcaactgcttgtctcaccattgatgtaccggtgactctactacgtcttccccaaccagttactatatcaatccgagaagggcaagttcctgaagctaac

SEQ ID NO: 99923 - DNA, 502 bp, Arabidopsis thaliana columbia
  unsure (1)..(502): unsure at all n locations
nnnnnnnnnnnnnnnnnnnnnnnnnnnnnnnnnnnnnnnnnnnnnnnnnnnnnnnnnnnnnnnnnnnnnnnnnnctttttttttttttttatggtgaaatagcgcctctataatccaaaccttttcaatttttatgtctttccaaactcaataacttaaaaaatacaacaaaagttacatctccaaagaaagaaaccaaagagaagagaacaaacacgacgtgtgtgattcataagagctttggccttaagttttaagcaaatcattgaccaccatttgaagaaatagtagtaagaacatcagtcaccgaagccatcacactcagggctgccttcaatacgtcttgagaacatcctggtttcactatcgccctcacttggtcaagatattcctgcagcttcttgatacgtcccatgtaatcttgatcttcaacacagagactcactgctttagcatccgcaccaggaccatcgtactgtagcggtcctgggtttctgtacag

SEQ ID NO: 99924 - DNA, 527 bp, Arabidopsis thaliana columbia
  unsure (1)..(527): unsure at all n locations
nnnnnnnnntttaggacgnnnnnnnnnnnnnnnnnnnnnnnnnnnnnnnnnnnnnnnnnnnnnnnnnnnnnnnnnnnnnnnnnncttttgtttttttttttttttaagaaaacatgcgatattatattaatgatgagttacaaatatagtttgtttttaaaatggttacaaatagagattaatatcgcatggcgtttccctccttcatataatagtaaaaataaaaataagagatgaactcatggctccttcatctgttgtataaacttgggccctttgttcaatctaagtgcttcttgtgagggttgctcaatggcctgaatccgcttcctccactgacatgcgccttacccgcggcatcgaagtgaccttttccaaagtacttcatgattccatcataatatccactgccggtttcacctccgactttagcttcaacttgagctctaaccttagccttacccgcggcatggacctgacctccgactttaacttaaccttggaactccaacctttccttntgggtt

SEQ ID NO: 99925 - DNA, 632 bp, Arabidopsis thaliana columbia
  unsure (1)..(632): unsure at all n locations
ccggnccggaancccgggataccaggcggctaacacccgnccgcccacgcggccggaaaatttctctctaaatatctgattcaaacgcatttggtaggctgagagaaagaaagaaaaagataaagatggatcacgcagcagatgctcaccgtacggatttgatgaccattacaagattcgtgttgaatgaacaatcaaagtatccagaatctcgtggtgatttcaccattttgcttagtcacatcgttttgggttgcaaattcgtttgcagtgctgttaataaggctggtttggctaagttaattggacttgcaggggaaacaaacattcagggtgaagagcaaaagaaacttgatgtgctctctaatgatgtctttgtcaacgctttggttagcagtggtagaacttctgttcttgtctcggaggaagatgaggaagctacgtttgtggagccatccaagcgtggaaagtactgtgttgtttttgatccgcttgatggatcttcaaacattgactgtggtgtttccattggcacaatttttgggatttacacgttggaccacactgatgagcccaccactccagatgttctgaaccctgggattgaaatggttgctccaggttttttttta

SEQ ID NO: 99926 - DNA, 658 bp, Arabidopsis thaliana columbia
tttaacgcctcctcctccatttttcaaaaccctaatccgaccggagccatggcggaggtcgacatctcacactcgaagaagaagaagcaagacaaaacggagaacgatgccgccgacaccggagactacatgatcaagccacagagtttcactccagccatcgacacttctcagtggcccatcctcctcaagaactacgaccgcctcaacgtccgtaccggtcactacactccaatcagcgccggtcactctcctctgaaacgtcctcttcaagagtatatcaggtacggtgtcatcaatctcgataaacccgcgaacccttcttctcacgaggtcgttgcttggattaagcgtatcctccgtgttgagaaaaccggtcacagtggtactcttgacccaaaagtcactggaaacctcattgtctgtattgaccgagccacacggcttgtgaaatcgcagcaaggtgcgggtaaagagtacgtttgtgttgctcggcttcactcagctgtccctgatgttgctaaagtagctagagctcttgaatcgctcactggagctgtgtttcagaggcctcctttgatctctgctgttaaaagacagcttaggattaggacaatctatgaaagcaagctgcttgtgtatgatgctgataggcatt

SEQ ID NO: 99927 - DNA, 477 bp, Arabidopsis thaliana columbia
tgacgtcgcacgcacgcgtacgtaagcttggatcctctagagcggtcgccctttggttttttttttttttttttggaaacaaaaataacaaacattattgtgattttgtaatcattcagtgtgtaatacatgataacccaagaaaaaaaaacattcaaagaatttgctataagatcaaaccccacaatgtacaaatcaaagaggggttaagcacacatattcactttaccaacctacaaagaagaatcaaaaagaataatagagatccaaaagcaacataaagttttcttggaatgagaagagctaacaagagatgagagacttcagacgttaatatccattcgctttgacctggcactgccattgttggttgtttcttgtacactggaaagagagtatctcggaatggtgtagttatcaggggtggacactggttgttgcggatagagcgtgggaggcggagttaggttgcgttgt

SEQ ID NO: 99928 - DNA, 494 bp, Arabidopsis thaliana columbia
atagaagagctatgacgtcgcacgcacgcgtacgtaagcttggatcctctagagcggtcgccctttggtttttttcttgttttttttttttttttttttttttttttttttttttttggagcaatggttcgttttttctttcaataaacaaaatgtctcaaagcacatcgtcgattctaaagacttcaattccacttagagttgcaaaggtttcacagttttgaaattcagatctctcccaagtagatatttttatcactactgcaagatccaatgataggctcggttgggtggaaaacacactcattgacagaaccggtatggcctgggagcttatatatagggcgccgactggttgggtcccagatatgaaccatacggtctgagctaccggcagtaacttttgtaccatcaggggaccatgaacatttcagcaggttcttctcaaagttgtgttgatgcccctcaaagatctttacacatcggttttgtgg

SEQ ID NO: 99929 - DNA, 495 bp, Arabidopsis thaliana columbia
taggaacactatagaagattatgacgtcgcctgcacgcgtacgtaagcttggatcctctagagcggccgcccttttttttttttttttttttaagagacaacctctgttttttctactataagacccacaaagataaaacccaaaaaagaaagaacattgcagtgtttgaccaaaagagttcctccaacgaatgcatctgactaaaccaaagtatgtctgagaagcagcatcaaaggccgaggttactcagaagctgactccatctgggagtctcctcatgaaaaatgtatgttacaggagaaactagtaccccacttcctcccaccgctctcagttgctgcacagactcataaagcgctttttttggtacacatatcacaatggcatagtactcaattgttacttttccatctcgtttacaataaactggacttattgttggtccctgcaatcctgatagtgatggttgggttttcacacgttcagccacttct

SEQ ID NO: 99930 - DNA, 511 bp, Arabidopsis thaliana columbia
  unsure (1)..(511): unsure at all n locations
cgattgtannnnnnnnnnnnnnnnnnnnnnnnnnnnnnnnnnnnnnnnnnnnnnnnnnnnnnnnnnnnnnnnnnnnnnnnnctttttttttttttttttttacgcccaaaccaactaataatttggcatatataataaattatgtttttgacaacaaatataataatgaagagtgatgagatataatttgacgtggaatactggaaaacggaaaaattccagacaatataaaatcgaaaaaaacaaaaataaaagccaagataagacgacagcgtttatagctgtgactgactgatgtatgtacagtgttgagagtgtggatcaagtagaagatggagtagtggtggtgggagtaatattacggnttntnatatacgtnaaaaattgtgttgggaattttgttagaagtgnttttaccantgagacctntnnatattgtatgtntngtaatggaacaaactggacgatatngngcgatgctattcgaccactggagctctctaatttctct

SEQ ID NO: 99931 - DNA, 807 bp, Arabidopsis thaliana columbia
cgatttaattatggtgcactatagaagactatgacgtcgcacgcacgcgtacgtaagcttggatcctctagagcggtcgcccttttgtttttttctttttcggccgctgttgtttagctgaaagaaagaaggaaagaacaactcatatgaaaaaaggtcaaagagtaaaatgataaagactataaaggagtctcctctcctccaaaggaaaatatttaaatgacctcaatcaaaaatgactcacctaaaccccctcaaagaatattacagacgaaagctggtttattatccacacaaacctataaaacaaaacaaaacaaggaaacattccgacagaattccgcggtcacagtcttctagtaagcgaataccaccatggcagattgcgctactatgagatttcaattacttatatggatacttgttttcccaaaggtcttagtagccgcccatcggtggcattccatatggaggcattggaggcattcctgacattcctggcattccacccatttgtggtggtggaccatacccgccacctcccattcctggcatcggtggtgcgggtagagccagtggtaataattgggcgtacatgtcctgttgcgacatgacatccttctcttcctgttctttggcctccacctttttttgagccctccagccttggcctttgattagccccattgcacctttggcccggaagtatttcctcggagataaaacttggaagggagaataaccggcaaagggccacaagttcccactcagttttcggggcgaattcccaaggccaaagttttttta

SEQ ID NO: 99932 - DNA, 662 bp, Arabidopsis thaliana columbia
  unsure (1)..(662): unsure at all n locations
nnnnnnnnnnnnnnnnnnnnnnnnnnnnnnnnnnnnnnnnnnnnnnnnnnnnnnnnnnnnnnnnnnnctttttttttttttttttttttgattgatgagttatatcaacattgatatatatcatgaatggtgagtgatccaaaacaagaaatgaatacaatacaagaagatctggaatttgttcagactacaattcaatacaactacagtttcatgtctcctgaatcagttatgttccatgagttggtccaatggttagagattgatgactcagtctcctccactcttaaacacccattagcgatcagaatcacagagacagagaacaaaagaatctgcgaatatgtaaagagagaacaacgtgcttttacatttctatctacctttgtgatcaaatcagtcttcgtgctcatcttcgccttcagaatctgatctgacatcttcactaagcttgcctctatcttgtatttgtttcacaagcatccgatacatcaaaacccaccaataaatgtgaagaacaagcaagcaatataggagagtgttaaacatgtagtagtaaattgggccttcgattgccggacgcgtggggtcgaccccgggaaattccgggaaccgggaaccctggcagggcgttaaccaagcttttttccccttattaagtg

SEQ ID NO: 99933 - DNA, 514 bp, Arabidopsis thaliana columbia
  unsure (1)..(514): unsure at all n locations
cgattgtannnnnnnnnnnnnnnnnnnnnnnnnnnnnnnnnnnnnnnnnnnnnnnnnnnnnnnnnnnnnnnnnnnnnnnnncttttttttttttttttttttaagcgtgaactgtgagcttattggagttactagaaaatcaatgacgtttttgtggtataaaattacacccgcagaaaagtgaggggaaaagaaaaaagaaaaaagccagacatgcctggaagcgggacttacccaaatcgttgtgacataatgggaagaaaaacaaagcttaacgtacaaaagcgttgttgtcatgtaatgaaatcagcaagtggtttatcgacttccagagacaaaaaccaacttcactacttagaatcgtgcactttctttgagcaccattttccttcaagatcctactgtttcttattttttggctttttgcttcttcttatccaaagatgttaaaccagcacctaatcctgcaggagccaggttttctgttttcccattttcagaggattctttcttc

SEQ ID NO: 99934 - DNA, 646 bp, Arabidopsis thaliana columbia
  unsure (1)..(646): unsure at all n locations
ttttntnccnccaaaaccgggnctttnaaaaaaccngggttggcctttccnccacgggnaggtttttanaaggttttnaggagggnaaattccaaaaggatttttgggggctaccccttaaaaattatggcccaagaaaagnaaatnagaactcaacanagagcaagagnccaattccgagagaccaacgaaaacctttttttttttttgggttttagaatactttcgtgaaaagaaaaccaatctttttttttaactgactcggacttctcccatgctagcatgcacttgcttcaccgtcttatcatactcatcttcttcgtcttcttcttcttctacttcctcaacttcttcctctgcatcttcctccttgccctcggcatcttctcctcctccccacccaaatgctccaatcgaccgagaaacacgagctggagtttttgcctcttccacaatcttcattatctcttcgacgctttggagtgagaatgtcgggttctctttcctgaagtatgcagcttgagctatttctgtaagttcccttggcaggttctttaggaaccatggatgttccttgatgtcacctatcgggatccccctaatcgagtgggggacaaaaaacggganaggagangtttgcaacctg

SEQ ID NO: 99935 - DNA, 541 bp, Arabidopsis thaliana columbia
  unsure (1)..(541): unsure at all n locations
nnnnnnnnnnnnnnnnnnnnnnnnnnnnnnnnnnnnnnnnnnnnnnnnnnnnnnnnnnnnnnnnnnnnnnnncttttttttttttttttcgacaaaaggctttgcttatatagccatgaagttttaatttttctacgatataccgtatgtttacaaaagtatagcataaattggattccatatgggatgtgaagatgaaagatggcatttgtttatttctaacaaaaacaattaaggtttttggttgatgaaaacttatttcttcacctcccttctctttctcttcctttacttttccgtattccgatttaaatgaagggagattgcttaatgggggttctttcccagtagaaaattccatgaatgattagcaaagacaagcattgccaagcccaatgagaaccgtaaatcggctaaggccatgtattcccatccactctaacacaaggcttgctcgtttgtatccataaacgtcgaccattaggtatatcgcggataacaaaaatcccgaggcccctgaggtgacacacatgtaactcaa

SEQ ID NO: 99936 - DNA, 734 bp, Arabidopsis thaliana columbia
  unsure (1)..(734): unsure at all n locations
attctnnnntacnnnnnnnnnnnnnnnnnnnnnnnnnnnnnnnnnnnnnnnnnnnnnnnnnnnnnnnnnnnnnnnnctttctttttttttttttttgtcatgaaacattgacttgtattatatatataccgctttagaatacagagaatccaaaaacgacttatatggataaatcaatatctactcgccagccaaaaccgttttctgtctccttgagtttccttgcagccgatcaatctcaccgtgcacaatctctttcaccagatcttggaagagaagcctctccatgtcaagcactaaaccagggagtgcatcatcaaaggccgtccatttctcagatggcattgccatatcttcatccaatatacattgcaagaaatcttcttcttcttcttcttcttcctccaacaacaacaagttttctgatctcttcttggcttgcttttgtagtatctctatctctgaacatagttccttcaacagattttgtgcacttaagaccttctttctcgctttagcttgcttcatccatggatctacatagctctcaacaaaagctagcttcttcccgagcatttcattaacagcatcgaacacaagtttgcggatgatcttttcattgctgctactgctgcatcctttagtttgctcaatcacaaggaacagctccggattaattgggtggcctgaagggtgcagttgaaaagttgttaatcctgagccaagatctctgt

SEQ ID NO: 99937 - DNA, 1010 bp, Arabidopsis thaliana columbia
  unsure (1)..(1010): unsure at all n locations
caattttcggttctaaacgtttgattgggagacgttttgatgatccacagactcagaaggagatgaaaatggttccttacaagattgttaaggcacctaacggtgatgcttgggtcgaagccaatggacaaaagttttctcccagtcagattggtgctaatgtcctcactataatgaaggaaacagctgaagcttacctcgggaaatctatcagcaaagctgttgttaccgttccagcttatttcaatgatgcacagtcacaagccactaaggatgctgggaaaatcgctggtcttgatgtccagaggatcatcaacgaacctacagctgctgcactatcatatggtatggacaacaaggaaggtgtcattgcagtgtttgatcttggaggtggaacctttgatgtttctatcttggaaatctcaagtggtgtttttgaggttaaagcaacaaatggagatacctttttgggaggagaagactttgacaacaccttgttggagtacttggttaatgagttcaaaagatcagataatattgatctgactaaagacaaccttgccctccagaggctgagagaagctgcagagaaggccaagattgagctctcatcgacaactcagaccgaaatcaacctgcctttcattacagcggatgcttcaggagctaagcacttgaacatcaccttaactaggtcaaagtttgaaggtttggtgggcaagttgattgagagaacaagatccccgtgccaaaactgcctgaaggatgctggagtcacaattaaggaagttgatgaggttcttcttgttggtggaatgacccgtgttcccaaagtgcaagagatagtttctggatctttgggatgaannnnnnnnnnnnnnnnnnnnnnnnnnnnnnnnnnnnnnnnnnnnnnnnnnnnnnnnnnnnnnnnnnnnnnnnnnnnnnnnnnnnnnnnnnnnnnnnnnnnnnnnnnnnnnnnnnnnnnnnnnnnnnnnnnnnnnnnnnnnnnn

SEQ ID NO: 99938 - DNA, 548 bp, Arabidopsis thaliana columbia
  unsure (1)..(548): unsure at all n locations
nnnnnnnnnnnnnnnnnnnnnnnnnnnnnnnnnnnnnnnnnnnnnnnnnnnnnnnnnnnnnnnnnnnnnnnnnnnnnnnnnnnnnnnnnnnnnnnnnnnnnnnnnnnnnnnnnnnnnnaggataaaagtgaattattatgaagaataagtaacatttttaaattacaggacatctgagagtaaggaaaaagatttggtggagaaaggaaaaactggtttaccaaaatgcaacccagtgatatctgcaatctgatttgcagagtatacgtaaaatataaaaacctttaggacgagagtttgttgagaatttgtggtaatagttgtttgaattcagtccatgagtttgtagcgtttctcttgcacaccagaaactcccatctgtatctctattatagggtgaagtggcatctcgatttggggtatttctttgaggggacgatccgcaaaatatgcatacaaggctctcagaacagcctggtgagatatcacgacgacaggagctctttgtcgttctaactcaatgatcacaggttcaagccgttggatta

SEQ ID NO: 99939 - DNA, 604 bp, Arabidopsis thaliana columbia
  unsure (1)..(604): unsure at all n locations
ttannnnnnnnnnnnnnnnnnnnnnnnnnnnnnnnnnnnnnnnnnnnnnnnnnnnnnnnnnnnnnnnnnnnnnnnnnnnncttttttttttttttttactcagaatgaataatttctccattgttggctgtatatttcatcacaacacaacaggcaaaaatataatctcatacaacagatgttctcttgacataatctactattgtttagaggatttcagaacagcgagataaaggccttgctcatcaacaaactgggttagctcaaatgaatgcttctcagcaacattactcaatgtggactcatcaggtaaatcagagacgaccacatctgaaaactctttcctttgctgctccaagcctagtctaccttgcgggtgactgattactactcttgcacctgaggaacaacgttgagagagtgtcttgaacagttcgtcgaggtcaaaaggcaaagctggaagaaagtagagaaacacagcgtctaatggagaccatttctccgggacatagatcatttctccttgccaacatttgactttgtcgtacttctctttgatacaggctaacgtaaaaagggagtcatggacaatgagcaaaagctg

SEQ ID NO: 99940 - DNA, 636 bp, Arabidopsis thaliana columbia
  unsure (1)..(636): unsure at all n locations
agcaagagaaacataaactaatctgctaatcgtttttttacagaataaaaagaaaagaaaaaaacaatagantaaaaacacaaagtatatatcnaaaaaaaaactaaaaccctaaaggccaaagttcaaaccaggttttaaacctcctattagacatagacacacatatcttacaatttacaacatcaacctttccatgaacatatataagcaatccaagtataagataaacaccattaatcaaacagaggattttcagtaaatgaaaccatagactatcaaatcttcacattccataccaaatcctcgtccactgctttttctacacgttaccttccggtactggaaacagtcgtttaatcaaccaattgattggtcccaaaacatgaactttctttttcctccagaaccaaatcgctgcactgtactgttcattgcgtatctttgtcgttgctgctctccaatcatatttctcggtctcttctcttgccgcttttccaatgatctctcttgtttcacggtcgtgcagtaaagttctcagttttgtcacgcaatcttcaacatctccagggttgaacaaaaatccggtttttccctcctgatcttcagggattatatcagggattccaccggcac

SEQ ID NO: 99941 - DNA, 548 bp, Arabidopsis thaliana columbia
  unsure (1)..(548): unsure at all n locations
nnnnnnnnnnnnnnnnnnnnnnnnnnnnnnnnnnnnnnnnnnnnnnnnnnnnnnnnnnnnnnnnnnnnnnnnnnnctttttttttttttttgaactgcttgattctttagtttcttaataaaccccgggactgatactagtctggttacataattgctcgttcaagttacaaccacacatcactttacagaatcaagaacataagttactaaattggagttgaagctatcataaggaacaaactttgatcctttttcccaatattggcatccatcaggaaaggcttggaaagctatgcaagaacagtttctccagcaggttccatgacagtcgctaagaccagcgctcaaactatcgtcatagtaaaatggataataaccggtattattttccatcatgtatcctcttctgggttcgaaatactctgaccctttcctacaagccgttggcttctccgtgatgcagattgctgaactgttctttaaatccgtcttgcagggttcactgctttcggaaatccaggtgctgctattgttactgctgagaga

SEQ ID NO: 99942 - DNA, 556 bp, Arabidopsis thaliana columbia
taggtgcactctacaagactatgacgtcgcatgcacgcgtacctaagcttggatcctctagagcggccgcccttaagatttgtgtgtgttatttaatgcttttctaactacattttttaagagacttgaagaaaccatcataaaaagtagaagtggtcataaaaattacataagcgtttttgataaacatcaacaacaactcctaaaaagcctaaggagacaaaatagaataagagacacaacagtctaaaaaaaacacgagggaacaaagaacaaagctgcctacacagatatggacgatggagagagatgggaagcatgaacaatggtaacatcctaattcactttacagacattaccctacctctccttgttgtttggttagagacacaatcatcatcatcagttcatcacattgttctttttgtttttctcctgcaaacacccttataagattaaaaatttcatgtaacacacaacaagtaaacccaccacttgctagctttttatgtcaaggctttatctttagaacagagcttcttgcattgcctctgct

SEQ ID NO: 99943 - DNA, 540 bp, Arabidopsis thaliana columbia
  unsure (1)..(540): unsure at all n locations
nnnnnnnnnnnnnnnnnnnnnnnnnnnnnnnnnnnnnnnnnnnnnnnnnnnnnnnnnnnnnnnnnnnnnnnnncttttgttttttttttcgacgaagtacgatattgataatttcatagtacatcgatcataaacaattacgtccgattaaattggaatcaagaagcgaaataaagcgcctccttgtaagtcttcttccaatgatgcagaacgtgtccaaaaacatcataaaagactacacgcagttcagcttctgaaacgtgaaccgacatgaaaccttgtccgtcgtagtaaaacctcatctcttctggttcaacgtagttcacgtcacctcctttccaggccttggatccacctccacttgtcataaattgtatgttactgtccacgctgcttatgtgctctaagcaatgatcatgtccgtttacgtagagatccacttcatttgcttggagaataggtaaaaggtgtttctccaactcaatggtgttcccgtggtggcctgcgcttttgatcgtatggtgaccaatcactattttc

SEQ ID NO: 99944 - DNA, 508 bp, Arabidopsis thaliana columbia
  unsure (1)..(508): unsure at all n locations
nnnnnnnnnnnnnnnnnnnnnnnnnnnnnnnnnnnnnnnnnnnnnnnnnnnnnnnnnnnnnnnnnnnnnnnnnncttttttttttttttttatctttactagcttttattagatttcaaacttgtggaagtaatcatattcatgtgggcgaatctacatgggtcaaataaatttggtggagcaacaaagtttgtttttatttacatgatgttctactgatgcacctaaaaacacagcatctaacaaaggtaaaaactgaggatcaacaaacaaagcttgctgtcctttcctggctgtcagaaagggctaatctcacgagcccctttcagtaactactctggtacaagacgctttctgggaggagccaacgagtctttggtcagcccatcattgtcctccgcatgtatcacagagactatgtcatcaaagagttcgtctttacctcctcgtaagggatcctgaagaaataagtcagtatgtgtctttccgctgtataaaacaagctcgg

SEQ ID NO: 99945 - DNA, 523 bp, Arabidopsis thaliana columbia
  unsure (1)..(523): unsure at all n locations
cgattcaannnnnnnnnnnnnnnnnnnnnnnnnnnnnnnnnnnnnnnnnnnnnnnnnnnnnnnnnnnnnnnnnnnnnnnnnnctttttttttttttttagaagtaaaataaatgaattaaataaaattaccgaaatgggttatgtgttcaaatctgttacaacaaattcccaaaaattactcaaatcaattaaaaaacaagaaatcaaaagatcatcatcaaccagaaaaaaagatcatctagcggcggcttttttgtcgccggagtaataactcaaataccatctgacaaacttcttcaaaccggtttgcaaatccgtagtcggtttataaccaagctcacgttgagctaaactaatattagcatgagtaaacggaacgtcaccgtttcgtggcatcttaatcaaattcttcttcgccttcactttcaattgtctctccaatatcctcaccagatctgaaaccggcaccggcgacgtgtttccgaggttaaacactctcaattgcgccggacctctcttctt

SEQ ID NO: 99946 - DNA, 611 bp, Arabidopsis thaliana columbia
  unsure (1)..(611): unsure at all n locations
nnnnnnnnnnnnnnnnnnnnnnnnnnnnnnnnnnnnnnnnnnnnnnnnnnnnnnnnnnnnnnnnnnnnnnnnnnnnnnnnnnnnnnnnnnnnnnnnnnnnnnnnnnnnnnnnacagaagatggtgaatttccattagactgtaaaagttgatcaatatacaaaacccaaaacgaatcctttttcaaaatgaagatacatcagagtcgatgacatgttctgcatcaaacacttactttgttcacaccaaaatgatcttgcaccattaatctcaaaagatgttcagtcataatgctccaatgacatggaagaagcattctccaaatctaataatagtataccttaccgggaaaccaaatcgagattcccgatttgaacaagaatattttcagaccgaagctccttatcggtcgcagaggtaagcctccttaggagcctttcggggcaattgtggatatcctgggggggataggtaaatttccctggtagccccaaatacaattggccatcctggaaaacagcggggtttgacagcaggggccattnggaaaaagggttcntggggaaaccggaagcacnctggnggatttgtttgtnttgaacctgggngnna

SEQ ID NO: 99947 - DNA, 423 bp, Arabidopsis thaliana columbia
  unsure (1)..(423): unsure at all n locations
nnnnnnnnnnnnnnnnnnnnnnnnnnnnnnnnnnnnnnnnnnnnnnnnnnnnnnnnnnnnnnnnnnnnnnnnnnnnnnnnnccacgcgtccgaaggaaggttagagaccaagttctctctgcaaccttccctatcctttgcacagtagtgtgtattggctaattttaatcttgattttagttttttttttttttttaaatgtatgtttgtaaataatggaaacacatacgtggttggttatgctctccgtttgtatctctacatagacaggttcaaaagagagattcttcttcgtcttatataaatatgatttaaaaaaaaaaaaaaaaaaaaaaaaaaaanaaaaaaaaaaaaaanaaaaaaaaaaaaaaaaaanaagggggggccgttctaaaggatccaagcttacttacgcgtgcatgc

SEQ ID NO: 99948 - DNA, 668 bp, Arabidopsis thaliana columbia
  unsure (1)..(668): unsure at all n locations
cgnnnnnnnnnnnnnnnnnnnnnnnnnnnnnnnnnnnnnnnnnnnnnnnnnnnnnnnnnnnnnnnnnnnnnnnnnnnnnnnnnctttttttttttttttgtgtgtgataaagaagattacagaaacgttacactactgtctttacacacttgagacatatttgctatatcgctgaagagagaaagattccgactttgtagaagaacaaagccctagtttggccttatacaacaattaatgtaggtcaagatcctcttcttcttcatgacagggtcatcgtcttgagtttcatggcgatggtgaagttgttggtggttgcgacgaacacttaccatgagttcttgttcgcttcccaaactagaatgtcttacaccagctttgttctgcttcctgtttgcgcgagctttagaaaagacaaccgagtagtttgtagcatcatttggtcctttttggtcccaccctccgaactgtggaactggagtccatgcagcattctcccttcttttatccataaatagatattgcttggtctagcagaaagatgttcttaaacattgatgaaggtgttcatgaccggacgcgtggnnnnnnnnnnnnnnnnnnnnnnnnnnnnnnnnnnnnnnnnnnnnnnnnnnnnnnnnnnnnnnnnnnnnnnnnnnnnnnnnnnn

SEQ ID NO: 99949 - DNA, 584 bp, Arabidopsis thaliana columbia
  unsure (1)..(584): unsure at all n locations
cccaatngaatgggnagccggttnggataancttgagtaccnataataagccaancttattcaccatcnccaggggggggngggnacaccaccacaatctttctttcttctctcctccgtctccggcttctttctttttctctccgccgtcaccaccttctttcttcttctctccgccgtctccaacctcttttttcttctctccaccgtcacttccttccttctttgcttcgttaactccggcggacggagcctctttctttgcgtcaggagcggcagcttccgtcttcttattctcggcggctccgtcatcttttttggcgggaacaagaggctcgacggttcttttgagcttcttagtgagtagaggcacaagttctttaacgtctatcgttcctttaaccgtcaccacgtctttagctccgtcaatagccactgtttcgactcctttgattntcaatattattttcttgattntgaatacatccttcgcaatgtagtctgatctttaaaggcaccacgctctcttttggagctgccggagcaggagcaggaggagccgcctccttatctccaccatcggc

SEQ ID NO: 99950 - DNA, 706 bp, Arabidopsis thaliana columbia
  unsure (1)..(706): unsure at all n locations
nnnnnnnnnnnnnnnnnnnnnnnnnnnnnnnnnnnnnnnnnnnnnnnnnnnnnnnnnnnnnnnnnnnctttttttttttttttttcaaactgcgcgtattctataccgcaaaattttacaaagatttggccactcttctcttaagtggaaaataaacagaattattccaaaccattaaaaactctgatgagaaaaacagagaatgttacaataactctgcttataatgaatacagacttactaagacctcaatcaccccaacttctttccttttggggcagacaaaaaaaactcgcaaacactaatcgattgtgagctaagaagacaactagaagtgatcactcagtcactcactcctcactaagtacagtgatcactcagtcactcagtcctcactaaatacaagtctgcttatgaatgggcacatggctgcaagaagtgccttgggacactcctcatgtggcagatgtccgcatcctgagattgctactagcctagagttttcgagttttgaagccatgacttgggaggacttgaggggaacaagtgcgtcttcggctccagcaacgactaatactggtaagttttccaccgccttgagaaggtgacaatgcatttttgagttggaggcaccatctcgggtgggagtctgcctatcttgtgaagggctatcccagcgttcanataaggggggcntntttngnct

SEQ ID NO: 99951 - DNA, 555 bp, Arabidopsis thaliana columbia
  unsure (1)..(555): unsure at all n locations
nnnnnnnnnnnnnnnnnnnnnnnnnnnnnnnnnnnnnnnnnnnnnnnnnnnnnnnnnnnnnnnnnnnnnnnnnnnnnnnnnnccacgcgtccgcccacgcgtccgcccacgcgtccgcttttttttctcttccttcattgtttcgctgttcctgcgattctgaaactcctcaagctttccattcagaatcgtagcaatggcttttcctctttgattttgtttttgatccgtctctctctctctctctcattgcgtttaaggggtcgctttttttcctcttcatcctcgccgccggcttatggccaactcgccaccaccttcgtcgcgaaatcctccgaagttgttggtggattgttggtcgtttccgtttcttctctctatggttcctactccctcataatttaaggatctgtatcggaataaccgaaacgatctccggtttcggatttgaatattttgggggaaattaaaagaatggggaaaggttggttcatggtagagaaagctagaagatgcttaaggacggtgttcttcatggttgcgatgcttgtctcg

SEQ ID NO: 99952 - DNA, 513 bp, Arabidopsis thaliana columbia
  unsure (1)..(513): unsure at all n locations
cnnnnnnnnnnnnnnnnnnnnnnnnnnnnnnnnnnnnnnnnnnnnnnnnnnnnnnnnnnnnnnnnnnnnnnnnnnnnctttttttttttttttaaaatgttgaactgaattttcttcgatgcgccgtgcttctaaccatggtgctctctccatttctatgttcaacttatgtagtactaaataactagttagactttcaacttaagcttaactgtggaattcatatttcgttttctctgcaaaagatcatccatcttttagtggtgtttagctgagaagatcattcgagccggcaaagtgattagatctcagcgaatactcttttatgagtttggagaagaaagaatcttctctctgtagcagtttggcaggtgaatcaaactctgcgattcgtccatcactcagaaccagaacaagatcactctctatcactgtgtggattctgtgtgcaatagtcaccactgtccgatctttaaactcttgattgatgatcttttgtattacaccatcagt

SEQ ID NO: 99953 - DNA, 459 bp, Arabidopsis thaliana columbia
atctgcaatcgcttccatggaaaccaaattcagtgactttacctgaaattaatcttttgaatcccaagcaattgactgcctcgagttctcagtatcgtagaactcgaaactggagaattagaagttcgtcggaagataatgtagcaatttcgagtgacggcggagatttgaagaattctctgtccggtattgtgggaaatcaagtggaggagctattgagcagagaagagaacaaaggtttgcttgatggtctggaaaaagcttcgttgagagtggagattgcgaagagagagctcgaagatatagagagacaagaaattgaggcgaaattgctacaggattatattaatcagctcgaatcaagagccgcagagattgcagaatgccagcaggagattgacgcagcaagatcaatggttgaggaagcagaacgctccttgtcattagcagataactcga

SEQ ID NO: 99954 - DNA, 525 bp, Arabidopsis thaliana columbia
  unsure (1)..(525): unsure at all n locations
nnnnnnnnnnnnnnnnnnnnnnnnnnnnnnnnnnnnnnnnnnnnnnnnnnnnnnnnnnnnnnnnnnnnnnnnnnnnnnnnnnnnnnnnnnnnnnnnnnnnnnnnnnnnnnnnnnggaaataattctagtttcaaattccgttgggaaacaaactagatgtaatgtgtataaccatgtagattatttagctgtacaagtgtgagagaagagaaaccgcccaaaacaattattagttcgttctagtgtattactactaaacaaaattgaaaaatgtaatctctaccggcggcgggcagcttgactatcatttcgaatgcggtcagcgtacattgggagacgaatgatctctcttatttcctgaagcaaaacctcctcagggatgttatcatttatgctctttatcaccttacgagcagtgttgatatcatttggtgtagttttgtcaactctgatcctcatgctaaaccaaactttcttatccttatcccaagcacattctacaatcttcccattgtaacttgacgg

SEQ ID NO: 99955 - DNA, 514 bp, Arabidopsis thaliana columbia
  unsure (1)..(514): unsure at all n locations
cgnnnnnnnnnnnnnnnnnnnnnnnnnnnnnnnnnnnnnnnnnnnnnnnnnnnnnnnnnnnnnnnnnnnnnnnnnnnnnnnnctttttttttttttttttttcaatgaatgagtgcaataggattgagtgacagtaacaaaatatgaattctacttacaacttggaaactcttgttagtatatcagcaatttcccaaacaaaaacacatctacgaaggtaaatggtcagcataatgccaagaacgcaatccagggaaatcttaaacaatggataagaattggatctattgtcacacactctctctctctctctctacaaacatttgcataaacttctactattactactactttccaatcaatacctgggaaaagaacacaaaaccaagctactcttacagagcacaagagaagaagttagataagaaaatgagaaacatacaaatttcttaccggattttatgatttttttcacgcacgcaagtggcttcaagtagtcactgaacctttgctt

SEQ ID NO: 99956 - DNA, 363 bp, Arabidopsis thaliana columbia
aagaaaacacagagagagagagattcacttccccatttcagaaaatcaaaatgggtggtggtggtgatacaacagataccaatatgatgcagagagttaattcttcttctggtacatcgtcttcttcgatccctaaacacaatcttcacttgaatcctgctcttatccgctctcaccatcacttccgtcaccctttcaccggagctcctccaccgccgattccacccatttctccttactctcagatcccggcgactttacaacctagacattctcgctctatgtcgcaaccgtcatctttcttctcctttgattcattgccgccgttaaatccttctgctccgtcggtttcggtgtcggtgg

SEQ ID NO: 99957 - DNA, 923 bp, Arabidopsis thaliana columbia
  unsure (1)..(923): unsure at all n locations
nnnnnnnnnnnnnnnnnnnnnnnnnnngcagtaccggtctcgaattcccgggtcgacccacgcgtccgctaaaaccatttccgcggcggcgtttctcggaatcaatggcgagtctccgaagagtcctgctcaacgtaacttcctattgccaacgttctctcactcaatcgtcgtattctacgtcggggatgttatcccgatcggtggtcaagcatgcgaacaatctcggtcaaattcaagctagacatttcacgacaacgcttatgaaatcgggaccaaagcatagtggtacagagcaaggcgtgaagcgaaacagtgcagatcacagacgtagattgctcgcggctagatttgaactgagaagaaagctatacaaagcgttttgcaaagatccagatcttcccagcgaaatgcgagacaagaatcgttataagctctcgaaattgccgagaaacagtgcctttgcgagaatcaggaacagatgtgtgttcactggtcgatctcgttctgtgactgagctgttccgtgtttctcgaatcgttttccggggattagcatctaaaggtgctttgatggggataacgaaatcgtcttggtagctgcattatgtgactgatctatggaagaagctgattctgaagaaatgggagcaaggaatacaaagaacgtttgtggtaaatacagttaccaaagtagctgtttgtatgatggtggtggaaacattttgacaccatcacaaaacttagtttgcttttcactagtgatgctctctctttgttttacgatcttgctcagctattctagcaattctcgttgaataagttatacaaagtcacaaannnnnnnnnnnnnnnnnnnnnnnnnnnnnnnnnnnnnnnnnnnnnnnnnnnnnnnnnnnnnnnnnnnnnnnnnnnnnnnnnnnn

SEQ ID NO: 99958 - DNA, 376 bp, Arabidopsis thaliana columbia
ctctctctctctctctctctgacagttctttctgtctctctctctgctcgatgcgaagaatcgagcatttgtgtcgctctctggaacgtgtgtcttcatcgggaatataaccataatctccacgagctgcttgaatgcgtacccttcgttccctaatgttggcggcggctctagcagtggctttggccgtgactggttttgcagcatcgccgttaccttcggcctatgcgaaatacgcagctggtccgaccaagattcttcctttacaaatggcttttcctctagacgagctaatggagctgagtgaacttatagcgcgtgatcgtgtcagacacgcgcgaatcttactcggcggtggtcgtcatagctctgttgg

SEQ ID NO: 99959 - DNA, 529 bp, Arabidopsis thaliana columbia
  unsure (1)..(529): unsure at all n locations
nnnnnnnnnnnnnnnnnnnnnnnnnnnnnnnnnnnnnnnnnnnnnnnnnnnnnnnnnnnnnnnnnnnnnnnnnnnnnnnnnnnccacgcgtccgcccacgcgtccgcttttgcttccatttccctcgccgtgggccgccacgtcatcaccgtcggcgccgcaatttatccctgaacttccacctccgtctcaatttgactactcgggtctaactaaaattcttaaaaaatcggtaatcggaaccctaaccggagctctatcgctcactctcgttttctcgccgccgatttcctccgttgctgctactaatgatccttatctctctgtcaatcctccttcgtcatcgtttgaatcttctctgaatcacttcgattcggctcctgaagattgtcctaatgaggaagaagctgatactgagattcaagatgatgacattgagcctcagttagtaactaatgaagggattgttgaagaagcttgggagattgttaatggtgcctttctagatactcgtagccatagctggact

SEQ ID NO: 99960 - DNA, 528 bp, Arabidopsis thaliana columbia
  unsure (1)..(528): unsure at all n locations
nnnnnnnnnnnnnnnnnnnnnnnnnnnnnnnnnnnnnnnnnnnnnnnnnnnnnnnnnnnnnnnnnnnnnnnnnnnnnnnnnnnnnnnnnnnnnnnnnnnnnnnnnnnnnnnnnnnnnnnnnnnnnnnnnnnnnnnnnnnnnnngggggagaaaaaaaaattgaatcaaaacccaagcgaagccgtcaatggcggctttcaaacagacaagaacatgggctctccagtttctatcttaattattcgtttctcaaaaaaaaaaaagaccattcctttacgacctttttgcatccaaggcaacaaacataggcgaagctaaaagcttagtcccggttgaaactgccattatttcacaaacccttttttctttgaagcgccctccaaaatatgcgtttttgagaataggaagccatagattggggctcaattttggcgccttggaggcctaccctcagcttccgagactttaatttgtctaccggccaaatcagccccctccagggacttggtggctttttggccctcttga

SEQ ID NO: 99961 - DNA, 568 bp, Arabidopsis thaliana columbia
  unsure (1)..(568): unsure at all n locations
cgnnnnnnnnnnnnnnnnnnnnnnnnnnnnnnnnnnnnnnnnnnnnnnnnnnnnnnnnnnnnnnnnnnnnnnnnnnnnnnnnctttttttttttttttttttgagtaaccaacctcatgatacaatcatcgcacgaagcacacaactctcgcaatttagacagttcgtacataagataaatttatagactgccacaatcatatcgagtatgaccaatttgatcacgaaacagaatcatcaacataactacaagcaatagcttcctaaccggcgaagaagctgctattaaactaccggtaagataagtttgtgtcgaaagccccacgagtctacctcttctttccctaatgtactcatcaattgcttcttctatttgcatccttgaagagaaggaagatacattaattataccgtcttgacctaaatttaacttcctccacaagcatctagccaaaacaacaccgtcctcaagcgcagccgaacatccttgtcctaagaatgggcccattaggtgcatactgtctccggcaactgtcacggtgccacgtcggaattttccagacagaac

SEQ ID NO: 99962 - DNA, 523 bp, Arabidopsis thaliana columbia
  unsure (1)..(523): unsure at all n locations
cgattnnnnnnnnnnnnnnnnnnnnnnnnnnnnnnnnnnnnnnnnnnnnnnnnnnnnnnnnnnnnnnnnnnnnnnnnnnnnncttttttttttttttttaatggaacctcccatggaggagcattctaaagtagcatctacttcatcattctccatagttacaataaagcatgctttacaaaagggattgtgaaagtatcgctttaatgttttgtgggagaactttctaagcttggcttgaacttactctatctttatgtacccaatacaaagaaaacgagtaagaaaaaagatgcataaaatatcatcatggcactgcttccagtttttcccacaacctgaaagctcttctgatgactggatcagctgaaaatcctttctgcgtaatccgcaatcgcgattaacaggctactcaatttctcaccattgtcctctggtttcttaaaagtaagatctttcgtgtcgaacggtactatgtaatctgggagatcagaccgtaacagtgccaatttcttgctaagaa

SEQ ID NO: 99963 - DNA, 550 bp, Arabidopsis thaliana columbia
  unsure (1)..(550): unsure at all n locations
nnnnnnnnnnnnnnnnnnnnnnnnnnnnnnnnnnnnnnnnnnnnnnnnnnnnnnnnnnnnnnnnnnnnnnnccacgcgtccgttatcatctctccataattgcttcgatttctctgcaaagacacaacacaaaaagtgctttttttaatcagatattttctgggcttcactttaactctcttcgtgcttggttttccgatcttagtcgttactaattgagtcggagactgttcatttcctgattctgaagaaagttttggagaaggagaagatgtcaactctgcgagtgagctagggtttagtgtgttttccgatttttgagctcttggggattgttgttttctcttaaagagtcgattttgaatggcggtggagtatgtatgttgcagcccaaacttctttatacatatagctgtgattgtgtttcttgtcttgttcgctggactcatgtctggcttaacattgggtcttatgtctttgagtctcgttgatctgaagttctcgctaaatccggtacacctgaacatcgttaatatgcagcaaagatatt

SEQ ID NO: 99964 - DNA, 784 bp, Arabidopsis thaliana columbia
  unsure (1)..(784): unsure at all n locations
ttaggacgactatagaagattctatgacgtcgcctgcacgcgtacgtaagcttggatcctctagagcggccgccctttttttttttttttttttttctataagaacaacactgatactcaaaaccgtatttccccatcggttacataatttgtcatctgcattatatcgcagaagagagtcgaaaatgcatcaaaatatataaaccggaatgtcagtaaatatgtcttcacctccatagactgaatcttaaaaagcagtctccttcgtcacatttactattcctaactccaggacagtcttcagcatccacttcttgttatatatacataatctccatagatagacagagaactattatataagagaaaaaaaagatacgagtcatgaaaatccattactttgccctacgatatgtagaagcttcttctgctgctgcctaattaaatggtaagcaaacagctttttaaacctgagtttttccacattcgtctcaggggatataatagtcgcttagatttccgaccagatagttaaactcttcacctactccatagtcatttgcctgctctactgtgttctgaaccattcccggtggcgacttttgtgctcacttttggtcttcctttgatgcancgtttgttgttgttggtggtgttagtggtattgttttctggagggaactcanctgtgagtcttnccatctgcttctgcagatcagccactgagtcgtttgagactttgccttttgaagtcttcttccgtaacaagcttgagctcgagcct

SEQ ID NO: 99965 - DNA, 695 bp, Arabidopsis thaliana columbia
  unsure (1)..(695): unsure at all n locations
cgattatannnnnnnnnnnnnnnnnnnnnnnnnnnnnnnnnnnnnnnnnnnnnnnnnnnnnnnnnnnnnnnnnngaatgnnncttttttttttttttttttttttttgaaaagcatgaatagatttcattgtgaatttgtgatgggagaacccaaacgtcttgtgttgttttgtgttgaagtaattgactacttatcggtagcagtgctgtacaaaacgaaccagaggactgtttggcaaaacaaatgaatcatatatgaattgcgaaatcaaggtcttcgtatgcatcacttactaaatcaaaactatacatttcaagcatcttcttcatttacccttttctaattggaacttaaaactaacaagacacttcgtttcctgcatttgttgtagctttagatgattgcttctcgtcttcaacatctgagtttccaatcttgtcaaagtcatcctcaaggcttccatcaccatcatctggagcttcatcactgtcttctagatcacccaacaggaatgtatccagatcctgctcagaagacgcagtagatgttctacggattgcaacattcttttctactgtttctgatctccagacactggagccttttagcttcttatttcatggtctcctttggtctaagtgactctgtacttcctttatatggagaacctgagtgttccttgtgggaaaaaat

SEQ ID NO: 99966 - DNA, 526 bp, Arabidopsis thaliana columbia
  unsure (1)..(526): unsure at all n locations
atgatctnnnnnnnnnnnnnnnnnnnnnnnnnnnnnnnnnnnnnnnnnnnnnnnnnnnnnnnnnnnnnnnnnnnnnnnnnnnnccacgcgtccggaattaacctacacaactgaaactcgagttaagaaccggaaacagaatccaattcaaccaaaccgaatcgaaccgaaccggagtttttatccaatggtgaagcaagcgatgaaggaagaggagaagaagagaaacacggcgatgcagtcaaagtacaaaggagtgaggaagaggaaatggggaaaatgggtatcggagatcagacttccacacagcagagaacgaatttggttaggctcttacgacactcccgagaaggcggcgcgtgctttcgacgccgctcaattttgtctccgcggcggcgatgctaatttcaatttccctaataatccaccgtcgatctccgtagaaaagtcgttgacgcctccggagattcaggaagctgctgctagattcgctaacacattccaagacattgtcaagggagaagaa

SEQ ID NO: 99967 - DNA, 813 bp, Arabidopsis thaliana columbia
  unsure (1)..(813): unsure at all n locations
nnnnnnnnnnnnnnnnnnnnnnnnnnnnnnnnnnnnnnnnnnnnnnnnnnnnnnnnnnnnnnnnnnnnnnnnnnnctttttttttttttttactaatattctgtctagcttatattaccaaactagctttttctcattcatttatgatcacatcacgtccacattaaaataaaacaaaaaagggatcaattatcacaaaaacaattcctctagaaaattattcttttgaggaatatattacaaaaaccagaagtgttggcatctctcaagaagtaaaaaaaaaactcgagagagacacacaactcaacaattacaagtctgttgtataaatggaagatgatatacacttagctgggtgaattcttcctgcaaaatttgggaataaatgtacactcacaagatggtgttgatgtgaagtgctttgaggagagatgttgccatttgcttcaccagaacttggcctcctgaacgttgtccatcacgtcgttcttctatcagattctgcagtttttgtggaagatcgttctctacgatcagctgttttggcttcggatgcttctcgtaaacggccttgatgagttcaggaggtaagtcgacaatagcatttggtggctagttagcatgagaacggagcagtcattaacgctatgtctattgttgagatgattcggagatctcaaaatggtccaaatgtgacaaatgctcttggaagtctgaaaagtactattttgattgatcttctgaaacgctgctcactttggaacgtttggcagcaacagatgatcagcttacgacatatatatcagtactcag

SEQ ID NO: 99968 - DNA, 563 bp, Arabidopsis thaliana columbia
  unsure (1)..(563): unsure at all n locations
cgattcnnnnnnnnnnnctatagaagaactatgacgtcgcacgcacgcgtacgtaagcttggatcctctagagcggtcgccctttttttgttttttttcaaaaaaatctccaacaaataatattcacgtgcaatatcaggctcatgacagtttcgattagagccacacatggaaataattaaaagtgaaagcgcgtctaatgaataatgtgttttacacctaaacctacgggtcctaccccaaaatgatgagacttaactattaccaagaatcctctgtttaaagttcatgtgtccttggtattcttctccggttcgatctcctgcgttgtacgttggccttcggtgatactagaccagcctgatggggttctgaccattgtcgctagtcaaaccactgcattcgctgctaccaaaatgttttgctttcgaacgccattttcttgaatttcttcaagtcttctttgtattgtgttgagctataatctgagctcccgtctaagctgtaaatagtactttgtcctggggcagctccttctgttaggtcatctatagatatatttc

SEQ ID NO: 99969 - DNA, 376 bp, Arabidopsis thaliana columbia
  unsure (1)..(376): unsure at all n locations
gcggcgaagagagataatgagctgtgaggagtaataatggtgttggagttaattcagatggaaacaccgaagaagagaggaagaggaaggccgaagaagcctcccgtccggtgatctcttttcaaactccggtcatgattgttaaaattatggagacaaaattttaaaggcaagttttttttaaaggcaaaggaaagtttaaggatcagcgtttgttgtcttagtgtaaactttattatgcatttgttgttattaccgttgtgtaattgtgttatcttgatttactttgaaacattttcctcattacattaatttggcaattcgctcnnnnnnnnnnnnnnnnnnnnnnnnnnnnnnnnnnnnnnnnnnnnnnnnn

SEQ ID NO: 99970 - DNA, 842 bp, Arabidopsis thaliana columbia
cgaaattaagccctcactaaagggaacaaaacctcgcgctgaggcgggcggtataaaactagtggatcccccgggctgtatgatttcttggccgccaaaggttgttttaagaatacaaaactatgaagacaaattacatgacaggatctgtaagaacttcttttatcttctcacgcttccttctctcatttcgctcttaagcatgtcttcacgtttcggctcttgataacacaatggatgactcaaagggatactctttttagctctccctgagacgtgaggtggtaaagctaaaactagaaccataacatcatgtttaataccagcgactcattgcagtatcttgtgctgcagacactttttgtggtatatactgagtgtttggcttcaatctacttggaccttcagcagcggtggcgcaatcttcatctcctctgttgcttttgcaaggttgagtcctctttgggtattgagacgcagcagctggatttctgaccatccttctctgttgttgttcaagagcttcaacgcctgtggctgcgccgcagttgttatagcgtaacactgatccaactactttaccaggcctagctactgcagcaccttggattgtttgagggacgttgataggaattctcgacattggcatctgggcattcctgtctgcaccccgaggtctctcgtctctaatgctacacttggagagtccatcagtgacttcagctgaactctgttgtgccaccggatgatttgttatcagagtacaatacgcaagcccttggtaatgatgcatgctgttgcctctcagggggattatgagaagtaccattcttgtagtgttc

SEQ ID NO: 99971 - DNA, 931 bp, Arabidopsis thaliana columbia
  unsure (1)..(931): unsure at all n locations
aatgtnnnnnnnnnnnnnnnnnnnnnnnnnnnnnnnnnnnnnnnnnncgtacgtaagcttggatcctctagagcggccttcctttttttttttttttttaggtgaaacagattgagttcatgggatataagaatcgtagacagtgtaagtgttacaacgtagataaacaaaggttgttttaagaatacaaaactatgaagacaaattacatgacaggatctgtaagaacttcttttatcttctcacgcttgcttctctcatttcgctcttaagcatgtcttcacgtttcggctcttgataacacaatggatgactcaaagggatactctttttagctctccctgagacgtgaggtggtaaagctaaaactagaaccataacatcatgtttaataccagcgactcattgcagtatcttgtgctgcagacactttttgtggtatatactgagtgtttggcttaatctacttggaccttcagcagcggtggcgcaatcttcatctcctctgttgcttttgcaaggttgagtcctctttgggtattgagacgcagcagctggatttctgaccatccttctctggtgttgttcaagagcttaacgcctgtggctgcgccgcaattgttatagcgtaacactgatccaactactttaccaggcctagctactgcagcaccttggattgtttgagggaccttgataggaatnctcgacattgcattttgggcttcctggctgcaccccgaggctctcgtctctatgctcacttgagaatcattagtgacttcactaactctgtgtgccaccgatgattggttaaatacaataccagcctgcaacataaagaagtttttagctgttcaaagatccaatgatacattttaggactaaactacctgtattttcttctgggctttcagggatataaaaaaca

SEQ ID NO: 99972 - DNA, 550 bp, Arabidopsis thaliana columbia
aggtgacttatagaagagcttgacgtcgcatgcacgcgtacgtaagcttggatcctctagagcggccgccctttttttttttttttggatactgcaaaattttatttaattagatttgttacacttcaagaaagtaaattgtaaaagcataggcgttggattctttggtttggccattttggccattgatattaaacaaaatatcaaacttaaattaaaatcaaaaaaaaaattgaaactttacttagaaattgtctctaacacccattttcgaaagaagcacatttactaccatggaggatagaaataggaggagactgaaaagccgaggaagagtaagcctccaacagttgcgaccgtacgttgcgagatccttgaagccagcatgcttcctccaacaactgctagtgaagtacacacagtgtgtccaatacttgccccaatggccactcctatggcgttcttgtgagtcgccaaagctattgtagcgatctggctacggtcaccccattcagctagaaaggttaagatgaaggactccagaaatatt

SEQ ID NO: 99973 - DNA, 654 bp, Arabidopsis thaliana columbia
  unsure (1)..(654): unsure at all n locations
nnttaggacacctatagaagattcttgacgtcgcctgcacgcgtacgtaagcttggatcctctagagcggccgccctttgtttttttttttttttttttttttttttttttttaaacaaaatatcaaacttaaattaaaatcaaaaaaaaaattgaaactttacttaaaaattgtctctaacacccattttcgaaagaagcacatttactacaatggaggatagaaataggaggagactgaaaagccgaggaagagtaagcctccaacagttgcgaccgtacgttgcgagatccttgaagccagcatgcttcctccaacaactgctagtgaagtacacacagtgtgtccaatacttgccccaatggccactcctatggcgttcttgtgagtcgccaaagctattgtagcgatctggctacggtcaccccattcagctagaaaggttaagatgaaggactccagaaatatttggggtacaaaatcttgagaataaaccacggaaggggggcttcccttgacctgactcgagcttctcttcaacttcctccatttctttcttctgtttggactttgaatcaggagacctccaagcaatggagaggagtcgcaaaccacaaaatgcattgagcacctgtacagccctattggggggc

SEQ ID NO: 99974 - DNA, 750 bp, Arabidopsis thaliana columbia
  unsure (1)..(750): unsure at all n locations
cggttctnnnnnnnnnnnnnnnnnnnnnnnnnnnncgtggcatgactgcgtacgtaagcttggatcctctagagcggccgtccttttttttttttttttttttaacaatgaaattttgtgaaactacaattaaaagttcaaaggtattttttttttttggattacaacattaacctatggagtctgtagccattttttaatttaacttttggcccaaataatacttctgccaagtctatacaagaacaaaaacttgaactctgttagagcggtgagaaatgtcttgatttgaagctgcataatctgtactggtttactctgtctggtcactgacacggaatagctcgatgagcgtgtttcggattttgattctcagagcagaggcttcatcgggtctaaaccacttcttgtcgaacattcccaggtctttccttttcagcctttgaggcgcctcttcaatgaaccgtttaatgaagaagagcacaaacggaccacaatcaaaatcgtttttctgctgcggaacctgaacaacagcttcgctgatcctacgagggaggtttttccatactttttctgagataggcagatccaaggaataggcatcttgattcaaataattccattcgtcttttagaaacctttttacattttcaacatttgattttctcgagtgaagtcctagagaatcaaggtgaagtatagtcaaccccgattcatctttcttatcagggatgcaaactattacaaggc

SEQ ID NO: 99975 - DNA, 652 bp, Arabidopsis thaliana columbia
  unsure (1)..(652): unsure at all n locations
nnnnnnnnnnnnnnnnnnnnnnnnnacgtcgcatgcacgcgtacgtaagcttggatcctctagagcggcctcccttnntggggttttcctttttttttttttgcctaaaacaaaccgggaaatatatgtaaattactctctttatcttaaaatgtacaactaaaaatggtgaaatagttgactgctctcattcattgacggcattaacattggctaattcataattaataattgaaatctgcttcataatctctttaagtgcgatctcgtctttaagtatagatgtatgcgaaactccatcaatctctacggtgttcaagctatcgactttcaaagctgctaagctcgccaaattaaccgtcccatctccatctccatacttaatctctggttgcttatcgaatcctccttttccatacatcaaaacctccggtgtatcaactcctctcccatatatgcaagtgactggcactcccggagtcatcagctcctctgttaaaggcaacactcttgtcttgtaaggcacaactccttgtgagaatccatgtctgcaaaaaccgatccatctcgaagctgggtagtaacctggggagttccaacagcgggttagttctgccggaaacactttggagatggaagacccattggtact

SEQ ID NO: 99976 - DNA, 787 bp, Arabidopsis thaliana columbia
  unsure (1)..(787): unsure at all n locations
nnnnnnnnnnnnnnnnnnnnnnnnnnnnnnnnnnnnnnnnnnnnnnnnnnnnnnnnnnnnnnnnnnnnnnnnnnnnctttttttttttttttttttaatcgaaactgatgctatattacaacttacaagtgaacaatggatagtacaagtagaatatggccaaaaagggttttcaccacttgtttcaacagtttcttactctagcaacaatgaagtttttagacaaatactggttaagtttcaagtctgagagaacctaaaacaaaaacagaaacgtaagagctagacatataacaaaaaaaattcccaccagaatcatgactcgagtttgtcacaagacaacagcgaggtatcgggcttaaacgatgcctctgaggagctttggtttctcttgtctgtaaacctgtacgcctgaacaaaataaaacgagctccaagaatttcgcgttgagcaattcatggtcacaaaagagcctctgactgagataatatcaagaggcagatcctgaaggtggagactggcggtctcggtcttgagcagcttcttctcctgatagattttgagagacggaggctggcanagcagctgggtcaagctcataccaacccttggttatgcctcttccttctgttcctgttaatctgaatgacggaatgctatgtgagaatctacagaattcatgaggtggaatctcacaagtgtttgactcattccttcggcatcggacagaaaacacagttaaagccttgcactttagacaagaaccaactgataccgtggctccctc

SEQ ID NO: 99977 - DNA, 533 bp, Arabidopsis thaliana columbia
aggtgacactatagaatgactatgacgtcgcatgcacgcgtacgtaagcttggatcctctagagcggcgcgccctttttttttttttttttcattaccgctggcggttgcggcagcggcagcggctgcggcaaacactaccgcctttatatatatatatttagtctttcggtctgatctttgagatcactttagttcatataacactacttttgaccgctaaagaacttccaatctattattatacactgtaccaaagcaacactctttttcatctggtgaaaacttcattactctcgcgaatttcactaaaaatttggaattttaagaacttaatccaaaagtccgggtttctcctctgcatcaacgagtgagttagcagaggcagtacgaggcccgcttgtggagaagctaagcgatctgctcagctcgttttgccaaaaatggttcctcaaggctttaagcttccgggttaaccgttgagaagctcggatccgacagcaactcttgcatcgctgtcttcccctctatgag

SEQ ID NO: 99978 - DNA, 651 bp, Arabidopsis thaliana columbia
  unsure (1)..(651): unsure at all n locations
nnnnnnnnnnatagaagagctttgacgtcgcatgcacgcgtacgtaagcttggatcctctagagcggcctgccttnnngtgtgttttctttttttttttttttttttttttttgtgctaaagaacttccaactatatatacacttaaaagcaaactcttttcattggtgaaaacttcattactctcgcgaatttcactaaaaatttggaattttaagaacttaatccaaaagtccggttttctcctctgcatcaacgagtgagttagcagaggcagtacgaggcccgcttggggagaagctaagcgatctgctcagctcgttttgccaaaaatggttcctcaaggctttaagcttcgggttaaccgttgagaagctcggatccgacagcaactcttgcatcgctgtcttcccctctatgagactcaccacctgcgacattgtaggccttaaagtcggtgatgcgttagtgcacataattgccacgttcagcatcaacatggtttcctcttctgaggaatctgaggctaacgttggatcaaccagctctagtaagcttcctctctcttgcaaaacgtaagcccaatcaagaaggtaaacaaagtcctcgggtggcctaaagtttgtgttactctttccactaacgatttcga

SEQ ID NO: 99979 - DNA, 550 bp, Arabidopsis thaliana columbia
aggtgacctatagaagactttgacgtcgcctgcacgcgtacgtaagcttggatcctctagagcggccgctcgcgatcgggaataaaagatggaggaagaaagagaaaacactaactctatctacatagtttccgagctacttgaagaaattttccttggattgcctttgaaatcaatcctcaaattcaaaaccgtctcaacaacaatggagatccaatcctggaatcgaacttgttcgtggagaggcgtagaactcttcaaaagaaccacccgaaaatcctggctgcttataactgcgactactgcacgcggccgggtatcctccctatgtctcagttcgaaggggacgaagagatcgtttatcttcataccgacgccacgcaaccctcgatgacttgcgacggtttagtctgcatcaccggaacctggttgggtcaaacgttttgaacgtctccaccggacaactccgaagatgtctacccggtcagatccaggaccgcaagcaaattggctcttgggattcggtagagacaaagttacggccaagtat

SEQ ID NO: 99980 - DNA, 1117 bp, Arabidopsis thaliana columbia
  unsure (1)..(1117): unsure at all n locations
cgatttcnnnnnnnnnnnnnnnnnnnnnnnnnnnnnnnnnnnnnnnnnnnnnnnnnnnnnnnnnnnnnnnnnnnnnnnnnncttttttttttttttttggtttcaagattgttttggaaagtgtaatttaggattttagtttcattgttgtaatgatttattgttttctcaaatctcaatcaaagaaggcaattttagctttgacaataataaacaaacacaagaaagtgcgtctctctatgccttatggttcttagccatctcgtccacgtccaatccacggccaggataggagaatcttgtcccattgcagtttggctgttcgaacaggtccgtgatcgacggctgttctcagacagtatatagctcttccaacaatgtctgctgttgaaactggaccaaatgttctactatcatatgcttccttagctttgagctcctggtttccagctgttacccaacactgattcttctcaagaacaaaaggctcctctttttcatcacccgataccatttcgaatccttctacagctgctaatcttcttaccagatacttatctgaatcgtttggatcctttaagacgacagcatctccaatgaatacaaccctggtattagcaattggtatcttacgaataagaagtgtgttttcatttgctgtcatggttggtgacatttctggtcctttatccgagtgtaagtaggttattttcccatagaacagattcttgcagattatttgaataagttcccggtcactcagtttattactcctatgactcttgagactgagagtgagggaatactcgagcttgtgagccatgtatcggaaccaagtcgagattgaagccatgaccaaaacccttaaaatgaatttcgcttttaaaaaataaatgctagagggtttcgaagctggcttctccgctttgtcggtcttctccgcctcgtcgccgccgtggtcgataggaacagaacagcaacaacacaaccctatgggtttggtttggtttttgcggacgcgtgggcggacgcgtgggtcgacccgggaattccggaccggtacctgcaggcgtaccgagctttccctatagtagtcgattagtgctgnnnnnngcat

SEQ ID NO: 99981 - DNA, 1256 bp, Arabidopsis thaliana columbia
  unsure (1)..(1256): unsure at all n locations
gggccgtctgcggtaccgttccggaattcccgggtcgacccacgcgtccgaattatcattatctcaaacacaacaaggatagatcatcctcataggcgatgttgtttagtggttcagcgatcccattaagcagcttctgctctcttccggagaaaccccacactcttcctatgaaactctctcccgctgcaatccgatcttcatcctcatctgccccggggtcgttgaacttcgatctgaggacgtattggacgactctgatcaccgagatcaaccagaagctggatgaggccataccggtcaagcaccctgcggggatctacgaggctatgagatactctgtactcgcacaaggcgccaagcgtgcccctcctgtgatgtgtgtggcggcctgcgagctcttcggtggcgatcgcctcgccgctttccccaccgcctgtgccctagaaatggtgcacgcggcttcgttgatacacgacgacctcccctgtatggacgacgatcctgtgcgcagaggaaagccatctaaccacactgtctacggctctggcatggccattctcgccggtgacgccctcttcccactcgccttccagcacattgtctcccacacgcctcctgaccttgttccccgagccaccatcctcagactcatcactgagattgcccgcactgtcggctccactggtatggctgcaggccagtacgtcgaccttgaaggaggtccctttcctctttcctttgttcaggagaagaaattcggagccatgggtgaatgctctgccgtgtgcggtggcctattgggcggtgccactgaggatgagctccagagtctccgaaggtacgggagagccgtcgggatgctgtatcaggtggtcgatgacatcaccgaggacaagaagaagagctatgatggtggagcagagaagggaatgatggaaatggcggaagagctcaaggagaaggcgaagaaggagcttcaagtgtttgacaacaagtatggaggaggagacacacttgttcctctctacaccttcgttgactacgctgctcatcgacattttcttcttcccctctgattttgggccctcttttacatttgggccttccttcgctatacgaaattaggccctgtaatggactgtgtatcgttcatttttagcccagagcttcttcgcttgaaaaaaaaaaaaaaaaaaaggncagggcggccgctctagaggatccaagcttacgtacgcgtgcatgtgaagtca

SEQ ID NO: 99982 - DNA, 773 bp, Arabidopsis thaliana columbia
aggtaatttattttagggtgccacaatagaaaagctatgacgtcgcaggcacgcgtacgtaagcttggatcctctagagcgcccgccctttttttttttttttttttcaaaccccaaatgcataaagtctttacgtggtttgtgaaaatagccttagtttgcattgaaaaatcgactaatttcctagaaagaggaccaacatagaacaacgaaacggccccaaaatcagaaacaatcgtatgaagacaaaagtagtgtgcgtatacataagtcgaaagaccatgtcagaatcgggcacatccggttcttattccgcttcatcagtgagatttctggataccaatgaggcgggcataatccacccataataaggaacccaagaatgtgttgcctgttctaactgcaaagcacaacgcactgagtgcaagtttgtgttggtgtagcattggctccaggagacgttgttcaatcacaccagccactatttggtaccttaggttgctagaaactgccatgtagacaccatatgcaacacttgtggagactatcggaacagtttcgacttcaccttcagaattctggtccacagcttttcgtgcttttatgaatgcatttgtaatagcagtaccaaccagcgatgatgtggtgccaacggcaaacagcttagctccattgcgcgttatagcacctagcctttgcaagagagtcggacgcgtgggtcgacccgggaattccggaccggtaccttgagggtaccagctttcccttagtga

SEQ ID NO: 99983 - DNA, 659 bp, Arabidopsis thaliana columbia
  unsure (1)..(659): unsure at all n locations
taggtacnnnnnnnnnnnnnnnnnnnnnnnnnnnnnnnnnnnnnnnnnnnnnnnnnnnnnnnnnnnnnnnnnnnctttgttttttttttttttttttttttttttgggcatgcgaaataatttattgataatccgcaccgacttaatatacatatataaaaattggtcaaaaaccctaatcaagctttagaaaactctcacactcaatagtaatgaggaaaacatttcacatgacaactacttcaagcaaaaatctctagaataattaaaccaaagccttgcatgcaaaaaccacaaactaaaacatatcgattatcaggttcttaattacttactcaatacattaatcagaaaaataaacaagatgaaatccgtagaatattagaatttagaaataaataaaaatatatgaaaaagaagcaatgcaaaaaaaacacgcttgttaagaacaaacaaacaaacgaaaggacaaaaaaagaaaaataaatctcacagaatatatttgtttgggtatgtttgcctaggaatgatgactggtgcttccatcttcttgatgggtgagatgatgatctccgtcacggttttgctggttgttggtatggttccccgtctccgccaccgggcggaaagcaacattcaacgcccgttaaactccataa

SEQ ID NO: 99984 - DNA, 547 bp, Arabidopsis thaliana columbia
  unsure (1)..(547): unsure at all n locations
nnnnnnnnnnnnnatagnaagactttgacgtcgcatgcacgcgtacgtaagctgggatcctctagagcggccgcccttnngggggttggcctttttttttttttttttttctttttttttttttttttcttctggggcctggaaaatatttcatattcagctgcaaatcttacaattttgaattcatcagaaaaatgaaggaattctaaattccaacaatttttttttcctggagatgtcagtcggcttttcctttgcctttaccatctgaaaccttatcaaaatcatatgctgatggtagcaaaaaagggctctgattcttctgaataaacttgaggaagtctgataatgtttgttgcatgcgactccatgtttcttccatgtttacatatgaaaaaagatctggcaacttgacaaaaagacggagcaaatgctcggcgcaataaacagttgaaggggaagtatcatccacgattgattcttgggattgccgcctctctttcttatataggagcatcactggcaatgccttggcgaaataactcct

SEQ ID NO: 99985 - DNA, 476 bp, Arabidopsis thaliana columbia
tggactcatagtttggtgccaagtgacccaaaaaaaaaaaaaaaaagtcgatcttgaagatttcatactttttctggcaattctgtttggtttcagaggaaggagtcaaaacaatggggatcgtttcacaagaagccattgatgaattccaagagctgatggatcaagttgaggagccactgaagaaaacttatgagagaagccatcagggatatctaagggagaatttgggtcgttttctgaaagcacgagactggaacgtatgcaaagctcacacaatgctggctgagtgtttgcgttggagggtggataatgaaattgacagtatcctatctaaaccaattgttcctactgagttgtatagtgatgtacgagattctcaactcataggaatgtcaggttacaccaaagagggctttgcggtctttgctattggcgtcggcctcaacacatttgacaaagcttctgttcactac

SEQ ID NO: 99986 - DNA, 548 bp, Arabidopsis thaliana columbia
  unsure (1)..(548): unsure at all n locations
atgatttnnnnnnnnnnnnnnnnnnnnnnnnnnnnnnnnnnnnnnnnnnnnnnnnnnnnnnnnnnnnnnnnnnnnnnnnnnccacgcgtccgcccacgcgtccggaaaaaaggaacagactttttacttgtgccattgaccaagaaccacaaagaggaggaaatcaaatggtttttgggagtttgatggattgattgattattcagcaaatcccacagaagaaatcagaagctgcttcttattttttggtcacgaccagtcttaatcaaaaggaaggagtcaaaacaatggggatcgtttcagaagaagccattgatgaattccaagagctgatggatcaagttgaggagccactgaagaaaacttatgagagagtccatcagggatatctaagggagaatttgggtcgttttctgaaagcacgagactggaacgtatgcaaagctcacacaatgctggttgagtggttgcgttggagggtggataatgaaattgatagtattctatctaaaccaattgttactactgagttgtatagggatgtacga

SEQ ID NO: 99987 - DNA, 1377 bp, Arabidopsis thaliana columbia
  unsure (1)..(1377): unsure at all n locations
ctatagggattgctggtacgcctgcaggtaccggtccggaattcccgggtcgacccacgcgtccgagaaaacttattagagagtccatcagggatatctaagggagaatttgggtcgttttctgaaagcacgagactggaacgtatgcaaagctcacacaatgctggttgagtgtttgcgttggagggtggataatgaaattgacagtatcctatctaaaccaattgttcctactgagttgtatagggatgtacgagattctcaactcataggaatgtcaggttacaccaaagagggcttgccggtctttgctattggcgtcggcctcagcacatttgacaaagcttctgttcactactatgtccaatctcacatacaaatcaatgaatatagagaccgtgttttactgccttctatttctaagaagaatgggaggccaatcaccacctgcgtcaaggttctagacatgacggggttgaagctttcagctctaagccaaatcaagttagtgactatcatatcgaccattgatgatctcaactatccagagaagacaaacacgtactatgttgtgaacgctccatatatattttccgcatgttggaaggttgtaaaacctcttttacaagagaggacaaggaaaaaagttcatgtcttatccggttgcggaagggatgaattattgaagattatggacttcacatccctgccacatttctgtagaagtggaagctctgggtcatctcaccacactcagagcgcaaattgtttttctatcaatcatcccttccatcaacagctatacaactatgtgaagcaccattatgaaacccaaggacaagcagaacctgcaaagcaaggatcattccacgtgggttttcctgagcctgaagctgaacgttgtgtgatagccaaaaccatagaatcggagctgcacaagtttgagaaccgcaacggtctggccgtgtccattgatgacagaaaatccagtcatgaaacactggcaaatggtgacctctgaatgcttctgagggaattccttcagtgcctccacaactgagatatatattttacaggtgagctagcaattcaaatgagtaagggagtactgagctgtgtccgctccctagccatgcaaatgtaaagcgaaaagaagagaataaatcttgaactgaatgcacttctggttttatgtatagtattatttgatcctctaatgtagcaaatttatttgtgggaaatctacctctcatttccctaagcatctgtgtttttggtgtttgatctgctctttggctgaacaacaacagtttaggnnnnnnnnnnnnnnnnnnnnnnnnnnnnnnnnnnnnnnnnnnnnnnnnnnnnnnnnnnnnn

SEQ ID NO: 99988 - DNA, 629 bp, Arabidopsis thaliana columbia
  unsure (1)..(629): unsure at all n locations
ctatagnaagattatgacgtcgcatgcacgcgtacgtaagcttggatcctctagagcggccgccctttggtgttttttttttttttttgtttttttatgggaaatagaaacactcctttattctgtgaattttatttagccatagatgatgactagtagtaggatacagttatacatatacatgttgtataatttttgtaatcactgcacaaagccatataagaaaaaagaggccagctctggctctatcttcaaagcaaagccagagaaagatatagacaaacgaatcaaacagcttgcttctgtcctgaaaactcggaatcagaagaagcttttcatggtcttttaaccaaagagattccgttaggatcaccacctaactcttcgaacacaactataaggttttgagacttaagccatgaacgaggtacatggtaccatctttgtgaagcttcaccacaattacttaagcatttcctttgcgtcgaaagttccagcgtagttacaacgtccacaagatccttgagctttatatgcaggccaatgacggcccatatttctaccggttatccaacctgtcctttcccatggggtcaggctaagccatggncattcngctgggagaacgg

SEQ ID NO: 99989 - DNA, 470 bp, Arabidopsis thaliana columbia
  unsure (1)..(470): unsure at all n locations
gacaataatttgatttaatgaaattatttgataattattaacaacataacctaaaacttaaccaatgaacaattagaataatctaaaaccctatacaatgaaatgttaaagacaagtttatgttattcccctttttgtacaagcttccaagtcttatgaacataaaaagcaaacgcaaatttcgtgcgtttttgtttccttgatgtcaaacgtagtttcttgccaaccaaaccacataagtcagcaagctagctgagatcgatatccactttttccgggacacacctttctttttgggtcttaccaagctctggttccaagctggaccctgatcgcctgcaccaaacgcgaatagcttccccgattccgtgagcgcaaatgtatgagcgtcccacttagggggtcgtagatcttccggccancgcccgtcactggtttagggggtacaacgtggctagacgttgatgcgt

SEQ ID NO: 99990 - DNA, 939 bp, Arabidopsis thaliana columbia
  unsure (1)..(939): unsure at all n locations
cgattnnnaaaaaaaagnnnnnnnnnnnnnnnnnnnnnnnnnnnnnnnnnnnnnnnnnnnnnnnnnnnnnnnnnnnnnnnnnctttttttgtttttcttgtttctgacaataatttgatttaatgaaattatttgataattattaacaacataacctaaaacttaaccaatgaacaattagaataatctaaaaccctatacaatgaaatgttaaagacaagtttatgttattcccctttttgtacaagcttccaagtcttatgaacataaaaagcaaacgcaaattttcttgcgtttttgtttccttgatgtcaaacgtagtttcttaccaaccaaaccacataagtcagctagctagctgagatcgatatccactttttccggtacacacctttctttttggttcttaccaagctctgttccaagctgaccctgatcgcctgcaccaaacgcgaatagcttccccgattccgtgagcgcaaatgtatgagcgttccagtatatggagttcgttagacttatctggaccatccgctcgttcacttgttttagcgatgttactaccgttggacttagcacgtttgcatgtcgattaccctgttcatcaaaggatggatggtgaccgagactagcggattcgccgcagccaaacgagtaaacatcaccatcgtctgagaccacaaaagtagtgtagtctcctgttgcgacatgaactgctttgacatggcttagaccttcaccaaccttagggactgattcacactcctcgtgaccgtgtcctaaacatccatatcttccccaaccccaagtgcacactcttccatcctgacctaccaccgcggcatgccaagcacccgctgcaactaccctaggttgaagattcaatatctgaaactgctcgatgacccgaggatacatctcatctgttcttcggacgcg

SEQ ID NO: 99991 - DNA, 616 bp, Arabidopsis thaliana columbia
  unsure (1)..(616): unsure at all n locations
tcgggtcaagcgtcgcttcgtgcgacgacatcgatagagcgggaagaatgagatcgggggaaagagcatgaaccctagcagcagacacaacacgggttcatcgagaagcaagatgactttcacgcgaaggaacggtgggaggaacaagcacaacagaggacacgtcaacccaatcagatgctccaactgtggcagatgttgccccaaggacaaggccattaagaggttcattgtgaggaacattgtggagcaggctgctattagagatgttcacgaagctagcgtctatgagggatacacattgccgaagctatatgcaaagacgcaatactgtgtctcctgtgctatccactcgcatgtcgttagagtccgttcccgcaccaaccgcaggtttcgtactcctccaacctcgtttcgccagacgcaaggagggatactcccaagccttgggnaccaggncaggnaccttgtccttcttgaccttggggtncaanttgcagtgaacccgngtgtttnnaggctttaaanagnggttttttgcttgttttccaatgtntttttacggnttaaagngnnttttttctntttaaaaaggtttccacgnggnnttaatttt

SEQ ID NO: 99992 - DNA, 700 bp, Arabidopsis thaliana columbia
aagcggacacacacttaagtccatcgacatctggagagtgagaagagaggaatagccaaagatgactttcaagcgaaggaacggtgggaggaacaagcacaacagaggacacgtcaacccaatcagatgctccaactgcggcaaatgctgccctaaggacaaggccattaagaggttcattgtgaggaacattgtggagcaggctgctattagagatgttcaggaagctagcgtctatgagggatacacattgccgaagctatatgcaaagacgcaatactgtgtctcctgtgctatccactctcatgtcgttagagtccgttcccgcaccaaccgcagggttcgtactcctccacctcgtttcgccagacgcaaggaggatactcccaagcctgggcaaccaggacaggcacctcgtcctgctggacctggagctgcagctgcagctgcaccgcgtgtctgaagccttcaagcagagctttctgtcttgttttcctatgttcttgttacgtctttaaggatgtttgtctctgtttaacatagttttgccatgtggatcttgaattctgtcaaactatttcaatagttgattcaacttgtttttttttttgttcctataaaaaaaaaaaaaaaaaaaaaaagggcggccgctctagaggatccaagcttacgtacgcgtgcatgcgacgtcaggctgtct

SEQ ID NO: 99993 - DNA, 761 bp, Arabidopsis thaliana columbia
  unsure (1)..(761): unsure at all n locations
tgatactccnnnnnnnnnnnnnnnnnnnnnnnnnnnnnnnnnnnnnnnnnnnnnnnnnnnnnnnnnnnnnnnnnnnnnnccacgcgtccgtacgggtgtcagaagacgacagaaggggacgaatgagatcggcaacaagagcgtaaaccctagcagcagacacaacacgagttcatcgagaagcaagatgactttcaagcgaaggaacggtgggaggaacaagcacaacagaggacacgtcaacccaatcagatgctccaactgtggcaaatgttgccccaaggacaaggccattaagaggttcattgtgaggaacattgtggagcaggctgctattagagatgttcaggaagctagcgtctatgagggatacacattgccgaagctatatgcaaagacgcaatactgtgtctcctgtgctatccactctcatgtcgttagagtccgttcccgcaccaaccgcagggttcgtactcctccacctcgtttcgccagacgcaaggaggatactcccaagcctgggcaaccaggacaggcacctcgtcctgctggacctggagctgcagctgcagtgcaccgcgtgtctgaagccttcaagcagagctttctggcttgtttccaatgtcctgtaacgctttaagntgttgcccngntaannagtttncatggntcngaatctgaaacattnggcggattcttaaccnggggncctantttaagggccaccggggggnccaanttttcccttnganggaatttgg

SEQ ID NO: 99994 - DNA, 580 bp, Arabidopsis thaliana columbia
  unsure (1)..(580): unsure at all n locations
gggactcggagagggnnnaggaagagcaagacgaagganccgagccanagaggtctattaacacaccaaaagcttctncttcttcttcctctcgtctctaaaaatccttcctttctttctgggttttctcgaatcttcatctctcattcaaacccacaagtccgatctcgcgatccaaacaccatggaagaggttgaagaagaagtgagacgaatcgtcgaacaagttaaagagcttcatgactcttccacatccttcgtctcttcttcttctcaagaagagctttctctccgtaacagagcctccgtcgttgactcatcaatccgccgtcttcattctactcttgcctctgacaaacatctcgatcccaagcttttcgaaaagctagaagaggatctgcaacgagctagatgcatgcttgcagatggagacacttcatcgtttcttccatctaaaccctcaagggcggttttgtgagaatgtttttgggacctgtgaatgttagagcttcacgaaaagatatacagccttaaggtcaaggaggatttaatagcttcaggggtaggccagctcttctttt

SEQ ID NO: 99995 - DNA, 768 bp, Arabidopsis thaliana columbia
  unsure (1)..(768): unsure at all n locations
nnnnnnnnnnnnnnnnnnnnnnnnnnnnnnnnnnnnnnnnnnnnnnnnnnnnnnnnnnnnnnnnnnnnncttggttttttatctctttttcttataatctcttttctttttggggtggagaaaacaccaattcttccttgggctcatatgaaagaacaaaaaaaatcgggcaacaatatgactccttggagtacacaagggaagttgagactagattctttcatgtacatattttatcaaagaggctgagaaacgataaacagagacccatataactcaaatgatttctacataggctcagttttaagtcagcttaaaacaggagcaattcttcagggcttgatctcaagttttaatgtcatccaatatatggtgattgcttatcttactaatgtttcatcaattgctcatcttgctagtgttccatcaagcttgggtttgacgtggtttaaacaatttctttcttagagcatcaatcgaccgcactttctcatctctcttttcacaaaagcactctccacaccagctggagaaatccttgtgatgagttttgagctctctaaatacagaacttctgcaccatagaagcatattgacccgatgcccgcatggtgtggctctggcaccatggcggtggcggccacggtgaaananagcttgtccaggnatatggcataatcanatgttcacngccttggtgcgggtcaanggtttcaaccgggccccgnaaaagnccnccaaatggtaccaanaaatcagggactcgnt

SEQ ID NO: 99996 - DNA, 582 bp, Arabidopsis thaliana columbia
  unsure (1)..(582): unsure at all n locations
cgnnnnnnnnnnnnnnnnnnnnnnnnnnnnnnnnnnnnnnnnnnnnnnnnnnnnnnnnnnnnnnnnnnnnnnnnnnnnnnncttttttggtttttttaaaatcaacctgttgcagattatattgttacaactagatgcgtcttggagaatgcataaaagaaaaaagtcaaaaaaccgaattgttcatgagtaatcatagagcgatacactcttgtcatcagagacactagcaagtcgaccagcccggacaccggttccacctggtggtctaaaggccacagaccaaacctggtcattgtggttgctcattgtctgaatcgcagctctcattttaagatcccatagcctcacagttctatcgcttgagccggttgctatggctccaccgtctgggctagcatcaacgctcagcacccaactcgtgtgccctgacatggaccccaacagcgttttcccttctgcatcgtgcatgttcacatgcccatcatctgatccagagaagaggactctcggggtctacaggggggaacacaagggaccttacaggcatatttgtgacctctagctgggaagnagctttat

SEQ ID NO: 99997 - DNA, 630 bp, Arabidopsis thaliana columbia
  unsure (1)..(630): unsure at all n locations
gggccccccctcgaggtcgacggtatcgataagcttgatttcgcctccgcgcccgcttttttctcagtcttcaaagagtttcttagtaacccaaatcaatggcaggtatcaaagttttcggacacccagcttccattgccaccaggagagtcctcatcgccctccacgagaaaaacctcgactttgagctcgttcatgtcgaactcaaagacggtgagcacaagaaggagcctttcctctcccgcaacccttttggtcaggttccagcctttgaagatggagacctcaagctcttcgaatcaagagcgattactcagtacatagctcaccgatatgaaaaccaagnaaccaacctttctccaaaccggacttccaaggaccatatctcagtacggaaatcatggncatttnggattgcaagtaggaggntcaccagntngncccagtggntttaaaggttgcttttgacaaatttttaagnccatctncgggttnnccaaagacggagcngtttttnagagggggggttaggtngcaaggtcttgatgtttcggggtttgnnttggggtnagttttggttggnnaatttnnnttgntntttancaatccgggttancctgtgnctnccag

SEQ ID NO: 99998 - DNA, 712 bp, Arabidopsis thaliana columbia
  unsure (1)..(712): unsure at all n locations
attttacttgtgtgttatttcatcaccttcaccttcaacatcaaacatcacatctcttcctcttttctctcttttttctcagtcttcaaagagtttcttagtaacccaaatcaatggcaggtatcaaagttttcggacacccagcttccattgccaccaggagagtcctcatcgccctccacgagaaaaacctcgactttgagctcgttcatgtcgaactcaaagacggtgagcacaagaaggagcctttcctctcccgcaacccttttggtcaggttccagcctttgaagatggagacctcaagctcttcgaatcaagagcgattactcagtacatagctcaccgatatgaaaaccaaggaaccaaccttctcccaaaccgacttccaagaaccatatctcagtacgcaatcatgggccattgggaatgcaagtaggaagatcaccagttcgaccccagtggctttaaaagcttgcttttgaacaaattattcaaggccatctacgggttgcccccaggcgaagccggttttttagaagaggggggtaggttgccaagggccttgatggctacgggggtggggcaagggggtcaaggatttgggtggggactttccccttggtgggtttnccaatcccggggttaaaccnggggggggccccccaaaaggnttnnngggggnccngggaaaanngggggggggnnaacccc

SEQ ID NO: 99999 - DNA, 1074 bp, Arabidopsis thaliana columbia
  unsure (1)..(1074): unsure at all n locations
atgatatgccgnnnnnnnnnnnnnnnnnnnnnnnnggaaanctatacgcctgaggtaccggtccggaattcccgggtcgacccacgcgtccgatcaaacatcacatttcttcctcttttctctcttttttctcagtcttcaaagagtttcttagtaacccaaatcaatggcaggtatcaaagttttcggacacccagcttccattgccaccaggagagtcctcatcgccctccacgagaaaaacctcgactttgagctcgttcatgtcgaactcaaagacggtgagcacaagaaggagcctttcctctcccgcaacccttttggtcaggttccagcctttgaagatggagacctcaagctcttcgaatcaagagcgattactcagtacatagctcaccgatatgaaaaccaaggaaccaaccttctccaaaccgactccaagaacatatctcagtacgcaatcatggccattggaatgcaagtagaagatcaccagttcgacccagtggcttcaaagcttgcttttgaacaaatattcaagtccatctacggcttgaccacagacgaagccgttgttgcagaagaggaggctaagttagccaaggtccttgatgtctacgaggctaggctcaaggagttcaagtatttggctggtgaaactttcactttgactgatcttcaccacattcccgcgattcaatacctgctcggaactcccaccaagaagctcttcaccgagcgtccacgtgtcaatgagtgggtggctgaaatcaccaagaggccagcttccgagaaggttcagtgagaaatttctaaaaggaaaatatggttttgcttcagtcacagtaataatgctaagattaaataagcggctttctcattgcccaatttctcagtactttctttctgttgtatcctctgttttctttcagttatgtgagtgtgtgtgtatgctcttgagagtatctttggcaaaaactatttatctaatcttcaagctattctagggcgaccgctctagaggatccaagcttacgtacgcgtgcgttcgacgtcataatcttcgagggagtg

SEQ ID NO: 100000 - DNA, 932 bp, Arabidopsis thaliana columbia
  unsure (1)..(932): unsure at all n locations
cgattaaannnnnnnnnnnnnnnnnnnnnnnnnnnnnnnnnnnnnnnnnnnnnnnnnnnnnnnnnnnnnnnnnnnnnnnnnctttttttgtttttttgtaaattttacatttatttaaaagctgaaccaaatccaaacttaaaacattatttttttctttctagaaattagactaggaatttcattacctacaaaaattttggtttttatttggttataatataatgaattctagttgtttacttaatttgcaacaaaattttggttaaaaactgaaccaaatccaacccatagtcaaaaaaaacttcaaaccgaaacaaaacattttggtttttatttggttaaaatttaacccgaataaaccaaatctaaccataatttcaacccgacccgaccataaccgggtcaaatccacaaccaatttatccaacgggtcaaaaagcgtacctggagcaacatagccgtaagtaccagcaacggcggaccaatttgaagaatccggtttaagaagcttcgcagtaccaaaatcagagatcttcgcttcataatcctcgccgagaagaatattcccactactaatatcacggtgaacaatcgccggagaccgatcatgatgcatataagacaaagcatgagccacacctttcacaacgttgatcctctttccccaatctaacttcttcgcttcatcatcattctccaaaactttcctcaagcttcctctctccatgtactcgtaaaccagaaacgtgttgcggcgatgcgagcagaatccgaagagtttcacgacgttccggtgacggatctcggttagtgctctgatttcgttgagaaactcttgttttgttgatggatttgagattgatgagtctgttgtttcgcggacgcgtgggtcgacccgggaattccggaccggtacctgcaggcgtacc

SEQ ID NO: 100001 - DNA, 982 bp, Arabidopsis thaliana columbia
ctatgtacgtcgcatgcacgcgtacgtaagcttggatcctctagagcggccgcccttttttttttttttttttttttttttatacaaaagatgcaaactattatataattcatcacaaaaactaaaattccatgaaacaaaaacattaacccataatcaaagaaacaaacactacaacgtgtaaagtttctgcttggtagagactagagagagtcagagaagagacaagttcttaagaaaaggcagtggagatagagagcattgttgggcgagcttgtggatcagaatgtaaacacaaaagtgcaactttcaaaatctctaagacctcctctttaatctccggtgtcggttccggtagccggtggtcggaaatgcttttcagtgacagagttgcatcgggaggtgaggatgaaagagttgaaactagatctcctggatgctctcctttgatcacttcaagtgttagaactccaaagctatacacatcgcatttctcagtcactttcatcgcataagctagttctggagcaacatagccgtaagtaccaacaacggcggaccaatttgaagaatccggtttaagaagcttcgcagtaccataatcagagatcttcgcttcataatcctcgccgagaagaatattcccactactaatatcacggtgaacaatccccggagaccgatcatgatgcatataagacaaagcatgagccacacctttcacaacgttgatcctcttcccccaatctaacttcttcgcttcatcatcattctccaaaactttcctcaagcttcctctctccatgtactcgtaaaccagaaacgtgttgcggcgatgcgagcagaatccgaagagtttcacgacgttccggtgacggatctcggttagtgctccgatttcgttgtatagaaactcttgttttgttgatggatttcagattgataagtctgttggttcggggacgggtgggtctaaacggaa

SEQ ID NO: 100002 - DNA, 403 bp, Arabidopsis thaliana columbia
aggacgcgtccgcccacgcgtccgcaataagctcacggatttctcctcaaaatcctaatccaatcatttctccaattctccaaggagtttggtaatacacaaataacatggaagacgttagaagaagaaacagaggacatcctctgctcagatccaagaagagaggagaaggctacaaccatggcttctcaccgtctcagattcaatctcttgccgtcatctgtcaaactttcctccctccggagaccacgtcggaacagcaagctgttaattcctcccgcccggcctcctctactcaaccaccattcactgatgaggtggcggagatgatagtgaaaaacggacgatcagaagcagtcaaagttttgagaatcatattgatgattttgtcattcagatttgg

SEQ ID NO: 100003 - DNA, 561 bp, Arabidopsis thaliana columbia
  unsure (1)..(561): unsure at all n locations
cgattnnnnnnnnnnnnnnnnnnnnnnnnnnnnnnnnnnnnnnnnnnnnnnnnnnnnnnnnnnnnnnnnnnnnnnnnnnnncttttttgggtttttttttttttgagaagggaagagattatgaaactttagtactaaattggaaaagttgcagataacaagaaaagctaaaggcttcaaaggaagatagttacacattttagatagtgtctacttttaacttattacactttcactacatgctcgctacttctgatgccaaacttgagatgatttctgagcttcagaagaaggctctactcccgtagaaaacacgggagctagcactctttggcgtctgctgggaggagcttgagttctctgattgggttgggctatcgatgtccaaaggaagtttcatcttagccagtgactcagtgaattgctgcaagttttttgtgtacatgtcaacaatatcttgttgcactaccttttgctctggttaaatggtaactgtcagaaccggtttcacactgcttcttcatcaatcttatttaatcaccacttttgatgatattctgt

SEQ ID NO: 100004 - DNA, 559 bp, Arabidopsis thaliana columbia
  unsure (1)..(559): unsure at all n locations
nnngacgtcgcacgcacgcgtacgtaagcttggatcctctagagcggtcgcccttttttttttttctttaacaggaaaggttttcttatgtgagcatatcatatggtttctctgaaaatgttcaactgcagatatatatcatcaaatacagacagacacagtacaaaatccggctgggccaggaacataactgcggatattctatacctaaaccaatgatggggggcaaaagctcttttaagatgatttttttagattgatcaaacctttttggttttcactattgaagaagttgggaacaatcctgtggtgtgacaggataagagtaaagcttctagcttctgtggagtggcgcagcacgtaaatcaactggctgatagctcactcgatccttgtgaggtaaaagctcctcatcatcagggtttatctggaatggcttcacaaaatcctcaaacattaacggagaaagatccttcattttctcttccacttccaatccagtaatccttgatttttctaataactcccggggtaagccaacgggccgttgcccangatt

SEQ ID NO: 100005 - DNA, 420 bp, Arabidopsis thaliana columbia
ggaagttgtgtgagagaaagaaaaagcccagagagaagagagtgagacccacaacacagacacaaagtagacgaagaagacgacgacgaaacagctctcttcttctctcctctctctcagcatcttctgctggtttggtctttcactaaagtctcggtgtgcacctaaatgtgcttgatccaaggtcgttataattctgtgtacagagccaatgccatatatagaaatgaagagcaagataagcaaggttcttggtgtctgtaagaaacataaagcaagtacaagaaattcttgctctttgtccaaaatatcaggagacttggaaagcataaccgcagctattactacttgccacgacgatgagaaacagcaccctgggttggatactttttctcgggagagtgaaactaatgagcccgc

SEQ ID NO: 100006 - DNA, 540 bp, Arabidopsis thaliana columbia
  unsure (1)..(540): unsure at all n locations
aggggannnnnnnnnnnnnnnnnnnnnnnnnnnnnnnnnnnnnnnnnnnnnnnnnnnnnnnnnnnnnnnnnctttttttgtgtttttttttttttttttgggaagaaaagtaaattcaatttagtgctaaaccttactacatttattttgaaatcaaaattgactttggtacaatagtagatgagaaaaacttaactagacaaattatcggggtcacggataatcttcttggaaggaagaacaattgctgccactggtttatccgggaatccaccgccttcatcgatgatcaatctcataccatcgatgtgaagttttccatggtgcccgctaacaacaacagtatgtttatcatccagctcctgtgggatgtcccaaacgtttttcctaccacttagatgttgtatttttgagatgctagtgtcttttagctctcaaaagcttcagttgttcttctacgttattccctttctctaaaccagcatgtacggcgatcaacttacaatgcttaagcccttcctctgtttctatacaaacatc

SEQ ID NO: 100007 - DNA, 557 bp, Arabidopsis thaliana columbia
  unsure (1)..(557): unsure at all n locations
nnnnnnnnnnnnnnnnnnnnnnnnnnnnnnnnnnnnnnnnnnnnnnnnnnnnnnnnnnnnnnnnnnnnnnnnnnnnncttttttttttttttttaataaaccttaccgtttttattgtctttttaccgtaagaaaaaaacaactcaaacgaacagagaaaaaatggagaattaattatgttttgtttttaaaagacgggagagacaagaaagctgttgggaattgggatgagctattttgtgccctttcactatttctcactcttatccattagtgggccataatcaaggcccacatactagtggatcaatatattaagcccagcacgttatcgatctcacgtgagagaaggcgacagattgatgatccttctcctccaccacccaaagctgagcctctttgtataacacatgtcgactagaaaggtcgagaagcttcttccatcattttcttcactcttgtcaacttctctatttctttcagaatctccaaagcaatgtcttcagaagttactgcttccaagtcttcaaattctagctttgtagctattttttcaa

SEQ ID NO: 100008 - DNA, 983 bp, Arabidopsis thaliana columbia
ctcgctgtccctccttctctttctcattcattgcaatgggcagaagatgctcacactgtggaaacgtaggacataactcaagaacatgttcttcttaccaaacaagagtagttaggctctttggtgttcatctagacaccacaagctcttctccgccgcctcctcctcctccctcgattttggccgctgcaataaagaaaagtttcagcatggattgcttgccggcatgttcctcctcttcctcttcctttgctggttatctctccgatggtctcgcccataaaacacctgaccgcaaaaaaggggttccatggacggcggaagagcaccggacgtttctaattggattagaaaagcttggaaaaggagattggagaggaatctctagaaacttcgtcgtcacaaaatccccgacacaagtggcaagtcatgctcaaaaatactttctccggcaaactaccactctccatcacaagagacgccgcaccagcctctttgatatggtttcggccggcaatgttgaagaaaatagtactactaagaggatatgtaatgatcatattgggtcgagctcaaaggttgtttggaaacaaggattactcaatcctcgtcttggatatccagatccgaaagtatcagtatccggctcgggtaactccggtggactcgatcttgagctgaagcttgcgtccattcaatctcctgaatcgaatattagacctattagcgttacgtgaatctatataacacgttatgatcagtttcattagaataattcaaatgtttacatatataatatcttatcgatcctatctaatttgattttgatttaacgttagttactttgataatttcgtcgatattgtttttttggttttttcattgtgagattttttgtcttggaagttggatccatacatatttctgtaaaactttatatttaaggtatatatatctagcgatcataaaagtttcaatattcc

SEQ ID NO: 100009 - DNA, 700 bp, Arabidopsis thaliana columbia
  unsure (1)..(700): unsure at all n locations
gattaaaannnnnnnnnnnnnnnnnnnnnnnnnnnnnnnnnnnnnnnnnnnnnnnnnnnnnnnnnnnnnnnnncttttttctttttttgtttttttcaaacgaaaagttatataaactcgatagtagataaacaatgtgtatcacaacaacatagcttaaagtagttcctaccattagagcagtagagaggaaaacaaaggaccttataatcattcttttatataatattccaatttgttgctaatgcctcgcagattcttgagatacagtaggctgcgctcaatggatactctgaaaccgacacaaattcatcgatatagttgcagtctattttcccgtgtgccattgcgcctaccacaaaaactgtgtctctatcatcatcacatacagtagctaggtgtttctgcatattgacgagtttctcagagctatgcgagaagcctattctgtgggagttaaccggtagatgatgttcttcgatagggttcttgacacaccgtagaagcttctcacggctgttaactgcagtaatgctcagcttttgtagcagttgcaacatgattccggcaaatcgtttgaaagttcttggtatacgaacatgtggcttaacttcaaaaaggacacctttttctgttctaacataaacagctttcaacctcccagctttattaaccggactatccaaaatcataagaagcg

SEQ ID NO: 100010 - DNA, 488 bp, Arabidopsis thaliana columbia
cacaaagatctttctaaagttctaaaacatctctctctctctttctctagaaatttcaaagtctcttcttttcttttctatttgatcatgaattctatgttcagtgccttcgacgctctcttcgcagaggtcatgggaaagaaccttatggcttcttcgtttactgctactaccgcaacaaccaaacctgccgccgcgccgcaaacacaaacgcaggagaaggcaaacgcaagtagcaagaagataggtttggtgcagaagattccgaggtttgctttggagcttgatggtcttcactgcttcgaaacaatagtccgttcttgatttgattcgttcttggttcttggcttcaagatcagaaacttagaatctgagtttcttatatttttatttattttattaattcattataacatgtgattgtgaatacgttttggaattttgatattgatcgatttgatcccattatatatttcttggattctccg

SEQ ID NO: 100011 - DNA, 531 bp, Arabidopsis thaliana columbia
  unsure (1)..(531): unsure at all n locations
nnnnnnnnnnnnnnnnnnnnnnnnnnnnnnnnnnnnnnnnnnnnnnnnnnnnnnnnnnnnnnnnnnnnnnnnnnntcctttttttttttttttgactttaaaatttctgatttttctttagggctaatatacgtataataagaccatacgagatgcaaaatgttaataggtaagtctgaaaatgtaaaatacatagaaagacgaatataggacctcttaaatcttacaaaacatttgaaaccaatcagtcaaaaaaccaaccatgtcgttttggcaatcttctttgtacaccgtctttgctctcacagcccttaaaaaaagcgtctttcttctctttacacaagggtgaaggcagatcgtactgtggattggaaccgagatgcgattgtctgagaagcacactgctgaaattggtacttagcatatatattgcactttgcgaagccgatgatattagccacattgagggacaggctatcgccaacaacatgcagatagtgaagcttgaaatctaatcatagataatacccc

SEQ ID NO: 100012 - DNA, 691 bp, Arabidopsis thaliana columbia
  unsure (1)..(691): unsure at all n locations
nnnnnnnnnnnnnnnnnnnnnnnnnnnnnnnnnnnnnnnnnnnnnnnnnnnnnnnnnnnnnnnnnnnnnnnnnnctttttttgtttttttaacttttaaccaagattttctttcaaaaacttctgatacatcattttcaagtttgtaagaatttagcatgcaaatacaataagttaactaagtttaaaggaaaaactaaaggaaaacaagaagtatttagccaacaacaacaccttgatgaagaaattacataatacagatagaattgacagacaaggccccgaatataagagggaactacagaattattttctcttttcgtatttttgattctctttgaaggggaaatttccccaaagagcaatttaaagttacaagaaagccgctaaaccctattaagtgaaattggatgcatattaagaaagaaagaaaaaagtgatggatcagaaggagaatggacttaagagagactcgtcaagttctttaaaacctgcgtatacaccatccgtcttgttcggtggcagagctagtctcctaacctctgtcatatacctgtttgcagcgtttgcaatcttatcacgtgccccttggttaagagcagctttgttctctagcgcaaacgagccgcctagtatcagagaagacctggtnggactcgaccccattctgtctgacaatacagacattgccc

SEQ ID NO: 100013 - DNA, 528 bp, Arabidopsis thaliana columbia
acgactcactattgggaaagctggtccgcctgcaggtaccggtccggaattcccgggtcgacccacgcgtgcgctaagatactataactactctttccaaaagcaattttaaatggtgtcattttgcggtagaaggttcgccttcttgattatctttctctttgcagcacaatatgagcgtgtctacgctggtagctttcacaaggacgttcagatacattggggtgatggccgtggaaaaattctcgacaatgtcggaaatcttctttctctctcgctcgacaaattctctggttccggttttcagtcccatcaagagtttctttatggcaaagtagaggttcaaatgaaacttgtacctggtaactctgctggaacagtgacaacattctatctaaaatctcctggaactacatgggatgaaatagattctgagttcttgggaaacataagtggtcatccatatactcttcatactaatgtttacacaaaaggcacaggagacaaagaacaacagtttcatctatg

SEQ ID NO: 100014 - DNA, 578 bp, Arabidopsis thaliana columbia
  unsure (1)..(578): unsure at all n locations
ttgagatatcaatatcaatactcctgtgagaacaaaatgaagctttcttgtggtacaagctttgcgttcttgattctgtttctctttgcggcacaatctatgcatgtctatgcgggtagcttccacaaagacgttcagatacattggggtgatggccgtggaaagattcacgacagagatggaaaacttctatctctctcgctcgacaaatcctctggatccggttttcagtctaaccaggagtttctctatggcaaagccgaggttcaaatgaaacttgtccctggtaactcagctggaacagtaacaacattctatcttaaatctccgggaactacgtgggatgagattgatttcgagttcttggggaaacataagtggtcatccatatactctccatactaatgtttacacaaaaggctcaggagacaaagaacaacaatttcatcttatgggttggcccaaccgctaactttcacacttaattggatcacatgggatccccnacgggttntttttcagttnaggggtncnttnggggggtaaaganccngggcaattggggccgncccacgnnc

SEQ ID NO: 100015 - DNA, 590 bp, Arabidopsis thaliana columbia
  unsure (1)..(590): unsure at all n locations
tatagaagagcttgacgtcgcatgcacgcgtacgtaagcttggatcctctagagcggccgnccttttttggttttttttagatgtgattttgttatcttatttctcagtaatactagtgccgcactcaaaccctaaactctatatccatccattgcgacaaatcccaagggatgtgagcattgtcaacaatccatcgattaaatacatccttacagtccatgtttctcttgcagtgatactttatcgattaaatactacaacttacgctccatgttcgaattgtttttcagtggcagcttctgattcttggtgattatccagattttcttttcgctcttcttggatttcagcttttgctgcatcaactgcgccttctgtcgttgcttctggaatcctcagttctggtttcttcttcttcctcgaagatctacttggtttatcatccgatggtgtaccaagtaaaagatggctatacttcgtcactacccgttctttctcatcaagcattcccaaaagctcataagcatcagccacggtctgcacaatgtgcttgtccggagncttanggtcataactctccagatccttg

SEQ ID NO: 100016 - DNA, 519 bp, Arabidopsis thaliana columbia
  unsure (1)..(519): unsure at all n locations
atagaagagctttgacgtcgcatgcacgcgtacgtaagcttggatcctctagagcggctgnccttttttgttttttttttcatttgacttgttatttagctcttacattttatgaaagaacatatacactttcttgtctgtaatttatatccactaattttgcgaatacaaagatttacaagaatacaaagatttacaactagactaattgtatagtctagtggttagcgaatatccaaggattggatagcgagtttggctgcaattgaggagatgttctcctttatgagtcccattgagagttctaatctctctatggtatctttcatatccattgcttttattttctcttgttgtaaccttgatagttccgacttcgtcgatccggagatgggttgaaatgctgaaaatgatagacgttcttggagagaaggtacgaatgattcgtcaaagtcgaccggcggctcattttcagcccagtttagagagttaatgaaacgagtttgtaccggcgagtct

SEQ ID NO: 100017 - DNA, 459 bp, Arabidopsis thaliana columbia
  unsure (1)..(459): unsure at all n locations
aatgtttcgattttaaggtcggaccggagtggattaaactggatttaaaaccaggattttgcctttggcgtaacctttcgaagaggaatgtctgcaaacgagatacccgacgagctatggagaaagatcctagagattggcgtaaagtcttcgactttctcgtacaaagatctttgctgcatctctatctcctctcgccgtctcttccgattgtcctgcgatgattccctctgggatcttctgctcgtccatgatttccctaaccacatcgtctctgcttcttcttcttctgaatctcccaccaagtttatctacatgactagggtttgagagggagaaggagaggaaattagctgcccataggaagagctttactcagggaggggagtgaaatttctttaaatgggggncccggaggantncgggaaatttnggggcnncgattttncccnccngggg

SEQ ID NO: 100018 - DNA, 571 bp, Arabidopsis thaliana columbia
ttaatacgactcatatagggaaagactggtacgcctgcaggtaccggtccggaattcccgtgtcgacccacgcgtacgcaatcgataagtaataataatattatctcttcttctctgcttccattttgggtatcgataaaccaccacatccttccctgaaaccctaaccacaacaatcgccgccgtctctagaaatatccatccacctacttcggctttgtttatcaggttcgatatatctatcaccaccgccttcttatctcaatttctgtgtttgatttttgctttgttggtgtttgattttaccgcagattttgatgaaaccagatcgggtcttcctctagatccgttctaggttttctatttccaccgtcttatcattatcatcatcatcaattcatcatcatcatcaataatccagatgctcaccaaattcgtcattcatagacatgtctctgtttctgaaagacgattcgattcaaattcgcgaagtctggaacgataaccttcaagaagaaatggatctgatccgagatgtcgtcgaccacttcccttacgtcgccatggacac

SEQ ID NO: 100019 - DNA, 909 bp, Arabidopsis thaliana columbia
  unsure (1)..(909): unsure at all n locations
gtgaactatacaagactttgacgtcgctcgccgcgtacgtaagctcggaattcggctcgagcgttaaaccaccacatccttccctgaaaccctaaccacaacaatcgccgccgtctctagaaatatccatccacctacttcggctttgtttatcagattttgatgaaaccagatcgggtcttcctctagatccgttctaggttttctatttccaccgtcttatcattatcatcatcatcaattcatcatcatcatcaataatccagatgctcaccaaattcgtcattcatagacatgtctctgtttctgaaagacgattcgattcaaattcgcgaagtctggaacgataaccttcaagaagaaatggatctgatccgagatgtcgtcgacgacttcccttacgtcgccatggacactgagttccccggcatcgtcgtccgacctgtcggaactttcaaatccaacgctgattaccactacgaaaccttgaagacgaacgtcaacatcctcaagatgatccagcttggcctcactttctccaatgaacaaggcaacctccctacctgtggcactgacaagtattgcatctggcaattcaatttccgagaattcgatctcgattccgatatcttcgctctcgattccatcgagcttctcaagcaatcaggcatcgaccttgccaaaaacacgctagacgggatcgattccaagagattcgcagagctcttaatgtcctccgggatcgtccttgaaacgaaaacgtgcattggggttacattnccncagtggggtngatttcggnttacttgnnaaaanctctttganttgccaaaaacctngccgggattcgaaaacagactcnttnaangntcatnancggttatttccgaccgngtnnncattaanacc

SEQ ID NO: 100020 - DNA, 532 bp, Arabidopsis thaliana columbia
aggtgacctatagaagactttgacgtcgcatgcacgcgtacgtaagcttggatcctctagagcggcctgccctttttgtgttttttttttagtctgaatgatttatgaacataaaagagaaaagttacgtcgcacaaatctgtaaaataagcgtgtggatctaaacaatgacaaggagacttttgactttttgttgttgttggtctccttattttagaatggaacagctttgtgaatctttctacagcccaaaccggtgaagaatctgaccggtattctcccaattgttttattttcctcaggctttcttttgtttcttcttctggggccgaggtggcgggaagatagaacggaaaagcaatgcagcagatattgctcctacgaaagaactgatccagtagacgtagatatggtcccatgtgttgtgggagctgtacttgtatgcccatccaaacgcaatggcaggattcatggctggtccagtgtatttagatcccgcgacaacaaatgagatggttgcaagagcaaagca

SEQ ID NO: 100021 - DNA, 546 bp, Arabidopsis thaliana columbia
  unsure (1)..(546): unsure at all n locations
nnnnnnnnnnnnnnnnnnnnnnnnnnnnnnnnnnnnnnnnnnnnnnnnnnnnnnnnnnnnnnnnnnnnnntccttttttttgtttttttttttgggcttaactagactttctcaattgacactttgaagaagttctgaacttacaagtttcttacattcaaaaacattaataaagaactcaaagtgtttgaactatataatctcaaaatagtaataatccgttcatatataccatattatccttcatattaaattgtatgcatttatttaactgttgacccacttcaagcaaagatccgctttgacaggcttttgatcagaaccatatacttggtctatggaatcataagagtgaagagttgcttgaatattatcagtatcttggatcttgaataagatcctatctgtccaagctggaaccctgatcttatggcttgtatcatagtcgctgcttcctacattgtacttgtaggttggtttaaaccctaaagttccttcagagtaacctttgaatatttcgcctctctccgcttcttgcaagagttg

SEQ ID NO: 100022 - DNA, 610 bp, Arabidopsis thaliana columbia
  unsure (1)..(610): unsure at all n locations
nnnnnnnnnnnnnnnnnnnnnnnnnnnnnnnnnnnnnnnnnnnnnnnnnnnnnnnnnnnnnnnnnnnnnctttttttgtttttttttttttagacgctctatctttcttaacaacaaaacaaaagatacatatttatattacaccaacaaagatcatagacgacaacaacaacaacttatgatctttctttttcactagtacaacaaacagagaccagaattttcccggtcaccagatcctaaaccccttcaaagaggttgttgaagagtgaccaccaagggacttgtcacattccgtttcccatctgaccaaactatatgaccagtctccacatttgtcgctcctggtgacaacttcacctctgtggtcttaaccctaacaacaaaactcagtttctgccccacccgtctgaacgatagcttctccggctcaaccgtcaccgtagtccctctaggcggcctaatcttaatctcggaaaccggatccgattcgcctacatttgtcacagtcctaatgaaatgggtcggcaattttactcccccaaatggngaancggcaggaacgnggggggggttnaatcccggggggcccggnngtttgacggaagcg

SEQ ID NO: 100023 - DNA, 2030 bp, Arabidopsis thaliana columbia
gttaacttaatagtatataaaataaaaatgcatataggttccgtaattaatctcttatcgtcacgagaggcacatctttttccaacatttgaccactctctctctctctctcaggacctttcggcgtaatttcgtcttcccctttgcttaacattttctttctttctttttgaccaaatattaaaaatatatccatttttattttatttttaattaaattcataatttgcatttgtaatagaaaaaaaaagaagagaataaatccaaaagagtgaagcaaaaacattaaagcggaaagaaagtggtaaaacaataatagaaacaggagaagcagaagtactacttcttcttcttctgctctcttctcagaccttgttttgtactttcttcttcttcttctttcttcttcttgtttgcgaactccgatatcttcttcactacctttgactccatttctttttcttcttcaggtgtaggcattgtcttgttatgagaagcaactgtagctggaagctcaagtatttgtttttagctgtggagcttgaatcttgatagttttcgacttctatgttattacctgtggggatatagaaacaatcatgggcttactctgcagtagaagtcgacatcatactgaagatactgatgagaatacacaggctgctgaaatcgaaagacggatagagcaagaagcaaaggctgaaaagcatattcggaagcttttgctacttggtgctggggaatctggaaaatctacaatttttaagcagataaaacttctattccaaacgggatttgatgaaggagaactaaagagctatgttccagtcattcatgccaatgtctatcagactataaaattattgcatgatggaacaaaggagtttgctcaaaatgaaacagattctgctaaatatatgttatcttctgaaagtattgcaattggggagaaactatctgagattggtggtaggttagactatccacgtcttaccaaggacatcgctgagggaatagaaacactatggaaggatcctgcaattcaggaaacttgtgctcgtggtaatgagcttcaggttcctgattgtacgaaatatctgatggagaacttgaagagactatcagatataaattatattccaactaaggaggatgtactttatgcaagagttcgcacaactggtgtcgtggaaatacagttcagccctgtgggagagaataaaaaaagtggtgaagtgtaccgattgtttgacgtgggtggacagagaaatgagaggaggaaatggattcatctgtttgaaggtgtaacagctgtgatattttgtgctgccatcagcgagtacgaccaaacgctctttgaggacgagcagaaaaacaggatgatggagaccaaggaattattcgactgggtcctgaaacaaccctgttttgagaaaacatccttcatgctgttcttgaacaagttcgacatatttgagaagaaagttcttgacgttccgttgaacgtttgcgagtggttcagagattaccaaccagtttcaagtgggaaacaagagattgagcatgcatacgagtttgtgaagaagaagtttgaggagttatattaccagaacacggcgccggatagagtggacagggtattcaaaatctacaggacgacggctttggaccagaagcttgtaaagaaaacgttcaagctcgtagatgagacactaagaaggagaaatttactggaggctggccttttatgaccttattattacatatctctagtaaattacctctccttattattataagaaaaactcgaaaactgaatgaccgtgtaatttatctttcgggacaaaagacttagcgattcaaaatctaatgtgtctcgatggctacgactagtttctattttatcattgtttttgttaacattcctctgtctttgacttcttattttttttctcatcaaaaacatctcattttgatcttgtttttggggttatattattattaaaatgaggcatccacatcccgaaatc

SEQ ID NO: 100024 - DNA, 556 bp, Arabidopsis thaliana columbia
  unsure (1)..(556): unsure at all n locations
cnnnnnnnnnnnnnnnnnnnnnnnnnnnnnnnnnnnnnnnnnnnnnnnnnnnnnnnnnnnnnnnnnnnnnnnccacgcgtccgccaaaaacccaaatcgaaaaatcgattctttagtcagaaaaaatgaggaccaaatctccatcttctcttaatctcaaggtcatattcataggttcctcaatcttgatcttgatcatcatctacttagcaagatcaaacatctcttcttcctcttcaaagccaatctccaaaacaaatctctcccaagaagaagaagaaactcagcataaacaagaaggatgtccaacaacacaacaatgcacaaagatgccactttctttatccgatgcattggttcattacgtcactagtaacgtcactccacaacaaacatttgatgaagtctctgtctcaaagagagtcttggacaagaagtctccttgtaacttccttgtctttggcttaggtcacgacagttttaatgtgggcatctcttaaccatggtggtcgtaccttgtttattgaagaagaccaagcttggattgcgatagtaa

SEQ ID NO: 100025 - DNA, 594 bp, Arabidopsis thaliana columbia
  unsure (1)..(594): unsure at all n locations
atgatactgccagctannnnnnnnnnnnnnnnnnnnnnnnnnnnnnnnnnnnnnnnnnnnnnnnnnnnnnnnnnnnnnnnnnnccacgcgtccgcggacgcgtgggctcagtctcaaagagagtcttggacaagaagtctccttgtaacttcctcgtctttggcttaggacacgatagcttgatgtgggcatctctcaatcacggtggacgcactttgttcctcgaggaagatgaagcttggattgagacagtaactaagaaattcccaaacttggaatcctaccacgtcgtatacgacacaaaagtgaaagattccaacaagcttatggagctaaagagaacagaggattgcaaagccgtgtctgatcctagagattccaaatgtgctctgtctctcaagggttttccagctgacgtgtacgagacgcaatgggatgtgataatggtcgatgctcccactggttaccacgatgaagctccagggaggatgagcgctatttacactgcgggtttattggctcgtaaccgttatgacggtggggagactgatgttttcgttcacgatattaaccggccggtggaggacgagttct

SEQ ID NO: 100026 - DNA, 549 bp, Arabidopsis thaliana columbia
  unsure (1)..(549): unsure at all n locations
nnnnnnnnnnnnnnnnnnnnnnnnnnnnnnnnnnnnnnnnnnnnnnnnnnnnnnnnnnnnnnnnnnnnntctttttttgtttttttgaaaatactattattatagattatcttttcgagttttggtctacatacactgcaaattttaactttaaatacacgtaagatcaataggtttagattctttcttatcctttactaaaaagatattaaaacaaggttacaacaacaacaatcaacatagaagaagaatcatctcatcaccacccttagttggagaagagagagtgaggaagaactttgtaagggttgagaattccctttgggtccagcaactttttaatggaagccattaatgcaacagtttcgggtgatttgctgtagaagatttcattagctttcattacacctaatccatgttccgcactgatgctttcacggtgctttgatgtccactcatagacataaagctctatcnaaacctaaagcttatcgttatattccgcggctgagatgtttaaatgtagatttccgtctccaaggtgacctt

SEQ ID NO: 100027 - DNA, 542 bp, Arabidopsis thaliana columbia
  unsure (1)..(542): unsure at all n locations
nnnnnnnnnnntatagaagagcttgacgtcgcatgcacgcgtacgtaagctgggatcctttagagcggccgcccttttttgttttttttaaccgttcaactggaatccattacatcagatcaccaacagcaacaaaacacaaaatttgaaaagccgtcaagttcttacatgatccatgcctactccgatagaaaaatggaaaagaaaaaaaagatcttccatttgtttagccttagagtacgtacatgcagcaaaagcatagtttctcttctgaaacttcttctctcactcaagcttgaatcttacgacgctgtctcagtcttccaccaatactactttgggtttggttcagcagacatctttcgcttgcttcttgtttctcggttctctttgtttgcagagttagccatcctctcagtttcactgcactgagcctcaagatcgatgatcacaggagttgctggatccacctctttcacatctaatggcttgagatcaccatcagtcactgaagtttggttgttcccagacgacaagaagca

SEQ ID NO: 100028 - DNA, 675 bp, Arabidopsis thaliana columbia
atagaagagcttgacgtcgcatgcacgcgtacgtaagcttggatcctctagagcggccgcccttttttgtttttttttttataccaacccagccttatttataccaattcgatctcatctcattttgttaccaacacatctcaagtacactacaatacaagtcatcttcttaaccagacaagaatcaaataagaaataacagtttcaaattaagtgcgttctaacactctattctatcttcagttttccgggcttttctggtgtggaagaaaatgtttaattgatcaacgaaaagcagattcctcacctcctccaattgtttccggcttctctccatttccaaatccaatttctcgaaatgaacaatcctatctcggatcttcttcatctcaacttcaacagtctctttgattgctccttctacctcatgctcttccttttcaattaaagactttgcatctgcccaagctctttcagattcgtttctagtggtttcaccactcgatgcagcattggcatcttgtcgatttgggtctctactggcgtttttgtcagccttgtagtctacatcaaataaagctctcactggccgtcgagctggttgttctgcacatttggggccgccaaagctgaaagaaaaacaacctgagccattattgggttgcttgcatctgc

SEQ ID NO: 100029 - DNA, 510 bp, Arabidopsis thaliana columbia
tacgactcactatagggaaagctggcccgcctgcaggtaccggtccggaattcccgggtcgacccacgcgtgcgcttctccggcgaagttgcgttagttaaacagagagtcatggccatgaaagctcccgatcccggcggatctggggaaattctcccgagcactccctctctttccgaaactacgtctggaggcgccgcagcagcttctaagtcggctcaattgccgtcttcttcttccgatatcgataatattcacgtacctagctactccagttggttttcatggaccgacattaacgattgcgaggtccggtcactgccggaatttttcgattcgagatcttcatccaaaaaccctaagttttatctctacttgaggaactcgattattaagcagtacagagacgaccatcctcggaagattagtttcactgacgttcggaggactctccggtcagtgatggtggcctctatttcggcgcggctttgattcctcaatcatggggac

SEQ ID NO: 100030 - DNA, 550 bp, Arabidopsis thaliana columbia
atggtggagagattgatttagatacagagtttgaatctatcttgaggagaagacgaagaagctcagggaatatattgcagttgcttcaagggattcgtgcagggattgcttctgagtatgaaagctctgataacaattgggataattctcgagagagggatagagttataatgattaatccgtataaccaatcgctagttgttccttcggatcagaatcagaatcatccttcattgacttcacttggagattacttcattggacctgggttagatcttttgcttcagcatttggctgagaatgatcctaataggcaagggactccacctgctcgtaaagaagctgttgaagctttaccaacggttaagataatggaacctttgcaatgttctgtttgcttggatgattttgagaaaggtacggaagctaaagagatgcctcgtaagcataagcttcatgctcggtgtattgatccctggctcgagcttcatagttcttgtcctgagagtcgttttgagcttccttctagtgctgatgatgatgatgagac

SEQ ID NO: 100031 - DNA, 550 bp, Arabidopsis thaliana columbia
  unsure (1)..(550): unsure at all n locations
gattaannnnnnnnnntatagaagactttgacgtcgcatgcacgcgtacgtaagcttggatcctctagagcggccgtccttttttgtgtttttttataacacaacgtaaccaaaattttatatgtacaccttaaacagtactgttacaaactccagtacaccataaagagacattgaaacacgaacaccaacaacacacaagtaacacataggcaaagtgcgtgaaagaccttatttaccatttacacacgtaaataacaatttctagaacagagcttttttttagctcatttttattagactgagactttgagaaaatattaaaaacttcacttgaaaatgggcttgacatggactccaacttggtgaattatgtctgcacccgctttgccatggaacccgacgaccttggtggccatcttctttgagtaggacgcttttggcactttcaagtccaaaaggcggagaggttcgttggttcgtcgtgaatctaagcatcgctacaatttcaccagcgaggaaacagtgtaccttattaggctgagtgata

SEQ ID NO: 100032 - DNA, 541 bp, Arabidopsis thaliana columbia
  unsure (1)..(541): unsure at all n locations
nnttaggtgacctatagnnagactttgacgtcgcatgcacgcgtacgtaagcttggatcctctagagcggccgccctttttttttttttttctcttttaaccacgattttctttcagtatcttcagatcctttctgattcaagtttgtacgaatttagcatgcaattactctacgtcaactaaaagccaacgataagctagaggaaaacatgaaggatttagccgacaacatcaccttgatgaataactggcatcatacagatataatggacagacaaggccctcgattatatgacggatctacagaattattttctcttctggggggcgggattctccctgaaggggaactgtccccatggagcacttgacagttacgagaaagcccctaaaccctattaagtgaacctggatgcatactacgacacaaagaaaggagtgatggatctgaacgacgatggtctgaagagagactcgtccagcacttgagagcctgcgtatacaccagccgtcttgtactgtggcagagctagtctgctag

SEQ ID NO: 100033 - DNA, 513 bp, Arabidopsis thaliana columbia
  unsure (1)..(513): unsure at all n locations
nncnnnnnnnnnnnnnnnnnnnnnnnnnnnnnnnnnnnnnnnnnnnnnnnnnnnnnnnnnnnnnnnnnnnnnnnccacgcgtccgcccacgcgtccggttgttggtgaacctgctcttcctagaactgagattgtgaggcaattgtgggcttatataaggaagaataaccttcaagacccgagtaacaagcggaagatcatctgtgatgatgcgttgcgtgtggtttttgagactgattgcactgacatgttcaagatgaataagttgcttgctaagcatattctcccgcttgatccatcaaaggactctggtcaagcaaaaaaggcaaaaactgaggtggagactaagactgagaccaccgagcctattagttcaactgctattagttcaactgttacattatctgagccacttggtaagttctttggcactggtgagacggagatggcagacgaagagattattcgccgtgtttgggaatacataaaactcaacaatttagaggacccagt

SEQ ID NO: 100034 - DNA, 669 bp, Arabidopsis thaliana columbia
  unsure (1)..(669): unsure at all n locations
nnnnnnnnnnnnnnnnnnnnnnnnnnnnnnnnnnnnnnnnnnnnnnnnnnnnnnnnnnnnnnnnnnnnnnnnnnnnnnnnnnnnnnnnnnnnnnnnnnnnnnnnnnnnnnnnnnnnnnnnnnnccagaaaactctttattatgtcttggtgctctcaatcgcattggtataacatatatatatacaacctagattatgtttcacctaatttgaataaataaatattctaaataggaaatatatatatacttattcatggttatctatttcttattcaaattaggaaaaacatattctaaattgcatatatatacattggatcaatgctcttgagatcaacaagacataagaaagagttttcccccaaactcttctctagtttctacatcttatgagtcaagaatatctgagaattaactttgtaggttaactccttctggtcaggtcgaaatcctctaatacgtagctgttggtctccatcgggttctttggaaatctgctgatttgcaactttaatatcatcttcatctgaaaagatttttggaaccaattccacttctccggggatccctgatgagttaagttttggggaanagtggattggagcttaatctcgggtgggctggnngctctgaaggccaatgattgggagctaggtggtcccgggac

SEQ ID NO: 100035 - DNA, 426 bp, Arabidopsis thaliana columbia
  unsure (1)..(426): unsure at all n locations
atttnnnnnnnnnnnnnnnnnnnnnnnnnnnnnnnnnnnnnnnnnnnnnnnnnnnnnnnnnnnnnnnnnnnnnnnnnnnnctttgtttttttttttgattatgaactagaatgtactattacattgcctactactactagaataagggttcttacaataacgttgcttatgccttatgttatggaaacaatgataggctaataggatctggaacattacaaagatacaaagaatttttccatagcttaaccaaattgtttttgattcactgatttgggttgagagaaggaaatgctggaatagaccgtagtatcagctttccggccattacctcttctccttaggattgaccctgactccgaggaagccgggttgaggggggagagactctctttgctggttggaagagatgggccttggatgtta

SEQ ID NO: 100036 - DNA, 2173 bp, Arabidopsis thaliana columbia
  unsure (1)..(2173): unsure at all n locations
cccgtnnnnnnnnnnnnnnnnnnnnagaagaagaatcgtggagatggcttcgaccccgaagcttaccagtacaatttcatcatcttctccatctcttcaattcctctgcaaaaaactcccaatcgcaattcatctaccatcatcttcttcctctagctttctctcgcttcctaaaaccctaacctctctctattctctccgtccccgtatcgccctactctcaaaccaccgctattaccactctcgccggttttctgtttgtgccagtaccgataatggagctgaatcagaccgccactacgattttgatctcttcactatcggtgccggaagcggcggcgtccgcgcctctcgcttcgccactagcttcggtgcatccgccgccgtttgcgagcttcctttttccactatctcttccgatactgctggaggcgttggaggaacgtgtgtattgagaggatgtgtaccaaagaagttacttgtgtatgcatccaaatacagtcatgagtttgaagacagtcatggatttggttggaagtatgagactgagccttctcatgattggactactttgattgctaacaagaatgctgagttacagcggttgactggtatttataagaatatactgagcaaagctaatgtcaagttgattgaaggtcgtggaaaggttatagacccacacactgttgatgtagatgggaaaatctatactacgaggaatattctgattgcagttggtggacgtcctttcattcctgacattccaggaaaagagtttgctattgattctgatgccgcgcttgatttgccttccaagcctaagaaaattgcaatagttggtggtggctacatagccctggagtttgcggggatcttcaatggtcttaactgtgaagttcatgtatttataaggcaaaagaaggtgctgaggggatttgatgaagatgtcagggatttcgttggagagcagatgtctttaagaggtattgagtttcacactgaagaatcccctgaagccatcatcaaagctggagatggctcgttctctctgaagaccagcaagggaactgttgagggattttcgcatgttatgtttgcaactggtcgcaagcccaacacaaagaacttagggttggagaatgttggcgttaaaatggcgaaaaatggagcaatagaggttgacgaatattcacagacatctgttccatccatctgggctgttggggatgttactgaccgaatcaatttgactccagttgctttgatggagggaggtgcattggctaaaactttgtttcaaaatgagccaacaaagcctgattatagagctgttccctgcgccgttttctcccagccacctattggaacagttggtctaactgaagagcaggccatagaacaatatggtgatgtggatgtttacacatcgaactttaggccattaaaggctaccctttcaggacttccagaccgagtatttatgaaactcattgtctgtgcaaacaccaataaagttctcggtgttcacatgtgtggagaagattcaccagaaatcatccagggatttggggttgcagttaaagctggtttaactaaggccgactttgatgctacagtgggtgttcaccccacagcagctgaggagtttgtcactatgagggctccaaccaggaaattccgcaaagactcctctgagggaaaggcaagtcctgaagctaaaacagctgctggggtgtagagaaggttgcaaaaaagattgtatttacggcattggagccccctgataaggagaacattgtgtctgtgaagaagaagcttttcttttggcagagaatattttttcataatgtcgtgtgaagatatgatcgctgtcctgcaatacttttgatcgtttgacacacgaccaaattcctcgagagagagaggttgtaactattccgaaagagctctaaaactgaagctttcagttcttgtgacatcataatgaaggctgtatagatataacagtttcgagttttatttggatttgtagtatttttgttttctattgtgttgaacttgtctctttgaagtcaccacgggagacctcatatcagcatcgttggcggccgcgaattcgatatcaagcttatcgataccgtcgacctcgagggggggccnnnnnnnnnnn

SEQ ID NO: 100037 - DNA, 816 bp, Arabidopsis thaliana columbia
  unsure (1)..(816): unsure at all n locations
atttannnnnnnnnnnnnnnnnnnnnnnnnnnnnnnnnnnnnnnnnnnnnnnnnnnnnnnnnnnnnnnnnnnnnnnntcctttgttttttttttttttttttgaagcatgacagacaaatttacattacagaagaagccgtgaaagttctctaaaccagaaactgaaattgtatacaactcacatgaagaaaccagcttcataattttttttgtaaaacactcaaagagacttgtattcaaaagttgtcctcaaatcatattcatacaacatctaaagagaaaggaaaggagggttaccagtggactcggatttccatggttttacaaatcaagcttctcggtgtatagacagaggagaaggtggagtcagagcaacatcgcttttaacctcttctttctctctaggtgtctgtacatttgggctatgtgcctctttccaaaacctgctcgggctaggagaactagctccacttatgttcttaggggagctcccgagaccaaaccgaggatcaaacacaccgtcttcacgaggcaaaggtgataccaaattcggagataccatattcttctcttcttttctttggcagaatttgtcttccactatctcataagagtttgcagtcctaacttcttgtgctaaagagcaccaacaacaacataaccagagcgcacaatcagcaatcgcggctctaccgaaacagaaattattaactcggtaatttgaatcttcctcatctgaattctccagaatccaccatagagcanaccaacacacaaagaaagattccagatatccctaacgcctccctgaccgt

SEQ ID NO: 100038 - DNA, 437 bp, Arabidopsis thaliana columbia
agcacaaaacctaactctttctctatacaagagcgcaagctcgaaggcgctcttgttctttcttcattttctccttaacaatcaccctcatagtaactttaaaactctctgtttctagtaattcacacacaaaatggctattaaactagcaattctatttaccacatttgttctttttagcctcgccgacgctagaatccccggtatttactccggcggcgcatggcaaaacgcacacgccactttttacggtggcagcgacgcctccggcacaatgggaggagcttgtggttacggtaacctatacagccaagggtacgggaccaacacggctgctttgagtacggcgctgtttaacaatggtatgagttgtggagcctgctttgagctaaaatgcgccaacgaccctcaatggtgtcactcaggtagtccttcga

SEQ ID NO: 100039 - DNA, 553 bp, Arabidopsis thaliana columbia
cagctctctacgactcactatagggaaagctggcacgcctgcaggtaccggtccggaattcccgggtcgacccacgcgtccgggctgctttgagtacggcgctgtttaacaatggtatgagttgtggagcctgctttgagctaaaatgcgccaacgaccctcaatggtgtcactcaggtagtccttcgatcctcatcaccgcaaccaatttctgcccaccaaacttggctcagcctagcgacaacggaggatggtgcaacccaccacgtgaacactttgacctagccatgcctgtcttccttaagatcgctcaatatcgcgccggcattgtccccgtctcataccgcagggtgccatgtagaaagagaggaggcataaggttcacaatcaacggtcaccgttacttcaacttggttctgatcactaacgtggctggagcaggagacatcgtgagggctagtgtgaaaggatcacggactggttggatgagtttgagcagaaactggcgacaaaactggcaatctaatgctgttttggttggtcaagcactctc

SEQ ID NO: 100040 - DNA, 1172 bp, Arabidopsis thaliana columbia
  unsure (1)..(1172): unsure at all n locations
tttcatttcaactccaattttgattatcttggtttcgaatatncctcatttnctccaatcacaggacgaaaagtaatcatctttttgtcttttcttctcccgcgcgtccctacaatggactctccggtatcaaaaaccgatgcatcgaaagagaaattcgtggcttcacgaccatcaacggctgattcaaagacgatgagaggttgtggactcgcgaatctggcatgggttggtgtagataaagtagagcttcgtcagaggttgatgatgcctgagtatcttcgtctcgctatgcgtgactgtatcaaacgcaaagattcctcggctattcctgatcatttacttcttcctggtggtgctgttgctgatatggctcctcatgctcctatggttgttttcattaaccccaattctggtggtcgtcatggtcctgttcttaaagagaggcttcaacagttggggagcgaggaacaggtgtttgacctcacggaagtgaagccgcatgagtttgttcgatacgggttggggtgtttggagaaagtggcagcggaaggagatgaatgtgcaaaagaatgcagagcaaggttgaggattatggttgcaggaggtgatggtactgttggttgggttcttggatgtcttggagagcttaataaagatggaaagtcgcaaattcctcctgttggagttattcctctcggtacagggaatgatctttcaaggagttttggttggggtggttcgtttccttttgcgtggagatctgctgttaaaagaacactccatcgcgcaagtatgggtccagttgctagacttgacagctggaagattttagtgtcaatgccatctggagaagtcgtagatcctccttattctttaaaacccgctgaagaaaacgaacgttgatcagggtttggacgcgggaattgatgcgcctccacttgcaaaggcttatgaaggtgttttctacaattacttaagcataggtatggatgctcaagttgcatatggcttccaccatcttcgcaacactaaaccatatcttgctcaaggccctatttcaaataagattatatattcaagttttggttgcagtcagggttggttttgcacgccttgtgtcaacgatccaggtttaaggggacttaggaacataatgaaaattcacatca

SEQ ID NO: 100041 - DNA, 490 bp, Arabidopsis thaliana columbia
gaaaattcttcgaatctgaaatccgatcggtgagcagaaaccctaatttcgtacagtctcatgattgagatttgcgtcttctacactctctgttttcactcctcctgattcttctctcaatctcttatccgatcgggctcgcttgttctgatttcgtgagggtgaacatggatggaaacaaagacgatgcgttgaagtgcttgaaaatctgcaaaagtgctatggaagctggagatcgacctcgcgctttgaaattcctggctaaagctcgtcgtcttgatccaaatctcccgatcgatgatctcgtatctgagcttaacaacaacaaatcagacgaaccaggatctgcaaaatcgcctggatctgcagcagcaaaggattcttccaattcttcagatcggccttctttacgtcaacgtggatcgtcaacaacgtcatcgtcttcttcgatgtcctacactgaagaacagatctcaatcgtgagaaagat

SEQ ID NO: 100042 - DNA, 432 bp, Arabidopsis thaliana columbia
aatgttggaaaaacacacaaagcaacttcttcttcttgttcggcttttatcatctctgaaaattgctttatttggttgaattcattggattgttgatcgagattggtttactgattgatcgaaagtatggaggaagatcgtggggaagcgatcgttttagatatttcgccggagattaataatactccggcggtaatgatgagagttccacggaggattcgtgagaggcttttgtctgactgtagtaataagaagacagtatcttctgttcaagatattgaagacaagcttcttcatgcccatctacgaagacagcaattttatcataacgtttcgagaaaggctcgtgctaaacctagaagtccttcacgatcatctgatgaagaacttggccaacgaatcgaagcaagacttctggctgctgaacaaaaa

SEQ ID NO: 100043 - DNA, 948 bp, Arabidopsis thaliana columbia
  unsure (1)..(948): unsure at all n locations
agctcnnnnnnnnnnnnnnnnnnnnnnnnnnnnnnnnnnnnnnnnnnnnnnnnnnnnnnnnnnnnnnnnnnnccacgcgtccggttgtgataaagggtttgttgaagttctggcctatcacgaatagtcagaaggaagtgatgtttctcggggaggtcgaagaaattgtagaagcaatgagtgtgatggagtttcaaaagatcatggtccctttgttcttgcggattgcttgttgtgtcaccagttcccactttcaggtttctgaaagagctttattcttgtggaacaacgatcaaattgtaaacttgattggacataaccggcaagccatcctaccaatcatgttcactgctttagaaaagaatgctcagaaccactggaaccaatccgtgctaaacttaaccttaaacgtacgaaaaatgttctgcgaaatggacgaggctctgttcatgtcttgccacgcccgctttaaggaggacgaagcaaagcaatgttctgctgcggaaaagaggaaagaagtatgggcaaggctagagaatgcagcaagtatgaagccgataacaggaaagactgctgttctggtaactcctcgagcaacctccatcgcctgctaaatagcgtttaaaccaattcacagacagtttatccaaagcaacaacatcgagaagatgatggagtggctgttgcttaagctatagtcttgggaacttttcatcgaggttgatctctgtaatattatataactttgatgttgttagctgtgtgggttttaatgctaattctattgctttcttttaaagcaatgaaaccatgctgcagatttttatcaaactctttgtatcaatcaattaagtttatatatcctttttctttcaaaaaaaaaaaaaaagggcggccgctctagaggatccaagcttacgtacgcgtgcagtcgacgccataatcttc

SEQ ID NO: 100044 - DNA, 862 bp, Arabidopsis thaliana columbia
  unsure (1)..(862): unsure at all n locations
ttaggaacnnnnnnnnnnnnnnnnnnnnnnnnnnnnnnnnnnnnnnnnnnnnnnnnnnnnnnnnnnnnnnnnnntcctttttttttttttttttaagaaaaaaacttgcctattaattaatgagattaccaacaacgtagcgttgaacagtttcagatttgaccaatgaacccctgttccctcttaatagcatcaaatctccaagaattggtttaaaattaaagaattctgagtttgttttcatgcagtagagttgtttggagagcaaaagtctgagaggacatgccaaacccattgcagaaatcgctgcatggttacctgtcaaagatcaaaaaagagacagggaagctgcaactgtcttcctcacattcattctcatcctcaaagaattgggtgcttggtaagcatcccaagaagctctccttctccttcaagcacagacgacgcagcagcaagaccagattcagcaaagaagaacccgtttaccaccaggactctgctcacgccgccaccttgtccgacattgatcgttttcttgaggaaaacttcaaatccctctgcatcagagacgaccaggaggatgatcagcatcaagcccgggtgaccaaaaacatggagaaaagggagtcatcatcagacgacagtgatgatgatgatgatgacgacgactatcgtcacagattcgagaggacatggngacatgccgtctacgactccncgaaatcagccccggatttgctgagaacagagaggctatctcctccgnctggatcttcggagggcaggcctagcatggananncacgtcacatcgtcggagaggcaatcgagatccacccttgtgctgccggaaactgctcgcg

SEQ ID NO: 100045 - DNA, 471 bp, Arabidopsis thaliana columbia
ctcactctctcactgtcggcaaactaacttattcacttttccggcactgattctgctcgggaaaaacaactccggcacaaaatgcagctttttccagtcatgttagccacactctgcattgtcctgcagcttctcattggctcgtcagctttggctacgacaaatcgccacgtgtcaaactctcattggcttcccgcagtagctacatggtacggaagccccaacggtgacggcagcgacggaggagcgtgtggttacggtacgttggtggatgtgaagccgttacatgcgagggttggagcggtgaatccaattctcttcaaaaatggtgaaggttgcggagcttgttacaaggttcgatgcttggacaagagcatttgttcccggagagccgttaccgtcataattaccgatgagtgtcccggctgctctaaaaccagcactcactttgacctcagtggtgccgtcttt

SEQ ID NO: 100046 - DNA, 795 bp, Arabidopsis thaliana columbia
  unsure (1)..(795): unsure at all n locations
nnnnnnnnnnnnnnnnnnnnnnnnnnnnnnnnnnnnnnnnnnnnnnnnnnnnnnnnnnnnnnnnnnnnnnnnnnnctttttttttttttttacctcatgaagaacaacttcaaaaaaacacggacattatcatcatcacaaacgtgtaaaccaggctttctttttaaaccctggaaacaacacctcggatattttttttaaacattcaaccacacataacttagatgatcgaagataattacccatcgatgcattgaaacccttgacaaatccaaagccagattccaaagagaacaaggcagatacagagatcaaacatcaaaacaatccaaacatgtttcctccatatctgctttgccttttgtctatgatgatgatcatgaatcaaaccattcctcactcctttacctcctcctcctaggtccatcttcttctcattccaatgaccttcacttttcgcttacgtctgcaatctcttcttggtcttcaacaccctcaacggctttcctaaaagcgggatcaacgcaccgccttttcgtccctgggacgaatcccaactctgatattactctaatctccctcgctatactcctcggtgtccaaactccaattcaatcctattaaattacaccatagcagcaatctcacaaaactggatcagctttattgagacaggttagtcgattatcacgatccgagtaatccgctccatanaacttgagctgattcatcattgatagcatacaactcgttcgtacacctattaaatccgaatcaaacatcatcagataagga

SEQ ID NO: 100047 - DNA, 513 bp, Arabidopsis thaliana columbia
aataccactcactttagggaaagctcgtacgcctgcaggtaccggtccggaattcccgggtcgacccacgggtccggaagtcaacaaagttctcaatgtctgttctcttgaaaaagacctacaaatgatggagtttggagataagactgagattggagaacgcggaatcaacctcagcggagggcagaagcaacgtatacagctcgcacgtgctgtctatcaggaatgcgatgtatacttgctcgacgatgtttttagcgcagtggatgctcataccggttcagatatattcaagaaatgtgtaagaggagctctgaaaggcaagaccgtattactcgttacccatcaagtggatttcttgcacaacgtggattgcatcttggtgatgcgggatggaaagattgttgaatcaggaaaatatgacgaattagtcagctccggattggattttggggaacttgtggctgcacatgagacgtcaatggagctggttgaacccggtgcagactctgc

SEQ ID NO: 100048 - DNA, 561 bp, Arabidopsis thaliana columbia
  unsure (1)..(561): unsure at all n locations
annnnnnnnnnnnnnnnnnnnnnnnnnnnnnnnnnnnnnnnnnnnnnnnnnnnnnnnnnnnnnnnnnnnnnnnncttttttttttttttttagtctgatacagatgtactttgttcattcaaataatggtctacaaaaagtaatttaaagaatacaagttttgaagagttgttcatttcctctttctctgtttcaagcagcaacaaaaattgcactttgtatagctattacattgcattttctgacaaacctatttcacaaagatataaatatgaatgctacggcaagctaataattttacagatttctttgaagtgatcatggaagggactgtttgcaaaacttttttcaacgactagtttgctgcgaggctgtataaatttgtcgagatagcaataatgctagtggcaacagcaagaacaagcattattgcagctacgatcttctctcttgaggttgatacaccatggatattccttagaacaatggcggctggaaatatgaatgctatggacgacgtcccggtgggccgccctggnagtncaggccnggnccntcant

SEQ ID NO: 100049 - DNA, 548 bp, Arabidopsis thaliana columbia
cgttagctatcatatcaccttctaaccccccccgatattattaggtcgacctatagagatctatgacgtcgcatgcacgcgtacgtaagcttggatcctctagagcggccgccctttttttttttttttttttttatatgtaacctaaacattcaacacaaaaattgtacagcacatttcaaaccatattaagcttaccaactctcactaatgaaaactacaaaagtttaaccaacggatctctacaatgaattattactctgaccaaaacttcacaaaggctgtcacgaaagatttcagaactgccaagagaggatttgtttcttgtcttcccatattagattcccctttcctcgattcaggtttaattctgtttaatgttgcattgctttctttttgagagctggaactatctggagcatcaattttccctttttccatgggtgccttcttctctacacttgcgacttcattcccggcatagctactcacagggtccacttttgctctgtcgtcttacgacttcccgactaagggctaaatgaggg

SEQ ID NO: 100050 - DNA, 402 bp, Arabidopsis thaliana columbia
tttaggacacactatagaagattctatgacgtcgcatgcacgcgtacgtaagcttggatcctctagagcgtgccgccctttttttttttttttttgtgtgaacttttttttcttttaaatcttaaatatttgttactgataataaagaataaatttagccgggggttctccttattttaatgcaaataaaaatcaactacatccggcaaaacaaaagaaattaaaactcttgtgtttcacaatacatatcatcaatacaatccaaaatcattaccatcctcttcttcttcctcgtcctcttcatagaatttctcgccggtttgaaaatctgtcttcatgtcctttgattctacattgccttcttcttcatcctcttcatcttcatgttcattttcaccattc

SEQ ID NO: 100051 - DNA, 587 bp, Arabidopsis thaliana columbia
  unsure (1)..(587): unsure at all n locations
tttaggacacacttagagatctatgacgtcactgcacgcgtacgtaagcttggatcctctagagctgncgcccttttttttttttttttttttttgaataacaatttttttactccaagcaaagaagaaagatagaaagaaagaaagaagtcaaaggttttgggacaagatgaagttaggaaagtgagtaaacgaacaagcattgtttttttctttatacaaaagatccgatctttctcggagaaatttcagtgattagattcaaactaaattcccaaaagaagttgaaagaagatgaaagagagagaagggtcgtcgatgtctggtctacttgtttgttagtagagctttattcttgtctggattggtgcacggcaaatcggacacatttgaagatctggtccacactcgcaacaagtctgatggccacaaccaaaggccatgtctttcgggttgctcaaacaaatcggacatagctggttatcagaagcagagcttgtagggggtgggacgggactagaccttacgtgatagccttcagttggatgaggaggaacactcggtttgaaacttggaagacgtgaagg

SEQ ID NO: 100052 - DNA, 422 bp, Arabidopsis thaliana columbia
cccacgcgtccggttatttcaattcacgttggtcaagccggtatccaagtcggtaacgcatgctgggaactcttctgcctcgagcacggtatccaacctgacggtcaaatgccatcagacaagaccatcggtggtggtgatgatgccttcaacaccttcttctccgagactggtgcaggtaaacacgtcccaagatgtgtcttcctcgatctcgagccaaccgttattgacgaagccagaaccggtacctacagacaactcttccatccagagcaactcatctcaggtaaagaagatgctgccaacaacttcgccagaggacattacaccattggtaaagaaatcgttgatctctgcctcgatagaatcagaaagctcgctgatcaatgcactggtctccaaggtttcctcgtcttcaactc

SEQ ID NO: 100053 - DNA, 543 bp, Arabidopsis thaliana columbia
  unsure (1)..(543): unsure at all n locations
nnnnnnnnnnnnnnnnnnnnnnnnnnnnnnnnnnnnnnnnnnnnnnnnnnnnnnnnnnnnnnnnnnnnnnnnnnnnctttttttttttttttgatcaagaattgaaccaagcccaaatagaaccaatgtagaagattacaagaaagaattttgttcatgtaaaggatctagaagctacacctttggaacatacaattacaataaaacaatgggattatacaatgtatgaggttgcttttttctatcttccaattgtctatgattaacatccgacggagcaaagtgtttgtcttttctcttggtagaggcatttacatgtaatcactggtcgtgtcggcactaccagcacgttgcgatggatcaactccgacagttctcttgctcatgttagctctctgcactaacacaactagagcctgcacaacttcagacattggtggtctaaactccggctccggctggacacagagagcgataacatctgcaaatcgagaaagggatttgacaggataaagccctttaagagctggatcaaccattttg

SEQ ID NO: 100054 - DNA, 622 bp, Arabidopsis thaliana columbia
  unsure (1)..(622): unsure at all n locations
cnnnnnnnnnnnnnnnnnnnnnnnnnnnnnnnnnnnnnnnnnnnnnnnnnnnnnnnnnnnnnnnnnnnnnnaccacgcgtccggaaagatcaaatctttgacgacatcaaggaggaggatttggtaagctacagataaaaacaaaagctatgatatgagataatgtagtccaccaccacaccaaattcccccttcaccgtctctcttcgtcggtgattcacattccgatttggtgtcttttttactcttaacaagtcctcaaaaaccctacttttactcgagattttgtctccgccgccgagtaccaagtgcctcccgatctacgccccaatccctaaatggctacggaggctacaaccgtacccaaattccaggaacctgatctccggcaggtttctcagacaccggatttcaaaccggaaatcgctcacgatggtcttaagttctggcaatttatgattgctggttcgattgctggctccgtcgaacacatggcgatgtttcccgtcgataccatcaagacccatatgcaagcgcttcgaccatgtcccttaaaacccgtcggaatccgggaagctttccgttcgattatccaaaaggaaggaccttcagctctgtatcg

SEQ ID NO: 100055 - DNA, 502 bp, Arabidopsis thaliana columbia
  unsure (1)..(502): unsure at all n locations
nnnnnnnnnnnnnnnnnnnnnnnnnnnnnnnnnnnnnnnnnnnnnnnnnnnnnnnnnnnnnnnnnncttttttttttttttttttttggcctaaaaaaagttttccttcacatacaatgattcaagtactctacaaaatatttcaactttccaactccaaaaaaccagctatagcctatagtagaagaagaaaggtgagtttgagacgtaaataacaaaatcaatcgaagtcaagatttgttgtttcttcattttttccagacacgaattgtaccatcgaccgaagaagtcaacatacagtcttccttcgggtggtaactcacgcttgtcaccactaaatcgtgagctctaaatttcgatagcacttttgcatctaccaaatcccaaaagaaaaccaatccatcctctgatcctccaatcacatgtgcatccgaattcgtgaggcaacaatccgttttaaatgacttggaaatatgacctttatagacttggagtagctctc

SEQ ID NO: 100056 - DNA, 512 bp, Arabidopsis thaliana columbia
  unsure (1)..(512): unsure at all n locations
nnnnnnnnnnnnnnnnnnnnnnnnnnnnnnnnnnnnnnnnnnnnnnnnnnnnnnnnnnnnnnnnnnnnnnnnnnnnnnnnnnnnnnnnnnnnnnnnnnnnnnnnnnnnnnnnnnnnnaaggtaataataatagatttataaacagcattttaatatactgatatattaaacatgagtttacaaagctaaacattaatggcaacaatttggaattccaataatcctgaagtcctcaagggtgggcaaatattttttgttcctttcaggttttgcttgaattagagtaaagaaaaaacacattttatgccatcttaatcaatcttttaggtaaacattgaaaaaaacgaaccagagctctccgttgaagccaccataattgaactttctggggaagccgttgaagcctccgtaaatgaactttccggggaagccgtctccgttgaagaagacaccttaatcgaactttccggagaagctgtccccgtgtaagccatgctaattgaactttccgg

SEQ ID NO: 100057 - DNA, 658 bp, Arabidopsis thaliana columbia
  unsure (1)..(658): unsure at all n locations
nnnnnnnnnnnnnnnnnnnnnnnnnnnnnnnnnnnnnnnnnnnnnnnnnnnnnnnnnnnnnnnnnnnnnnnnnnnnnnnnnnnnnnnnnnnnnnnnnnnnnnnnnnnnnnnnnnnnaaggattaataacgttacccttatttatccgaattaactatagtacatacgtaattgcttacgtaacgttataggcgattattccatggggggatttgacccaaaaaaaaaaaaaaaaagataatggcgtgaaaagctcgttgaaagtaaaatattaaggcgttaataagtgttgatttatagaatattctctccttcaaatgggcttaacgacgctataacccccgtcaacagccagattctgaccgctaacgtaagccgaatcatccgaagccagaaacaaagccgcctttgccacatggcgagccttaagcaccacacctttgagaatccccgtggctgcgctatattcctccaccatcctcaccgtttcctcgtcacggctatttatcgccgtcgccaccgcgtatggtgcaacgccgttgactctaatcccgtacttccctagcccgccacaagccgatttaaccagcccgagaagagcgtgcttagacgccgtgtacgcgtgaggtcctggaccaccgatctccgacgcgacgctg

SEQ ID NO: 100058 - DNA, 917 bp, Arabidopsis thaliana columbia
cttacttcctctgtcttccttcgcttccctcttctctcaccacaatccgagagagagacagtactgtaatccaagtgagagagagagagaaatgaaaatgcagacgaagaagctctttatcaccattgtctcctttcttctctatgctccattgttcttatcttcaccagttcctgaccctgaatctgtcgttgaagaagttcacaagagcattaatgcgtcggttgcaggaagaaggaagttaggttacctctcatgtacgaccggtaacccaatcgacgactgttggcgttgtgaccctcactgggagcaacaccgtcaacgtctcgctgactgcgccattggattcggcaaaaacgccatcggtggccgtgacggtcggatctacgtggtcaccgactcaggaaacgacaacccagttagccccaagcccggaactttaagacacgccgtggtccaagacgagccactctggatcatcttccaacgagacatgacgattcagctcaaagaagagctaatcatgaactcattcaagaccatcgatggccgtggtgcttccgtacacatctctggtgggccttgtataacgatccagtacgtgaccaacattatcatccatgggattcatatccatgattgcaagcaaggtggcaacgctatggtgcggagctctccacggcatttcgggtggagaacgatatcggacggtgatggtgtctctatctttggaggaagtcatgtttgggttgaccattgttcgttctctaactgtgaagatggacttattgatgctatcatgggctcgacggctatcactttgtctaacaatcatatgacacatcatgataaggtcatgttgcttggtcatagtgatacttacagtcgtgacaagaatatgcaagttaccattgctt

SEQ ID NO: 100059 - DNA, 511 bp, Arabidopsis thaliana columbia
  unsure (1)..(511): unsure at all n locations
nnnnnnnnnnnnnnnnnnnnnnnnnnnnnnnnnnnnnnnnnnnnnnnnnnnnnnnnnnnnnnnnnnnnnnnnnnnnctttttttttttttttacgaataggtttggtttatgtccaaactttttaacattattcgtcatcaagaactttcttattagaaggaaaaaaactttaattcgaaacaagtgaaaattacaaaacccaaaacaatgatgataatacagctacgtaaccacagcgagtttctccatacagtgttatcgctctcttgacttcaaagagtattgtccatacaaaacttacacattgtcattacgcctgtttattgaacgagtatctgtttgggtgttgagggttcctctgctttatttttccgttgttcactaggggattgcttgctactagtactgctctcaaacagcttgctgctctttgcgattgtaaggataagctcgagatggtttcgctgttgttcctgcatagcaaagcaacaaccagctttcatgagctca

SEQ ID NO: 100060 - DNA, 1758 bp, Arabidopsis thaliana columbia
ctttttttcattttgttctgagggggcttttgtgttgacggtggtgggaacaaaggaacatcgtatccattctgtccgggaaacacagcaatgttcatttccgacaaatctcgtcctactgatttctacaaagacgatcatcacaattcctccaccaccagcaccacacgcgatatgatgatcgatgtactcaccactaccaacgaatcagtagatctacaatctcaccaccaccacaatcaccacaatcatcatctccaccaatctcagccacaacaacagattctcctcggagaaagcagtggagaagatcacgaagttaaagcaccaaagaaacgagcggagacatgggttcaagacgaaactcgtagcttaatcatgttccgtagaggtatggatggtttattcaatacatccaaatctaataaacatctctgggaacagatttcgtctaagatgagagaaaaagggtttgatcgatctccgactatgtgtactgataaatggaggaatctgttgaaagagtttaagaaagctaagcatcatgatagaggaaatggatcggcgaagatgtcgtattacaaagagattgaagatattcttagagagaggagcaaaaaagtgacaccaccacagtataataagagccctaatacaccacctacatcagccaaagttgattcctttatgcaatttactgataaaggttttgatgatacgagcatttcttttggatccgttgaagctaatggcaggccagccttaaaccttgaaaggcgtcttgatcatgatggtcatcctcttgcaatcactacagcagttgatgctgttgcagcaaatggagttactccttggaattggagagagactcctggaaacggtgatgatagtcatggtcagccttttggtggtagggtcataacagtgaaatttggtgactatacaagaagaatcggtgttgatggtagtgcagaagcaatcaaagaggtaatcagatctgcttttgggttaagaactcgaagggctttttggttagaagatgaagatcagattattcgctgtcttgaccgagacatgcccttagggaactatctactccgtctggatgatggactggccattagggtttgccattatgatgaatccaaccaattaccagtccattcagaagagaaaatcttctacactgaagaagactaccgcgagtttctggctctacagggatggtcaagcctgcaagttgatggttttaggaacatagaaaacatggatgatcttcaacctggtgctgtgtatcgaggtgtgagatgaggaaatgagatcacaaaacttcttctccaattctatcaacagttatctgaacagaaaacagtcccctgtagatatgatctcattctctttatacatttcttctttttttcatgtacttgctcaaatatgaaatatcataactggcatttaccgtacagaccaagaagacctcaaaatagatttttggtctgttacatttgtaagaacagaacataagagaagtgaataaattgttcacaatcagacgagcgagtgtttgtgtgtggtatcagagtcattcttcatcccttttattgttcttgtatgaaatgagtgtgttcgaccttgtcaatcactctcttgatccaggtgaacggtacagccacatcggtatcagtaaatgctctcaacacaacagacacaccttatccaaccgccaagccgattaatgtctccctctcttacatg

SEQ ID NO: 100061 - DNA, 648 bp, Arabidopsis thaliana columbia
agcatgacctcgtacgcacgcctgcatcctttaaagcggccgccctttatttttttctcggtttttaccattttaacccacagataaaaaattacaatgtcacatttgaagcaaagaacaatgaaggaagaagattgcattcatctacttctgcgaaagcattgtctcaagaaaaaaataagagatgagccaacaacaatgcaaagataaagcaaatttcatatgtttgatgcactcaaagccataactttgcattgttcattcaaagctagaagctgagcctctttcttgtcgagaagtgctgtcaatttcacattctcctccatcagtttctgtacttcaacctccttttgtgccttctccccttctaattgtgtcggcttagtgaccaaccgttcaaagagctcctcaatggttttgaattgtctctcggacgaaagaagtgtttctcgaacattggtaaaagtactgacgtagcttttaagcgactcgaactctctctcaacgcgacacaactcctcttcgttttccacagctttttccctctgcctcatcgtctcttcaactaattcctcaatcctttcccgcatttcgtttagaacactattagtcccataagcaaatcgttccatctcttctaacttcacg

SEQ ID NO: 100062 - DNA, 558 bp, Arabidopsis thaliana columbia
cctttccaaaataccccccaccccgctataattgaggtcgacctatagaagttctatgacgtcgcatgcacgcgtacgtaagcttggatcctctagagcggccgccctttgttttttttttttttttttttttttttggcacaccaaaatcttgatatactcttcaatcatataatgaaaaaaaaacatatatcattacagaaaactcaactcttaagaggttacaaaataggataaattgaaccaaaaccggaccccataaagaaaacaaaaaaatgatcaaatattattgattcatgcatgacacatacattctttacatcttgggtaacggtaaacgctgcgtccattaggtctagcgaatacatgtttcgtctgtctaatcgcttttcttactcttttctcaaacacgttccactcaatcgtactgttcttcaacaatatgtccgaaagtctccgtttgttcggtcttatcggcggcaatttccctcctccgtaataaatccgataacccgatacaagagatgataactgactccctgaatccgtcatcgcaaa

SEQ ID NO: 100063 - DNA, 607 bp, Arabidopsis thaliana columbia
  unsure (1)..(607): unsure at all n locations
caacgaacacttgatctccctcttctccccccccccggtattttattgaggacacactatagnagatctatgacgtcgcatgcacgcgtacgtaagcttggatccatctagagcggccgcccttttttttttttttttagaaagataaaactaatctttaattcatcttacaaaagagcagaagtccacaaaaaaattgcgggtttaggtccttttgtttttagaggttactggagacagaagaaagactttttaagtacctgaaaatccttacaaaagcataaaaatctctcgttcattcatcagtgccctcagcattaccagacttgagatgaagatgcttctctcgcttttggaaatctgtcaaacctttcccacttccagtcacacccacttttccaaatggatcctcaggtgatttaaatatactctctttcttcctccctgtgaagaaccctacctttttagttttggctttagtcggctgaaactgttgccaatcattctgtttcttgttctgcacaacctcgagttgctcaaaccttgccttggatttgaaagcatgtatcttcttacgcttagctatttttacatcctcgggatcatt

SEQ ID NO: 100064 - DNA, 528 bp, Arabidopsis thaliana columbia
  unsure (1)..(528): unsure at all n locations
ncttagaagatctatgacgtcgcatgcacgcgtacgtaagcttggatcctctagagcggccgcttttttttttttttttttttttttttttttcatgccaatggagggaacaaaactgttcttccagacgttaccaaaacaggtgtcttgtacactttccgcggtcaagaatcatggcaggctagtcccaaatctcttttacatccgttcattactacaatctattaataacatggataaatacatatatgttcttcactctattgcctgttacagcctatgactggaattggtggcgaaaagtgtaaacgatgcggaatctatgagcaaggcagcctcgtttcagacaaagagttcgatgtatgggaagttcgtcccactgatttctctgctagccaagtttatatgcattttaaagaaaaggagattaatgctacttttgtctgccacggttgcgccaagttccactccggtgagtaataactaatttccttatttctgtttcctgaagatgaacttggacttgac

SEQ ID NO: 100065 - DNA, 540 bp, Arabidopsis thaliana columbia
  unsure (1)..(540): unsure at all n locations
nnnnnnnnnnnnnnnnnnnnnnnnnnnnnnnnnnnnnnnnnnnnnnnnnnnnnnnnnnnnnnnnnnnnnnnnnnnnnnnnnnccacgcgtccgcccacgcgtccgcccgaagttgctcttcttgttcactctctgatctagtcttaactcctccaactacaattccatggcggtgtctcttcttctctggactctcttcctcttctcatttatcttctccctccaatcacacagcaaagaagaagaagaagacacaccaatcacacgattccagcaatacttaagattcaacaccgctcatccaaaccctaactacaccgcaccaatctcttttcttcttgatcaagcaagatcaattggtcttacttctcgaaccatcgagtttgttcctggtaagccagttcttctcctcacatggctaggctcaaaccttaacctttcttcaattctcttcaactctcatctcgattctgttcccgcggaatccgagaagtggatacatccaccattctcagctcaccgaaccatcgatggtcatat

SEQ ID NO: 100066 - DNA, 515 bp, Arabidopsis thaliana columbia
  unsure (1)..(515): unsure at all n locations
gcccccagaccggaattatatgggtctacnnnnnnnnnnnnnnnnnnnnnnnnnnnnnnnnnnnnnnnnnnnnnnnnnnnnnnnnnnnnnnnttttttttttttttttttttttttttttttgagataatgaaaacgctgtagcgacttatgattcacatttgaacattattgtacctgattttgagttttatgacagtaacaccaacaagatgaagatgtaaaaaggaaaatacatccaattatcgttgagttgagtttagttccttagtccctctttttgttgcatttgagatatctatttctttcacctcaggtggaaaatgaagcttatcctcccaatctatccatgaatcatcattatcatcatcatcttcgccttcttctttgacattaccgaatgtgaatcctagatcaatgacttcgggtttttcaactggttcttcggttagaaatagcgagaagttggagaaaatgcttttacctgttgactcaccaaatttgttgcagcctggt

SEQ ID NO: 100067 - DNA, 818 bp, Arabidopsis thaliana columbia
  unsure (1)..(818): unsure at all n locations
cgnntccgcttctcttcnnaaatttcnnngtgaaaacatttgtctgtnacgacgagcacncnnactttgagggccgagnncgagtggccggagcctnntccaagaacgctatcctnnncaatcagccccggtaacaatnnccgtaaaggggtgggntcacatcngnntcatcannaaaaccccgtccctttgcaagggttgnnttgagggtttcngnaacttccnnaaaactngnngcaagcanncggtcnnacgccaananntgtcactnnttgttggcttattgggatatcnnttcactgggctaagaaagcccttgaagatattgttccatcttcccacaattgtgatgttccacatgtgaaccgtgttgattaccagttgattgatatcactgaggatggcttcgtgagccttctcactgacagtggtggcaccaaggatgatctcaagcttcccaccgatgatggtctcaccgcccagatgaggcttggattcgatgagggaaaggatattgtggtgtctgtcatgtcttccatgggagaggagcagatctgtgccgtcaaggaagttggtggtggcaagtaaacaagtatcattccgatatattattacccagtttgacaacggnccgccaatgttattaaggaccccaaagatggttttcccttttncccaattttagaccccttggggggggggttcccctggtcgcaanaaacccctttccnatggggtttgggatttgggggaaatttttgggtnaaancnccaaagttcctangggggggttcccttaaaaacccccttttgttgtg

SEQ ID NO: 100068 - DNA, 958 bp, Arabidopsis thaliana columbia
cggacgcgtgggcggacgcgtgggcggacgcgtgggttcattcccaataatctcttggctatctcgaacataatgacatgatgtctgacgaagagcaccacttcgagtccagcgacgccggagcttccaagacctaccctcagcaggctggtaacatccgtaaaggtggtcacatcgtcatcaagggccgtccttgcaaggttgttgaggtttcgacttcgaagactggcaagcacggtcacgccaagtgtcactttgttgctattgatatcttcactgctaagaagcttgaagatattgttccatcttcccacaattgtgatgttccacatgtgaaccgtgttgattaccagttgattgatatcactgaggatggcttcgtgagccttctcactgacagtggtggcaccaaggatgatctcaagcttcccaccgatgatggtctcaccgcccagatgaggcttggattcgatgagggaaaggatattgtggtgtctgtcatgtcttccatgggagaggagcagatctgtgccgtcaaggaagttggtggtggcaagtaaacaagtatcattcgatatattattaccagtttgacaacggacgtcaatgttataagaaccaaaagatgtttttctttttcctaatttagaccctttgtgtgtgtttcttgttgcaagacaaccatatctattggttttggattgttggaaaagtttgtgttgaaacattcaaagtttcttatgagatgttattcttaaaaccactttttgtttgttcactggatatgtttgttcatgaagcttgttttaagcaactctttacatgatattcattgctatttgcacgattcaagagtgacatatacattttatttaacaataacagtgtaagatatgtgattgaatacttgtggaaacatagagttacacaggctgcgatagtattcgacattttaact

SEQ ID NO: 100069 - DNA, 862 bp, Arabidopsis thaliana columbia
tcttcccctcctatataaaaaaaatcgacatcgcttttgctcacttctctctcttaggtttttttttcccttctcccaatctcatcttctccgaaaacctttcttctctcaaatttctgtgaaaacatgtctgacgacgagcaccactttgaggccagcgaatccggagcttccaagacctatcctcaatcagccggtaacatccgtaaaggtggtcacatcgtcatcaaaaaccgtccctgcaaggttgttgaggtttcgacttccaaaactggcaagcacggtcacgccaaatgtcactttgttgctattgatatcttcactgctaagaagcttgaagatattgttccatcttcccacaattgtgatgttccacatgtgaaccgtgttgattaccagttgattgatatcactgaggatggcttcgtgagccttctcactgacagtggtggcaccaaggatgatctcaagcttcccaccgatgatggtctcaccgcccagatgaggcttggattcgatgagggaaaggatattgtggtgtctgtcatgtcttccatgggagaggagcagatctgtgccgtcaaggaagttggtggtggcaagaaaacaagtttcattccgatatattattaccaattttgacaacggacgttattggctttaagaaccccactgatgttttgtcttttttacctaaatttaagacccctttggggatgcagtttcctttgggtgggaaagaaccatacccaatattccttatttgggggttttttgggaattgggttagagaaaaaaaagactttgggtggttttgaaagaacaattttcaaaaaggcgtctgcctctaatttaaaaaaaa

SEQ ID NO: 100070 - DNA, 681 bp, Arabidopsis thaliana columbia
aggtctattgcccaacagaatcaaccctctatttaatacattgttgggggggtggcttttaaaccattcagatatgctaccatgacataataaacagaaagcaaaatagatatgctcaaagtgcattaagtttatgacatgtcaatcaaataaatgcagcaagggaatccacatgactcagaagaaaaccgtctgagccatacttagctaccaatgataccgaaaccggaagattttcgtgtagccccaatggtatgctcacctgacagaatccagaaacgcctgctatcgacaacaagctgaaggctctgctgcggaaagattcaagtgcagccacattagcttggagatgcggtggaggacctggtaccgttggaatcgccaacacacccttctccccgagcaaagttgaaagagccgttatcagttcagatttcacggaccggcaatggtcgatcttctcgtcggatgttctgatagcttcctcaattcgttctgatattccaggaccaaactctggcttcaccgtcgagatccatgcaccgtggtttatcttgaattcatgtctttgtaacaatctcattgaactcgatagggccatgatagacgcaatgcagaactcttgttgtgtagtgacatagacacaagtcatgaaaagtttaaggcttaaaacattctgtc

SEQ ID NO: 100071 - DNA, 602 bp, Arabidopsis thaliana columbia
  unsure (1)..(602): unsure at all n locations
atttagctgacactcatattaaagctatgacgtcgcatgcacgcgtacgtaagcttggatcctctagagcgggcgcgctgtggtttttttttttttttttttttttttgttcaattgtccaacatatacaacaatttatttaatacattggtggggtttgggacaagaaaaccattcagatatgctacgatgacataataaacagaaagcaaaatagatatgctcaaagtgcattaagtttatgacatgtcaatcaaataaatgcagcaagggaatccacaagactcagaagaaaaccgtctgagccatacttagctaccaatgataccgaaaccggaagattttcgtgtagccccaatggtatgctcacctggacggaatccagaaacgcctgcgatcgacaacaagctgaaggctctgctgcggaaagattcaagtgcagccacattagcttggagatgcggtggaggacctggtaccgttggaatcccaacacccttttccccgggaaatttaaaagccggttanttnagttttcggggcgggantnggggnttccccgggggttttnangcccccaatnngnngtttncgggaaactg

SEQ ID NO: 100072 - DNA, 523 bp, Arabidopsis thaliana columbia
  unsure (1)..(523): unsure at all n locations
agctacnnnnnnnnnnnnnnnnnnnnnnnnnnnnnnnnnnnnnnnnnnnnnnnnnnnnnnnnnnnnnnnnnccacgcgtccgcgacgaacactcacctctcctgacctcatggaacctttcaacaactttctgttcatggaccggtgtcacgtgcgacgtctctctccgtcacgtgacctctctcgacctctcaggtcttaacctctccggaactctctcctccgacgtagctcatttacctctgctacagaatctatcactcgctgctaatcagatctcaggtcctattccgccgcaaatctccaatctctatgagcttcgtcacctcaatctctccaataatgtcttcaacggttcatttcccgatgaactctcctctggattggtgaatctccgtgttcttgacttatacaacaacaatttaaccggagatttaccggtttcactcactaatctcactcagctccgtcatcttcacctcggtgggaattacttctccggcaaaatcccggcgacgtacgg

SEQ ID NO: 100073 - DNA, 508 bp, Arabidopsis thaliana columbia
  unsure (1)..(508): unsure at all n locations
tttaggacgnnnnnnnnnnnnnnnnnnnnnnnnnnnnnnnnnnnnnnnnnnnnnnnnnnnnnnnnnnnnnnnnntttngttttttttttttttttttttttttaatggaaccatggaaatagtagagcttggaacattctcagacatatatcataagaattttattcttcttctgaaggcaaaaaggaaatttagtaatacaatagttcagccgttggtagatcacagaagtcattgatacactcataaaagcttgtgaatacgaaccaaccttcaagttgcttcatttgggatccgaagtccgaaccccctgggcgcttaaagaattctctgaatccgtagggactcatatcataattggtaaggtacaactttcactgaataccgagtgatatttggatcctgtccttttccttcattaccggcatgttgggggctatggaatattacaaggaagggatttcattttttttggggagttatgccaaatccgggatccttggaacac

SEQ ID NO: 100074 - DNA, 498 bp, Arabidopsis thaliana columbia
  unsure (1)..(498): unsure at all n locations
ggnaaggtttcagnnncccgggaatggaaactggtcctggttttttattataaattctcaaccatgggcattggacacatcacccgtgaaccttaataataggccccatgagcaaacataggcccaatttaatccccaaaaacccggaaagaaaacacacatgaagacggtctaaaatataattttcttcccattgtacatactattatttaaagatgattctttcggtagcaactgaatcttaaacatttcaagatccactataccaccaaaatcaaatcaatagaactcgaaaaacacgagcctgatgccgatatatgacttgccgttttgtctcctccttgcttctcatggccaagctaaacaaactgttggggagattttccaaactgaggttcctctgtctcttccttaaatggctttgtctgcattttttctgccggtttcattcccttgaagattttttttatgaattatttggttcaaggttttgaattt

SEQ ID NO: 100075 - DNA, 805 bp, Arabidopsis thaliana columbia
  unsure (1)..(805): unsure at all n locations
aagctaaggagaggcgaattcgaatcgagaagatggtgtctggctcagggatatgttcaaagcgtgtcgttgttgacgcacgtnaccatatgtntggtcgtcttgcttcgatcatagctaaagagttgctcaatggacagagtgttgttgttgtccgatgtgaggagatttgtttgtctggtggtttggttcgtcagaagatgaagtacatgaggtttcttaggaaacgcatgaacactaaaccttctcatggtcctattcatttccgtgctccgtctaanatcttctggcgtaccgntcgtgggatgattccacacaaggccaagccgtggtgctgctgctcttgcacgtttgaaggggtttgagggagtaccacctccttatgacaaggtcaagagaatggtcattcctgatgctctcaaggtgttgaggcttcaggctggtcacaagtactgcttgttgggacgtttgtcttctgaagttggctggaaccattacgataccatcaaggagcttgaggtgaagagaaaggagaggtcacaagctttgtatgagcgtaagaagcaactcaccaagctcagggcaaaggccgagaaggttgcagaggagaaacttggatcccagctcgatgttcttgcatcgatcaagtactgaagaaaatcagcatctatcttttggtttaactcttgttttggtttttatctattcagattttgttttcttccttgtatcactgttgaagtttatcacctcatttcagttttatttatcagttgatacttcaatccttagggatgaagtcntt

SEQ ID NO: 100076 - DNA, 657 bp, Arabidopsis thaliana columbia
  unsure (1)..(657): unsure at all n locations
gtgacactatagcaagactatgacgtcgcatgcacgcgtacgtaagctcgggagaggcgaattcgaatcgagaagatggtgtctgggtcagggatatgttcaaagcgtgtcgttgttgacgcacgtcaccatatgtgtggtcgtcttgcttcgatcatagctaaagagttgctcaatggacagagtgttgttgttgtccgatgtgaggagatttgtttgtctggtggtttggttcgtcagaagatgaagtacatgaggtttcttaggaaacgcatgaacactaaaccttctcatggtcctattcatttccgtgctccgtctaagatcttctggcgtaccgttcgtgggatgattccacacaagaccaagcgtggtgctgctgctcttgcacgtttgaaggtgtttgaggggagtaccacctccttatgacaaggttaaagagaatgggcattcctgatgcccctaaaggtgttgaggcttcaggctgggcacaaggactgcttggttggaccgttgccttctgaagttggctggaccattacggtaccaccaaggccttaggtnaaanaaggggaggccaaccttgattgcgaaaaaaaccccaacccacgggaagccnaaaggtccagggaacttggcccncccanttttnaccga

SEQ ID NO: 100077 - DNA, 817 bp, Arabidopsis thaliana columbia
  unsure (1)..(817): unsure at all n locations
cnnnnnnnnnnnnnnnnnnnnnactactcactatagggatagctggttcgcctgcaggtaccggtccggaattcccgggtcgacccacgcgtccggcggaagctaaggagaggcgaattcgaatcgagaagatggtgtctgggtcagggatatgttcaaagcgtgtcgttgttgacgcacgtcaccatatgtgtggtcgtcttgcttcgatcatagctaaagagttgctcaatggacagagtgttgttgttgtccgatgtgaggagatttgtttgtctggtggtttggttcgtcagaagatgaagtacatgaggtttcttaggaaacgcatgaacactaaaccttctcatggtcctattcatttccgtgctccgtctaagatcttctggcgtaccgttcgtgggatgattccacacaagaccaagcgtggtgctgctgctcttgcacgtttgaaggtgtttgagggagtaccacctccttatgacaaggtcaagagaatggtcattcctgatgctctcaaggtgttgaggcttcaggctggtcacaagtactgcttgttgggacgtttgtcttctgaagttggctggaaccattacgataccatttaaggagcttgggggggagaagaagggaaaggtcccaaagcttttgttatgagccgtaaggaagccaacttacccaaagccttaaggggccaaaaggcccccagaaaagggtttgccacagaggaaggaaacctcttgggtattcccccaagcctctcggattggtttcctttggcctttcggatccacaagttcctctggaatgaaaaaaa

SEQ ID NO: 100078 - DNA, 1014 bp, Arabidopsis thaliana columbia
cgaagatggaatttgagttcgagagaagaaaggtcactaaagaggatataagagagctaatttctagggagatacttgagtaccaccctcagctgcttaaagatcatatgaacggggctgataaagccagttttctctacccaagtgctgttgatcaatttagaagacaatttgcgcatcttgaagaaaacagtggtaaaaccggccctgtggcacctctagaaaggaaacatgcctctcttcccagatcaacggtcatacactcaaccgcagtagcacgaggaggacaaccaaaacttatgaataacacaaacacattgaaccctgaaactactcaaaacattccttttaatcatgcaacaatacaagcacaacaaagaaacctctcagcagccaaaccaagcacattcatgggcccggttgcacctttcgacaatggcagaatcagcagagatgcatatgacccgagatcattcatccggagcactaatctccccttttcacaacaatctgctgcaacagtcgccatgggaaagcagcaagagagaagaacaactatggagcctgagaagcaggcaagacaaatatctcagtataatagatatgcaccagatgtagccatcaacatagacaacaacccgtttatcatggctagaacgggaatgaacaaagccgaaaacatcagtgaccggatcataatcgacacaaatctgttacaggcaactgccggaataggagtcgcagcggcagctgcagcagctgctcctggtggttctgctcaccggaaagttggagctgttcggtacggtatgtcaaagatgtactagttctccacctaagctgggctttcatcacacagaacattgtatgtttccatcttcatgtcataaaagaaaattgtctatgacacaaaaccatatgagcaaaaaatattttttttattaattgtgatccatcatttgtttgtttttttctattccgacaaataaataaatggatgttagattctggtat

SEQ ID NO: 100079 - DNA, 1094 bp, Arabidopsis thaliana columbia
  unsure (1)..(1094): unsure at all n locations
nnnnnnnnnnnnnnngcctgcaggtaccggtctggnattcccgggtcgacccacgcgtccgcgaatcgaaacgaagaagatcgagatcagtgaagaagaagaagacgaaatcacgaaaccatgttcttgttcgattggttctacggaatcttagcttcgttagggttatggcaaaaagaagcaaagatcttgtttctcggtctcgataatgctggcaaaactacattacttcacatgctcaaagacgagagattagttcagcatcagccgacgcaacatccaacgtctgaagaacttagcattggaaaaatcaagttcaaggcttttgatttgggtggtcatcagattgctcgtagggtttggaaagattactatgccaaggttgatgctgttgtctaccttgtggatgcttatgacaaagaaagatttgcagagtcaaaaagagagcttgatgctcttctctcggatgaagcccttgcaactgtcccgtttctgattcttgggaacaagattgatatcccttatgcagcttctgaagacgaactgaggtatcacttgggtctcactaacttcaccaccggtaagggcaaagtgacgctcggagactctggtgttcgcccacttgaggtcttcatgtgcagcattgtccgtaaaatgggttatggcgagggattcaaatggctctctcagtacatcaactaaagacagacgtcaagtcttttatcatattttcaaaccaaacccaagaagattttccgtacaatttgtctatttcgagctaaaagatttgtgattgacgatgtcacatccttcccttagaagacttgagaacacttttttctcatatttgttctttttgttgttttctgtgtggaacataagtttggtggcttgcatttccaaacttattcatttctcttgtccacatttttgtcaactgcttatgtttcattgaacattattcccaagtttgaccaccaacttttttgaacaaaaaaannnnnnnnnnnnnnnnnnnaagnnnnnnnnnnnnnnnnnnnnnnnnnnnnnnnnnnnnnnnnnnnnnnnnnnnnnnnnnnnnnnnnnnnnnnnnn

SEQ ID NO: 100080 - DNA, 513 bp, Arabidopsis thaliana columbia
  unsure (1)..(513): unsure at all n locations
nnnnnnnnnnnnnnnnnnnnnnnnnnnnnnnnnnnnnnnnnnnnnnnnnnnnnnnnnnnnnnnnnnnnnnnncaagaacgttttaatttgctcttctcattacataaggtgagaaacaattatttttgggaggcctcaaagctccatttttgaattacaagaacaaaaattaattgaaaaaataatagtaatttacaagacaaattttgccttaatatatagtacttgatgcagaacaaattttttaccaatcgagtttaatattcctttcaatgtaaagcttgtcaatatattctatgataggtcgcgatgcttccatgtacctcctcatgttcttctcaaccgattgatcagtttcattgagccgtaagagaagttgatccctcgtcggaagtgtatacattccggcgtaaaccgcggttctaacggcccacgtatggaacggtgcacacacttccgtgtaagccgttgtcgcagcgtctttcaacgaatagtcatctgcgatcaaaaatt

SEQ ID NO: 100081 - DNA, 498 bp, Arabidopsis thaliana columbia
aaatacgactcacttagggaaagctcggtacgcctgcaggtaccggtccggaattcccgggtcgacccacgcgtccggtttatattttaattgtttggatatttgcttttatcttctaccaagttcctctgattttagtcgaagaaattagtagctgaaaatccaaaaatcggacttacttcatcagctttttggccccactttacaaagtatgagcaagtttttcttgttttctacagcaaagcaatgctcacaccattttcgtggagcttaaagtcttcaaacccaaactaaaagctttgaaatttctctgcaagaaacagagagagagatctagggattggctattaagagagagagagtagagtactacactattggttcctgtgctgttgtgttttgtgcatctgttcttgtgtttctcagataaaatattagtttcagtctttcagagacattgaatctcacacacttactaacacacactcacacacgcgt

SEQ ID NO: 100082 - DNA, 514 bp, Arabidopsis thaliana columbia
  unsure (1)..(514): unsure at all n locations
atttaggacgcactatangagatctatgacgtcgcatgcacgcgtacgtaagcttggatcctctagagcggccgcttttttttttttttttttttttttttccatggttaaacattgagattaaaagcctcaattatttcaaacaatcgaggtctacatctcgcacaattgttcatatattggatctagaactatacatgatcaaacattgatatcaattactagtgtttttttctttcatatttgaatttgctataatcagcgaccaagctctcaataaccctatgcttcatgttatccaccaaaccggccaaaatcgcattggccatgtttctcctaacatcttctggtacaagcgcgagaactgaaggaagcacgaagctaatggtcgtttctagtcgacctttgagcctcgtgtgccttccacgccggtctgggtataatgctccttttactccaagagtgaaatcagttggttccattactcggccaagcccttgaagctcccatttcg

SEQ ID NO: 100083 - DNA, 703 bp, Arabidopsis thaliana columbia
  unsure (1)..(703): unsure at all n locations
gaaactttcaaaatgcttagctgagccagtcagatatgattcaacaagaggtgagaaaacgtctgagnttgggaaaggccctgatatttntcatagctctgatgagagtaaagggcaaggtgattttgatgactacagctgggacaacattggtagttttgatgatcttgatcgaatgttcagcaatgatgtccctatatttggtgatggcagtctcagcggtggtgatgagttatggtcatcttctaaagatgtatccaatagcccaaaatcattatcatcaatgttggactctcaagatctaggattggatattagaactgagtttgagcaacaagagaaccagcaatttccattgactggaaaagccaatggtctgtcatcccaaagtgtcccaagtgtacgtgtaactcttaaggctgaccaatatcgtgagcataagggtcaaccctcagttgaggaccagccatatcaacaaaataaaatgatgaacttttcgaaaatgcctgggacttctgaggcaaggccctttcaagagctgtacggccacaggattccatttagtaattcagctggaaaatgtgtaaatcagttggcaccgccacaatcgtctctgatggctgttaatctcctgagtgagtctgaggggtctgggacatcacactattcacatatgccaaaccaatacatggctaattctgct

SEQ ID NO: 100084 - DNA, 524 bp, Arabidopsis thaliana columbia
  unsure (1)..(524): unsure at all n locations
nnnnnnnnnnnnnnnnnnnnnnnnnnnnnnnnnnnnnnnnnnnnnnnnnnnnnnnnnnnnnnnnnnnnnnnnctttttttgtttttttggtttgtaaatttcttcccacaaaaaaaagtgtctttgtacatagttctttcgattttaaataaaaccgttgttgttggttccacaaaacactataaagcggcgtatataataatatacataagattgaaagagggtccaacctgagaaacctaagcaagacaaatatttcatgaaactaacacaagcttacgcatcggataagtctcttggtcgccaatctctaggtggaaccgtggaatggactggctttcgtggttgtctgtctgaaaattgtttccgaggctcttaccacccaagaagatctgacttctccctcttcttcccaagaaactcttacgagtcactaaaatggagattcgagtggttcatcccaaacatctgcactcccattcgagacttcctccacatcttcctccattgacaacctcacatac

SEQ ID NO: 100085 - DNA, 683 bp, Arabidopsis thaliana columbia
  unsure (1)..(683): unsure at all n locations
cgaatttttttaggaacnnnnnnnnnnnnnnnttgacgtcncatgcacgcgtacgtaagcttggatcctctagagcggctgcccttttgtttttttttttttgaaaagaaaagattagtgaaatggtatattaacttgtataggtgcaaaaccacttatggtaataacaaacttttttctgtatgagaggaggttttaatcaaatctcaataacaaccctcgtaaaacagtcactaactgatttattcgtttagaattgctgcaaaaataaaaccttcttcaatttgtctttaaaatgcatcaagccatgtcttcttttgagctcgccaaaaccgattaagcaaccacacagaatctgctgccacggcgttcccatcttggttccgattccagctgaagtaagcatgagttctgtttttaatctctagcaacccgtgcccaaagctagcttctcgaaacgcggagtattttggttgtggctgcatcatgtcggtaagcaagccttccgagtttccgccatccccgattgtgatgtatataggagctgactcatccgatattggctcacacaatccattgacaatgttgtaagcaatattagaaacacgttccgatctctcataggcatgaacatgacctgcaacacaacatcaaccttgtatttgacaaaccattgttcgtac

SEQ ID NO: 100086 - DNA, 456 bp, Arabidopsis thaliana columbia
gcctcatacccagaaaaacaaaaggataggaaagacgaagaaataaaaagagagagaatgttagagagacaaactctgagagacaaaacaagagaaaatcgctcgtcgtcggtattcaagcgtctgtgactccgataaagcctagactagcgaggacggcgagagagagagagagagagctttggagttgtcgtatctctaaatcggaggcaatttgagtgagataaagacaaaggaaggaatcaagtggactaccgaagcgagttttgagctttttcagagacggatttggagatttcttgttgatatcgtctgcttagaggcttatttggtaccagatgaaacagatctgagcttcggaaggtatggcgagttcggaggtttcaatgaaaggtaatcgtggaggagataacttctcctcctctggttttagtgaccctaaggagactagaaatg

SEQ ID NO: 100087 - DNA, 476 bp, Arabidopsis thaliana columbia
  unsure (1)..(476): unsure at all n locations
gntctttaagcttccttatgaagagaaacnaataaatattttgactccagctgctggatacagaggatatcagagaattggagaaaatgtgaccaaaggaataccagatattcatgaagccattgattgttacagagagattaagcaggggaagtatggggatataggcaaagttatggaagggccaaaccagtggccagagaatcctcaggagtttaaagagttgatggaggagtatattaagctatgtacagatctttctagaaagattttgagaggaatctccttagctcttgctggatcaccttatgagttcgagggaaagatggctggtgatcctttttgggtgatgcgtcttattggttatccaggtgctgagttcacaaatggccaacctgaaaatgatattggatgtggagctcacactgactatggcttgttaactcttgtgaatcaagatgatgacaaaactgctc

SEQ ID NO: 100088 - DNA, 733 bp, Arabidopsis thaliana columbia
ggcttctggagaaaagagataacctgcttccatgagtttaaattatctgtcttgagaagctggtagatttttctattgatgaacaatgggtgagaacggggagaatcattcagtctctcaagagagtaaatccaagaagcttgagagtaaaaatcattcaggtgttcccaagagcgatctttggactgatgggattatttgtgcctttgagtttattcgaggtccgaaaaaacatgttgattcaaaacaacttgagaaaggtgctttgaagcaagaagatggaccaatcagtcatagtttccctggtcataacccgtttgttgattcgtctccagttgatgatttaaggtcaaggtcggtatcttctttggattttaaagaggctcatttgcttccatcagggcatgttgagagatatgagggaagtcattgggtacctattggttgggctagaataactgaactagttcaaatggttcaagtaaacgctgagtggcctaatctagagttgattgatgatgaagaagatgtccctgttacagatttagcagctccgtattgggaacgaccaggtggccctacatggtggtgtcacttgactgctggaaactcttttgttgagggatggcttagaagtgctacgtggttgcatcctgcaattagtctggcattgagggatgaaagtaagctaataagtgaacggatgagacatcttctatatgaggacaatcag

SEQ ID NO: 100089 - DNA, 693 bp, Arabidopsis thaliana columbia
  unsure (1)..(693): unsure at all n locations
nnnnnnnnnnnnnnnnnnnnnnnnnnnnnnnnnnnnnnnnnnnnnnnnnnnnnnnnnnnnnnnnnnnnnnnnnnnnnnnnnnnccacgcgtccgaaaaagaagaacccaagatcgactcttacttcgaatctctctcaactttcttcctcagcttacgggaacttccacacatatacatccacaagaacccatatcgaagattcatcctacatatatttacatggatcagtactcatcctctttggtcgatacttcattagatctcactattggcgttactcgtatgcgagttgaagaagatccaccgacaagtgctttggtggaagaattaaaccgagttagtgctgagaacaagaagctctcggagatgctaactttgatgtgtgacaactacaacgtcttgaggaagcaacttatggaatatgttaacaagagcaacataaccgagagggatcaaatcagccctcccaagaaacgcaaatccccggcgagagaggacgcattcagctgcgcggttattggcggagtgtcggagagtagctcaacggatcaagatgagtatttgtgtaagaagcagagagaagagactgtcgtgaaggagaaagtctcaagggtctattacaagaccgaagcttctgacactacccctcgttgtgaaagatgggtatcaatggagggaatatggacagaaa

SEQ ID NO: 100090 - DNA, 643 bp, Arabidopsis thaliana columbia
  unsure (1)..(643): unsure at all n locations
cggacgcgtggggtcgacgcggccgcgcggacgcgtgggcggacgcgtgggcggacgcgtgggcggacgcgtgggtcggaaacttttattctcagcaaagcgatgatctcgacgtttctcagatccgtccggcgagttagatccttgagaaatcatggctccggtctcggcactcgctaagtataagctggtgtttctgggagatcaatccgtcggcaaaaccagtatcattactcgattcatgtacgacaaattcgacaacacttaccaggccacaattggtattgattttctatcaaagacaatgtaccttgaagatcgaacggtcagacttcagttgtgggatacagctgggcaagagcgattcaggagtctaattccgagctatatcaagggattcctcccgttgctgttattgtgtatgatgttgcaagcaaggcagtccttcctaaacactactaagggggtcgatgaggtangncagaccgtggtagtntgcatnggcgtccttttngggacaaaactgtctngtggcaaaaggaagtncattggggagcagagttaggccggnccttaatgaattnangancnntccaangggttacataggggttccanatcnncnttcggtnggattttcagt

SEQ ID NO: 100091 - DNA, 1040 bp, Arabidopsis thaliana columbia
ggactcactaatacagtatttgcaattccagaggcacgagatctctctccggtaaatatcggaaacttttattctcagcaaagcgagatctcgacgtttctcagatccgtccggcgagttagatccttgagaaatcatggctccggtctcggcactcgctaagtataagctggtgtttctgggagatcaatccgtcggcaaaaccagtatcattactcgattcatgtacgacaaattcgacaacacttaccaggccacaattggtattgattttctatcaaagacaatgtaccttgaagatcgaacggtcagacttcagttgtgggatacagctgggcaagagcgattcaggagtctaattccgagctatatcagggattcctccgttgctgttattgtgtatgatgttgcaagcaggcagtccttcctaaacactactaagtggatcgatgaggttaggacagaacgtggtagtgatgtcatagtcgtgcttgtgggaaacaaaactgatctagtggacaaaaggcaagtgtcaatagaggaagcagaagctaaggcacgcgaacttaatgtaatgttcatcgaaaccagtgccaaagcgggcttcaacattaaggcgctcttccgcaagatagcagcagctttgccgggaatggagacattgtcttcaacaaagcaagaggatatggttgatgtcaatctcaagtcttccaatgcaaatgcatctctcgctcagcagcaatcaggaggatgctcttgttagatttggcaacaacaacacaacaacaaatcgatagagaacaacaaaacacactactaaaaaatgtcctcaagcccctttgcatgattcgatcagttatcgtcttccatctgtaaaatttttgcctgtttttcaactttttttcttcatcggattgtttttaaagaagactctgttttagctatggtttgtccctaactgtgatcttttgtggtctttggagtttcaaatgctcgctgcttcagtacttttgtttacttatttctcaaaaacgcgattt

SEQ ID NO: 100092 - DNA, 839 bp, Arabidopsis thaliana columbia
  unsure (1)..(839): unsure at all n locations
gttcgcaacttgtaacgctattttgctctctcgattcctttctctcttctcttatctttgctgcttcttttgctccgccgtcttcagctcagtcctgcttcagctctccggcgaaattgaagaagaaggttgcaatggctgatcccagtgaacaaaaagaaaaggttgtgaaagaaaagaaagaaaaggttaagaaagaaaaggttgtgaaagaaaaggttgcaaaggcttcttcgagtggacagaagaagaaggacgtcaagaaggaaacgggtctcggactcagtgttaagaaagatgagaacttcggggaatggtattctgaggtttgtaaacaagatatgattgagtactacgatatctctggatgttatattctacggccatggtcaatggccatttgggagattatgcaaattttctttgatgcggaaatcaagaaaatgaaggtcaagaattgctatttccctctgtttgtatctcctggtgtcttagaaaaggagaaggaccacatcgagggattcgcccctgaggtttgcgtgggttacaaagtcaggtaaatctgacttggaagtcccaattgctattcgtccaaccagttagacagtnatgtacccttactacagcaagtggntaaggggggcaccntgacttttccttttnaaggttaaccacttggtgcaaatatttntttagattgggngntcagcaaaccctanccccttttttccggggcccgtgagttccntttggnaggaaggtcacactnnatttgccccaaaaacaggancagnttaagnggccttaaaatttttngggtttcccncgntanttnagga

SEQ ID NO: 100093 - DNA, 493 bp, Arabidopsis thaliana columbia
  unsure (1)..(493): unsure at all n locations
gcgtacgtaagcttggatcctctagagcggctgctttnnttgggggtagggcgnttnncccttttaacagtataaattggatttcttgatttatgtattctgcaaccaaataaaccaaaaggtaacacaaagaaggcataatcaaatcaaacaactctctactagtctaatcacagaatctgatgctttctttttctttccataaaaaacacaggcaacaaaagagatgtggatgaaggaatgttacaaaacagaagaggttttattcactttcaggtgaagagtcctgatcaagattcgttcccacaacaggaaccgggtctggcgcacgcccatgaaccctgaaccggtagaatgccggggtgccagcccgcctcccggcggaagccggggcccgccggcgcgccggactaggcagggcgcggttgggcttcaggacggcgcgtaccaggagaccgccgcgccacgccgtagccggggcccgccgggcgcc

SEQ ID NO: 100094 - DNA, 523 bp, Arabidopsis thaliana columbia
  unsure (1)..(523): unsure at all n locations
nnnnnnnnnnnnatagaaagactttgacgtcgcatgcacgcgtacgtaagcttggatcctctagagcggccgccttttcgttctttttgttgttttattactaaagatggaacacgacgaagtacccaaggttccacttctattccaaaatatgaaataacatgtttacatataaattataaatatcagagtgagtccaataattggttctgattgagataagctgtataatctaaaacctcagacaaacacaatttatttgactttaaaccatcaaagtatcctaaaggaccaacaaatctaaacaaaaactaaacttatcttggaaaaaagcaaataaagccacacaaataaaattcccaagtctcagagaacagagtcatagccattgatctaatgtacaacacccaaaagaagagaagattgattgtttgggctaagaaaacagaaagagcgtaaccaaccccggaggagagagtttcagataaccttctttttttagaaaaacggttgtaggggaaag

SEQ ID NO: 100095 - DNA, 426 bp, Arabidopsis thaliana columbia
cggacgcgtggggtctcaacaatcaaaagcttcaaatttttcattgtcaagaattctcaaaatggctagaacaaagcaaacagctagaaaatccaccggaggaaaagctcctagaaagcaactggcgacgaaagcagcaaggaaatcagctccagccaccggaggagtgaagaagccacacagattccgtccaggaacagtagcgttacgtgaaatcagaaagtatcaaaaaagcacagagcttttgatccgtaagcttcctttccagagattggttcgtgagatagctcaagatttcaagacggatcttaggtttcagagtagtgcagtcgcagctcttcaagaagcagctgaagcttatttggttggtttgtttgaagatactaatctctgtgctattcatgctaagagggttacgattatgcc

SEQ ID NO: 100096 - DNA, 735 bp, Arabidopsis thaliana columbia
attctcaccgaatcaaatccaaaagagcaaatttacaatcttgcgaactcctaaaatggctcgtaccaagcaaacagctcgtaaatccaccggaggaaaggcaccaaggaagcaactcgcgaccaaagctgcgaggaaatcagctccagccaccggaggagtgaagaagccacacagattccgtccaggaacggtggcgttgagagaaatcaggaagtatcagaagagtactgagcttttgatccgtaagcttccgttccagagattggttcgtgagattgctcaagatttcaagacggatctgaggttccagagcagtgccgtcgcagctcttcaggaagcagctgaggcttatcttgttgggctctttgaagatactaatctctgtgcgattcatgctaagagggttacgattatgcctaaggatatccagcttgcgaggagaatcagaggagagagggcttaagtgaacgaagatgatgaagattaagaagactagtcgtttagttatggattagcttgtttggtttcaatggatatgtaaagccgtctcttagatccggtttcgagtgttcttagtcttttgctctgatgtgtcttccagatgttcgatgaaatgcccaaaggaaatttttaatctactgttgctactttctaagaaaaaaaaaaaaaaaaagggcggccgctctagaggatccaagcttacgtacgcgtgcatgcgacgtcatagctctt

SEQ ID NO: 100097 - DNA, 870 bp, Arabidopsis thaliana columbia
  unsure (1)..(870): unsure at all n locations
tttttggatttgcgtccntccccggnccgcttcccttttcccacctatcgcccttggaactgtcccctcggtccgccgatcccgncgccccctccgttcaagctcaatttgcctcttagatcgtaaatgccagccagccancgcagaatcccctggngaagccccgagaagccactggcgacgaancgcaggaatccgctccaccccgagnntgaagannccaccagttccgtccggaacagtagcgtgcgtgaaatcagaagtatcaaaaagcacagagctttgacccgtagcttccttccgagattggttcgtgagatagctcaagatttcagacggatctgaggtttcagagtagtgcagtcgcagctcttcaggaagcagctgaagcttatttggttggtttgtttgaagatactaatctctgtgctattcatgctaagagggttacgattatgccgaaggatattcaacttgcgaggaggattagaggtgagagggcttaagatttgaagaagatgaagaaaaacaatggtgtagaatagatttgcttgtttgctctcataagatttgtagattcatgttttagatttggttttgagttttcttagtcttttgttctgaagtgtcttccagatgttcgatgaaatgcccaaatgaaaatttaatctacttttgcaactttctaagaatcagtcttcagtttaacttattagatttgcaattgaagttgtcattttggttgtaacttatttgtatattgttacatctgtattcaggtcttagtgacttgtgtcaaaatggttctaatttattgaccaaagcagggttaatcattttattttcctgcagcataaaaaaananccaaa

SEQ ID NO: 100098 - DNA, 858 bp, Arabidopsis thaliana columbia
  unsure (1)..(858): unsure at all n locations
tatacgactcatatagggaaagacggtacgcctgcaggtaccggtccggaattcccgtgtcgacccacgcgtccgcggacgcgtgggttcgcatcctccacaagaagaaaattcgatcggtcgattagtctttgtttgatttcgaaatggctcgtactaagcaaaccgcgaggaaatccacaggaggcaaagcaccaagaaagcaactcgcaaccaaggcggcaaggaaatctgctccggccaccggaggagtgaagaagccgcatagattccgtccaggaactgttgccttgagagagatcaggaagtatcagaagagcactgagcttctgatccgtaagcttcctttccagcgtctggttcgtgagatagctcaggatttcaagacggatctgaggtttcagagcagtgctgttgctgctttacaagaggctgctgaggcttaccttgttggtttgtttgaagacactaatctttgcgccattcacgctaagagggtcaccatcatgcctaaggatatccagctcgcgaggagaatcagaggagaaagagcttgaagactgttgttatggtttatatcttttgatttagttcgtcaatggaactctatttctggattttgatttgcgttttagtagtaatgggttcttgtaagtgttgagctttggctcgttttaattttcagttgttaggtactttggtttagttagccttgaagtgttcgatgaaataccccaacgaaactctctcctgtttaatagaacttattttccttaaaaaaaaaaaaaaaagaagggcggccgctctagaggatccaagcttacgtacgcgtgcatgcgacnnnnnnnnnnnnnnnnn

SEQ ID NO: 100099 - DNA, 526 bp, Arabidopsis thaliana columbia
agctctctacgactcactatagggaaagctggcacgcctgcaggtaccggtccggaattcccgggtcgacccacgcgtccgcccacgcgtccgtacggctgcgagaagacgacagaagggggagcccaaacaaaaacaaattgtgagagatggcggtggccaaacttcacggcggaggtatggcggcgatgcgtcttcttctacttccttccccgatgacgcaccggcgaccatcaacgcttccgagcactgcctctttatctccacggagatacattgtcgcgttggcggccaagagaagccctaagcgtctcaaatactctactcctcgtttcaccaaggagggggaattggtgtacatcgaggtcgatccttgtggtgttgattcctggaaactccaacctgtcattgaccttctcaaacaaggagcttgttggtgttattcccactgataccccatatgccattgcttgtgattgtaaaaacccttccgctgttgagcgtcttcgaaggattaaaaagattg

SEQ ID NO: 100100 - DNA, 423 bp, Arabidopsis thaliana columbia
ggataacacttttctttccatattgatgtttgacatacagaagtctaaaccaaaaaagctcaactaccatataatatatccatcaggaggacattccaaattctgctacataacctcagaggggtttttcacaacaatataaacgtaatgcgtttcaaaagagccaattcacactaatgttaccaagccagatcaaaagaggaaactgggctaaagcaacaaagatcaagagatagtgatgcctgcttgagtcataactcctagattctgcaaagagaactcgcttcattggcttcactaagaataccccagtgcataagcaggtccacggaatcaaaacatagtaagagtatccccagattatcttgccaagaacagctagacaaaggcctgtgaaagtatagcctgcatatgccacaatat

SEQ ID NO: 100101 - DNA, 487 bp, Arabidopsis thaliana columbia
ctcactctcgatctcgacgcgaaatagctttctctcttccaaaggcaattatcgaaaacctgcaaaaagtttctccgccaagtctctccaaaacccctttctcatctctacttttcttcttcttcttcttcttctactgcgctcgctcctcgctcctccgtctccgtcttcaacgtaatctcgaagtcggttgtttcaatcctgccatggccgaagggaagttcgatctgcctgacgatctcatcttttccaaatcttctgatcagctcaaagaattggcctcagataacagcattcccttgtctccgcagtggctttacacgaaatcaagcgagtacaagatggatgttcgatctcctactcctgttcccatgggaaatccaagtgacccaaatccgaaggatgcatggcgcttggatgcacctgaagacaaaaaggactggaagaaaattgtgcatgagaatgaaactagtcgcagatggcgtga

SEQ ID NO: 100102 - DNA, 546 bp, Arabidopsis thaliana columbia
  unsure (1)..(546): unsure at all n locations
nnnnnnnnnnnnnnnnnnnnnnnnnnnnnnnnnnnnnnnnnnnnnnnnnnnnnnnnnnnnnnnnnnnnnnnnnnnnnnnnnnnnnnnnnngtcaatggtagaggttgctgccatttgaatttaactcatatctcttatattttacattagctttcatcttacttctgctatggaatttctaaatagaatctatatatatgaagattatgaactaaactcttccatgaagctgtttagatcgttgaaggaagaccctccttcttccacggcagctttagccatcgccgctagcttctttgcccgtctccgcctctcctctgctgcttccccagccaaaacctccctcaccgctttatccactttctctctgctaatgaaatctcccatcataactttcatatgcttgctcgctcccacgctcactcctgttctgagcacttgcgtaaccaatttctcattgtagaattgctccgctcctacaggccatgtcaccattggtagccctgcagccactccttcaagaagcgagttccagccgcaatgggt

SEQ ID NO: 100103 - DNA, 2436 bp, Arabidopsis thaliana columbia
  unsure (1)..(2436): unsure at all n locations
accgggccggaaataccggggcggccccacccgtcccggcacgatcttcatcgactcaaattcaaaaactcatctctctctatctctatttctctggttccatagctcaccgtcgcatcgcagatctactccttccgcaataaattttaccggcggaggtatcagatctcgccgatctgttgtagcagctactgtattttgggcttctcatttgatattggggaaacgaggagtagaggacgatggaaaatctgatctctctggttaacaagatacagagagcttgcacggctttaggagaccatggagactccagcgctttacctactctttgggattccttgcctgcgatcgccgtcgttggtggtcagagctcagggaagtcttcagtcctggagagcatcgtgggaaaggactttttaccccgtggatctggcattgttactcgaaggccccttgtcttacagttgcaaaagatcgatgatggaacccgggagtatgcagagtttcttcacctcccgaggaaaaagtttactgattttgctgctgtgaggaaggagattcaagatgagactgacagagagactggacgcagcaaggctatttctagtgttcccattcaccttagcatatactctcccaatgttgtcaacttgacactgatagatcttccagggcttacaaaagttgctgttgatggacaatctgatagtatagtgaaggacattgaaaacatggttcggtcctacattgaaaagcccaactgcatcattttggcaatctcacctgcaaaccaagatcttgctacctcagatgcaattaaaatttcccgtgaggttgatccatcgggggacagaacatttggtgtcttgacaaagattgatcttatggacaaggggacggatgcagtggaaattctggaagggagatcttttaaacttaaatatccgtgggttggtgtcgtcaaccgttcccaagcagatattaacaagaatgtcgacatgattgcggctcggaaaagagagagggagtacttttccaatactactgagtataggcaccttgctaataaaatgggttccgagcatttggcaaagatgctctccaagcatctagaacgtgtgatcaagtcgagaattcctggcattcagtcacttattaacaaaacagtattagagctggaaactgaactaagtcgccttggaaagcctattgcagctgatgcaggggggaagttgtactcaataatggagatatgtcggctttttgatcaaatattcaaagagcatcttgatggagtgcgtgctggtggtgaaaaagtgtacaacgtgtttgataaccagcttcctgcggctctgaagagactccaatttgacaagcagctagcgatggacaacatccggaagctggtcactgaggctgatggttaccagcctcacttgattgctcctgagcaaggttaccgtcgtctcattgagtcttctattgtctccatcagaggccctgctgaagcatctgttgacaccgttcatgctatcttaaaggatctggttcacaagtctgtgaatgaaactgtggaactaaaacaatacccagctctgagagtggaggtgacaaatgcggcgatagagtcgctggataaaatgcgggaaggaagtaagaaagcaacactgcagctggttgacatggagtgcagttacctcactgttgatttcttcaggaaacttccccaggatgttgagaagggtggtaaccccacacactccattttcgaccgctacaacgattcctatctcagacgaatcggatccaatgttttgtcttacgtgaacatggtctgtgctggcctgcggaattcaatccccaagtccatcgtatactgccaagtccgagaagcgaagcgcagtctcctcgaccatttctttgcggagctcggtaccatggatatgaagaggctctcgtcgctattgaacgaagatccagcaatcatggagagacgcagtgccatctcaaagcggctagaattgtatcgagcagcccaatccgagatcgatgctgttgcttggtccaagtgataccggcatgtcatgtccactgttttgctcggttctggtcggtgtggctcagactcggagcagagatttagggtctgtaatttgtataagatgatcttcccgataccatgcagtatcgttttatataacatccacattgtttgtcctacctctatgttttttgtccatcacccgatatgttacgtatcgttttataacatccacattgtttgtcctgcctcaaaaaatttttgtccctccccccgatatgtttcgtttcttaaaaaaaaaaaaaaaaaccaaacacaaagnnnnnnnnnnnnnnnnnnnnnnnnnnnnnnnnnnnnnnnnnnnnnnnnnnnnnnnnnnnnnnnnnngacct

SEQ ID NO: 100104 - DNA, 830 bp, Arabidopsis thaliana columbia
  unsure (1)..(830): unsure at all n locations
nnnnnnnnnnnnnnnnnnnnnnnnnnnnnnnnnngctagccgttccggtccggaattcccgggtcgacccaccccacgcgtccgcgaaagccttgagagagagaacacagacgataccaactttcttcaatctcgttgccgcagtataattatctcattcctcggatatatctctccttctgcggcggcgacaagaagctacaagaataaaaagtctgttttctctcttttcaagaaaccacttacttcgaaaatggctcgttctatctctaacgttaagatcgtatctgctttcgtctctcgtgaactctccaatgctatcttccgacgtggttatgcggccacggcggcgcaagggagcgtttcgagcggtggaagaagtggagctgttgcttcggctgtgatgaagaagaagggagtggaagaatcaacccagaagatttcttgggttccagatcccaaaaccggttattacagacccgaaaccggttccaacgagattgacgcggctgagctacgagcagctctcttgaacaacaagcagtgattgattattattacatgtaattttgtcaaggtctttaagaggagattagtgggtaatgatctggtgcagtgaaccctattttcatatgttaagtgcggttctgtaatgaataaaatagagaagcgtttggtttcctctaattgtaacaaaaggatcgttggatgtatgatagagtttttcttataaaaccatttcagaaaaaaaaaaaaaaaaaaaaaaaaaaaaaagggcggccgctctagaggatccaagcttacggaccnnnnnnnnnnnnnnnnnnnnn

SEQ ID NO: 100105 - DNA, 643 bp, Arabidopsis thaliana columbia
  unsure (1)..(643): unsure at all n locations
acgcgtccgtatgtccccggtgcttccttttgggttccacctcctagattccagtctcatgggatcgctaagctcgttgagaagctggccaatccgatctctgatgaagaatctatttcaatctcatcggttcgaggatggccttgctctgattacttcatcaaaggtgtaaagcctcaatcagttgagacggagatgacttcaaatactgcatatcactccgaggacgaggaataaaccccaaaactcgtcagggctcttgctcttcaagatttgtagatttatgaacacgaatcaacgaagattcgaatcaccaagagcagctgcaaagacatggtttagacttttagataaggtagagtaaagcaaaccttttacagactgatcagatcctatccagtcttagtgaaattaaataaggaaaaggtgctgttgctttaccctctgttttcttgtaatctcccttataacagtttgttgaatcgtgtgtatatatatttccgcataagctcgcagattcggttctcttaaaaaaaaaaaaaaaaaaaaaaaaaaaaaannnnnnnnnnnnnnnnnnnnnnnnnnnnnnnnnnnnnnnnnnnnnnnnnnnnnnnnnnnnnnnnnnnnnnnnnntagaattcgt

SEQ ID NO: 100106 - DNA, 700 bp, Arabidopsis thaliana columbia
  unsure (1)..(700): unsure at all n locations
nnnnnnnnnnnnnnnnnnnnnnnnnnnnnnnnnnnnnnnnnnnnnnnnnnnnnnnnnnnnnnnnnnnnnnnccacgcgtgcgtgcggctgcgagaaacgacgagaaggggatcaaccaaaccaaaccaaaaaaaaaaaggaaccatctttctcctaaatctctacaatggctcgatctttatctccttcactttctctctctcgataccgtttcgccgcagcttctcttcttctcccttcatctcaaaccattttcatccgatctcaatcctccaatcgtcggtctaactctaaccatctcggagtaatctacgagattgatatcgctgcggatcctcttgtcaataagttggaagatgctgtccaccggattatggtacgccgatccgcacctgattggctcccttttgtccccggtgcttccttttgggttccacctcctagatcccagtctcatgggatcgctaagctcgttgagaagctggccaatccgatctctgatgaagaatctatttcaatctcatcggttcgaggatggcccttgctctgattacttcatcaaaggtgtaaagcctcaatcaagttgagacggggntggcttcaaaaactggatattactccgggggcgggggataaacccaaacttggtatgggttttgtttcaagttttnggtttttncnnggtncgnggtcggtnggg

SEQ ID NO: 100107 - DNA, 516 bp, Arabidopsis thaliana columbia
  unsure (1)..(516): unsure at all n locations
nnnnnnnnnnnnnnnnnnnnnnnnnnnnnnnnnnnnnnnnnnnnnnnnnnnnnnnnnnnnnnnnnnnnnnnnncttgggtttttcttttttttttttttttcaagatattttgaaattccttcaaaaaaaaaccaactgtacattttcattaacacaaattacaaactaaataaagccgaataccgattaaaaacataaaaaaggaaaatgaaacacacttaaaaagagtttaaacaaccttctttcaaaaaaaaacctactaaaccggaccaaagcacaaaccgtactaagagggattaaagtaaattaacaaccaaatctcatcgcttaataacatttatgaaaagacaaatttaccccttataccggtaccctaaattaaccgccgtgaatcagaaaactctcatagattgagtagatccggcggactttgaacaccagacttgggcgaaagctcattttccggcgctgattccgcattcggctgatccttcgacggtggcaacttgggaatc

SEQ ID NO: 100108 - DNA, 533 bp, Arabidopsis thaliana columbia
  unsure (1)..(533): unsure at all n locations
ttaggacannnnnnnnnnnnnnnnnnnnnnnnnnnnnnnnnnnnnnnnnnnnnnnnnnnnnnnnnnnnnnnnnnctttttttttttttttctaaacgtttctcattcttgttatcattatgtgtaacaacaaaacacataatagtttaatacaacttaaactccaaagagttatatatgaatatctcaacaacaaaatactaaatcggccagttttaattaattacatgaccccaacgaagtcacctactatcatctctgtaacactaaagttcactgaaaattatctacaaacttcatcttcgtttacatgaaaaaatcattttcagatctcatcaaggtcactgtctacatcatcatcatcattcggcctctcgaagttcatcataaacctcagtgagtctccttcctctacttcccattgcttcttcagcgcattgatcgctctcgaagcagctgctgcaatcgccgggttactgtcttcagcgagtctctgaaatgctcccattcctgcatttcctagtgtccacatgg

SEQ ID NO: 100109 - DNA, 637 bp, Arabidopsis thaliana columbia
  unsure (1)..(637): unsure at all n locations
gctatgacgtcgcatgcacgcgtacgtaagcttggatcctctagagcggccgccctttntttttttttttttttttttttagactacaacttacttttataaactttgttaattgtcataaaaataaacatagatccgagtaaatatagatatcaggtacaatgaaaatcaacaaccctttgaaatagaatagatccatacactcttactttgacaaaatagaataggcacacacttatttgactatgattttgttaattttgaaatcacatttatagtcttcaattatgttgtaaacaacctaaactttcacaatttcgtccaacaatattttgaaattctctaaagagcttcctttcatggagaaatcttcttggagtttttctttaagcttcttggcattagccttcatcgtcttaccatcatcatgaacaaaaacatcattcaaacacttctcaaatccttctttcgtgaagactccattatccatcatcactccaaccttccacacaacctccactgctcttccgttgagcctattatccgccaaaatcggtctgccgatcattggtacacctgccgacacactctccaacactgagttccatccacaatgtgtcacattcacacccattgc

SEQ ID NO: 100110 - DNA, 509 bp, Arabidopsis thaliana columbia
ctatagaagagttatgacgtcgcacgcacgcgtacgtaagcttggatcctctagagcggtcgcccttttttttttttttttttttttgtaatattcgaatattaatatccatacttaaagattcacatcaccatgaaaagccgaacccattcaagatcataaaaggaaaaagaatgctcattgcattgtctacacacaatcatgacgcaacctaaaaaccctcttaggatcgtttcaacaaatcgggggcgcatccacaaaaataaaagcgaatacactgaacatgtcataaaagaagtaagcacctttacctacaaaggctctctctctttctacaaaagagttccttttctctctaaacgttatgaaacttaaaccggcttggttcagaaatcagaaccaacgcatgcatgttcctggctggtttttgctaaaagatcctttacttggtgttacattgatcctatccgcattatctgctgcccatttgccaaaatccggaagaagaa

SEQ ID NO: 100111 - DNA, 814 bp, Arabidopsis thaliana columbia
acactatagagatctatgacgtcgcatgcacgcgtacgtaagcttggatcctctagagcggccgccctttttttttttttttcttaattaacagtagtagcataaataattccatcaacagataaaagattacaaaatttaaaaagacaaataaaaaatgtcctttcccaaccaaataaaaaaacaaaaaataaaagacaatgagagaagttctttgacttgctctatattttggctcaactatacttgtgtgtttcttggccaatctctgtctccatctttagaaaggactaaagaaagagaatttttgagaaaccaaacctatgaatcatgggaaagtgaaagatcctccgatttgagtggaaccagcaggtggattaatggcaacccaaagcagagatatggtgatggcaacaagtccagaccagacatatacaatggtcggagtccttcctcttcttcccataagccctttagcgaatggataaagatgagccagtacccagaaactgaagaacactcctccaatcaacttactccactgcggaatcacactgtatatcgtcctgctaaacccgaccgcgatggcgattaggttcaccatcatgattgtgattggtgggatcatgagggatgtccatttcacaatgtagagatccgcaaattcgtcgtctacatcctctcctccggatttagatgtcaatgtgaatgagatttcgattccggcaacaactttgagcagcccttggataaccgcggctaagtgagcgcttgttcctccaatgagccagaactgctcgtttcgccaccattc

SEQ ID NO: 100112 - DNA, 545 bp, Arabidopsis thaliana columbia
  unsure (1)..(545): unsure at all n locations
nnnnnnnnnnnnnnnnnnnnnnnnnnnnnnnnnnnnnnnnnnnnnnnnnnnnnnnnnnnnnnnnnncttttttttttttttttgaaaaagacttgagatgtatttatatatttgtcaaaacttattcccctgaaacatgggaacccactccttccagagagaagaaaacgaaaaaaaaaaaaatctcgagtgaacaagattttgagtaaataatggtacattgcatggtacattgcaaagagagagggcttagcttattataagttaaaagatgatgaagaattaaatgagagcttgaacacccgctctcaacatctctctgagcctccaaatgggataaatcgcatcttcccctaactctgctgcatccacttgttgcatagcccagtcgtagtacactgggtgtattgtgtcctggcctccttctttgatttttccatcctgatcacggacgcagaagatttcttgcgtttggaacctgacgatgattactggagtagctcccatcatctttgtctcttgaatatcaacttcagatacatgca

SEQ ID NO: 100113 - DNA, 544 bp, Arabidopsis thaliana columbia
ttaggacaactatagaagattatgacgtcgcctgcacgcgtacgtaagcttggatcctctagagcggccgcccttttttttttttttttttttttttttttttttttggatttccaacgacattactggaaaaatcaagatcaaggatgtaggaagtaaatgtcgttcttgttctaagatgatcagaaaacgattcacaattatatgttcaacgaaataaacggagatatggagtgaaacaaacacaactttcttctaccgacaacatcctctctcaggagacaactctcgcattctccgagtttcaaagcgcaggccattctttacggatgtcaaagctgtagttgatctccaagtagcacttattatcatcatcaagaaacttagttcttgcagaatatgatcctcgagcaaacatgccagaaggagtgggctcttctggcatcacgtggttgtatggctccaactgaggactaaaggttccaagcatttccttagctctgaccactttgacaccggtcttccaaactgtattggtgtacct

SEQ ID NO: 100114 - DNA, 659 bp, Arabidopsis thaliana columbia
  unsure (1)..(659): unsure at all n locations
nnnnnnnnnnnnnnnnnnnnnnnnnnnnnnnnnnnnnnnnnnnnnnnnnnnnnnnnnnnnnnnnnnnnnnnnnnnnnnnnnnnnnnnnnnnnnnnnnnnnnnnnnnnnnnnnaaaaaaaagaaaaaagggggacctgcccatttattcatccacgctacatcaggtattaatacatgactatgaaactaataaattatttacattaaaaagaacatagtttattatggaattagccggccgcaaaggcaaattagttgaaaattaaaaggcctatttacattaaaaaggtacagatgacccatctcaccagaaggggcaccacccaacatagttttgacagagattctcatgggaaggggctggtctgattagctcttgaacctgaactttcacagacaaaccatgttcgacttcatgagaatctcctccgggcaggttattatgaccagcaaggggattgctcggaattgcagacgaagaataatcacgccctgtaagcttatgactcatacgtgccataacaactacggcacgctcatttaaaacttcattagcatctccaagcatatttacagcctgaagaatctacttctctcgagtactcctttgaggctgaggaagatctatatcagcgggatcttcatcttcttcgtcaggc

SEQ ID NO: 100115 - DNA, 509 bp, Arabidopsis thaliana columbia
  unsure (1)..(509): unsure at all n locations
nnnnnnnnnnnnnnnnnnnnnnnnnnnnnnnnnnnnnnnnnnnnnnnnnnnnnnnnnnnnnnnnnnctttttttttttttttttttgaaggaaagcctgagtttttgttttatcagatgtgcgtccccttaagaggaacaaaagacaatgtaagttttgtttagataagcagagaaaacacacagattaaagatgtgtattaggtttttagaaatcccatccctgaagaaaaaacataattcaaaactaagttcttttaattaagtcatcttcttctttccttgcattgattccatctttcaactcaagttaattgtttcccccgaagctccatcaagggcctgtttcttttgcttgatcttcttgtctctgatgatcttctgccttgtctcatagaacttgcaatcatcaagtatacatgtcttgctcatataactccttgaagatctttatgatcttggtcccatgctccagattcaccttttgagtgtctctggtattagtgacag

SEQ ID NO: 100116 - DNA, 592 bp, Arabidopsis thaliana columbia
  unsure (1)..(592): unsure at all n locations
tttaggacnnnnnnnnnnnnnnnnnnnnnnnnnnnnnnnnnnnnnnnnnnnnnnnnnnnnnnnnnnnnnnnnnnnnctttttttttttttttttaaattgcaattaagctgtcttctcataaaaatatcaaaagataaaacattttaaagtaaatttgtaaaattcagctcgtttctgtagtaaataggatattgagattaaatgcaaaataatgtaaaaatttgagtcttctgatatgactaagcaagaagaggtggagatcaacatgcttttatggtcatcagtcatccagttatgtatcacaccgaccttaaagcaccggcttgcaaagaatcttgcagagacgtgacagcgccgtcgtagtttaaaaaacccatgaaccaaaactcatgattgtctaccgaaatcacctgtatgtacttctctgcaggattgactatgctcgctgatggattcactgctttaagttgatgtaatggaattactaccttgtaatagctccattcggtttgatcaccgtttttataggagagagggttgtcactacagtaagcaagtttggcactggatatatatagaactcccataact

SEQ ID NO: 100117 - DNA, 1489 bp, Arabidopsis thaliana columbia
  unsure (1)..(1489): unsure at all n locations
ggcttaaaccagagagagagtgtgtgtggtcgagccatttgaccaaaagcaaaaacttaaaactggtttcagatctgaagtaaaagggttttgcttcggattctccggcgtcgtttaaatgatctctgacccatcttccttggcttaataattctggtccctccttttatctctttttactgttgatttatctgaatatgccacgctctttcttccacatgtttattctctcttcctttcttcaacacaagcgtctggactaaggaaagccaacaacaaaatctggtttcaagacggttggcaggagtttgtcaaccgtttctccattcggattggtttcagatacaaagttacagtctacattttcaatttatcctccacactctgagatcaaccaccattctagtagtgaagctcttatgcaaatggattccgcacagaatcagttcaacaaacgtgctcgattgtttgaagatcctgaactcaaagatgctaaggtcatttatccatcgaaccctgaatctactgaaccagtgaataaaggttatggcggttctacagccatccaaagctttttcaaagaatctaaagctgaagaaacgcccaaggtacttaagaagagaggaaggaagaagaagaatcctaatcccgaggaagtaaactcttcaactcccggtggagatgactcagagaaccgctcaaagttctacgagagtgcttctgctagaaagagaactgtaactgcagaggaaagagagagagccgtcaatgcagccaaaacattcgaaccaacaaatccttactttagagttgttctgcgaccatcatatctatacagaggttgcatcatgtacttgccatctgggtttgctgagaaatacctaagtgggatatctggtttcatcaagctccagctcggtgagaaacaatggccagtgaggtgcctctacaaagcagggagagctaagtttagccaaggatggtatgagttcacactcgagaacaatataggcgaaggagatgtatgtgtgtttgagctactcagaactcgggatttcgttctcgaagtcaccgcctttcgtgtcaatgagtatgtgtgaccaaaaaagatttccctttcatcagcgatcttgcaggtagctttccaaagttaaaattttatgtaggggtctcttaaccattctctctcttgcattggttgtctctgttctagtagtgttttgagtgaaatttcaggttcctatgtttggatgtggataagtatttgacgattataataacctctgagtgggaaactctttgtttgagtggtagctaggttcaaaagtagagttgtatatacttttatcttcatcaggataattatgtttatttgaattgttgattattatggaaaaaagaaaaagaatccataaaaaaaaaaaaaaaaaaaagggcggccgctctagaggatccaagcttacgtacgcgtgcatgcgacgtcgtgncg

SEQ ID NO: 100118 - DNA, 506 bp, Arabidopsis thaliana columbia
  unsure (1)..(506): unsure at all n locations
gggactnnnnnnnnnnnnnnnnnnnnnnnnnnnnnnnnnnnnnnnnnnnnnnnnnnnnnnnnnnnnnnnnnncttgtgtttttttttttttaagctttaagcaaaaagctcataaaatagttaccaatagccttttacatataagtggaagactggaagtattcagaaatacataagcaaaaccaaaacaaacctaacacaccaacaacaactagaccacatacaaaaaacatttacaagcaaaacacttttcaaacaaatactgttaactccaaatatcttccacaccagtttcttgatcaatgtgctcgaccaacagctttcttgtatttgtagcgttttgaaatccagaggtacactaagaagttgaggaaactgagagttgccaacaagtagaaaaagtaatcaatatggcctcggttcaagttatccggtatccaacccgggttacacgtcttcttcgttttcttcatcacaaccgggacaagaactgtgctcaaatagtt

SEQ ID NO: 100119 - DNA, 519 bp, Arabidopsis thaliana columbia
  unsure (1)..(519): unsure at all n locations
nnnnnnnnnnnnnnnnnnnnnnnnnnnnnnnnnnnnnnnnnnnnnnnnnnnnnnnnnnnnnnnnnnctttttttttttttttaaaaccatattttttttttaattcagcagttgacattttgtaacaaagtttaatgtttcaatgggacatcaagtatcacttggtcaggatactcctttgcatttcctttaggattatcttcaaaccgtcggagactaatctgtttcatctcaactcctccacctccggcctccacctccatcgccatatccgccagtatcctccccaccgccggcgccatcttaaaaccatgaccggaaaacccgccgcctaccaccacatctctcccaaactcccctccaagaaaatcaatcacgaaatcctcgtccggtgtcatcgaatacatacaaagctgagtcgccacgggtccttcggaatcaaccatccctccaaatctctcctttatccactctttaagctcctctaacttcactcctggcccccatggcctcttatcc

SEQ ID NO: 100120 - DNA, 610 bp, Arabidopsis thaliana columbia
actatagaagatctatgacgtcgcatgcacgcgtacgtaagcttggatcctctagagctgccgccctttttttttttttttaaggtatatttgatgaattgaccaaaacacaagtgtgtttaaaaatcttactgagtaacatacatatcctttcttttcttttcctgtgttttgacaggtttccagcatctctgtctgtctttacactagtaagtataattttttctatgagacttataatgttcaataattttatgatatttagagaattagtgacgtttatgatgatgttttggtggacgaagaaactcctccggttttctcaagatcccgttgtcttgctcgttccattttccgctttcgccattcttccaatgctttcaagctcgatgcatcgtttagcgcacggaaatccttcagtcgtttagagagatcaacggctgtagtctgcttcacatctttctgctgctcggtttcttgtcccgcagatgcctcttgttcgatttctcggacctatcattcatttcaagcggacgcgtgggtcgaaacgggaattccggaccggtacctgcaggcgtaccagtctttccctataaatgagtcgtatagt

SEQ ID NO: 100121 - DNA, 523 bp, Arabidopsis thaliana columbia
  unsure (1)..(523): unsure at all n locations
ttaggacannnnnnnnnnnnnnnnnnnnnnnnnnnnnnnnnnnnnnnnnnnnnnnnnnnnnnnnnnnnnnnnnnctttttttttttttttttgtcaaatccacttatttacttttacttgagtgtcacaatgtctatctgtctgcgactatgcctgtaaaaattgatcaaatatctgaactattttctcaaaaatatgtcggattatatgattacatctgtcgaaatctcaaacacaaattgtaacactagaagccatccccgagagttctccatcatttactcttttccattcaccatctatcataaggcagcttctactttcctcttcatcattccacatcagattctcttctgctacagtttcagtttcctcatatgcatgttctatttccatctcagcttcttcctcgtatgattccaatgtcacatcatttgattcagaatctcctgcactcttccttgctcgcttgcatggcgatttctccaattgatttctattacactcagctcctctcttcgca

SEQ ID NO: 100122 - DNA, 587 bp, Arabidopsis thaliana columbia
gacactatagaagatctatgacgtcacatgcacgcgtacgtaagcttggatcctctagagttggcgccctttgtttttttttttgagtgatttcttttgtgatttttttttgtaatgaaagaattgttattttacgacaatataaatgttatagagaaaaaaagtaacacagaagagagtttggttgcaaatgcttgtatgataatttaccttcatgaacaattcctggagctgccactgctattattattattgatgtcttcgatcatcattcctttcaaactcttggccaaccaaatagcggtttctcgaggcgaaactttgttcttcccaaacggctgcaacacaatggctagctcttcgagcctgctctgttccagcaaatccgcagatagttccaatagaccttcaagcgcttctgctctctgtctgaacgacttgatgtccaacgtctctttaacaggtggagtcggagttgtttcctcttcaggcacgaatgagttagttctggtctcagctggtgaagaatccgagcaggagttaaagctctttgtttctgagtaattggtgatggggtctggtttctt

SEQ ID NO: 100123 - DNA, 1170 bp, Arabidopsis thaliana columbia
gttttagctggactggatcctgttggagtactttgtgaaattgttgatgatgatggttccatggctagattaccaaaacttcgtgaatttgccgccgagaacaacctgaaagttgtttccatcgcagatttgatcaggtatagaagaaagagagataaattagtggaacgtgcttctgcggctcggatcccaacaatgtggggacctttcactgcttactgctataggtccatattagacggaatagagcacatagcaatggttaagggtgagattggtgacggtcaagacattctcgtgagggttcattctgaatgtctaacaggggacatatttgggtctgcaaggtgtgattgcgggaaccagctagcactctcgatgcagcagatcgaggctactggtcgcggtgtgctggtttacctacgtggacatgaaggaagagggatcggtttaggacacaagcttcgagcttacaatctgcaagatgctggtcgagacacggttgaagctaatgaggaattaggacttcctgttgattctagagagtatggaattggtgcacagataataagggatttaggtgttaggacaatgaagctgatgacaaataatcccgcaaagtatgttggtttgaagggatatggattagccattgttgggagagtccctctattgagtcttatcacgaaggagaataagagatatctggagacaaagcggaccaagatgggtcacatgtatggcttgaagttcaaaggggatgttgtggagaagattgagtctgaatctgagtcctaagcttaaaaaccaggacgaaccgaatggaatcaagaactatagatataatacttcacaaaaaacaaggaaagaaattgacacagaagaagaggaaaaagacatttgatctgtctgagaaacttgattagattggtttatgttctaatctaatctgatttgatttttttttattttgtctacgattcttgagttacgaaatgttcatcatttgttacttcttgttgtcgggattgagtagttgcatttttttagttgtggagctgtgacaaagaggccagctagtgtgtggaatgtggatcatcatcctttggttgattccttgtagaatcctttttgtaaacatttaaactataataaagtgttatgattaag

SEQ ID NO: 100124 - DNA, 530 bp, Arabidopsis thaliana columbia
  unsure (1)..(530): unsure at all n locations
nnnnnnnnnnnnnnnnnnnnnnnnnnnnnnnnnnnnnnnnnnnnnnnnnnnnnnnnnnnnnnnnnnnnnnnnnnnnnnnnnnnnnnnnnnnnnnnnnnnnnnnnnnnnnnnggaaaangagtaatcttgagaaagtgtgagctttgtttatttacaaaaaatcatctgtatatctttcatctacaaagtattattcatatgcgtttggcctaaatcaacgagcagaaagatcctgaagaattttctggcaaaaaaggaatattccggctagctctcagactgcaatgatacttgtataatcagagactggcgtgaggtgaagtcgcacctgatgagaggtcttggagccgaactatttactattctcggaatggatcaatcgattatcttctctccggttgaaaataggttccaaatgacggtcccaacgaggtaaagaccgaccgaaatcgtgaaaacgtcatcccaagaaccgtgttgtagtatgtgaccagtcgcagctgtgccaagaactccggcaagtactccag

SEQ ID NO: 100125 - DNA, 542 bp, Arabidopsis thaliana columbia
  unsure (1)..(542): unsure at all n locations
nnnnnnnnnnnnnnnnnnnnnnnnnnnnnnnnnnnnnnnnnnnnnnnnnnnnnnnnnnnnnnnnnnnnnnnnnnnnnnnnnnccacgcgtccgcttcaatctgatataactacccttggagcatcggtgaggaaaagagaaagagagagagaaggcagttttgttttccaaatgtcagcaattcttgcagctgccattggtggtgctgtaggagctcttgcattgattgctttgtttgtttttctcctttggttttgtgtctttcgtcgtaagaatctgtctagaacttctgagactggctcttctgatccatctactcaagaaggaagaaatgttgcaattgagttgtcaatgagagaagctagaagatttgaaatggaggaacttgctcaagccaccaagagttttaccaatcaaagtcttattggtattggcaaattcggcgaggtttacaaaggtttgcttcaagatggtgttcttgtagctatcaagaaaagacctggtttgcctactcaagaatttgttaacgaggttcgttatct

SEQ ID NO: 100126 - DNA, 534 bp, Arabidopsis thaliana columbia
  unsure (1)..(534): unsure at all n locations
atgatcctgtnnnnnnnnnnnnnnnnnnnnnnnnnnnnnnnnnnnnacgcctgcaggtaccggtccggaattcccggttcgacccacgcgtccgcggacgcgtgggctttcctctagccactcttcgccactctctttctctctcccttgttttccaacagtaacaatggcgtcagcttccaagcaaaacccttcttcttccaaacctcctaggcatccatctccgatcattgcttcaaccccctcgaaatccggtgtattggaggaatcccaatttcgaaaccctaataacccgtcgacgtcatcgaattcaccgatttcgatggcggtggaggatcagatcctgggaaattccaatcacctcactcgcccggagcttctccgacgcagatcgcacaacctgaagcagctctctagatgctacagagaccattactgggctctaatggaggatctcaaggcacaacatagattttatagctggaactatggtgttagtccttccaaagatgagaattatcaccaaaacaagag

SEQ ID NO: 100127 - DNA, 539 bp, Arabidopsis thaliana columbia
caagctccttaagcatcttctggcaggctccacaatactcactcatcggggcatcagaagtgttcatgtacgtgggtcagcttgagttcttcaacgcgcaaacaccagacggactaaagagcttcgggagcgctctgtgtatgatgtcaatgtcaatggggaactttgttagtagcttgttggtaacaatggtggtgaagatctcaacagaggatcacatgcctggttggattccaaggaatctcaacaaaggtcacttagacagattctatttcctcctggctgcgttgacgagcattgacctggtggtatacattgcatgtgcaaaatggtacaaacctatacaactagaaggaaaagatgagatgcaagacatgagtgatgatgactatgacaccgagagtgaagaggaacgagagaaggattctaaagtctaacaaatgtgtgtttggttttcagttttccggtgatgtaacagcaaactgattcataaataaaaggctaaatcggatcgctttttgtcgaaaaaaattttaact

SEQ ID NO: 100128 - DNA, 616 bp, Arabidopsis thaliana columbia
  unsure (1)..(616): unsure at all n locations
atgaatacctctgtctcagatttcaaaatccccccggcaagtatgtccagcttcgacatccttagcgtcgctttgttcatattcctgtaccgcagagttctcgagccagtagccaacagattcaaaaagaatggatcaaaaggaatcaccgagcttcacaggatgggaatcggacttgtgattgctgtcatagctatgattgcagccgggattgtggaatgctataggcttaagtatgcagacaagagttgtactcactgtgatggctcaagctccttaagcatcttctggcaggctccacaatactcactcatcggggcatcagaagtgttcatgtacgtgggtcagcttgagttcttcaacgcgcaaaacaccagacgggctcaaagagcttcgggagcgctcttgtgtattgatgtcaatgtcaattggggaccttttgttagtagctttgttggtaccaattggtggtgaagatctcaacagtgggccacatgcccttgggtggnttccaaggnattttcaacaaacgggcactttggcaggttttttttcccccctggtccggtacggggtttccctgggggtnaatcatgcaaaatggcaaccntcaatc

SEQ ID NO: 100129 - DNA, 531 bp, Arabidopsis thaliana columbia
  unsure (1)..(531): unsure at all n locations
ggcacagagncagnaaaggcgcncctttgaataactttgaacnngccaaagccagcagggagcttagtttgaaggtgctctccatcattgacaagtatgctgagcgtggtcttaggtcgttggctgttgctcgccaggtggtgccagagaaaacaaaggaaagcccaggtgcgccatgggaatttgttggcttgtggccgcgttttgatccccctggtcgggacagtgctgaaacaattcgacgggctttgaatcttggtgttaacgtcaagatgatcactggtgaccaacttgctattggtaaggaaactggtcgcagacttggaatgggaacaaacatgtatccatcttcggctcttcttggtacacacaaagacgcaaacctcgcatccattcctgttgaggagttgattgaaaaggctgatggatttgccggagtcttcccagagcacaaatacgaaattgtgaaaaagttgcaggagaggaagcatattgttggaatgactggtgatggtgtcaatgatgcccctg

SEQ ID NO: 100130 - DNA, 901 bp, Arabidopsis thaliana columbia
  unsure (1)..(901): unsure at all n locations
nnnnnnnnnnnnnnnnnnnnnnnnnnnnnnnnnnnnnnnnnnnnnnnnnnnnnnnnnnnnnnnnnnnnnnnnnnnnnnnnnnnnccacgcgtgcgcccacgcgttcgcccacgcgtncggctactttgattgcggtttacgccaactgggaatttgcaaagattaggggtattggatggggatgggctggtgtgatctggctatacagtattgtcacatacttcccattggacgttttcaagtttgccattcgatacatcttgagcggaaaggcgtggctcaacttgtttgagaacaagacggctttcacgatgaagaaagattacggaaaagaagagagagaggctcaatgggcacttgctcaaaggacacttcacgggttacagccaaaaaaagctggtaacatcttccctgagaaaggaagttacagagagcttgtctgagatcccttgagcaggccaaagagaaggcccgagatacgctaggcttaggggagcttgcacacactgaagggacatgtggaatcagtcgcaaagctaaagggattggacattgatacagcaggacatcactacactgtgtagttggagttgcacaacaacacaaacatttaccgaaaaccaaccccatcatgactcatcttttgttttgtcttcacaaatctctctttaaaagtcattacagtagagggaagngaactcttgtgtattgccataactcttccaaaactctttttttctntttgttattgttagtcatngtcttaaaactcctactcgatatgagctttncaaggctttcacccataatacggtttacatggtccatttttnggggtnccactttnacaatttttcnaattttgtaaaatccnttnaaggccaatcgggttggggggtcc

SEQ ID NO: 100131 - DNA, 485 bp, Arabidopsis thaliana columbia
  unsure (1)..(485): unsure at all n locations
aacgacggtaccatcatgacaatctcaaaggacagagttaagccatctcccacacctgatagctggaaacttaaagaaatttttnctactggagtcgttctaggaggctaccaggccatcatgactgtaattttcttctgggcggcgcacaagactgactttttctcggacacattcggtgtgaggtccattagggacaataaccacgagctaatgggtgcggtgtacttacaagttagtatcattagtcaagctctggtcttcgtcacaagatcaaggagttggccttttgttgaacgtcctggagcattgctggtgattgcttttcctcatttgcacaactgatttgccacctttgattgccgggttacgccaacctgtgggattttgcaaggatttgggggaatttggactgggggnttggccttgggggtcctcttgntnatacgaggtgttttcaaaaaacttccccanttggccgcttt

SEQ ID NO: 100132 - DNA, 829 bp, Arabidopsis thaliana columbia
  unsure (1)..(829): unsure at all n locations
nnnnnnnnnnnnnnnnnnnnnnnnnnnnnnnnnnnnnnnnnnnnnnnnnnnnnnnnnnnnnnnnnnnnnnnnnnnnnnnnnnnccacgcgtccgtacggctgcgagaagacgacagaagggtacggctgccgatgaagacgacagattacggggaaaagaagagagagaggctcaatgggcacttgctcaaaggacacttcacggtttacagccaaaagaagctgttaacatcttccctgagataggaagttacagagaattgtctgagatcgctgagcaagctaagagaagagctgagatcgctaggcttagggagctgcacacactcaagggacatgtggaatcagtcgtgaagctaaagggcttggacattgaaactcccagtcactacactgtgtagtaaaaccaaacatatgactgatcttcgatcctctcatgttttgtcttcttcttcttctttttttcttcaccacctcttatgattattattcacatagggagagatctttgtttattgccataactcttcccaaaccttattgttagtgttcttgtttctcaaatatgtacttttgcataatttgctcttttgaagaaacaaggcatgcctttgtgtttggcatttggcacatgcacattctcttctttgctcttattccatgagcctatgtaatcttaatcttcttctttttcgtaatccaacttttcttccggcttaaaaaaaaaaaaaaaaaaaaaaaagggcggccgctctagaggatccaagcttacgtacgcgtgcatgtgacgtcataactcttctatagtgtcnnnnnnnnnnnnnnnnnn

SEQ ID NO: 100133 - DNA, 538 bp, Arabidopsis thaliana columbia
  unsure (1)..(538): unsure at all n locations
nnnnnnnnnnnnnnnnnnnnnnnnnnnnnnnnnnnnnnnnnnnnnnnnnnnnnnnnnnnnnnnnnnnnnnnnnnccacgcgtccgtgcggctgcgagaagacgacagaagggacatgtggaatcagtcgcaaagctaaagggattggacattgatacagcaggacatcactacactgtgtagttggagttgcacaacaacacaaacatttaccgaaaaccaaccccatcatgactcatcttttgttttgtcttcacaaatctctctttaaaagtcattacagtagagggaagagaaatcttgtgtattgccataactcttccaaaactcttttttctttttgttattgttagtcattgttcttaaaactcctactcgatatgagctttgcaaatttgcctttgaagaaacaaggccctttgcctttggaaaaaaaaaaaaaaaaaaaaaaaaaaaaaagcggccgctctagaggatccaagcttacgtacgcgtgcatgcgacgtcatagtcttgtataggtcactaatagaatcgca

SEQ ID NO: 100134 - DNA, 575 bp, Arabidopsis thaliana columbia
  unsure (1)..(575): unsure at all n locations
cttttctcagtgaaggagtggtgagagatgtcgagtctcgaagatatcaagaacgagactgttgatctggaaaaaattccgattgaggaagttttccagcggctaaaatgttcaagggaaggattgacaacgcaggaaggggaggacaggattcagatctttggccccaacaagctcgaagagaaaaaggaaagcaaacttctgaagtttttggggtttatgtggaatccactttcatgggtcatggaaatggctgcaatcatggccattgctttggccaacggtgatggtaggcctccggattggcaggattttgttggtattatctgtctgttggttatcaactctaccatcagttttatccaagaaaaacaatgctggtaatgctgctgctgctcttatggctgggccttgctcccaaaaccaaggttcttaaggggtggaaaatggggtgaacaanaaccgncantccttgtcccncgngatatttgtnccnttaaatttggggcntttnccccctggtnccngcancttaanggngcccttaaaggtgccaactnccaccnggngcccnc

SEQ ID NO: 100135 - DNA, 650 bp, Arabidopsis thaliana columbia
  unsure (1)..(650): unsure at all n locations
ttaaccctcactgaggggggcccaaaagctggagattcccaccggggtggcgggccccctcaagaactaagtggattccccgggggctccagggaaattgggcacgggcggcagcgaggccaaaagccgaagggatgggcattgatacaggcggggacatcgccgaccctgtggagtttggagttgcacaacaacacaaacatttcccggaaaccaaccccatcatgactcatcttgtgtggtgtcgtcacaaatctctctttaaaagtcattccagtagagggaagagaactcgtgtgtattgccataactcttccaaaactcgggtgtcgttttggtattgttagtcattgttcttaaaactcctactcgatatgagctttgcaaatttgcctttgaagaaacaaggccctttgccgttgaagagacaaggcccgttgctttgtaatggcctaatgtgattattctatcactcttttgtctgtttgatcaatttcatcttgaagataatatttaaatttttttcccnnnnnnnnnnnnnnnnnnnnnnnnnnnnnnnnnnnnnnnnnnnnnnnnnnnnnnnnnnnnnnnnnnnnnnnnnnnnnnnnnnnnnnnnnnnnnnnnnnnnnnnnnnnnnnnnnnnnnnnnnn

SEQ ID NO: 100136 - DNA, 618 bp, Arabidopsis thaliana columbia
  unsure (1)..(618): unsure at all n locations
ctaatctctcctcctctccttctctctattttgccggaatacatatgatcgagtgaaacggcggacaaagctgtcgtgttgagtactaattcgccgtcgtttttctcagtgaaggagtggtgagagatgtcgagtctcgaagatatcaagaacgagactgttgatctggaaaaaattccgattgaggaagttttccagcagctaaaatgttcaagggaaggattgacaacgcaggaaggggaggacaggattcagatctttggccccaacaagctcgaagagaaaaaggaaagcaaacttctgaagtttttggggtttatgtggaatccactttcatgggtcatggaaatggctgcaatcatggccattgctttggccaacggtgatggtaggcctccggattggcaggattttgttggtattaatctgtctgttggttatcaactctaccatcagttttatcgaagaaaacaatgctgggaatgctgctgctgcccttatggctgggccttgccccaaaaaccaaagggtcttaggggtgggaaagtggngtgnaccaanaancnggaatccttgnccacgnggaaattgttccacnnaaattngggcattntcccc

SEQ ID NO: 100137 - DNA, 1054 bp, Arabidopsis thaliana columbia
  unsure (1)..(1054): unsure at all n locations
nnnnnnnnnnnnnnnnnnnnnnnnnnnnnnnnnnnnnnnnnnnnnnnnnnnnnnnnnnnnnnnnnnnnnnnccacgcgtccgcccacgcgtccgtgaactaatgggtgcggtgtacttacaagttagtatcattagtcaagctctgatcttcgtcacaagatcaaggagttggtcttttgttgaacgtcctggagcattgctgatgattgctttcctcattgcacaactgattgcaactttgattgcggtttacgccaactgggaatttgcaaagattaggggtattggttggggatgggctggtgtgatctggctatacagtattgtcacatacttcccattggacgttttcaagtttgccattcgatacatcttgagcggaaaggcgtggctcaacttgtttgagaacaagacggctttcacgatgaagaaagattacggaaaagaagagagagaggctcaatgggcacttgctcaaaggacacttcacggtttacagccaaaagaagctgttaacatcttccctgagaaaggaagttacagagaattgtctgagatcgctgagcaagctaagagaagagctgagatcgctaggcttagggagctgcacacactcaagggacatgtggaatcagtcgtgaagctaaagggcttggacattgaaactcccagtcactacactgtgtagtaaaaccaaacatatgactgatcttcgatcctctcatgttttgtcttcttcttcttctttttttcttcaccacctcttatgattattattcacatagggagagatctttgtttattgccataactcttcccaaaccttattgttagtgttcttgtttctcaaatatgtacttttgcataatttgctcttttgaagaaacaaggcatgcctttgtgtttggcatttggcacatgcacattctcttctttgctcttattccatgagcctatgtaatcttaatcttcttctttttcgtaatccaactcgatatcagcggccgcgaattcgatatctagcttatcgagacagtcgacttcgggggggtg

SEQ ID NO: 100138 - DNA, 3358 bp, Arabidopsis thaliana columbia
  unsure (1)..(3358): unsure at all n locations
cccacgcgtccgcgctttctctctctctctctcgtgtgtgtgtgtgtgatcgagtggtgaaacgacagagaggggcgtcgttttgttgatttcttctgggtgaagatgtcaggtctcgaagatatcaagaacgagaccgttgatctggaaaaaattccgattgaggaagttttccagcagctaaaatgtacaagggaaggattgacaacgcaggaaggggaagacaggattgtgatatttggccccaacaagctcgaagagaagaaggaaagcaaaattctgaagtttctggggttcatgtggaatccgctttcatgggttatggaagctgcagctctcatggccattgctttggctaatggtgataatcgacctccggattggcaagattttgtgggtattatctgtctgcttgttatcaactccacaatcagtttcattgaagaaaacaacgccggaaatgctgcagctgctctcatggctggtcttgctcctaaaaccaaggttcttagggatggaaaatggagtgaacaagaggctgctatccttgtcccaggtgatattgttagcattaaacttggagacattatcccagccgatgcccgtcttcttgaaggagatcctttaaaggttgatcagtctgctctaactggagagtcccttcctgtgaccaagcaccctggtcaagaagttttctctggttcaacttgtaaacaaggagaaatcgaagcggttgttatagccactggagttcacaccttctttggtaaagctgctcaccttgtggacagcactaaccaagttgggcacttccagaaagttcttacatccattggaaacttctgtatctgttctattgctattggtatagcgattgaaatagtcgtcatgtaccctatccaacaccgaaagtacagagatggaattgacaatctcttggtcctcttgatcggtggtatccccattgctatgcccacggtcttgtctgtgactatggctatcgggtctcacaggttgtctcagcaaggtgctatcaccaaacgtatgacagccattgaagaaatggcgggaatggatgtcctttgcagtgacaaaaccgggacactaacccttaataaattgagtgtggataaaaacttggttgaggttttctgcaagggtgtggagaaagatcaagttctactatttgcagctatggcttctagggtggagaaccaggacgctattgatgcagccatggttggaatgcttgctgatccgaaagaggcccgagctggaatcagagaggttcacttccttccattcaaccctgtggataagagaactgctttgacttacatcgactctgatggtaactggcacagagtcagcaaaggtgctcccgagcagatccttgaccttgccaatgccaggcctgaccttaggaagaaggtactctcttgtattgacaagtacgctgagcgcggtcttaggtcgttggcagtagctcgtcaggtggtacccgagaaaacaaaagaaagcccaggtggaccatgggaatttgttggcttgttgcctctttttgaccctccaagacacgacagtgccgaaaccattcgtagggcgttgaatctaggtgttaatgtgaagatgatcactggtgatcaacttgctattggtaaggaaactggtcgcaggcttggaatgggaacaaacatgtatccatcttcggctcttcttggtacacacaaagacgcaaacctcgcatccattcctgttgaggagttgattgaaaaggctgatggatttgccggagtcttcccagagcacaaatatgaaattgtgaaaaagctgcaggagaggaagcacattgttggtatgaccggtgatggtgttaatgatgcaccctgctttgaagaaagcagatatcggtattgctgtggccgatgctacagatgctgctcgtggtgcttcagatatcgtcctcacggaacctgggctgagtgtcattatcagtgccgttctcactagcagagctattttccagagaatgaagaactatactatttatgcagtctcaatcaccatccgtattgtgtttggtttcatgcttattgctttgatatgggaatttgacttctcagccttcatggttctgatcattgccattcttaacgacggtaccatcatgacaatctcaaaggacagagttaagccatctcccacacctgatagctggaaacttaaagaaatttttgctactggagtcgttctaggaggctaccaggccatcatgactgttattttcttctgggcggcgcacaagactgactttttctcggacacattcggtgtgaggtccattagggacaataaccacgagctaatgggtgcggtgtatctacaagttagtatcattagtcaagctctgatcttcgtcacaagatcaaggagttggtcttttgttgaacgtcctggggcacttctgatgattgctttcgtcattgcacaactggttgcaactttgatcgcagtgtatgccgactggacatttgcaaaggtgaagggtatcggttggggatgggcaggtgtgatttggatttacagtatcgtaacatacttcccacaggacattttgaagtttgccattcggtatatcttgagtggaaaggcttgggccagcttgtttgacaacaggaccgctttcacaaccaagaaagattacggtattggagaaagagaagctcaatgggcacaagctcaaaggacattgcacggtctgcagccaaaagaagatgttaatatcttcccagagaaaggaagttacagagagctgtctgagatcgcagagcaagccaagagaagggccgagatagctaggcttagggagcttcacacattgaagggacatgtggaatcagtcgcaaagctaaagggattggacattgatacagcaggacatcactacactgtgtagttggagttgcacaacaacacaaacatttaccgaaaaccaaccccatcatgactcatcttttgttttgtcttcacaaatctctctttaaaagtcattacagtagagggaagagaactcttgtgtattgccataactcttccaaaactcttttttctttttgttattgttagtcattgttcttaaaactcctactcgatatgagctttgcaaatttgcctttgaagaaacaaggccctttgcctttgaagagacaaggcactttgctttttaatggcctaatgtgattattctaacaaaaaaaaaaaaagttgatcaatttcctcttgaagataaccctttnattttaatacaacnancccnnnnnnnnnnnnnnnnnnngnnnnnnnnnnnnnnnnnnnnnnn

SEQ ID NO: 100139 - DNA, 742 bp, Arabidopsis thaliana columbia
  unsure (1)..(742): unsure at all n locations
acttnaggntgncnggaanccnttccagggccccccgggnntttnaacaccccntttcgggcttntanaangggggggnaaacccnccattgtnttgacccctgggnggtcaactgctaaccncgnggctaantacagaccggctttcccggattctgccagtggtttncccggttatgacccactgatccctttgactggtcttgtagtgccgagtccacctgcaaggcattagtctgatatacagaggtctaatccctatgttggctgaaggatctgccaaggcaccagatagtgaagcccccgaagttatcattgaagctgctctgaagtcggctactcagagaggactgtgcaaccgtggtgatgcaatcgtggcgctgccccgtattggagctgcctcagttattaagatctgtgtggttaagtgagattacagacttctttcaatacctcaaatcttggattgttggtaatcgtaactgagattttgctttgtagcatgaaataaagaaaacaggtcacaatagttcctgaaactctgttacttttaagatatctctctctctttttttttctttctatttagtatttcaagtttatggatcaaaatctgcttcttatggctcccnaaaaaaaaaaaaaaaataaaaaaaaaaataaccccnnaagnnnnnnnnnnnnnnnnnnnnnnnnnnnnnnnnnnnnnnnnnnnnnnnnnnnnnnnnnnnnnnnnnnnnnn

SEQ ID NO: 100140 - DNA, 691 bp, Arabidopsis thaliana columbia
  unsure (1)..(691): unsure at all n locations
atgatcctnnnnnnnnnnnnnnnnnnnnnnnnnnnnnnnnnnnnnnnnnnnnnnnnnnnnnnnnnnnnnnnnnnnnnnnnnnccacgcgtccgcggacgcgtgggtggcaatttaccattctcaacctccggatacatcttcagtggtcaagcctgagaacaatcctccacagtaggatttctgcaataaagagtttgtacagctaatccaactgtccaacatgggtttttcttctgctctaatgactctggtttcttctctcctctctcacccacttgaaaggtaaaaaagtgaaaaaggctttgtagatggaatcaatgtaggatttgcagtagagggaaaaaaaatgtcaaaaagctcaattgatcaagtattattgtaatcattgtacctttattttaggtggactttgatgaaagcaactttttgttttcaagactttagtgggaggttgaggaaggagcttgaagggtgttatttattagtagtagtagtagtgggaagttgtgggaccttgttgagttgtgttcaaattgaagaaaaaacaagtatttgtaatttgtcaccccttgtattattatttattttgtatgaaaaaaaaaaaaaaagnnnnnnnnnnnnnnnnnnnnnnnnnnnnnnnnnnnnnnnnnnnnnnnnnnnnnnnnnnnnnnnnnnnnnnnnntagaatcg

SEQ ID NO: 100141 - DNA, 684 bp, Arabidopsis thaliana columbia
  unsure (1)..(684): unsure at all n locations
aagaccgatagagctgctatgatcgatgagattgtggattatgtaaagtttctcaggctccaagtcaaggttttgagcatgagccgacttggtggagccggtgcggttgctccacttgttactgatatgcctctttcatcatcagttgaggatgaaacccgtgggggtggaaggactccgcaaccagcgtgggagaaatggtctaacgatgggcctgaacgtcatgtggctaaactgatggaggtgaacgttggagccgcgttgcagcttcttcaatcaaaggctctttgtatgatgcccaatctcattggcaatggcaatttaccattctcaacctccggatacatcttcagtggtcaagcctgagaacaatcctccacagtaggatttctgcaataaagagtttgtacagctaatccaactgtccaacatgggtttttcttctgctctaatgactctggtttcttctctcctctctcacccacttgaaaggtaaaaaagtgaaaaaggctttgtagatggaatcaatgtaggatttgcagtagagggaaaaaaaatgtcaaaaagctcaattgatcaagtattaaaaaaaaaaaaaaaaaaaagnnnnnnnnnnnnnnnnnnnnnnnnnnnnnnnnnnnnnnnnnnnnnnnnnnnnnnnnnnnnnnnnnnnaacggatttac

SEQ ID NO: 100142 - DNA, 528 bp, Arabidopsis thaliana columbia
  unsure (1)..(528): unsure at all n locations
gtaatgttcagactcctcctgtcagtcgctgtaataccggtggtggtggtggtggttctacttctgactctcctgcagaatcaccaaactcttcaggaccaggtaatggatcgaaaaccgtaccagtaggagaaggagacggacccccatcgtctgatggaagctctatcaagttctcatttcctcttattgccttcttctccgcggtttcctacatggcaatcttctgagttactattttcccatacgcttttgtgccactcagattgcattctttatttgtccctatttattcacatttcgttgtgattttgtgtgatgtattttatgctctgtaaatccctactctccgggtgatattgctttgttgtaccaacggagagcattttggatctctttaccttttataataaacattactttccagaaaaaaaaaaaaaaaaaaagnnnnnnnnnnnnnnnnnnnnnnnnnnnnnnnnnnnnnnnnnnnnnnnnnnnnnnnnnnnnnnnnnnnnnnnnnnnnnaatc

SEQ ID NO: 100143 - DNA, 654 bp, Arabidopsis thaliana columbia
  unsure (1)..(654): unsure at all n locations
nnnngcgtccgaaaaaccaacaaaacaaactcaaaaggattcttcttcaaacacaacatcttcaagaaaacatgaaaatggaaatgggtttagtgttccttacagtttttatggctgtgatgtcttctacaatggtctctgctcagtcaagctgcacaaacgcgttgattagcatgtcgccgtgtctcaactacataactggaaactctacctctcctaatcagcaatgctgtaatcagttgagtagagtagtccagtcttctcctgactgtttgtgtcaagtccttaacggtggaggctctcagcttgggatcaatgttaaccaaacacaagctcttggtctgcctagggcttgtaatgttcagactcctcctgtcagtcgctgtaataccggtggtggtggtggtggttctacttctgactctcctgcagaatcaccaaactcttcaggaccaggtaatggatcgaaaaccgtaccagtaggagaaggagacggacccccatcgtctgatggaagctctatcaagttctcattccccctaattgccttcttctncgggggttccnaaagggaantcctgnggacaaattcccaaaacngtttgggcaaccaaatnganncttaattgncccaatnaccaaatcggggggagc

SEQ ID NO: 100144 - DNA, 568 bp, Arabidopsis thaliana columbia
tttttaataaaggtcctctgtcccaggcttattgcatccgcaaatccatgagtacaatcctttttgaacagagaacatcgaaagcttttcttgcgtttgtttttacaatcgtttgagaattaacaaaaatcattaacttatatagtttccaaaattcaaaagttcaaaacgcattacgaaatcgaccgaaaacaaaaatacaaatcgataaaacttaggtgcaagtttcacgggaaattccgagcctggaatttggaacgtcgatgagaactcggtggttctgttgctgcatactagcgatgacgttaaggacagagttaacgttgaccggagctgcagccatggcgagggaactgaggttacctgcggagcttgggatgagagggttgtctggaggcagagtcacgttcatttccggcgaacctaaacggcaccgacgggaacacgaccggaccccgaagtagattggggccaaacctcctagggaaagttgcgtttgggtttttaaacaggtttcctgagaccggtttttaaccgccaaggaagcctgggttgacatagccttggg

SEQ ID NO: 100145 - DNA, 522 bp, Arabidopsis thaliana columbia
ttgacgtcgcatgcacgcgtacgtaagcttggatcctctagagcggccgcccttttttttttttttttatataatatatttatttgatttaatttatgaaccacacattttacatattagttggatattctacaaggacatgacttgattaatcaattaattaaatatacatcgaatcacattgctctctcctcttgatcttcacctttagcccaccagccatgtgagcggttagaagaggaacaaagaccggccggttattgcaaaccggtataatcttaaaccgactcaaaactgaaccaaccacgtatttcatttgtgtaaaagccatttcttttacctatgcaaacccttggtccggcttggaaaaccggaaacttgaacgaactcacacttttcaaaacccggtttgtaccggaactcggttcttcctcaaaccaccggtttggtttaaaactcgggccaaattttaacccaaaactttttcaatccttccataacggaaggggaaaaaagggactt

SEQ ID NO: 100146 - DNA, 2251 bp, Arabidopsis thaliana columbia
  unsure (1)..(2251): unsure at all n locations
ggatcctcgctcgctttctcgtctctctcgtgtctctcaacagaaaaccatggcggacggccacttcctcaataatatctctctcagcggtcgcggtggaaagaacccgggtttacttaaaatcaattctggaggaattcaatggaagaaacaaggtggtggaaaagctgtggaagttgatagatctgatattgtaagtgttagttggacgaaagtgacaaagagtaatcaattgggagtcaaaaccaaagatggattgtactacaagttcgttggatttcgagatcaggatgttccaagtctgtctagctttttccaaagttcttatggaaaaacaccggatgagaagcaattatcagttagtggtcgtaattggggagaggtggatttacacgggaatacactaacctttttggttggatcaaaacaagcttttgaagtatctttagctgatgtttcacagactcagcttcaagggaaaaatgatgttactttggagtttcatgttgatgatactgctggtgctaatgagaaagactccgctgatggagattagttttcatattcctaattccaacactcagtttgttggtgatgaaaaccgtccaccttctcaagttttcaatgacacaatcgttgcaatggctgatgttagtcctggagttgaggatgcggtcgtcacatttgagagtattgcaatcctcacacccaggggtcggtacaatgtggaacttcacctttctttcttacgattgcaagagcaagctaatgactttaaaatccagtacagtagcgttgtccgtttgttcttgcttccaaagtcaaaccaaccacacacgtttgttgttatctctctagacccaccaatccggaaaggtcagacaatgtacccccacattgttatgcagtttgaaacagacaccgttgtcgaaagtgaactgtcaattagtgatgaacttatgaatacaaagttcaaggacaagctggagcgatcatataagggtctcattcatgaagtattcaccaccgtgttgcgttggctgtctggtgcaaagatcactaaacctgggaagttccgcagttcccaagatgggtttgcagtgaaatcgtctctcaaggcagaagatggggttctttatccactcgagaagggatttttcttcttacctaaacctccaacgcttatacttcacgatgagattgactatgtcgagtttgaaaggcatgctgctggtggtgctaacatgcattactttgatcttctcataagactgaaaactgaccatgaacatctgttccgtaacattcaaagaaatgagtatcacaatctctataccttcataagctctaagggtttgaagattatgaaccttggaggtgcgggtaccgcagacggtgttgctgctgttcttggggataatgatgatgatgatgctgttgaccctcatcttacgcgtatcagaaaccaagctgctgatgagagtgatgaggaggacgaagactttgttatgggtgaggatgatgatggtggttcaccaactgatgattctggcggggacgactctgatgctagtgaaggcggtgtaggagagataaaagagaaatctatcaagaaggaacctaagaaagaggcttcgtcatcgaaaggattgcctcctaagaggaaaactgtagccgcagacgaaggcagtagtaagaggaagaagccgaagaagaagaaggatcccaacgcaccaaaaagagcaatgtctggtttcatgttcttttcccaaatggaaagagataacataaagaaggaacacccaggaatagcatttggagaggtgggaaaggtgcttggagataagtgcgtcaaatgtctgctgatgataaagagccatatgaagccaaggcttcaagtcgacaagcagcgatacaaggatgagatcagtgattacaagaaccctcagccgatgaatgtggactcaggaaacgattccggatagtaactaaactttgattctccaacattctctactagtatctcatttaccctacaatactaagttatggcatgtagtaaacgttggacctttagttgtttggagttaaccagatttttctctttgaccttttagatcttgtgttacttcctagaaaagaagagcctgtctttacctcaaaaaaaaaaaaaaaaaaagggcggccgctctagaggatccaagcttacgtacgcgtgcatgcgacgtcatagtcttcntataggtcacct

SEQ ID NO: 100147 - DNA, 523 bp, Arabidopsis thaliana columbia
atagaagagctttgacgtcgcatgcacgcgtacgtaagcttggatcctctagagcggccgccctttttttttttttttgcttcttatgtttctttttactagtgcatgaatgcaatgtttgggtttaacttaactacaaaataagaagttgaaaggaagaaactaactttaaaacaccagagcacaggagctcaaaattccaatctgggggctacaacaagaccttaaggcatggtgtgtggagcaacaagacaaatacttcccacatcatatagcctaattgttctgtatttcttcacttatattcttgactaaaagagggatttctatcagatcctaaatcacatctaaccccaataatcaaggctgctacattccatctctatgtgatgtcgttctctagatatatcagatcacttacactgttttgatcggaaattctcagtggataataacgaagttaccagattcttgagccgtttagcgcctggaccaggacttgataacatgagggccaccaata

SEQ ID NO: 100148 - DNA, 414 bp, Arabidopsis thaliana columbia
tgttctggcgccgcaggagcataagcttccgcccaggccaaggaggaacaacaagcggcttgctgcttcggatccggatccggatcctattgagtcggttcaggagaaaccaaagcgcacgcgtggatcgtcgaagcaagaggaaaatgaactgcccaagagtactagggcttcgaggaaaaagaatctggacgatatcgccgataaagaagaggaattggatgtggaaattgagaaggtggtcaaagctagggttgggaggcctcggaagaacgcaggcagtgcaattgcgaaggaagaagaagttgtggaggagaaaaaaagggttgggaggccccggaagaacgcaagtagtgcaattacggaggaagaagaagttgtggaggagaaaaaaggcaactctagggctcggag

SEQ ID NO: 100149 - DNA, 549 bp, Arabidopsis thaliana columbia
ctcgcccgccgggggagggccctacccacgccaacggaaataataggtgcaccttagaagatctatgacgtcgcatgcacgcgtacgtaagcttggatcctctagagcggccgccctttttttttttttttttcatgaaacttatctgatttttaaaattagtcattacattcaatcacgttaaaaacttataataattattttctattttcctcctctcatatatacaaaaagagaaagaggaaaaagacttctccaacaatggttgctaaagccaaggcagagaagtgatatatagtgtgacatattgagtgcagacaccgtacgagatgacgtagtcctccaagtgaactggagacaagctaagcacaaaccctaattaagactgaggctcctgagaggaagaagaagaagaacaccaaaggctgctgtatcttctctccaagcgtactgtttgacacagagacattatcctccacgctaaccatcgggaggctcacgagaaattcctgtgtccaaatgtgggaaaacctcggagacaaaaccatc

SEQ ID NO: 100150 - DNA, 510 bp, Arabidopsis thaliana columbia
cttagaagatctatgacgtcgcatgcacgcgtacgtaagcttggatcctctagagcggccgcccttttttttttttttttagtgtctctgaaacattgaattcatttatggtttcatttaaatctttacaaaaagaactctgtaatttctgtagtttatgcagactatacagcaacaataaaaagaactctcaaaactcatttcaggtcacctattcgtttttgcatacgcatcaatcaaaagcttcttgaatctatggagatctaacctcactttctggtcgttcaggtatatcccctttgtgaattgccatcctttcttaccgatgctgcttggatcttttagaatcggatcatctttatcatatttttcatacaatgagctctctcttggaagaatcttattaaccagttgtaccctaagacccgagcttatttggccggttctgccataattagtcctttgctgccccacctcgttcctagtggtattgacctcgactaaacatac

SEQ ID NO: 100151 - DNA, 568 bp, Arabidopsis thaliana columbia
  unsure (1)..(568): unsure at all n locations
nnnnnnnnnnnnnnnnnnnnnnnnnnnnnnnnnnnnnnnnnnnnnnnaccatcttttcagaaggaccttacctcccccgcggccggttcgaatgaaaattgcacttggtgcagctaaaggtctcgcctttcttcacgaagaagctgagaagccagtcatatatcgagatttcaaaacatctaatattttactggatggggaatataatgcaaagctctctgattttgggcttgcaaaagatgctccagacgagaaaaaatcccatgactcgggttgatacgtgggaacttatggttatgctgcccctgaatatgtaatgactggacatctgacaacgaagagcgatgtatacagttttggagtagttttacttgaaatattaactggacgaagatctgtggataaaagtcggccgaacggggaacagaacttggtagaatgggtgagacctcatctcttagacaagaaaaggttttaccggctattagatcctcggttagagggtcactactcgatcaaaggtgctcagaaagccacacaagtagcggcgcaatgccttaaccgagac

SEQ ID NO: 100152 - DNA, 915 bp, Arabidopsis thaliana columbia
gactgtccgtctgcggtaccggtccggaattcccgggtcgacccacgcgtccggagaaattgggtgttgagaaaggtgaaaaagggaagatgatgagtaaaaaaagaatgttaagaaagatggagatgagagtgaaagtgggttttggtttagattcaagtttatctttagttgtatctcttctagatcaaaagttgatagttccatgaatgctactgctgttattgcagaacctaagaaagttattgagaagcttgaaggtcatccagctccgactaaagacactggctgtgcggagagcggttcctcaacacctctaatgagcggggaattgaagtattcttctaagctacggattttcatgtttaacgaccttaagttagccactaggaatttcagaccagagtctcttctcggtgagggtgggtttggatgtgtttttaaaggatggatagaggagaatggaactgcacctgtcaagcctggtactggtctaactgtagctgtcaaaacactgaacccagatggccttcaaggtcacaaggagtggctggctgaaattaacttccttggaaaccttgttcaccccagtctggttaaattagttggctactgcatggaagaagaccaaaggctgcttgtttacgagtttatgccacgaggaagtttggagaccatcttttcagaagacctacctctcccttggctgttcaatgaaattgacttggtgcagtaaggtctcccttcttacaagagctgaaagccatctattcgagattcaaactctatatttactggtggggaaatatgcaagctctctatttggcctgcaaatgctcaacagaaaatccacttcacccagctgggactatggttgctgccgattgtagcggctctgcacaaacgtgttcagtt

SEQ ID NO: 100153 - DNA, 184 bp, Arabidopsis thaliana columbia
agagaatgacaagtgacttaacattacgtttccagataccaatgaatgttctctctctcgcttgttatgcttctacttggttttgtgtgttctctattttgttctggttctgctttagatttgacgtaacagttcgtgattaggtattttggtatctggaaacgtaatgacaagtgacttaaca

SEQ ID NO: 100154 - DNA, 446 bp, Arabidopsis thaliana columbia
  unsure (1)..(446): unsure at all n locations
tttgaaaccctaatttctcttcttttccccaaaaaaaaatgtctgaagttgagtaccggtgctttgtcggcggccttgcctgggccaccaatgatgaagatcttcaaaggacgttctcacagttcggcgacgttatcgattctaagatcattaacgaccgcgagagtggaagatcaaggggattcggattcgtcaccttcaaggacgagaaagccatgagggatgcgattgaagagatgaacggtaaagagctcgatggacgtttccatcacccgtgaacgaggctcagtccgaagaggttgccggcgggtggccggagggaggccccttggttggaagcccggtggttgggttacccccacccggggcccggtggttgggttactccaagaaagccggttggccggcggattctccnnggaagaaagccggttngttggtttacc

SEQ ID NO: 100155 - DNA, 583 bp, Arabidopsis thaliana columbia
  unsure (1)..(583): unsure at all n locations
gccttaatacaactcatatagggaaagctggtccgcctgcaggtaccggtccggaattcccgggtcgacccaggggtccgcggacgcatgggtttgaaaccctaatttctcttcttttccccaaaaaaaaaatgtctgaagttgagtaccggtgctttgtcggcggccttgcctgggccaccaatgatgaagatcttcaaaggacgttctcacagttcggcgacgttatcgaggctgagatcattaacgaccgcnagagtggaagatcaaggggattcggattcgtcaccttcaaggacgagaaagccatgagggatgcgattgaagagatgaacggtaaagagctcgatggacgtgtcatcaccgtgaacgaggctcagtcgagaggtagcggcggtggcggaggaggccgtggtggaagcggtggtggttaccgcagccggaggcggtggtggatactcaaggaggccggtggcggcggatactccaggaggaaggccggggggtggttacgagagaccgtagccggnngttancggntcttnttgnagccggttntttcccaaggataccggttgttgtg

SEQ ID NO: 100156 - DNA, 546 bp, Arabidopsis thaliana columbia
  unsure (1)..(546): unsure at all n locations
ctctcactgtaatcccttagatcttcttttcaaatttcaatggcgtccggtgatgttgagtatcggtgcttcgttggaggtctagcatgggccactgatgacagagctcttgagactgccttcgctcaatacggcgacgttattgattccaaggtctgttacacgccgagatcggactccgagtgatatcgatgatctcatcctcgacggatctgttccgatcttgtgtttctctgttacttgattcgattactctgttactattctcgttctttgttactactactactactaactgttaccttgtattttccccaaatcgggtacggtcaatctctccctgccttcttgtgagcccggngatcgatcggattttttttgaattttgaaaatttgttggaggtctaaagncttttgntcaagtttgttnggttgttttgctgaacctggnttttgnatnntttnggtaacaggcatnacggccgagggctgaaggncaaggggnttggntnggacctcaaggtnngaaancataagntcggtttg

SEQ ID NO: 100157 - DNA, 480 bp, Arabidopsis thaliana columbia
  unsure (1)..(480): unsure at all n locations
ctcactgtaatcccttagatcttcttttcaaatttcaatggcgtccggtgatgttgagtatcggtgcttcgttggaggtctagcatgggccactgatgacagagctcttgagactgccttcgctcaatacggcgacgttattgattccaagatcattaacgatcgtaagactggaagatcaaggggattcggattcgtcaccttcaaaggatgagaaagccatgaaggattgcgtttgaggggaatgaaacggccaagatcttcgaatggccgtagcatcacctgttaacgggggcctcattcacgggggaaagccggttgccggccggggggccccccttgggacggttggttggccggtttggatcaccccaagtcggccggttcgcgttggaaggtttactcccggtttagggtggtagctancgggangtnngctnccggtagaccngaangnttttnnnaaggttcaaccggccg

SEQ ID NO: 100158 - DNA, 508 bp, Arabidopsis thaliana columbia
cgattgtattaggtgacactatagaagatctatgacgtcgcatgcacgcgtacgtaagctcggaattcggctcgagaatccgaatccccttgatcttccagtctcacgatcgttaatgatcttggaatcaataacgtcgccgtattgagcgaaggcagtctcaagaggattcggattcgtcaccttcaaggatgagaaagccatgaaggatgcgattgagggaatgaacggaccagatctcgatggccgtagcatcactgttaacgaggctcagtcacgaggaagcggtggcggcggaggccaccgtggaggtggtggcggtggataccgcagcggcggtggtggaggttactccggtggaggtggtagctacggaggtggcggcggtagacgcgagggtggaggaggatacagcggcggcggcggcggttactcctcaagaggtggtggtggcggaagctaccgtggtggaagacgtgagggaggaggaggataccgtggtggtgaa

SEQ ID NO: 100159 - DNA, 371 bp, Arabidopsis thaliana columbia
ctcaatgtaatcccttagatcttcttttcaaatttcaatggcgtccggtgatgttgagtatcggtgcttcgttggaggtctagcatgggccactgatgacagagctcttgagactgccttcgctcaatacggcgacgttattgattccaagatcattaacgatcgtgagactggaagatcaaggggattcggattcgtcaccttcaaggatgagaaagccatgaaggatgcgattgagggaatgaacggacaagatctcgatggccgtagcatcactgttaacgaggctcagtcacgaggaagcggtggcggcggaggccaccgtggaggtggtggcggtggataccgcagcggcggtggtggaggttact

SEQ ID NO: 100160 - DNA, 509 bp, Arabidopsis thaliana columbia
  unsure (1)..(509): unsure at all n locations
nnnnnnnnnnnnnnnnnnnnnnnnnnnnnnnnnnnnnnnnnnnnnnnnnnnnnnnnnnnnnnnnnnccacgcgtccgtgaaaccctaatttctcttcttttccccaaaaaaaaatgtctgaagttgagtaccggtgctttgtcggcggccttgcctgggccaccaatgatgaagatcttcaaaggacgttctcacagttcggcgacgttatcgattctaaggtctgttacacgagagatcggtctcccggatcgagccgattccgatgattctgatcctcgacggatctgattccgatctgtttctctgttacttgattcgattactgttactatgttctctctcgttctttgttactgttacttaatttgtcccatcgatcattaacgaccgcgagagtggaagatcaaggggattcggattcgtcaccttcaaggacgagaaagccatgagggatgcgattgaagagatgaacggtaaagagctcgatggacgtgtcatcaccgtga

SEQ ID NO: 100161 - DNA, 755 bp, Arabidopsis thaliana columbia
ggtcgcctgcaggtaccggtccggaattcccgggtcgacccacgcgtccgctaatttctcttcttttccccaaaaaaaaatgtctgaagttgagtaccggtgctttgtcggcggccttgcctgggccaccaatgatgaagatcttcaaaggacgttctcacagttcggcgacgttatcgattctaagatcgattaacgaccgcgagagtggaagatcaaggggattcggattcgtcaccttcaaggacgagaaagccatgagggatgcgattgaagagatgaacggtaaagagctcgatggacgtgtcatcaccgtgaacgaggctcagtcgagaggtagcggcggtggcggaggaggccgtggtggaagcggtggtggttaccgcagcggaggcggtggtggatactcaggaggcggtggcggcggatactcaggaggaggcggtggtggttacgagagacgtagcggaggttacggatctggtggaggcggtggtggccgaggatacggtggtggtggacgccgtgagggaggtggctacggaggcggtgatggtggaagttacggaggcggtggtggcggctggtaatcaaagatagagttgtttgcgtgactgctgctctgcatttttggtttagatttggttttgtgtcaccacttctggtttgttatcgttcgtttgtttacttttttgatgaaacagtttcgtttaagtcttctttgtctggaacgaaatgttaattcgcgtgttgtt

SEQ ID NO: 100162 - DNA, 525 bp, Arabidopsis thaliana columbia
  unsure (1)..(525): unsure at all n locations
gctggtacgcctgcaggtaccggtccggatttcccgggtcgacccacgcgtccgcggacgcgtgggcggacgcgtgggtgggtttgatcttgaccacgacgagaaagacagcagttacaacagaatcaagagcttagtgactgaggaactaaaacagtatttcagaccagagttctcgtacaggttagatgagatgattgttttcagacagttaacaaagctggaagtcaaggaggatacagcggcggcggcggcggttactcctcaagaggtggtggtggcggaagctacggtggtggaagacgtgagggaggaggaggataccgtggtggtgaaggaggaggttacggaggaagcgggggtggtggaggatnnnnatttctttaattanggttgggggataccaatgagtggtcttnttttgggttgtgatgcttatacttggggtgtgggggggctctatttggggtgggctctgctttagattagagggacccgggggcggattaggtatttgtgggatcc

SEQ ID NO: 100163 - DNA, 532 bp, Arabidopsis thaliana columbia
  unsure (1)..(532): unsure at all n locations
gctcactactctcactgtaatcccttagatcttcttttcaaatttcaatggcgtccggtgatgttgagtatcggtgcttcgttggaggtctagcatgggccactgatgacagagctcttgagactgccttcgctcaatacggcgacgttattgattccaagatcattaacgatcgtaagactggaagatcaaggggattcggattcgtcaccttcaaggatgagaaagccatgaaggatgcgattgagggaatgaacggacaagatctcgatggccgtagcatcactgttaacgaggctcagtcacgaggaagcgggtggcggcggaggccaccgtggaaggtggttggccggttggattaccccaagcggcggttggtggaggttactccgggtggaggtggtagctacgggaggtggcggcggtacccccgaataattgaggaggnataaancggccgncgggcggcgggtaacncctcaaanaggttgttnttnccgaaactnancgtttgtttaaaaactttaggaat

SEQ ID NO: 100164 - DNA, 622 bp, Arabidopsis thaliana columbia
gactcaccttagggaaagctacgtacgcctgcaggtaccggtccggaattcccgggtcgacccacaggtccgcccacgcgtccggcgcccactgtaatcccttagatcttcttttcaaatttcaatggcgtccggtgatgttgagtatcggtgcttcgttggaggtctagcatgggccactgatgacagagctcttgagactgccttcgctcaatacggcgacgttattgattccaaggtctgttacacgccgagatcggactccgagtgatatcgatgatctcatcctcgacggatctgttccgatcttgtgtttctctgttacttgattcgattactctgttactattctcgttctttgttactactactactactactgttacttgtattttcccaaatcggtacgttcatcttcctgcttctgtgagcccggagatcgatcggatttttttgtattttgtatatttgttgtagatctaaatgcttttgttcagttttgttggattgttttgctgatctgaaaaaaaaaaaaaaaaaaaaaactaaagggcgaccgctctagaggatccaagcttacgtacgcgtgcgtgcgacgtcatagtcttctatagtgcaccta

SEQ ID NO: 100165 - DNA, 820 bp, Arabidopsis thaliana columbia
acccactatacggtaagctggtacgcctgcaggtaccggtccggaattcccgggtcgacccacgtggccgcccacgcgtccgactctcactgtaatcccttagatcttcttttcaaatttcaatggcgtccggtgatgttgagtatcggtgcttcgttggaggtctagcatgggccactgatgacagagctcttgagactgccttcgctcaatacggcgacgttattgattccaaggtctgttacacgccgagatcggactccgagtgatatcgatgatctcatcctcgacggatctgttccgatcttgtgtttctctgttacttgattcgattactctgttactattctcgttctttgttactactactactactactgttacttgtattttcccaaatcggtacgttcatcttcctgcttctgtgagcccggagatcgatcggattttgattcgtcaccttcaaggatgagaaagccatgaaggatgcgattgagggaatgaacggacaagatctcgatggccgtagcatcactgttaacgaggctcagtcacgaggaagcggtggcggcggaggccaccgtggaggtggtggcggtggataccgcagcggcggtggtggaggttactccggtggaggtggtagctacggaggtggcggcggtagacgcgagggtggaggaggatacagcggcggcggcggcggttactcctcaagaggtggtggtggcggaagctacggtggtggaagacgtgagggaggaggaggatacggtggtggtgaaaggaggaggttactggcgaattgggggaaacacca

SEQ ID NO: 100166 - DNA, 670 bp, Arabidopsis thaliana columbia
tcccgggtcgaccaacccgtccgttctcttacattttgaaaccctaatttctcttcttttccccaaaaaaaaatgtctgaagttgagtaccggtgctttgtcggcggccttgcctgggccaccaatgatgaagatcttcaaaggacgttctcacagttcggcgacgttatcgattctaagatcattaacgaccgcgagagtggaagatcaaggggattcggattcgtcaccttcaaggacgagaaagccatgagggatgcgattgaagagatgaacggtaaagagctcgatggacgtgtcatcaccgtgaacgaggctcagtcgagaggtagcggcggtggcggaggaggccgtggtggaagcggtggtggttaccgcagcggaggcggtggtggatactcaggaggcggtggcggcggatactcaggaggaggcggtggtggttacgagagacgtagcggaggttacggatctggtggaggcggtggtggccgaggatacggtggtggtggacgccgtgagggaggtggctacggaggcggtgatggtggaagttacggaggcggtggtggcgggtggtaatcaaaaatagagttgtttgcgtgctgctgctctgcatttggcttagatttggttttgagtcaccactgatggttcgggtatcgcctgt

SEQ ID NO: 100167 - DNA, 694 bp, Arabidopsis thaliana columbia
  unsure (1)..(694): unsure at all n locations
cccactcgtccggtgaggagaggttactgggggaataagattgggaagccacacactgtgccttgtaaggttactgggaagtgtggctctgttactgtgagaatggttcctgctccgagaggttctggtattgttgctgctagggttcctaagaaggttcttcagttcgctggtattgatgatgtctttacttcctccaagaggatccactaaaactcttggaaactttgtcaaggcgacgtttgactgcttacaaaagacatatgggttccttacaccagagttttggaaagagactagattctccagatcgccctaccaagagcacactgatttcttgtcgactaaggctgtttttgcaaccaaggttatcccggagggtgaagaccaagcttaagaccttcatgagataagttttggttgttcttaaaactaattcctcctttgaaaaagagtatttttttttcttgattatctatgagttttgttattggtggtttcgttactgttttggattttgttagatgtttgccttaatgcaaattcccctgaaaaagcttttgcaataacaaaaaaaaaaaaaaaaaaaaaaaaaagaaaaaaaaaaaaaagggcaggccgctctagaggatccaagcttacgtacgcgtgcatgcgacgtcaaagtctnnctataagtcacctangatcaatc

SEQ ID NO: 100168 - DNA, 1102 bp, Arabidopsis thaliana columbia
  unsure (1)..(1102): unsure at all n locations
accggncccggnaattncccgggntcgaacccacgctcaccgctcactactctcactgtaatcccttagatcttcttttcaaatttcaatggcgtccggtgatgttgagtatcggtgcttcgttggaggtctagcatgggccactgatgacagagctcttgagactgccttcgctcaatacggcgacgttattgattccaagatcattaacgatcgtgagactggaagatcaaggggattcggattcgtcaccttcaaggatgagaaagccatgaaggatgcgattgagggaatgaacggacaagatctcgatggccgtagcatcactgttaacgaggctcagtcacgaggaagcggtggcggcggaggccaccgtggaggtggttggcggtggataccgcagcggcggtggtggaggttactccggtggaggtggtagctacggaggtggcggcggtagacgcgagggtggaggaggatacagcggcggcggcggcggttactcctcaagaggtggtggtggcggaagctacggtggtggaagacgtgagggaggaggaggatacggtggtggtgaaggaggaggttacggaggaagcggtggtggtggaggatggtaattcctttaattaggtttgggattaccaatgaatgttctctctctcgcttgttatgcttctacttggttttgtgtgttctctattttgttctggttctgctttagatttgatgtaacagttcgtgattaggtattttggtatctggaaacgtaatgttaagtcacttgtcattctctaaataacaaatttcttcggagatattatctctgttgattgattctatcaactaaaaagaaaaaggaaaaaaaaaaaaaaaaaaaaaaaaaaaaaaaaaaaaaaaaaaaaaaaaataaaaaaaaaaaaaaggggccgctctaaaggatcaaagctaacttacgcgtgaatgcaaagtaaaagctcttcaaaagtgtaaccaaaattaaattaagggggcgtcttttaaaaacgtcgtgagggaaaaaaccggtgggttacaaaattaaaccgctttgaagaaaatccccttttcgaaagggggggaa

SEQ ID NO: 100169 - DNA, 1073 bp, Arabidopsis thaliana columbia
cacacacgtccgcccacgcgtccgcccacgcgtccgggcggaaagaggaggagaaagcggcgcagagcgtggcggtgaccgtggtgacttcgggcgtggattcggcggtggacgtggaggtggccgtggccgtgatcgtggtccaagaggccgtggaagacgtggaggccgtgcctcggaagaaacgaaatgggttccagtgaccaaactaggtcgtctagtggctgacaataaaataacgaagctagagcagatctatcttcattctctcccagtaaaggagtaccaaatcatagatcatcttgttggtcctacgttgaaagacgaggttatgaagatcatgcctgttcagaaacaaaccagagctggtcaaaggactagattcaaggcctttgttgttgttggtgatggaaatggtcatgttggtttgggtgtcaagtgttctaaggaagttgctactgccattagaggagctattattcttgctaagctatcagtggttccggtgaggagaggttattgggggaataagattgggaagccacacactgtgccttgtaaggttactggtaaatgtggttctgttactgtgagaatggttcctgctccgagaggttctggtattgttgctgctagggttcctaagaaggttcttcagttcgctggtattgatgatgtctttacttcttcaagaggatctaccaaaacccttggaaactttgtcaaggctacattcgattgcttacagaagacatatgggttccttacaccagagttctggaaagagactagattctccagatcgccgtaccaagagcacactgatttcctgtcgactaaggctgtttctgcaaccaaggttatcactgagggtgaagaccaagcttaagaccttcatgagatgagtttggtttataggttttggttatcgcaaatatttatctttccggtcttgtttcttggttgtcttttatcagtttttgatattggagtttcagttacaaggataatcataatttagttatgtttggcttttgttagatatttgcttccatgaaatgacattttgcaat

SEQ ID NO: 100170 - DNA, 1406 bp, Arabidopsis thaliana columbia
  unsure (1)..(1406): unsure at all n locations
ttgtatgacataatgacgacgagacgaaggacaaaattgtcatttaaggaataaaagatattcttacaaagatattttttgctcgaaacgaggagaaaaaatcattagttatcgaaaatgctcacatgatgtgggcctaaccactaacccaattaaccacacatcttaatcagagtaagttgaaacaaatctttcagcaaaccctagaaaacatgtttaaccctagttattacgtcacacctgttctataaattaaggctgcgtcttatcacctcaaatcacataagtctctctcttacattttgaaaccctaatttctcaaaaaaaatgtctgaagttgagtaccggtgctttgtcggcggccttgcctgggccaccaatgatgaagatcttcaaaggacgttctcacagttcggcgacgttatcgattctaaggtctgttacacgagagatcggtctcccggatcgagccgattccgatgattctgatcctcgacggatctgattccgatctgtttctctgttacttgattcgattactgttactatgttctctctcgttctttgttactgttacttaatttgtcccatcggtacgttcatcttcctgcttctatgagctcggagatcgatcgatttttgctttatattcatcgctttgttttatattccttccacgattgtttttgctgatgtgtatgattttgtttgtttacagatcattaacgaccgcgagagtggaagatcaaggggattcggattcgtcaccttcaaggacgagaaagccatgagggatgcgattgaagagatgaacggtaaagagctcgatggacgtgtcatcaccgtgaacgaggctcagtcgagaggtagcggcggtggcggaggaggccgtggtggaagcggtggtggttaccgcagcggaggcggtggtggatactcaggaggcggtggcggcggatactcaggaggaggcggtggtggttacgagagacgtagcggaggttacggatctggtggaggcggtggtggccgaggatacggtggtggtggacgccgtgagggaggtggctacggaggcggtgatggtggaagttacggaggcggtggtggcggctggtaatcaaagatagagttgtttgcgtgctgctgctctgtttttggtttagatttggttttgtgtcaccacttctggtttggttatcgttcgtttggtttacttttttgatgaaacagtttcgtttaagtcttctttgtctggaacgaaatgttaattcgcgtgttgtttactaaatttataacgtttccttttaaccagattcgagattttccctcaaataatttatcttgttagacacaagagatnnnnnnnnnnnnnnnnnnnnnnnnnnnnnnnnnnnnnnnnnnnn

SEQ ID NO: 100171 - DNA, 515 bp, Arabidopsis thaliana columbia
  unsure (1)..(515): unsure at all n locations
nnnnnnnnnnnnnnnnnnnnnnnnnnctatgacgtcgcatgcacgcgtacgtaagcttggatcctctagagcggccgccctttgttttttttttttttgtccatgtttcacagaatctggccttaagcaattttatcatatttaagctacaaatccataaccgagtttaacaaagataaaataaccagaaagttacattgaaagataaaaagggaagaagacaaaattttgaggggggggagcgctaaatcgaaaacaaaagaaggcattggcaatagcattccgattttaaaaaaccgataaagctatgtatctaatggcttggtcttagaagcttcaacgaacatagaagcacccttattcaaaaacttagtcttgtccaacacaaagtccaactccttagctggcaacaacttatacttctcttcaacaatctttttactctcaaccgaaaccaaactccattgctggttcacataatgctcatcaacacccaaactagcaattatcctaac

SEQ ID NO: 100172 - DNA, 564 bp, Arabidopsis thaliana columbia
ctttctcctccgacacactccaaaactcataaatctatctgatgcgaatttgactaactctttcgtaattcaggatcttactacaaatctttaactcaccaatcttcttcttattcaaagattagagagaaaatggacaacgagctgtttatgaacacagagtttccaccaccgccggagatggcgacgcatttcgaacaccaacagtcttcttcatcggccatgatgcttaattgggctttaatggatccaaatccgcatcaagattcttcctttttatgggaaaagtcaacggaacaacaacaacaacaaagcatctttgactctgctttaagctcattagtctcatcaccgacgccgtcaaattccaacttctccggcggtggcggtgacggttttctcatcagagaactcatcggaaagcttggaaacatcggtaataataataacaactccggtgagatctacggaactccgatgtctcgctccgcctcatgttacgcaactccgatgagctctccaccgccaccgacgaattcgaattctcagatgatgatgaacaga

SEQ ID NO: 100173 - DNA, 619 bp, Arabidopsis thaliana columbia
  unsure (1)..(619): unsure at all n locations
nnnnnnnnnnnnnnnnnnnnnnnnnnnnnnnnnnnnnnnnnnnnnnnnnnnnnnnnnnnnnnnnnnnnnnnnnnnnnnnnctttgcatggtttgcttatacaaatacgacattgcgtgtaatatatggcataacataattccccgatgttcctgtacatcaatcagaccagtgaagttacactggttttgaattgagaccgaaaccaaacgggaacaatgggtcatttgaattggcatgagcatctaggggcaaatgctcaacgtgtttgaaccagctcactggcaacttccccttgaagtcataatctccaaaaacaacgtcagccaccccttgcccttctgttccaggcagccaagcagcaaccagagcctctgtcttttcaagaaccggcggctccaaaaccacaggtcgtcctgagatcaatatcaccagagtcgggattatctctgcaactgcggtgacaatgtcagtaccatttaaagggattctgagtccgagttatcccccatcggctctgcataggggggtccccgactgnaacaatggggtagagnatccttcacttggggtaaggttccttgatggggttcccatgntnctngggtcgcncantgggc

SEQ ID NO: 100174 - DNA, 774 bp, Arabidopsis thaliana columbia
  unsure (1)..(774): unsure at all n locations
nnnnnnnntcgttcgaaacnnnnnnnnnnnnnnnnnnnnnnnnnnnnnnnnnnnnnnnnnnnnnnnnnnnnnnnnnnnnnnnnnnnnnnnnnnnnnnnnnnnnnncggccgcttttaagcatataaactcatacatctcttcatttgattctccaaaagaataatcatatagagatttgtctctgtaactatctacttagttagactgcgaacgatcttttggtttagacaaactaagcttcttctaggcaatggcgacattcataaattgaaaataaagaaagggttctaagtttttattggttttatcttccttggactagaccactaaagacttggctgtttccagcaagagtggcttcccattcaatggaagacaggagtatctgcgagagcgatataaccacttgcttcatgtttggtcttagaatcggatcatcatccacacattgctttgccaacgtagcaatcttgaacaaacagtcatgcgggtataaatccatcatgttggggtcaacaaactccttcaaactcgacatgttcatagagtctggtgagttctttagcactgctaacataatagatgccaatggacgtctttctggattcttagttccaatcgcctccgttcttataacagcttctcttccggatataatttcgaaaagaacaacaccaaaggcgtaaatatcacttttcgaggtggcaagaccgtcgcttagatattctggtggcagataaccatatgtacccactactttaggtactgatatt

SEQ ID NO: 100175 - DNA, 713 bp, Arabidopsis thaliana columbia
cgactcactatttggagggctggaccgcctgcaggtaccggtccggaattcccgggtcgtcccacgcgtccggtggccgttccttgaaatccgattctgattccttccttttggatccgattctatctccaccttcaagcacaatattcgactcggtactctctctttcttcttcttattgcaaaaagattctctttttatctgttttgtggatatagagattctggataaaaacaatcatcttttttctctcaaaaatctctgcttaagaactgggattcttcaaaagctcttctcttgtctgatttcttctgaatttcccctctaagtctctccaattcttctccattagctataaagtcgattcctttatcaccgttctgaagaatttggtcgaaagttttggcctttagtacccaattttcaatcctggcgataactgaattgaaaagggttccaaaagttacatcacctgaaaacaacagtgcttttgattgtgttggtggtttggagtgcttgataagttgaatcacggcccttgatatggggtcctgcttatcatcatctggaggtggaggaagcaggagatctctccatggctctcctcatgttcctggacctgggaggaggaagaggcctcccaagaggagacctgggtcttgtagttcttcgtttgataacaccgaggagccacttcttcatagggatccctg

SEQ ID NO: 100176 - DNA, 615 bp, Arabidopsis thaliana columbia
  unsure (1)..(615): unsure at all n locations
agaaatttaatccactagtattaattgtgtcacatttgtttctcaaaaatagaaaaaaaaaaatcaaatctatgtgatttggagtttataaaaatcatgaaatcttttctttactaaatgttcttcttcactccttattcattaagcatccacaatttcccatcaatattgttttatactttatatacttcttcaagtcaatctcagtctcatttcgaacttcttcccaacaagtaacgacagtttagaaacctccacacttagaaacctcggatcatcattgtccgaaaccgtctttataagagagattctaggactcctcaatctctcacttgtcctaacctcggacggttttcacggtctccacggttctcggaacccaacaaacggtcactttcccggagggctccatttcattttcgacggcatactctggggggcaccacttccggatctccagtacaacggggtttccggggcacatagcccgggacttaaagggggccatcacgggttcctcctcagggtccaccggaaatttcccggcacaagaaagtcgcggggatgtcaagcgggngggaaaacagngggaaggggctnnggggccagggaagc

SEQ ID NO: 100177 - DNA, 494 bp, Arabidopsis thaliana columbia
ttaggacgcactatagaagagtcttgacgtcgcatgcacgcgtacgtaagcttggatcctctagagcggccgcccttttttttttttttttttttttaggcgatttcgattttattgattcaaaaggttcgaacaaagacgtaccaaagccaagaagaaaagaaaaaaactacaaaacagtaaaatgtcaaacacaagttatgcaaaatcacgacgacagttatgtttttgcttttagttataaagcgcctcaattagagacagcctcttctttcactgaaggacaatgcactattgtgaagctgccaccattcatcgaattctgctcttcaagctcctcttcttcttcttcttcgtgactactaaaaccgatggcatcaaatatcatagtgttaacttctctgaatctctcctctgataaagaaacttcagctagtaacctccatgccttctcttctgacgctccttcatagtcttctttcctcttcaacacc

SEQ ID NO: 100178 - DNA, 544 bp, Arabidopsis thaliana columbia
atgatcctgccagctacaatacgactcaccttagggaaagctgcgtacgcctgcagatagcagagaggaaacgtttctcttgttcgttggaatctccgtccctttttgttgatcgacggtggtgaatcttagacatggcggctgcgaagctcgtcgctttgttacttcttgccttgcttttcaccaccagcgtcttcgccgatgctgatgagccggaggtttctgaggctgccggatccgatggctcttccaagatccacctggatcagcttaatgccaagatccgtgccctagaatctcaaatcgatgagaaaacccgggaagttcagggcaaagacgaggtagtagcagagaaggagaaactactcaaagaaagggaagacaagattgcttccttgcagactgaagtctcatcactacagaaaaagggatcatcagattctgcaaaacagttgggaaaggctcaagcacgagctgatgaattagagaagcaggttgaggttctcaagaacttctttggggcaaaaaaaccaaggggggaaag

SEQ ID NO: 100179 - DNA, 263 bp, Arabidopsis thaliana columbia
ggttttttttttgaggcataaacaaagaatttgtatttgtcccaaaatggggactttggtgaaagtgctacataaagaattcatactaaaggtactgactttgtatataacataattgttcacaaataccccataacatcttatgcattttttcttactattgggtgggggatatataacaagagttaaaaaaatagagttgtcaaaatatatgaaaagaaattaaaaatggaaaaaaaaaggagttcctttcttcttgcgat

SEQ ID NO: 100180 - DNA, 485 bp, Arabidopsis thaliana columbia
  unsure (1)..(485): unsure at all n locations
acgtcgcaagcacgcgtacgtaagcttggatcctctagagcggctgccctttgtttttgttccttttttttttttttttttttttttttttttttttttttttttnnaaacttcaaagaccatcacgaattccgatctttacccaaattacccactttggttaagggtaaagctaatttgggaatcgaaaggccacaccaccttcacaggggcggggccgggcctttttgcctggataattccataagctggccccgacaaaaggcttattttgggaggaaaccacttggtggccactcgatgcttttgcacaaccctcctggcacaattagccccatctcctgataaacagggggggcccaggggaggagaaccttaggggggccttcttcactggtcaatgggaacggcactttttcacaaaccctaatttttggacaccctgaaaacctttttgatttttggggcccctgaagaaagtcatg

SEQ ID NO: 100181 - DNA, 516 bp, Arabidopsis thaliana columbia
  unsure (1)..(516): unsure at all n locations
atgaannnnnnnnnnnnnnnnnnnnnnnnnnnnnnnnnnnnnnnnnnnnnnnnnnnnnnnnnnnnnnnnnnnnnnnncttttggttttgtttttttttgcgactcaagtgattattctttatacattcatattttttgagtatacaattattcaaaactaaacttgtaaccttaccttttcttcaaccgggttatcactaactggatgtgcacttcaaaactcttctgctgaccgccaaaccaggaggacacagtctcttttggacactcactctcaggaggttttaatctttaagagttgatccaaactcaccttgcagctaactggggaccttactctgcaaaaccttgtattttctattcccaccatccacaggacagggcaaaccccgggggcttccacggggatttacagagacataaaaaccccactcaatagccatctaaaaggttttgggattgggtctgctccttgggggggaacccaaggcctaaaccaaaggcatgataacagac

SEQ ID NO: 100182 - DNA, 591 bp, Arabidopsis thaliana columbia
  unsure (1)..(591): unsure at all n locations
gccgcanagtgacgtttcatacaaatnattacaatacagaagcccttgtcttcgccggcatcgacgaacgtttaaacaaaaaaaaaccaaagacgacagntaaaacaaacaaacaaaatacaagccttgctttaattaatgtctaacgtttatcgacttttatttgtgtacatttcaaacatgtgacaaagtttggttccctatattgggtgatacttatctaatttgattttggttaaagagtgtctcgaaaaacagggtaatatgtgtcgatctcgagtctttctaaaatctgctgagttttccatagatatgaagagtgaccttccaccatatcggttacatccacgttttcgataccagggatacatattgggttgggattccggctaatccctgggaaattaaactagcacgaaatgcgataccaagggtccaatcatttgtggcataaccattgatgaatcttccagcgaccatcttccctacgtctcgccagttttcactattgattgaaatgggtgctccaagaagaccatctctcccaactcattgtttggcctnctcagcaggntgggggattgagagnac

SEQ ID NO: 100183 - DNA, 490 bp, Arabidopsis thaliana columbia
ttgacgtcgcatgcacgcgtacgtaagcttggatcctctagagcggctgtcctttggggttggttcctttctttttctttgcaaatttttttttgggggggatccatttcgaaatttcaagagaatataaggaaaagccccaaatgttatagacttgacccaagcagagccaggaaaggttcttatatacaatgcgccgcgggctattttccctaaagaggaggaccgaccatgctggaagttagagatgtagtaaagaatccgcttcttgtcgccaggggttaatgagaaagaaggggtttagagatagagccactgcttcctcggtttttaaggggaggggaagaattgctttcttggataatgggggctgcactttctttggtacccaaatatatcttcagcccgaaaaaaacaattcagaggggcgcaacccagtggggttgaaacttttaggaaaaattcgcgctataaaggggggaaaaaactc

SEQ ID NO: 100184 - DNA, 502 bp, Arabidopsis thaliana columbia
  unsure (1)..(502): unsure at all n locations
gaaatcaaagcaattcaagatcaaaacacaaagggatttgtctgttcaatatttgtatgtatacatactgattactaaaatctgatcatacgaaattcaagaatcacacggtgcacaaagcaccactagtagtagaagtaattctgcatcaaatctggttagaaagaatcaagaaaactgtatattttctggctaatgaggaaagtccttcactggaacttttaaatccgaagaaacagtagagccaaaaatggtgtcaggatgagaagaaaggtggatacatgtttcctgtgactgttgctcgtgggtagtacagaagggagtgaacattcctggcccgttgaagagtactttggtggggaacccatctttggaaccacctttgatcccgggagccagttctgggngaaggngnaacccgctgnggttcccggggatcccaaagcttcnccngggtttnccgcctttcnngcagggnaantccnccnggggccnccntaaa

SEQ ID NO: 100185 - DNA, 894 bp, Arabidopsis thaliana columbia
  unsure (1)..(894): unsure at all n locations
atgatactgccnnnnnnnnnnnnnnnnnnnnnnnnnnnnnnnnnnnnnnnnnnnnnnnnnnnnnnnnnnnnnnnnnnnnnnnccacgcgtccggcaagatctaatcgggtctgatctcgagcttccttcactaaccagagatcagaatcgtggtggtggttacgatctcgtcgatcgaatgccgtttctatacattcgtgtagctaaagcgaagcgagcgaagaacgatggaagcaatccggtttacgcgaagctcgtgatcggaacaaatggcgtgaaaaccagaagccaaaccggtaaagattgggatcaagtgtttgcttttgagaaagagagcttaaactcgacctcgcttgaagtttccgcttggagtgaagagaagattgagaaggaagataaaacaacgacgactactgagagttgtttaggaacggtgtcgtttgatcttcaagaggttcctaagagagtgcctccggatagtcctttggctcctcaatggtacacattggaatctgagaaatcaccggggaatgacgtcatgctcgctgtttggctcgggactcaagctgatgaagcgtttcaagaagcttggcaatctgattccggtgggttgattccggagacgagatccaaagtttacttatcttcgaagctttggtatttgcgtctaacggtcatacaaacccaagatttgcagctaggtttgggatccgaagctaagtcaaagatccccaccactgagctttatgtgaaagctcagcttggacctcaagttttcaaaacggctacgacttcgattgggccgtcggcttcttcgtccggatccggtaacccgacttggaacgaggatctagttttcgtaacttccgagccgtttgagccgttcttgatagt

SEQ ID NO: 100186 - DNA, 450 bp, Arabidopsis thaliana columbia
cccacgcgtccggtcatttttaataggaaaataagacatagttatctacaatataaagcctattcggtataataacagagtagaatctaacaaccccaaagctttcatagattgggttttgtagggatatttcagtttttactggaaggatcatgaagaacatcaacaatggcttcttcctctgcatgcttttactcctctggtgttttgtgcattcggggatttcaattgatcctttctccccaagcgactcactcaaaacagagtgtgtaatgaagcctccacgaagcagtgaaacgaaaggattattacaatttagccgctctgtcgaagatgactctgatgaagaatgggaaatagatggaagtggatccataagagaaatggcacagagaagtcagcttcaccaacgagacatttacagcttctctgcttgggtgaagttgagag

SEQ ID NO: 100187 - DNA, 586 bp, Arabidopsis thaliana columbia
  unsure (1)..(586): unsure at all n locations
cccaagcgtccgctctcgcagctcttctctattttcagcaatcgcctataatattaggtaaagctaaaagggtctgattcgtttgttttttcactgaagaatttggaaggaagtgattccgttgtgaaacagaaaagaagtatgggtactcacattgatatcaacaacttaggcggcgatacttctagagggaatgagtcaaagccattggcgaggcagtcttcgttatattccttaacgtttgatgagcttcagagcacattaggtgagccggggaaagattttgggtctatgaatatggatgagttactcaagaacatatggactgctgaggatactcaagcctttatgactactacatcttcggttgcagccccgggacctagtggttttgttccgggaggaaatggtttacagaggcaaggctccttgaccttgcctagaacgctttagtcagaagactgtccgttgaggtctggaaatacctgaattcgaaggaggtagtattgggaatcttgaacggatgcgtttanggaacaactttnggggaataccntggaggtttncncccctgggtntaaaanta

SEQ ID NO: 100188 - DNA, 540 bp, Arabidopsis thaliana columbia
  unsure (1)..(540): unsure at all n locations
nnnnnnnnnnnnnnnnnnnnnnnnnnnnnnnnnnnnnnnnnnnnnnnnnnnnnnnnnnnnnnnnnnnnnnnnnccacgcgtccgacagttctttgttacaattttttttcctcaaattgtttttgaaagggttttattatgcggttaaacatcaacaaaatctctgttcttttatatatatatgaacaaaaagagatttaagaaaaaaaaatagatgataccttaagcaatactatttaattgaagtatgtttagttattcatattaaggatcttgttttcaattatggtgaattttgagttaattgaaatgatatttgtgaataactttaatgaagaatcttgtttttattttggtgaaatatgacagtaagttggaatgagaagagaagtttttgagtcggtgagcaccaatgcttctaatgaaagggttcacgtggctcccaaaatagcggcagaggaacaagattatgaggagaaagaatgcactgaggagaattctctctctcagaatcataaatcttctaatgtaatcacagag

SEQ ID NO: 100189 - DNA, 531 bp, Arabidopsis thaliana columbia
  unsure (1)..(531): unsure at all n locations
atgatactnnnnnnnnnnnnnnnnnnnnnnnnnnnnnnnnnnnnnnnnnnnnnnnnnnnnnnnnnnnnnnnnnnnnnnnnnnnccacgcgtccgctttgtctctgtctttttctttgtcttcttcctcgtatctctccctttcttctcatccgcagcacctccgtcttctgattctatctacgaatcattcgttcaatgtttctccgacaagacaaaatctccacaagcccaaatcaccgacaatgtcttctctcggacaaacccttctttctcctccgtccttcgtgcttacattcgaaatggcaggttcaacacttcatctacgccaaaaccagctatcatcgtcactcctcgctccgatatccacgtcagcgccgccgtcacttgctcaaaaagtttaaatttccttctcaaaatccgaagtggtggccatgattacgaaggtctctcttacatctctgataaaccattttttatactcgacatgtcgaatctccgtgatgtctctgttgatatcgccgatcaatcag

SEQ ID NO: 100190 - DNA, 434 bp, Arabidopsis thaliana columbia
attcaggaaaaagatttcatctttgagtttttcattcatctatcggttgtttccattctcaggtttcagtcgaaaattccctctctttcttttcgatttgatctgggtttcattgtacatagctcgatcttcaagtttcgtcatctgggtcttgtaaagttttagacttttagggttgttttacttgtgaagtttctctcttttctaatggattctctgggtaattgatcgattagggtttaagattttagcggtggggaaagctgtttggttctagaattctatcttgattaacgtcacttgcagctttctcacaggttttggaattgtactaggttttgattgataatcatagattggtagtgatttgggagtttcttgattgtgtaatcatggcggaggctattggtgctgtatctttggtgggtcatcga

SEQ ID NO: 100191 - DNA, 835 bp, Arabidopsis thaliana columbia
  unsure (1)..(835): unsure at all n locations
nnnnnnnnnnnnnnnnnnnnnnnnnnnnnnnnnnnnnnnnnnnnnnnnnnnnnnnnnnnnnnnnggcctggaatnccgggntgccccccggccccacagcaaaaaaaactcactccctagaaaagtttgaaaatggcgaaggcagataagaaaccagcggagaagaaaccggcagagaaaactccggcagccgaaccagcagcagcggcagagaagaaaccaaaagccggaaagaaactcccgaaggaaccagccggcgccggagacaagaagaagaagagatcaaagaagaacgttgagacatacaagatctacatcttcaaggtgttgaagcaagttcatccagatatcggaatctccagcaaagccatgggaatcatgaacagtttcatcaatgatatctttgagaaacttgctggtgagtcttcgaagcttgcgaggtacaacaagaagccgacgattacttctagggagattcagactgcggtgagacttgtgttgcctggagagttggcgaaacatgctgtttcttgaagggactaaggcggttacgaagtttacgagttcttagatttggaatgtggttttgtaatggaggagaagtagtagtagtagttggaatgtgaaaatagggtttatgcttttgggtatctttgagggttatgtaatatgggaattagggttttaatttatggcccggctatgaaatctacttaattttcccatgttcgattgcaatttcattaaaaaaaaaaaaaaaaaannnnnnnnnnnnnnnnnnnnnnnnnnnnnnnnnnnnnnnnnnnnnnnnnnnnnnnnnnnnnnnnnnnnnnnn

SEQ ID NO: 100192 - DNA, 483 bp, Arabidopsis thaliana columbia
catgacgactcggagatctctaggctatggctacgttaactatgcaactcctcaagatgctcccagggcactgaatgagctgaatttcatggctcttaatggaagggctataagagttatgtattctgttcgtgatccaagtctccgtaagagcggagttggtaatatatttattaagaatcttgacaaatcaattgatcacaaagcacttcacgagacattttcagcctttggtcccattctatcttgcaaagtggccgttgatccctctggtcagtcgaaaggctatgggtttgtgcagtacgacactgatgaagcagctcagggagccattgataaactgaatggaatgcttcttaacgataagcaagtttatgttggaccctttgttcacaagctgcagagagatccttcgggtgagaaagttaagttcactaatgtttatgtcaaaaatctctccgagtccttgagtgatgaagagct

SEQ ID NO: 100193 - DNA, 560 bp, Arabidopsis thaliana columbia
  unsure (1)..(560): unsure at all n locations
tgatacgttcnnnnnnnnnnnnnnnnnnnnnnnnnnnnnnnnnnnnnnnnnnnnnnnnnnnnnnnnnnnnnnnnnnnnnnnccacgccgtgcgaaataaaaaaggtctaaactttactcttacatgcgccattgaactaacagggctaatggctgcagctcctttactgctccaactacgatttccacagttgcagagatattacatccttcgaattcaagttttgggtattgatcgtgagaattcaaggaacatcttttcttcggtcagtatgtggcactctaagttagtgttcgtctctcggatcaaattttcgaattactcttgcttagtttctctgattacttgtgtagatgtgattacccaataagcctgaaaacaaaaggcgtgattttgtgattactctggcgtaataatgcctcagtatgggtcaacgggtcaacactgcgagttcacggcgggcgtcttacttctcgtggccgacttcaagcaggctaagcaacgccgcggaagaaagagctaactatttctcaaacttgcagaaagaggangatgatgat

SEQ ID NO: 100194 - DNA, 578 bp, Arabidopsis thaliana columbia
acgactcactatttggaaagctggaccgcctgcaggtaccggtccggaattcccgggtcgtcccacgcgtccgattttatttttttcccctaccaaattttcttcgaatttcagctcagatcccttccttcttccagatcgatcttcagatctattgttttttaagaatgggtttcaagcgaacgtttgacgctgaagatgttcaagagctcaacgttaagaatggtagacagattagttactgtaataagctggccaaactagatgaaggagttccatatcgtctttcactggagaagccaggtgtcgtaggtaataataacaccttgtttcttgcagaggggttcacatgataaacttaagcagttcgcttaatgattatctgtctttatcatttagcaggatttggatataagtgatctctaccgggtataaatgggagggtaacgttgacaaggggtttgagaccactgcgcctttctcttgggtcacacactgggttcgtctgaggaggattctcagtctggagctacgattcagtctaccatttctcatgaatctcctgagtcagatatacc

SEQ ID NO: 100195 - DNA, 897 bp, Arabidopsis thaliana columbia
cccacgcgtccgcttcattgtcaggaggtcttgagagtttcagaggaagcagcagttttcttccattcattaagcttgttgacacatttgacgcgcaatatagtgttatctcaaatgatgagactctgtttactttcttgacgaataaagatgcccctaagtagaaattagtccgggttgatctaaaggaaccaaacagctggactgatgttgttgaagaacacgaaaaggatgtcttagcatcagcttgtgctgtcaatgggaatcacctggtcgcatgctacatgagcgatgtaaagcatattctgcaaattagggacttgaaatctggttcattgcttcaccaattacctctagatattggttcagtatctgatgtttctgctcggcgcaaggacaatacctttttctttagctttactagctttctcactcctggtgtgatttacaagtgtgacttagccaatgaatctccagaagttaaggtattccgggaggttactgtacccggatttgacagggaagcatttcaagccattcaggtcttctatcccagcaaggatggaacaaagatacctatgtttattgtggcgaaaaaggatattaagcttgatggatcacacccatgtttgctctatgcatatggtgggtttaacataagcataacaccgtctttcagtgccagccgtattgtgcttagcaagcatctcggtgttgttttctgctttgcaaacattcggggtggtggggagtatggtgaggaatggcacaaagcaggttcacttgccaaaaagcagaactgtttcgatgactttatctctggggcagagtatctcgtgtccgctggttatacacaaccgagcaagctgtgtattgaaggtggcatcaatggtggtg

SEQ ID NO: 100196 - DNA, 393 bp, Arabidopsis thaliana columbia
cggacgcgtgggcgcaaatctctttcactcttaaacctcataaccttagagatcatcagtcatcaatcatcttcttcgttgttatcacttctttagtagctctcaacgagatttctccaaaatcagcgatgcctttaacgagatcaaagagtcttccggcgacggagaacggtggatccgatcgggagacactccaatcaggaagatcagtggctgggattctctataaatggactaattacggaaaaggatggagatctagatggttcctcctccgcgacggaatcttatcgtattccaagatccgaagaccggagaatgtcaatctcttatctcccttccgatgatctgaggttaatcggagatatttccaccgatcgtctcttgagaatg

SEQ ID NO: 100197 - DNA, 546 bp, Arabidopsis thaliana columbia
  unsure (1)..(546): unsure at all n locations
nnnnnnnnnnnnnnnnnnnnnnnnnnnnnnnnnnnnnnnnnnnnnnnnnnnnnnnnnnnnnnnnnnnnnnnnnnnnnnnnnnnnnnnnnnnnnnnnnnnnnnnnnnnnnnnnnnnnnnnngatccaaaaaaatgtgacaatatttactaaaaatcagggttacaaatcttggtttttactcgtttgttacatgtacagactattcttaaaaactgggtctggctctctctctctctctgttaagaattacataaatagattggcacaacaattacatatgtataacctctgtagctcgcatcgcatcacatgacgatttcgaattgaactccatataaagaatgcctctctcacgcaatgagagagcatatcaaagtctgctttagctgcttttctttattgcatttcttcattgagctttcttcttttgttgtgttgatcgcgaaatgcatattcagattctctgctcgttgggtttatttttccttgagagaagagttgtctatcgatgcagcacgagctgcttggaactgtatagtatacttt

SEQ ID NO: 100198 - DNA, 668 bp, Arabidopsis thaliana columbia
aattgatctaaaacttgttcactaagaaaaaatcaaaatcaaatcagagcaccaaaaccgactcagatctagatcggatttctccaatggctctcgaatgggttgtgttaggttacgcagcagcagctgaagcgatcatggtgattctcttgacgatgcctggacttgacgctctccgcaaaggattagtcgctgtaactcgtaatctcttgaaaccgtttctctcgataatcccgttttgtctcttccttcttatggatatttactggaagtatgagactcgaccttcttgcgatggtgattcgtgtactccttctgagcatcttcgtcaccagaaatcgatcatgaagtctcagcgtaacgcgcttctgattgcgtcggctcttgttttctactggattttgtactctgtcacgaatttggttgtgaggattgagcagcttaatcagagggttgagaggctcaagaacaaggattaagtaagatccagctgcttcgtccctcgtcttcctcaggtcctttagtgttttcgagttgtttgaatttcgatgaaagagtctctttactacttgtgccgttttaggttttttctgcgtttgttttccgatgtttgctctttgttgaactggggattgaaggatctataatacttaaaatatatgcttctt

SEQ ID NO: 100199 - DNA, 537 bp, Arabidopsis thaliana columbia
  unsure (1)..(537): unsure at all n locations
cgattgtannnnnnnnnnnnnnnnnnnnnnnnnnnnnnnnnnnnnnnnnnnnnnnnnnnnnnnnnnnnnnnnnnnnnnnnnnctttttttttttttttgaattcacttttttcaagtttggatacatgtaagaaaataaataatttaaaccggaatctatttttgttggttcggtttgaattggttcatctaaattaaacacatgctatcaaaacatacccaaaacagaaccacttacatttttgggtttttaacccttacaaaatttgtacgcatcttcttccacctttaaaatcttcctcctcccagtggtgtaatctcttttccttgggcatgatttttatgtcacttgtgtagaattcattacctctgtgcaaatcgatcttcgcaagagaattggaccatggtggaagaaaatctggtttcatggactaagctaacttctcttctaatgatttcaccacagagatattaatgactctctggtaaccgccatgggaactcgcttgtgtctattccagcttggtgaagctcatc

SEQ ID NO: 100200 - DNA, 519 bp, Arabidopsis thaliana columbia
ctatagaagactatgacgtcgcatgcacgcgtacgtaagcttggatcctctagagcggtcgccctttttttttttttttttaatttaaaccggaatctatttttgttggttcggtttgaattggttcatctaaattaaacacatgctatcaaaacatacccaaaacagaaccacttacatttttgggtttttaacccttacaaaatttgtacgcatcttcttccacctttaaaatcttcctcctcccagtggtgtaatctcttttccttgggcatgatttttatgtcacttgtgtagaattcattacctctgtgcaaatcgatcttcgcaagagaattggaccatggtggaagaaaatctggtttcatggactaagctaacttctcttctaatgatttcaccacagagatattaatgactctctggtaaccgccatgggaactcgcttgtgtctattccagcttggtgaagctcatcaacgtattgtaatgcttcccgacattcctctctgtcatcata

SEQ ID NO: 100201 - DNA, 549 bp, Arabidopsis thaliana columbia
  unsure (1)..(549): unsure at all n locations
cgatactattaggacnnnnnnnnnnnnnnnnnnnnnnnnnnnnnnnnnnnnnnnnnnnnnnnnnnnnnnnnnnnnnnnnnnctttttttttttttttatatgcaaacccatttgcattcatattctttaaaaaaaaaaatgtatcatgtatatatccaaaatttcttgtattcatatttttacaaaaggaaaaagggagttaattttatatccatgcaatatgcgtgaatataattctctagtattgagggtatgtaattaatagtcttaaagcaaaacattctacagctcgctgctgtaactaagcagggccatctctttattgacataatagtattaataggtttttgacctctgggtctaaatctacgagtccgcattggcgctgtcggagcttttctcttccgaggaataggctgacggagcttttgcctgcggattttgagtgtgtcttttgatagttggtagattgatagctagcactgccggcttgtcctcccatagattggcctccgaaagttccaccttccatcgagctttcacttgcac

SEQ ID NO: 100202 - DNA, 849 bp, Arabidopsis thaliana columbia
atttctttcctttgccatatttataaaataaaagagagagaaagaattttcaataattttcaacaagcaaagttcatgatggggaataagcgaaatctcggatttgtgatcttcttctgggctctggtggttgcagtagtagccacggccatcgagcatcgtcgcaatgagaggactaaaggcgtcaatggtcttgacaagatcatcatccgcgaccgtcgtggccgatctgctgaggtttacttgtatggaggtcaagtcagttcttggaaaaatgagaatggagaggagttacttgttatgagtagcaaggctatattccagcctccaacaccgattcgtggaggaattccagtattgtttccgcaatacagtaacaccggtccacttccctcacatggatttgtaagacagaggttctgggaggttgagactaaaccacctcctttgccatcactttctactgctcatgttgacctgatcgtaagatcatccaatgaggatttgaagatctggccgcataagtttgagtatagactgagagtagcattgggacatgatggagatttgacgttaacatctcgtgttaagaatactgatacaaaaccatttaacttcacatttgctcttcacccctacttcgctgtttccaatatcagtgaaatccatgtcgaaggattacacaacttggattaccttgaccaacaaaagaacagaacacgtttcactgatcatgagaaggttataactttcaatgctcaacttgacaggttgtacctaagcactccagatcaactaagaatcgtggaccataagaaaaagaagactagtgttgtacacaaggaggga

SEQ ID NO: 100203 - DNA, 549 bp, Arabidopsis thaliana columbia
  unsure (1)..(549): unsure at all n locations
cgattgtannnnnnnnnnnnnnnnnnnnnnnnnnnnnnnnnnnnnnnnnnnnnnnnnnnnnnnnnnnnnnnnnnnnnnnnncttttttttttttttttttaaggaagcaccgacacttaaattctcactttgggtcaaagtattgttttaaaacaagaaaaaagcctcttgaatagtaacaaaaataagtctctttgttttcaaactaatctttctaatagaagaagctcattcatcttcaagtttcagttagtttcctttcacaaaagaaacttgggaagagaaggccatggccagccattgttcgtcacccttctacttaggattgttaatagtcagagcttaggcttgagtcttttcttcttccagttgttctccgtttccttcagcttcatcatcttcaactcctagggactggtttaggtactcttgagcgtcttctaatgcagattcatttgcatcggttgcatacagtatcttcttcactgctaccactatcggaagatcatctagctcaggagtttggcagagtatctctacatcccggag

SEQ ID NO: 100204 - DNA, 1748 bp, Arabidopsis thaliana columbia
gtcgacccacgcgtccgaaatttcgaatttttgtctaccgatttttcgttcaatttggtgatgcaattactctaaattcaagctgagagagagacatagagatccttttgtatccgtaacatttaacaatctggttttgcttttcttctgttcctctattatctaatcaaatggcgaatgcatctgggttcttcactcatccttcaattcctaacttgcgaagcagaatccatgttccggttagagtttctggatctgggttttgcgtttccaatcgattctctaagagggttttgtgctctagcgtcagctccgtcgataaggatgcttcgtcgtctccttctcaatatcaacgacccaggctagtgccgagtggctgcaaattgattggatgtggatcagcagttccaagtcttctgatttctaatgatgatctcgctaaaatagttgatactaatgatgaatggattgctactcgtactggtattcgcacccgtcgagttgtatcagccaaagatagcttggttggcttagcagtagaagcagcaaccaaagctcttgaaatggctgaggttgttcctgaagatattgacttagtcttgatgtgtacttccactcctgatgatctgtttggtgctgctccacagattcaaaaggcacttggttgcacaaagaacccattggcttatgatatcacagctgcttgtagtggatttgttttgggtctagtttcagctgattgtcatataaggggaggcggttttaagaatgttttagtgatcggagctgattctttgtctcggtttgttgattggacggatagagggacttgcattctatttggagatgctgctggtgctgtggttgttcaggcttgtgatattgaagatgatggtttgttcagttttgatgtgcacagtgatggggacggtcgaagacatttgaatgcttctgttaaagaatcccgaaacgaaggtgaatcaagctccaatggctcggtgtttggagactttccaccaaaacaatcatcgtattcttgtattcagatgaatggaaaagaggtctttcgctttgctgtcaaatgtgttcctcaatctattgaatctgctttacaaaaagccggtcttcctgcttctgccatcgactggctcctcctccaccaggcgaaccagagaataatagactctgtggctacaagtctgcatttcccaccagagcgagtcatatcgaatttggctaattacggtaacacgagcgctgcttcgattccgctggctcttgatgaggcagtgagaagcggaaaagttaaaccaggacataccatagcgacatccggttttggagccggtttaacgtggggatcagcaattgtgcgatggaggtgaatggctaagtccaacaatgtaagttaacttcagagccaaagctttcttctcccccgacgaacactggaaattgatttaaccggtcttgtttaggccggttaaactagacgtaaagctcattttgtctgaattcggtctctctgtttttgaaatttcattgttgttacttgtttaacttgttagttatttccaatgctaataatcaaaaagaagaaaaaaaaaggagcattctttcatcatttcttgtttgtaatgttaagacaacatttctccatttgcttaatcttttcttctgttttggagaactattagaaaccaaaaagttttatatttctgttcaattttctatacgaattagatccc

SEQ ID NO: 100205 - DNA, 870 bp, Arabidopsis thaliana columbia
  unsure (1)..(870): unsure at all n locations
ttgtataggacgcactctatactaaactgtgacaccgcatgcacgcgtacgtaagcttggatcctctagagcggccgcccttttttttttttttttctagaactagtagcttattatatatagtagtcgactgtttcataagctacaaacttcatgcactaaagtaaaaagttggttgcattacttaggaaactaaagacagacaagagcagaggaagaggaaagaaacctcctcattcttcatttcaaaccaacgaaacaacatatatctaaaaaaagttaacatgaaatgtcgaaagaaagacttactacctttataactcctctcactccatccttttacgtttgtttttcagttttgaaaacatttgctcgatatctgcagaagttatcgcctttgatggcccagcagactccattaaaccctggagtcccgcttggaagtctttgattccgtgaaggagctcaactttggatacgggggctaaattattcagaagatcaagtgcttaaccttcttggtgctccagttcctctggtctcttttccttcggcttttttttnnatcacaacattggggcctctgcattaagtaaatagctaccttttcttgtttaacattaaaaggacttttcccattcgcataggaggttcttcaagttttgggaaaaacaaagggttttttaaacctcggacccaggttaaatatgcctatataccaacccgctggggaacttttgacaagccacgatcttttgaaactttccgncaacaagttttcggtttatactggtttaagtgggcgggttaaattctggtctttcaaaatttttcgcaaaattctcgtctaaggcctttaagtggccagct

SEQ ID NO: 100206 - DNA, 650 bp, Arabidopsis thaliana columbia
  unsure (1)..(650): unsure at all n locations
tannnnnnnnnnnnnnnnnnnnnnnnnnnnnnnnnnnnnnnnnnnnnnnnnnnnnnnnnnnnnnnnnnnnnncttctttttttttttttttgattgagaacacacaatacatatctatgtatgtattcaaatacacatacatagcctactaaaagaatgttctatgagctaaaaaaaagaacgaaacattcctacacacaaatttccgtaaaactactgcaaatttcggaatctacttacattacaacatacacacacctataaaacagtacacaatatacatacatacatatataaataaccaatgactgtatgtatttaatgttatatgtctgaaatagagattgtataacctacctgactccaagtgcttgcgcactcatcatgatacaagaacgaacaccacggaaaagccaacgatcatcgatttcaagaatcactccaactatctgaatcttcatcctcgtcgcttccagccattgccatgcgtattgtatttgctttctctaagatgggggtaccctaagctggtctaggccagctggntgctgggccgggttgtactgcgggttaggttgcgggtggtccgattggganaacgancttgncctgnttggttgatgggggggcncccagggttctnnctgggg

SEQ ID NO: 100207 - DNA, 547 bp, Arabidopsis thaliana columbia
  unsure (1)..(547): unsure at all n locations
ctctctctttcacttgcagtgtgtcgctttgctgccttcattctcatttcacacgaagattaaaaaaagttggtctctttcctaatttagaacagtgataaaccaatcccagatccgagtctctctccccatctccttctttctctcttttgaataacacactgcggttttttgcctttgagatctgtcattgtctcttccaaatctagaacctttacttgggttgtaacagattcaaatatctgtaactagtgagaaatcatcaatttttaaagctgaagtcttcacttagtagtctgcatcctttaactcggaacgttgggtctccgtttggctttatctcaaataagaaggcaatgaaaggaagatcagatggacggcaaaagaagcgggtgattgctttggtttgcgttgcagcggtagttcttgttctcgtatatctgttctacggctcttctgatcatagagcatcggctatcgaatacgggagaaaactcgggttaggtgcngatgatgatgatactaaacaggatgacacttctagctc

SEQ ID NO: 100208 - DNA, 601 bp, Arabidopsis thaliana columbia
  unsure (1)..(601): unsure at all n locations
atgatactccnnnnnnnnnnnnnnnnnnnnnnnnnnnnnnnnnnnnnnnnnnnnnnnnnnnnnnnnnnnnnnnnnnnnnnnccacgcgtccgcaaatactgaaaataaaaagaagaagagagaaatctacggtggtgggtgattcgccggagttcaatttcgtagctagatttctcctccttttccccccgacgagctgtgcgagagagggaggggaatcatgcagaaacggagaacggtgaaggaatctacgaagataagaaatggtaaaggtatggattccggcgaaaagaagagatctgagaagagattgatgaagttcgaggagttacctaggtatttgaaagataacgagttcatacacaatcattatcgatgtgagtggtcaatcaaagaaactttcctcagcgctttctcatggcacaatgagactctcaacatctggacgcatttgtgtggatttgcgatatttacttggatgatggttgtgagttcaatggagacgacggagcttggcctcgccggctttgttagccttctctccggagcaacaattcgctggccatggccgtcaatggcaatgtcaaaagatgtttacttc

SEQ ID NO: 100209 - DNA, 520 bp, Arabidopsis thaliana columbia
  unsure (1)..(520): unsure at all n locations
cgatttnnnnnnnnnnnnnnnnnnnnnnnnnnnnnnnnnnnnnnnnnnnnnnnnnnnnnnnnnnncgtggagaagcttgatctttataatatattgtaacaaaagcttagagatgtcttacgataaaagaggccaatgtttgcaacaagaactgaaaatctaaagctacatcaataaaacctgtttggatacaagacattgtgctgaatacgaccaaaaggtcaaggattcgggtgcctgaaatgatgtacgtctgacgcattcaatgtttgtgcataagtcatagtggcactaggccactctgtataagaaggtgccgtcatagctgggtttaaggggtgtccatagtttaggctggcttgagttcttggcatctgtgggaaaattgcgtcatggaacggaagcggaatcggtatcggattgaagttttgtaccggtggcgcaaccctcacatacctgttacggtcataatcaggatcataacgatccttctctctatctctaataatggcaacccgag

SEQ ID NO: 100210 - DNA, 717 bp, Arabidopsis thaliana columbia
  unsure (1)..(717): unsure at all n locations
ggcgaactatagattagctatgacgtcccatgcacgcgtacgtaagcttggatcctctatagcggccgcccttttttttttttttttaattaaaatctcacaacaactgaatcacaaatcccatagctatataaataaaacacagaaaaattaaaaataaatcaaaagaacccttggagcttctcctctttcctggtctttgataaaagtcttctcctttcttcctacttgttgttaccggtacgtctctatctcccctatcaattttcctttgtcatttcaatgaaaattgtctttatttctcaagaaaattaataacattctcttttctctctgaaacaacacaactactaactcgggacataagtctgccccagcccagcccactgatgaagaaagacattgtctgaagaaacaggtagatgaagtaattgttcttcccgtgcacaaagtcatagcatccgcacacgaacaagaaagccgcaaatccaagctccaatgtattcaatcgatcaggcaatttgaagattcttgggaaccttttgatccctttagtgtttcctttagcgctctgaccgcttccaagcttagcagtcactacccactcgttagcccttcctgcctcaaacagaccaatgagagtggcctttgtccggtgcagcgacatcacattctcgaataganctccaatagancagcagatgaattnaccttgga

SEQ ID NO: 100211 - DNA, 2304 bp, Arabidopsis thaliana columbia
ataacaaatgggtcacaacaagttgccataaaggtcccaacagaagaagaaaagagaagtttccccgtgtcactttgtcacaagcttcatcactatttataactaccttgccaagaagaaagcctaaaaaggtataacagtttctttgtcgtgcgacgtcagcgaaaagatgtcgatctcttggactcgaaatttcttcgaaagattctgcgtcgaggaatacaatatagacaccataaaacagagtagtttcctctctgccgatcttctaccatctcttggagccaggatcaaccaatctactaagctccgcaaacacataatctctccttttaatccacgttacagagcgtgggagatgtggctagtattactagttatttactcagcttggatttgcccatttcaatttgctttcatcacctataaaaaagacgcgattttcatcatcgacaacattgttaatggcttcttcgccattgatattattctcaccttcttcgtcgcttatctcgatagccactcctatcttctagttgacagtcctaagaaaatagcaataaggtacctttcgacgtggttcgctttcgatgtttgttccacagcaccatttcagccactaagcctcttgtttaactacaacggaagcgaactaggattcagaattcttagcatgctcaggttatggcgtctccggcgagttagctcgctatttgcaaggcttgagaaagatatccgtttcaactatttctggatacgttgcacaaaactcatttcggtcactttgttcgctatacattgtgctggatgtttcaactacctgattgcagatagatatcctaatccaagaaagacatggattggagctgtgtatccaaatttcaaagaagcaagtctatggaatagatatgtgactgctctttactggtccattacgacattaacgaccacgggatatggagattttcatgctgagaacccaagagaaatgctttttgacattttcttcatgatgttcaacctcggtttgacagcttacctcattggaaatatgaccaacctcgtcgttcattggactagccgaaccagaacctttagggattcagtgagagctgcttcagagtttgcttcaagaaatcaactcccacatgacatacaagatcaaatgttatcacacatttgcttaaagttcaaaacagagggcttgaaacaacaagagaccttgaacaatctgccaaaagcaatccggtcaagcattgcaaactatttattcttccccattgttcacaacatttacctctttcaaggagtttctcgtaacttcctctttcaattggtttcagatatagacgctgagtatttcccaccaaaagaagatataattctacaaaacgaagctcctactgatctttacattctggtgtcaggagcagtggacttcactgtctacgttgatggacatgatcagtttcaagggaaagcagtaattggagaaacatttggagaggttggagttttatactatagaccacaaccattcacagtaagaacaaccgagctgtctcaaatactgcggataagcagaacatcgctgatgagtgcgatgcatgctcatgctgacgatggacgagtcatcatgaacaatctcttcatgaaacttagagggcaacagtcaatagcaatagatgattcgaatactagtggtcacgaaaacagagatttcaaaagcatgggatgggaagagtggagagattcaagaaaagatggctatggtttagatgttacgaatccgacttccgacactgctctaatggatgcgattcacaaggaagatactgaaatggttaagaagatacttaaggaacaaaagatagagagagccaaagtggaaagatctagtagtgaaaccgctggaagaagttacgctaacgattcatcgaaaaaagatccatattgcagctcaagcaaccaaatcatcaagccatgcaaacgagaagaaaagagagttaccatccacatgatgtctgagagcaagaacgggaagttgatactcgtaccatcatccatagaagagcttctaagacttgcaagtgagaagtttggaggctgcaacttcacaaagatcaccaatgcggacaacgctgagattgatgatttagatgtcatttgggatggtgatcatttgtatttttcatcaaattgagtttgaaaactcgacttcatttatagagcatgtatatctgcagacaatgtatttttacccggtttcatagaaaagtctagattatcccctgacgtagaaaa

SEQ ID NO: 100212 - DNA, 487 bp, Arabidopsis thaliana columbia
  unsure (1)..(487): unsure at all n locations
cctctntgtntcctcctccgggaagctttctgtctctctctctctctctctacacaagaccttgaagaatccgattccataacaatggcgacttcgttagcacgaatctctaaaagaagcataacatcggctgtttcatcgaatctgattcggcgttacttcgccgcggaagcagtagcggtggcgacgacggaaacacctaaaccgaaatcgcaggtgacgccgtcgccggatcgggtaaaatgggactacagaggccagagacagataattcctctgggacagtggctaccgaaggtagctgtagatgcttacgtggcacctaacgttgtgttggctggtcaggtcaccgtctgggacggctcgtctgtatggaacggtgccgttttgagaggagatcttaataagatcaccgttggattcttgctcaaatgtccaggaacggtgtgttgttcatgctgcgtggtcggcgcctacaggattacca

SEQ ID NO: 100213 - DNA, 1029 bp, Arabidopsis thaliana columbia
  unsure (1)..(1029): unsure at all n locations
cagctacnnnnnnnnnnnnnnnnnnnnnnnnnnnnnnnnnnnnnnnnnnntgctcaagttaaagatttcatcccccccctccggcattacggtggctacaacgagatggctgatatactcgtcaacttaacctctttagccactgagatgggtcgactcgtgtcagaaggctacgttttaaccgttcttgctcctaacgacgaagccatggctaagctcacaacggaccagcttagcgagccaggtgctcctgaacaaattatgtattaccacatcataccggagtatcaaacagaggagagtatgtacaacgctgttcggagattcggaaaagtgaagtatgattcattgagattcccacataaagtgttggctcaagaagctgatggatctgtcaaattcggacacggtgatggttcagcttacttgtttgatcctgatatctacacggacggtcggatttcagttcagggtattgatggagtcttgttcccgaaggaggaaacgccggcgacggagattaaaccagctgctccagtcgttaagaaagtttctaaatcaagaagaggtaaattgatggaggtagcttgtagaatgatggggtcacggtttattccgtgtcagtgatttcacacgttatcaaaaaaaaattccaagcttccaaattcttaattctgtaaacatgtggaaaaaaaaaagaaagagttgaatatgtaaatgatgtgatttttgggttcgttgttatttgcatgttctatttgtaatttttttattatcataaatatatatatatatatacgtagattttgattaagtttgttatttgggggtgagtaaaaaagttctaggagtttagagaaatcaaatatgtaatacaagttatacaatctgtatggaaataataaaggaaggatccatttgtgtgcctaaaaaaaaaaaaaaaaaaaaagnnnnnnnnnnnnnnnnnnnnnnnnnnnnnnnnnnnnnnnnnnnnnnnnnnnnnnnnnnnnnnnnnnnnnnntagaatcg

SEQ ID NO: 100214 - DNA, 539 bp, Arabidopsis thaliana columbia
  unsure (1)..(539): unsure at all n locations
nnnnnnnnnnnnnnnnnnnnnnnnnnnnnnnnnnnnnnnnnnnnnnnnnnnnnnnnnnnnnnnnnnnnnnnnnnnnnnnnnnccacgcgtccgaaataattctcttaaaagagctaagaaaatgcattcctctttgataaaattgggatttcttcttcttcttattcaggtatcattgtctcatgctcaactaagcccttccttttacgataaaacatgtccgcaagtctttgacattgcaaccactaccattgtcaatgctctaagatcggaccctcgcatcgctgcaagcatccttcgtcttcatttccacgactgctttgttaatggatgtgatgcatcgatattgttagacaacaccacatcgtttaggacggagaaagatgcgtttgggaacgctaattccgctcgaggtttcgatgtgatcgacaaaatgaaggctgccgtggagaaagcatgtcctaaaactgtttcatgtgctgatttgctcgccatcgcggctcaagaatctgtcgttttggcgggaggtccttcatgga

SEQ ID NO: 100215 - DNA, 356 bp, Arabidopsis thaliana columbia
attgaggcgaactatagattagctatgacgtcgcatgcacgcgtacgtaagcttggatcctctagagcggccgccctttttttttttttttgctcatataaactgatcacttgattatattgtaagattcggaagaattacagataaacgagatcaaagcggtttgtggcactcacaaaaattgaaaaaacaaaaggcaccaattctcttgtccccttgccaaatactaatcttcttcttggggggtgatgtatcctaagtatgtacacaaaatcactcaaaattccagacttaaacatctcgtaccaatctgaatatgcatctttctagtaatactccttgacctagtagttgtt

SEQ ID NO: 100216 - DNA, 677 bp, Arabidopsis thaliana columbia
ttagcaaaagcggttgaaggtcctctacttctcggcccaccgtaacaacatacactgtcaatccatatagttatcataaacccacacgtcaacgaaaccactcttttgacttcatcctctatccaatcacaccacgccacgttaacaccacgacctagtgtttctgtgatctccacacagagaaagaagcgtttcggttctgttttcgccccaacacaaagactccttttgtttcttttcctcaattggatcgaaaaaacccctaactttgacatggaaggagagattcaagactgggaaatacttcagagctcgagatctaccacggaagatgacaattcgaggagcttggaggagattgatgatggcacgcaaggtatgattaggtttgatcatttctctcttgagaaccagagtggtttgtctcgtttggaggcaaacgatgaagatgggtctgttcaatcgggtagtccaggatggatcgaacctagctccgatgttccttatggtccgaagcattttagtgagttatggtctgattcaagcagtgatcggcttgatgatcagaggttagtggatgatgatgtgaataacgagatgggtatagagagaaacgaagtgggtactgttgaatatagtgaaagtatagctcaagacatggatttgataagctctga

SEQ ID NO: 100217 - DNA, 590 bp, Arabidopsis thaliana columbia
  unsure (1)..(590): unsure at all n locations
cactatagatgactatgacgacgcatgcacgcgtacgtaagcttggatcctctagagcggccgccctttctttttttttttggtcttgtttcttgactctcgattttttacttaaaaagtggaaactttatgacacttaaatgtgtgtattggtgtaacctatacatttttctttttcttttcttctcaagtctatactctttaaaactataacaaagcttgctttctctctttttatagtttaaattccatttaaggaaatgtaccggtcaagcgaatatggtcgagggttcgcctcagaccatgcttaagaactgcttggttaccttgcctgaacccatccccatatgccgatgaagaatccgactcgatttgatgcttgaaaaactcaccagtttcttctcaaaatcagacctctcacctttcttggacgatgctgacaccacagcagatgatgaagaagatgcgatgtctactaatgtagagccagcataagtctcagantccaaccaaatgtgtgctaaaacttgnnatatccnncgtccanntctgggnctaaggnttggganacccattagtcggaggccatg

SEQ ID NO: 100218 - DNA, 653 bp, Arabidopsis thaliana columbia
accacgcgtccgtgtggagccattgcaactgcacagagcattcgaatgtcaggctctactcgtgatctggtcatacttgttggttgaaacgataaccgattaccataaaattggcttggtacctgctggatggaagattcaaatgtttcaaagaatcaggaacccgaatgctgtaccaaatgcctacaacgaatggaactacagcaagtttcgtctttggcaactgactgaatacagtaagatcatcttcatcgatgcagacatgcttatcctgagaaacattgatttcctcttcgagttccctgagatatcagcaactggaaacaatgctacgctcttcaactctggtctaatggtggttgagccatctaattcaacattccagttactaatggataacattaatgaagttgtgtcttacaacggaggagaccaaggttaccttaacgagatattcacatggtggcatcggattccaaaacacatgaatttcttgaagcatttctgggaaggagacgaacctgagattaaaaaaatgaagacgagtctatttggagctgatcctccgatcctatacgttcttcattacctaggttataacaaaccctggttatgcttcagagactatgactgcaattggaatgtcgatattt

SEQ ID NO: 100219 - DNA, 364 bp, Arabidopsis thaliana columbia
gcaaagtgttgaagactttttagaaagcagaaaaaaaagcagagagtgtattcaaagtcggaaagaaaccctaaagaagaggattatgggtgctgtatcgatggagtcgcttcctttaggtttcagattcagacctaccgatgaagagctcgtcaatcactacctccgtctcaagatcaacggacgtcactccgatgtccgtgtcatccctgatatcgatgtctgcaaatgggaaccttgggatcttcctgctctctcggtgattaagacggatgatccagagtggttctttttctgccctcgtgatcggaaataccctaatggtcatcgctctaacagagcaactgactctggctattggaaa

SEQ ID NO: 100220 - DNA, 642 bp, Arabidopsis thaliana columbia
gcgaaaaaaaagagggaaaaaaaaaggaagttgtgtgaatccaaagggtggaaaccttttaagagggcaggaaaaaaggcggggggggtttccaaagccgaaaagaacccctaaagaagaggtttatgggtcctgtttcgatggagccgcttcctttaggttccagattcagacctaccgatgaagagctcgtcaatcactacctccgtctcaagatcaacggacgtcactccgatgtccgtgtcatccctgatatcgatgtctgcaaatgggaaccttgggatcttcctggttcgtctctttattctctcaaaatttgattccttttattctcagattctgttttccctctcaaagattccaccttttttttctttactcaattgggaacaaatctgattgtcggcagctctctcggtgattaagacggatgatccagagtggttctttttctgccctcgtgatcggaaataccctaatgggcatcgctctaacagagcaactgactctggctattggaaagctactggtaaagatcgtagcatcaagtctaagaagactttaatcggtatgaagaagactcttgtcttctatcgtggacgagctcctaaaggtgagcggactaattggattatgcacgag

SEQ ID NO: 100221 - DNA, 322 bp, Arabidopsis thaliana columbia
  unsure (1)..(322): unsure at all n locations
gggtataataagggggggggttttactttttaggcattcaaaagatacatatgatttagtgagcatgccatcgagccttacattgtattgaaacattaaaacctctttgcgccttaatttgtattggtaatatgccgaacgaactcatcgatgtttacattagacgaaccgcttttcgcaacagctcctcgactgatttcactaaggtcacaagcccttcttctcatctctttcccttcttcacncnctctaatccataaaccnccttcacgacttccctgatcnccnctctcccccaatnaaaaactcattccnttttggg

SEQ ID NO: 100222 - DNA, 421 bp, Arabidopsis thaliana columbia
cccaagcgtcccacttttggatcttcttcttcttcttctctctcaatactcacaaatcctccattttctctgagtttagtttcttcttcagacactaagattcaagtcctctctttggtcggagaagatgcaggtagtctcgagcttcgattttcagtcttcgccgttctcacacggcgccggagagattctcatttctccggtagaccaccgagagttatcctcacacggtgacgcgcttgaaggcgcgtgtgatgactcgactagattggcggcggtgaaagtacagaaggtctacaggagttatcgtacgcggcgtagattagcagactctgtcgttgtcgccgaagagctctggtggcaagcgatggattatgcgaggcttaatcatagtacgatttcgtttttcgattactcgaga

SEQ ID NO: 100223 - DNA, 504 bp, Arabidopsis thaliana columbia
ggggagaattaccacatgatgaaggcgatctcagacatccatgatttgcctcttttgtcttctttaccttattcgtctctcattctttgaatctcctttccctttctctcaatcttcctcacttacatttcttatctcactccctctctcactttctccttcaatgttctctcctctgcgttttcacgaaacagagaaccttatcgttccgtcttcgtagacattgaaatcgatagagaggtgttgatttgattacgtttaatattgattcggatgaacggaagagatggttactaatagctacatggatacgcgatcaaatttgacaagtgtgaatcgaggatccaatgtggatctcgaagatcgattccagagggagctcgaatctttgctccaacaacatcgtaatcagcaatcatttggccgagaacgataacgagacattgatgttcacagaagcggaagcgcgcctcctaccgtggaaggattgttgagagctatgga

SEQ ID NO: 100224 - DNA, 726 bp, Arabidopsis thaliana columbia
  unsure (1)..(726): unsure at all n locations
nnnnnnnnnnnnnnnnnnnnnnnnnnnnnnnnnnnnnnnnnnnnnnnnnnnnnnnnnnnnnnnnnnnnnnnnnnnnnnnnnnnnctttgtgttttgatatttttaaattttattgttctttttggaggggatttaactcatatatgcattatatatatcccatatatataatctttctacaagcaataacaacaaagatcatcaacaaaccaatcatgtggttctattactcacaaataaaaccatttccctcaaccaacccaatgaagaagatacaaacatgaatagacaacatgatcaaatgaggccagtgctacggaacgggttgttatgttggtttaccgagaaatcaccataaccggaggtatttggctgctgtgaaaccgggttaaccgggaatcccccaaaatcaccaaatggattactattattagtgggagggttggactgatgctgatacgttggctggggctgatgctgatatgtctgctggtaagcaccgaatgggttgttcaccgcttgctgctgaggtgggggagctgtgccattggacgatgcaaacgggtcatgggacgcaaatggattgggacctggtgcaccgtagacgggccgttggaaccattgaagggccaccaccgaaanccggcaagngaccgntcaacccccancantttcccgnccgggggnccggatccgcggncgggggaaagttcccaaggggngttt

SEQ ID NO: 100225 - DNA, 499 bp, Arabidopsis thaliana columbia
tttcactcgtccgatctgcagatcacttatacacagccatttgtggaatcataccaaacatttctagcccaggttgcaggatatttcattgtggaggatcgggtgattaggacagctggagatttcttgttggctgatcaagttgagacaatgtgggaaacagccatttccaaaattgtagccatattggagaaccaatttgccagaatggattcgcctactcatctgcttttggtgaaagattatgtaactctccttggcacaacccttagacagtacggttatgaagtgggtccagttcttgatgcccttgacaagagccgagataaataccacgagcttcttcttgaagagtgtcgaaagcaaattgtgactgctattacagaggacacttatcagcagatggtaatcaagaaggaagctgactatgaaaacaatgtcttgtcgtttaatcttcagacctcagacattatgccggctttcacttacattgcgccct

SEQ ID NO: 100226 - DNA, 524 bp, Arabidopsis thaliana columbia
cggacgcctgggttccgcccgctcctccattgcaaaatctagctcgatctgtgaaggtttctctgagttcttcaaaaatctcttctagagaaagacttcattagctcaattttagcaacttcctccacctccttttactcacactgtgcttcgatttcaacttcgcatttcacaatgatccccaacggagaattgagattacctgctctcaaggtccgtgaagaccgcgtgtcaccctcacctcctattccggtcaccagaaccctagtggctgatactgacgtcacttccgatgacgatatgagtacaaattccgaggatgtctctctcgattcgtctcccgagaacagtagagtgtccagtgccgttggtcgcagctacgggagaaattcgtcttattatacttactccgaggtgagctcatcacgagagactttggtcggtgcgcgcgaaccgacgggacctagatttgatggtgatacggaggaagatgaatccaccgattcagcttctagcacgcaatt

SEQ ID NO: 100227 - DNA, 2608 bp, Arabidopsis thaliana columbia
cgggagagcccaacggagagacatatcgccatttcaaagctaaacaaccagataataatactgaggtttttatgcttataattggggtgaaagagacaaatccagagtgtgtgtaaattaggtacgagaagaatttcagctaactcttttgagagaggagaaaaaagtaatagatggttggggaaatgacgaacaatggaagaatccggccatcttttccggtgaaagatctgaccagtaatgaaggatctgaatatggtggccctgttgagtttaccagagaagatgttgaaactcttcttcatgagcgaatcaagtacaagagcaagtacaattacaaggagagatgtgagaatacgatggactatgtaaaaaggcttaggctttgcattagatggtttcaagaactcgagttagattatgcatttgagcaagagaagttgaagaacgctatggagatgaatgagaagcattgcgccgatttggaggttaatttgaaagtaaaggaagaggagctaaatatggtaattgatgaactgaggaagaactttgcatctgttcaggtgcaacttgccaaagaacaaacagagaaattggctgcaaatgaatctcttggaaaagagagagaagcaagaattgctgttgaaagtttgcaagctgccattacagaagagctagcaaagacgcaaggagagcttcaaacagctaaccagaggattcaagctgtcaatgacatgtacaaactcttgcaagagtataactcgagcttacagttgtacaatagcaaacttcaaggtgatctcgacgaagctcatgaaaatataaagcgaggagagaaagaacggactggcattgtagaaagcattggcaacttaaagggtcagtttaaagcactacaggatcagcttgctgcctcgaaggtgtcacaagatgatgtcatgaagcaaaaagatgaattggtgaatgaaattgtaagtctcaaggttgagattcaacaggtcaaagatgaccgtgaccgccatataacggaaattgaaactctgcaagcagaagcaaccaagcaaaatgacttcaaagacaccataaatgagcttgagagtaagtgttctgttcaaaataaggagatagaagagttgcaggatcaattagtagcttctgagagaaaactgcaggtggctgatttatctacttttgagaaaatgaacgagtttgaagagcaaaaggaaagcattatggagctgaaaggtcgcttagaagaagcggaacttaaactcatcgaaggagaaaaactacggaagaagttgcacaataccatacaggaactgaagggaaacatccgtgtattctgtagggtgagacctctattatcaggagagaattctagtgaggaggccaaaactatatcctaccctacatctctagaagcacttggtcggggcattgacttgttgcaaaatggacaatcgcattgtttcacatttgataaggtttttgtgccaagtgcatcacaagaagatgtttttgtagagatttctcaacttgtccagagcgctcttgatggttacaaggtttgcattttcgcatatggacaaacaggatctggaaaaacttatacaatgatgggtaggccaggaaacccggatgaaaaaggactgattcctcgatgtttggagcaaatatttcaaacaaggcagtctcttcgatcacagggttggaagtatgagttgcaggtgtctatgttagaaatatacaacgaaacgattagggatctcttgtcaacaaacaaggaagctgtgagagcagacaatggcgtttctccgcagaaatatgcaatcaaacatgatgctagtgggaatacacatgttgtggaacttactgttgtagatgttcgaagctcgaaacaggtttcgttcctcttagaccacgcagctcgaaacaggtcagtagggaagaccgcaatgaacgagcaatcttctagaagccatttcgttttcacattgaagatctctggattcaacgagagcacagagcaacaagtacaaggtgtcttgaacctgattgatcttgcgggtagtgagcgtttgtcaaagagcggatcaactggcgatagactgaaagaaactcaagcaatcaacaaaagcttatcgtctctaggcgatgtcatatttgccttagcgaagaaagaagatcacgttcctttcagaaactcaaagctcacttatcttcttcagccctgtttaggtggtgactcgaagacgctaatgtttgtgaacatcacaccagaaccttcctcaaccggtgagtctctgtgctccctcaggtttgcagcaagagtgaatgcttgtgagattggaactgcacaccgtcatgttaacgccaggccgttagattatcgcttgagccttggatgagaattttctccactgaagccaaagaaataaagttatgtttatacccgaatgtgggcactacttgatgttggtactaaatctgtatatagcttgtaatagtttcaaggttctgttatcttctactcttgtcttggatcagaagatttgtgtgctggaaaatcataatgttctgagaccattaaccgcatcatttcatt

SEQ ID NO: 100228 - DNA, 2815 bp, Arabidopsis thaliana columbia
acgagagcaacaaaaactgaaacgtgcctccatttctaaaacccaaatccttcttcgtacaaacgacacaatctctcttaaatgccaaaggtcctctttttcgtcttcttccactctctctatacttctctcacaaatctgggcatgttttgaaatccacattcttcattcactgagtttcctttacctcttaaagtttcaatctttagattgagagagaaatttgaagtaatttaaggtaacaagaagagaacaattttgttctgttatggtgggggcgatggcaaacaatggaagaatccggtcagcttttccggtgactaatgggtcaaaagatctgacgccgaacagtgctccggcgagtacaaccggatctgaatatggtcctgttgagttcacaagagaagacgttgaaactcttcttaatgaacgaatcaagtacaagagcaaattcaactacaaggagagatgcgagaatatgatggattatataaaaagacttagactttgcattagatggtttcaagaacttgagttggattatgcttttgagcaagagaagttgaagaacgcattggaattgaatgagaagcattgtgttgacatggaggttagtttgaaaaacaaagaagaggagctgaatatgataattgaagagctgaggaaaaactttgaatctgttcaagttcaacttgccagggaacaaacggagaagttggcggcgaatgattctcttggaaaagagaaagaagcaagactttctgttgaaaaggcacaagctggtctcacagaagagctaggaaaagcacaaggagatcttcaaacggctaaccagaggatacaatccgtgaatgacatgtacaaactgttgcaagagtataactcaagcttgcagctgtataacagcaagctacaaggtgatcttgatgaagctcacgagactataaaacgcggtgagaaagaacggactgccattattgaaaatattggcaacttgaagggtcagttttcagcattacaggaacaacttgctgcttctaaggcttctcaagaagatatcatgaagcagaaaggtgaattggtaaatgaaattgcgagtctcaaggtagagcttcagcaagtcaaagatgaccgtgatcgccatttagtggaagttaaaaccttacaaaccgaggcaaccaagtacaatgacttcaaagacgccataaccgagcttgagactacatgttcgtcccagagtacccagatacgacagttgcaggatcgactagtaaactctgagaggagactgcaggtgtctgatctatctacctttgagaaaatgaatgagtatgaagaccagaagcaaagcattatcgatctgaaaagtcgcgtagaagaagcagaacttaaactcgttgaaggagaaaaactacggaagaagttgcacaataccattcttgaactgaaaggtaacatacgtgtgttctgtagagttagacctctattgccgggtgagaacaatggagatgagggaaaaactatttcttacccgacatccctagaagcacttggccgtggtattgacttgatgcaaaatgcgcaaaagcatgctttcacatttgataaggtttttgcgccgactgcatcacaagaagatgtcttcactgagatttctcaacttgttcaaagtgctctcgatggttacaaggtgtgcatttttgcatatggacaaactggatcgggaaaaacttacaccatgatgggtaggccaggaaacgtcgaggaaaaaggtctgatcccgcgatgtttggagcaaatatttgagacgaggcagtctcttcgatctcagggttggaaatacgaactgcaggtatccatgttagaaatatacaatgaaacgatccgagatctcctgtcaacaaacaaagaagcagtaagaacagacagtggtgtttctccacagaaacatgctattaaacatgatgctagtggaaacacgcatgtcgctgagcttactattttggatgttaaaagctctcgggaggtttcattcctcttagatcatgctgctcgtaacaggtctgtagggaagactcagatgaacgagcaatcttccagaagccattttgttttcacgctaagaatctctggtgttaacgagagcactgagcaacaagtacaaggtgtcttgaacctgattgatcttgcggggagtgagcgtttatcgaagagtggatcaaccggagatagacttaaagaaactcaagcaatcaacaaaagtttgtcgtcgctaggcgatgtcatattcgccttagcaaagaaagaagatcatgtaccattccgaaactcaaagctcacatatcttctccagccttgcttaggcggtgacgcaaagacgctaatgtttgtgaacattgcaccggaatcttcttcaaccggtgagtctctctgctctcttagattcgcagcgagagtgaatgcttgcgagattggaacaccacgtaggcagactaacatcaaaccattggaaaatcggttgagccttggatgagggaaagaaaagagagatggatttgaagtttgaagctaaaagcttcatttcaaagttaattatatgaatgtacttaatatggtcacaacttgatgaagaaggatgggatgattctaacaagaaaacatgaagaccttttgttgtaatttgtatagtttggtttagcattttattatctgttgtttatgtaattctttttcttttggatcataagtaggattttgcttgttgatgttcggattcatattcatcttctgggattcaaaatatttacttctcgtt

SEQ ID NO: 100229 - DNA, 570 bp, Arabidopsis thaliana columbia
aatacgactcactttagggaaagccggtacgcctgcaggtaccggtccggaattcccgggtcgacccacagctccgcccacgcgtccgcggacgcgtgggtttctccagaacctgacggaaaaaaacttgaatctgcaaatcgacttcccccggagaatgcgatcggagatcggaaactgaggaattgctgctctctactcgcggtgtttagtttacgattggaatatggggaagatatttagctggttagtggtgttattgtcattgatctcattagtccctgttccatcggaatcggctgttttgagtgtagatctaggttcagaatgggttaaagttgccgtagttaatctgaaacgaggacagagtccaatctctgtagccattaatgagatgtccaagaggaaatccccagctttagtagcatttcaatctggagaccggttactaggcgaggaggctgcgggaataacggctcgttatccgaataaagtttattcacaactgagggatatggtgggaaaacctttcaaacatgttaaggatttcattgattctgtctacttgcc

SEQ ID NO: 100230 - DNA, 447 bp, Arabidopsis thaliana columbia
aattgtagaacaacacacaactttctttctcctcctgttcaagactcctttattttctcttatgttcaaagagatgaatctgaatctgaagcaaatgggcaacatgatctatgaagatccaacaaggatccaagaagaagaagacattgttcaagaagtttcgacaacattctctgaggaagaagataactcatcatcttgttcattatcttcttccatgtgttctgattttacagaggatgatgatgatgatgatgtttcttcatcttcttcaaatggacctcttgaagatctctctgacctcatgtcacacctccctatcaagaggggattatcaaagttctatgaagggaaatctcaatcattcacatcactagcaaatgttaaaggccttggaagatcttatgaagagaggggtttaataaaaataggacctatgggcaaaga

SEQ ID NO: 100231 - DNA, 589 bp, Arabidopsis thaliana columbia
  unsure (1)..(589): unsure at all n locations
gggcccttttnttggnncccncaggncccgggnggngnnccttntncagnngttccccaccttccngggggggaggttccccccnncttggtcattacctcctcccatgngtctgnttttaccgggggtggtggtggtggaggatgttccttcatcttcttccaatggccctctggaagatctctctgacctcatgtccccacctccctatcaggggggggatttatcaaagttctatggagggaaattctcaatccattcacatccactagcaaatgttaaaggccttgaagatcttatgaagagagggtttaataaaagtagaaactatggagcaaaaagaaagtcatctaggagtactggagggattttagatcaaagctacaaaagggtttttagtcctaaagctacaatctccaagaaacccaacagaacaccttcctctgctctctcttgtctagccagaagaagacattagatctcagacaaacattagtttctctttccaagttttaaccctttttacgattcaccaaaatcggtttcagtaacatgacaacaacagtaagacatcgtagcattccactgt

SEQ ID NO: 100232 - DNA, 623 bp, Arabidopsis thaliana columbia
  unsure (1)..(623): unsure at all n locations
nnnnnnnnnnnnnnnnnnnnnnnnnnnnnnnnnnnnnnnnnnnnnnnnnnnnnnnnnnnnnnnnnnnnnnnnnnnnnnnnnnnccacgcgtccgcagacttcacactttcactttcattcgctttttcttctctattactgcaatcacttgttcacgataatggcggacctctcctctgtcgatgagttcctgaatcagtgcaaacaatccggcgacgcagcttatggcgccttgcgatcggtcttggagcggctcgaggatccgaatactcgatctaaggctcggatcttcttgtctgacatctacaaacgcgtcggatcttctgagacgtctctccaaacctaccattttcatatccaggacatctatctcgatcaatacgaaggctttcagtccaggaaaaagttaaccatgatggtcattcctagtatttttattccagaagactggtcatttacattttatgaaggacttaacagacatcctgacaccatctttaaggataagactgtttctgaacttggctgtgggaatggatggatatcaatagccattgctgctaagtggttgccttaaaggtatatgggctcgatattaatcctagagctgtgaaaatttcttg

SEQ ID NO: 100233 - DNA, 553 bp, Arabidopsis thaliana columbia
  unsure (1)..(553): unsure at all n locations
ctatagnagagttatgacgtcgcctgcacgcgtacgtaagcttggatcctctagagcggccgctttttggttttttttttttttttttttttctgaagaattgaaatatatgagctaataatcgttaagcaacattcgggataacccaagaaaatacatatattcctaaacaaactcctgtatagtttactttatatatatacgtaattatctacctttatgcttacactgagcagtaaaaaaacagagtgaagtcattataacaacgaaaaccttttcttttctcgaaatagtattattgattccagagaaaggtaaagaaagagaagaatgtttcctctggaactctaatatgattaatccctcctttttatctgaagattttagcttcccctgtttacctgatggaacaagagaatgacattggaatataactggaagctgggaaacatcgaatatctcccatgaatctttcgatctgaaactctaactttcgcgggctgcaaatccgttgggacccgtcgaatatcggtgtcaaacaccatttcngggg

SEQ ID NO: 100234 - DNA, 764 bp, Arabidopsis thaliana columbia
  unsure (1)..(764): unsure at all n locations
nnnnnnnnnnnnnnnnnnnnnnnnnnnnnnnnnnnnnnnnnnnnnnnnnnnnnnnnnnnnnnnccacgcgtccgagatgatgaagcttgtgaggttgatgaggagtcttcaagtaatcatacttgtcaagaatgtggtgctgagtttaagaaacctgctcacttgaagcagcatatgcagagtcattcgctcgagagatcttttacttgctatgtggatgattgtgctgctagctataggaggaaggatcatctcaataggcatcttcttacacataaagggaagctctttaagtgtccgaaggagaactgcaagagtgaattctcagtacagggaaatgttggtaggcatgttaagaaatatcatagtaatgacaaccgtgataaggacaatactggtttgggcgatggtgataaggacaatacttgtaagggggatgatgataaggaaaaatctggtagtggcggttgtgagagggaaaatgaaggggatggcggaagtggtaaggacccataatggtaatggcgattctcagcctgcggagtgttcaactggtcagaagcaggttgtctgcaaagaaattggttgtggaaaagcctttaagtatccttcacagcttcaaaagcatcaggattctcatgtgaaattagactctgtggaggcattttgttccgagcctgggtgtatgaagtactttaccaacgaagaatgcctcaagtcacacataagatcctgtcatcagcacatcaactgtgagatatgtg

SEQ ID NO: 100235 - DNA, 578 bp, Arabidopsis thaliana columbia
  unsure (1)..(578): unsure at all n locations
attgaactgnnnnnnnnnnnnnnnnnnnnnnnnnnnnnnnnnnnnnnnnnnnnnnccgttttgataagaacagaacggttttttctttgcttttagcaacaaaagaagtagggtatctatataatacatatatagtcacacataacatgaaagtctacgcacaatttgcacaagaattaaaacattttctcttagaggaagccacaaagaaatagagggtaaacacttacattgttatacatgaagtagtaaacacttcctcttctcaggccactactgctctctttcctttactgcttttggtgttatctttcttctttcttgaaacgcctgtgattggatgacccagaggacctgaccacgtctggacttgtgttggtggttcggctttggaaaaattgaaagaagaggatgtgaaggatgggaccatatctcgtgggataaatgtcgggtctatatgctgtgaggcacccaatggtacacccattgctccaccatcttggtgtggtggcggaaacttctcgctcttgctctttgcatttgcgtgtgtgattaatctccttctatcgacatttgac

SEQ ID NO: 100236 - DNA, 548 bp, Arabidopsis thaliana columbia
ctatgacaacccatgcacgcgtacgtaagctcggaattcttttcgagctaggcactaccattatcaatccgctctcttctcaaaaaaaaaaatcgactctaaaatcaaactctctcaaagctccccaaaaaaaccctagttctgaatggaatcggcggattccggacgatccgatccggtaaaaggagacgacccgggtccatctttcgtctcttcaccaccagctacacctagcaggtatgagtcacagaagcgacgcgactggaacacgttcttgcagtacctcaagaaccacaagccgcctctcgcgttgtcacggtgtagcggagcgcatgtgatcgagtttctcaagtacctcgaccagttcggtaagaccaaagtccacgtggcggcttgtccttacttcggccatcagcaacctccgtctccttgctcatgccctctcaagcaagcttggggatctctcgatgctttgatcggacggttgagagctgcctaccaggagaaacgggggacggccggattctaacccgttcgccgcacgtgcg

SEQ ID NO: 100237 - DNA, 628 bp, Arabidopsis thaliana columbia
  unsure (1)..(628): unsure at all n locations
aattgaacnnnnnnnnnnnnnnnnnnnnnnnnnnnnnnnnnnnnnnnnnnnnnnnnnnnnnnnnnnnnnnnnnnnnncttttttttttttttttctcgccgcagaagatatgtgtctgtgaattatatatacaaaaatatacagaaacttaacaatggttttttttttcatgtctatttaaagacactatattaaaaaaaaaaaaaaaaatcgtgcatataacacgaagtcattcctaacaaacagacaatacagttgacttttcggttctagcagttctttggtctgtggtattttggaggcagagacgggcagggctcgttcatatgtgggtatggctccattgtgttgtaaccgggaagttccttcctgtatttcccaagtatttgacagtacggaagcttcacaacgtcattgtcattgcaccatttgggaaaacgacttgcattactctcgaaaaacttgagcatgtaagcatctttgatcgtggatcccgtgacttgaatgggacctagagattggatcgaaagcccagctccttggaaattccggggnaaaanggtnaagccgtgatnccnccgganaaccancacctgtcagacgcagaaccgcnaaggggcncncttcg

SEQ ID NO: 100238 - DNA, 1198 bp, Arabidopsis thaliana columbia
  unsure (1)..(1198): unsure at all n locations
atgatcctnnnnnnnnnnnnnnnnnnnnnnnnnnnnnnnnnnnnnnnnnnnnnnnnnnnnnnnnnnnnnnnnnnnnnnnnnnnccacgcgtccgcccacgcgtccgcccacgcgtccgattttagctcttgcctcagaggcctctgtgtctttggcaggaggaccttcatggactgtgttattaggaagaagagatggtctcaccgcaaacttgtctggagccaattcgtctcttccctctcccttcgaaggccttaacaacatcacatcaaaatttgtagctgtcgggctaaagacaaccgatgtagtatccttgtctggagcgcatacgtttgggcgtggtcaatgcgtaacgttcaacaatagactattcaacttcaacgggacaggaaaccccgacccgactctgaactcaacacttctcagcagtcttcaacagctatgtcctcaaaacggcagcaatacagggatcaccaatctcgatctgagcacacctgatgcgttcgataacaattacttcacgaaccttcagagtaacaatgggcttctccagtcagaccaggaactgttctcaaacaccggttcagccaccgtcccgattgttaattcctttgcaagtaaccagaccctgttttttgaggcgtttgttcagtctatgatcaagatggggaacattagtcccttgactgggagtagtggagagattagacaagactgtaaggtggttaatggacagtcatcagccactgaagcaggggacattcagttacaatctgacggaccagtgagtgtagcagatatgtgaacaacgatgagatcagtttcaccgtttgtttatcatatatgaataataactcctaggccgaatcatttttgtgaaaaaaataagtttggttgaggagaaaataagtgagtggtagggttgtgttttacacttttgaaaattttaatattctaaaacattattatgcctaaagacatgcatgcatgtataacgtctatcgttttgatacattttgtggatttgaatctaaattgtgtcacaacgacaaaatttaaaagaataaaataaaaaactagattcatgtcatgatttatcaaaaaaaaaaacaaaaagnnnnnnnnnnnnnnnnnnnnnnnnnnnnnnnnnnnnnnnnnnnnnnnnnnnnnnnnnnnnnnnnnnnnnnnnntagaatcg

SEQ ID NO: 100239 - DNA, 1477 bp, Arabidopsis thaliana columbia
  unsure (1)..(1477): unsure at all n locations
nnnnnnnnnnnnnnnnnnnnnnnnnnnnnnnnnnnnnnnnnnnnnnnnnnnnnnnnnnnnnnnnnnnnnnnnnnnnnnnnnnnccacgcgtccgcttcttcagagcacacaagctctgagatcccatcaataaatggcggtaacagagtcctctgtttatttactctaacaagtcctttaaggttttaataacccagtttcatgggggttacttccttgtatctagccctgttatagcaaggagctcgtgatcatgagtggtacagagttagatgagcctggaaagttaaaacgtgctgtcattgatgcttctgctggtggtgttgctggtgcgatttcacgtatggttacctctccccttgatgttatcaagattagatttcaggttcagttggagcctacagctacatgggctctgaaagattctcagctgaaaccgaagtacaatggtttgtttcgaacaacgaaggatatctttagagaggaaggtttatcgggtttctggcgtggaaatgttccagctttacttatggttgtgccttatacatccatacaatttgcagtcttacataaggtgaagtcttttgccgctggttcatcaaaggccgaaaatcatgctcaactgagcccttatctttcttacatcagtggggcactagcagggtgtgcagcaacagttggatcgtatccgtttgacctattgcggnctgtattggcgtcccagggtgagccaaaggtgtatccaaatatgaggtcagcatttctgagtatagtgcaaactcgtggaatcaaagggttgtatgcaggattgtcccctactctgatcgggatcattccttatgctggtctgcagtttggcacctatgacacatttaaacgctggagtatggtatataataagcgataccgatcttcttcatcaagctcaacgaatccaagtgatagtctttctagctttcagcttttcctttgcggtttagcttcgggcactgtttctaaactagtctgtcatccgcttgatgttgtcaagaaaagattccaggtcgaaggtctgcaacgtcacccaaaatatggagcccgagtagagctgaatgcttacaagaacatgtttgacggtttagggcagatattaagatctgaaggttggcacgggctttataaaggcattgttccatcaaccattaaagctgcacctgctggtgctgtaacatttgtggcctatgaacttgcatccgattggtttgaggcaaatttcccctgaacttgtaaaattcttcaattctatttgtaaatcttattctattttgcttttgagtaataagtaatataagattccatccttctctgaacagagaccaataatgcaaactctttcttactaggaaaaaaaaaaaaaaaaagnnnnnnnnnnnnnnnnnnnnnnnnnnnnnnnnnnnnnnnnnnnnnnnnnnnnnnnnnnnnnnnnnnnnnnnnnnnn

SEQ ID NO: 100240 - DNA, 722 bp, Arabidopsis thaliana columbia
  unsure (1)..(722): unsure at all n locations
nnnnnnnnnnnnnnnnnnnnnnnnnnnnnnnnnnnnnnnnnnnnnnnnnnnnnnnnnnnnnnnnggcttggttttttttttttagtttagtattagctttttttctttcttttggtaaaagatccatccttttcattacgtacaaagaaactattaaccagtcttaatctcaaacacacacaaacgattctgttaaagaagtcatcttttaagaatacataactaatctatcttcactcatacatgatcatcataaagtttgggtggactcttcatgttttggagccatggagtgtgaagaatctgaaggctctctcgtaggactcgatactgaaggttttcttgtaggacttgaatttgatggctttgttgtaggacttgaatcctggtggggccatatgagatggttggttagggactagtgggaacccgatgatgattgcggtgattgagggtatcacgcttggtaaattctctggaagaagcatgcttggttgactcttatcctggggtggatgttcacatactcatcggtttcgtcaaggatctcttcctgaagaagctcttcgataacatcctccatggtgataactcctacaacctcttcattggtagggaaatcaggtatgggagtattctcaatatccaaaatgcagaacgaacaacctctatgtcgcttcttagctggagcagccaatagacttgtttccctgacccttgct

SEQ ID NO: 100241 - DNA, 797 bp, Arabidopsis thaliana columbia
  unsure (1)..(797): unsure at all n locations
aggacgcatgggctctctcttttcttctttcatcttctctcttccttatcacttgactttagtccaaatctctagctcatttgtcagacaacaaatttctgacaatggaagcaatcagattctctaatttgtcaggtcttcttattctcttaatgtcactgcctcttttagtgacttcaaaggacgaaactgtttcttgcacaatgtgttcctcttgcgacaatccatgtaatcctgtcccatcttcttactctcctcctcctcctccgccatcaagctccggtggcggtggatcttattattactctcctcctcctccttcaagctccggtggtgttaaatacccgcctccgtacggcggcgacggctacggtggctattatccgcctccttactacggcaattacgggacaccaccaccaccgaatccgatcgttccttattttccgttttactatcatactcctcctcagggatattcaggctcggctcgtttacagaattctctcctctttgctctgttcgccgtcttgctctgttttgtgtgacggcgattcatctgtatttggccgggaaaagtgtacggtgtaaaactgaaatatcttgtttacttatttaactttttttacatttttgttgacaatttgtatttattatatcttttcaattaattaagaacatttataactaaaaaaaaaaaaaaaaaaggnnnnnnnnnnnnnnnnnnnnnnnnnnnnnnnnnnnnnnnnnnnnnnnnnnnnnnnnnnnnnnnnnnnnnnnnnnnnnnnnnnnnnnnn

SEQ ID NO: 100242 - DNA, 510 bp, Arabidopsis thaliana columbia
  unsure (1)..(510): unsure at all n locations
ttgacgtcgcatgcacgcgtacgtaagctcggaattcggctcgagactgtttcttgcacaatgtgttcctcttgcgacaatccatgtaatcctgtcccatcttcttactctcctcctcctcctccgccatcaagctccggtggcggtggatcttattattactctcctcctcctccttcaagctccggtggtgttaaatacccgcctccgtacggcggcgacggctacggtggctattatccgcctccttactacggcaattacgggacaccaccaccaccgaatccgatcgttccttattttccgttttactatcatactcctcctcagggatattcaggctcggctcgtttacagaattctctcctctttgctctgttcgccgtcttgctctggtttggggactggggattcatctgggtccggggcggcaaaaggggnccggggggaaacccgagacggcctcggcggcttttggaagcggcgggcgcggcggcggcgagccaccga

SEQ ID NO: 100243 - DNA, 461 bp, Arabidopsis thaliana columbia
agaacaatcaataaaaacaaaatctcttacctcaaaagaaaaagctctcttatggctgcttcttcttctgtgagacccaccccaacgggacctcaagtgttcatcaacttccgaggaaaagatctgcgtaacggcttcctaagctttcttgagcctgccatgagagaagcgaacataaacgttttcatagacaaggacgaagtggtgggcacagatctggttaacctttttgtgaggatccaagagtcaagggttgcggtggtgatcttttctaaggactacacaagttcggaatggtgcttagatgagctggccgagatcaaggactgcattaatcaaggcggtctcaatgcgattcccatcttctacaaacttgcaccttcctccgtgttagaactcaaaggaggttttggcgatactttcagggttctaaaggagaaatataaaaatgatcctgaaag

SEQ ID NO: 100244 - DNA, 727 bp, Arabidopsis thaliana columbia
  unsure (1)..(727): unsure at all n locations
nnnnnacactatagttgagctatgacgccgcatgcacgcgtacgtaagcttggatcctctagagcggccgccctttttttttttttttttttttattgaaaaatgttattacgataggatctgattccagtcaaattaatacacctaatccattacagattttactaccattttaaagtcacgtgacttttacataatctaaaatcaaaagagcgaaaaataaaacaagaggtcggtacggttcggtttagcattattagaaagtagaaaccaaaccaaactgaatgggataacgttcattgatcagaataggtaataggtcatgtttctggtaatagctgacgtttctgggaaagtcttctgtagattcttgcaccttcgaactctggcgtggatctctcgttctggtcttatacccatcgggttttccgtttaccacccatcctctgggtcaactgtgtccatgtgttgaagaacatttgatccctcgtccaactgatctctcatgtcttgagccacatccagcacatcggattgcacaaattttttccccccgggtttaaggtttgaagaatggaattcaccaaggcttttgaacaacactctctttgatgacgtttccgaaaagaggatccgacccagattggacatttccaaggtccaggatggtcgtatagatgttaaaaaaacatggctttgcaatttaggtgtcgtttaaagtccagct

SEQ ID NO: 100245 - DNA, 685 bp, Arabidopsis thaliana columbia
  unsure (1)..(685): unsure at all n locations
nnnnnnnnnnnnntatagacgagctctgacgtcgcatgcacgcgtacgtaagcttggatcctctagagcggccgcccttttttttttttttttttttttttttatcttggaaaaggaacaaaaggtctcttcattctgaattttgacattacaactccaaaatttccatttcaacagttcctaggttctacaaaaaaaaatggtaaacagagataaagatcgacaaagaggcaagcacctagcggttctgcatgtagtcgaagctcaagggttgttgaacgaactgtgcctgaagagagccattcctgaactgctcatacggatgagcatacatcatagctgcattaggccaatgcatatacattgcatccattgtggtgccatagggactcatgattgagctaggatgtggtccgaagccaagaggagcaggaggacttggaatttggttatatccagtgaatcccatttcgtagtatggtgtcggtatttgctgaatgttgaagggtggtagattgaagttctgattcaccggaaggctcctaatggacctttggtgtctgcggccataatcagggtcaaaccgatctttctctctgtctctaaatattgcaacacgagatgttggaccactttccctgatgcttaagttcttcttgacctcaacgnaagcattcttagatac

SEQ ID NO: 100246 - DNA, 566 bp, Arabidopsis thaliana columbia
tgatacttcagctctaccacgactcactatatggaaagctggcacgcctgcaggtaccggtccggaattcccgggtcgacccacgcgtccgcgtttttgtatcgagtttattaattcacaatgggaaaagaaaagccacatattaaccttgtcgtcatcggtcacgtcgatgctggaaagtccaccactactggacacttgatctacaagtgtggaggtattgataagagaaccatcgaaaagttcgagaaagaagccaaggaaatgggcaagtcctcattcaaatatgcttgggtcttggacaaactcaaggctgaaagagaaagaggtattaccatcgatattgccctgtggaagttcgaaacctctaaatactacttcaccatcattgatgcccctggccacagagatttcatcaagaacatgattactggaacctctcaagctgactgtgctatcctcgtcattgcttcccctgccggagagttcgaagctggtatctctaagactggacaaacccgtgaacatgccctccttgcttacactcttggagtcaagcaaatgat

SEQ ID NO: 100247 - DNA, 606 bp, Arabidopsis thaliana columbia
  unsure (1)..(606): unsure at all n locations
tgcactatagatagactatgacgccgcatgcacgcgtacgtaagcttggatcctctagagcggccgccctttttttttttttttacttaattacatgttccttataaaagaagcatataagaaacaataaatcaaaacctattacaaaacctgttctctcgtttttgtaaaacttgtatagcaatgaagatatctctagtttttggttcatgaatcagcttcttcgtttcttgtgtgtgaatcataaaccgacggcaggaaattcgggttgaaaatgacggtttagtctcaaaactggttgatcatcactcggacctggtgtttgtgaaagaagagagtaaaccagctgcttgagccggtagtatatcgccaaatgtcgacatagcggctgctgatctgtccttggaatattcccacttgtccatcagttaataattgatcccagtttcaatgtgctttcccgcatgaaagacttaaaagccacgccgaaattgggattttcctccaaaccacttggttgggatgcccccggttggaaangccnccagggtcctgcgngcacctttgtgacngaaaggnccattgnnccagtnangggggggnngt

SEQ ID NO: 100248 - DNA, 823 bp, Arabidopsis thaliana columbia
  unsure (1)..(823): unsure at all n locations
gggggggggtagtatcgccggctactatacgactcatatagggaaagctggtacgcctgcaggtaccggtccggaattcccgggtcgacccacgcgtccggattacgttgatgtgctctattgccacaggccggatgcttcaactcctatcgaagagactgtgagggcgatgaactacgtgaatgataagggttgggccttctattggggaaccagtgaatggccagctcaacaaattacggatgtctggggaggtgctgaccggtttgaatttggttggcccaattgtcaaacagccagaataccacatgttcgctaggcacaaagtttgagacagagtttcttcctttgtaccccaaccatggtatagggcctcactaccctggagcccacttgcatctgggtgtgctcactggtacatacaaccagggaagctattccctcagacagccgatttgcattgggggaactacaaaaaccttgggccaatagatcccttgtggatgacggcctgaagaaagttagcggtctccaancccattgcagaatgaactaagtgttaccttgggttcaactttgcnatccgcatgggtgttgcttccaatccccaaagntgttcntcctgtttatccccngggtgccccccaaggggaattcccccnnaattccnaaaaaaatttttgaaaacctggttgaaantntnttncccntttggttgaaaccccntnttgttcnttggaanaaaaaattnaaccnattnttttcnaaaccaaacccaaancctccccgaaccnttttgggttnaaacncccccccatatncc

SEQ ID NO: 100249 - DNA, 1609 bp, Arabidopsis thaliana columbia
  unsure (1)..(1609): unsure at all n locations
nnnnnnnnnnnnnnnnnnnnnnnnnnnnnnnnnnnnnnnnnnnnnnnnnnnnnnnnnnnnnnnnnnnnnnnnnnnncggacgccggaattcggcacgagtggcacgagaagagagagagagcgatagtgagatttagatcaacagatttgaatcgatttctgaaaacatgcagtacaagaatctggggaaatcgggtttaaaagtgagcacgctctcgttcggagcgtgggttacgttcgggaaccagctcgatgtgaaagaagcgaaatcgattcttcagtgttgtcgtgatcatggagtcaatttcttcgataacgctgaggtttacgctaatggtcgcgctgaggagattatgggtcaagcgattcgtgaactgggttggcgtcgatccgatatcgtcatctctaccaagatcttctggggtggtcctggtcctaacgataagggtttatctaggaaacatatcgttgaaggcactaaagcttctctcaaacgacttgatatggattacgttgatgtgctctattgccacaggccggatgcttcaactcctatcgaagagactgtgagggcgatgaactacgtgattgataagggttgggccttctattggggaaccagtgaatggtcagctcaacaaattacggaggcatggggagctgctgaccggttggatttggttggtccaattgtcgaacagccagaatacaacatgttcgctaggcacaaagttgagacagagtttcttcctctgtacaccaaccatggtataggtctcactacctggagcccacttgcatctggtgtgctcactggtaaatacaacaagggagctattccctcagacagccgatttgcattggagaactacaaaaaccttgccaatagatcacttgtggatgacgtgctgaggaaagttagcggtctcaaacccattgcagatgagctaggtgtaaccttggctcagcttgcaatcgcatggtgtgcttcaaatcctaatgtgtcatctgttatcactggtgccacaagggagtcacagattcaagaaaatatgaaagctgttgatgtgatcccattgttgacccctattgttctggacaagattgagcaagtgatacagagcaaaccaaaacgtcctgaatcatataggtaaaaccaacatccaagatctctcttccctattcaatcgtttacaaaagagtgttgcaggaaaaagaaaacattagaagaagctctgtgatgtatgttgttggatgttgtctcgttttcgctttgtttgttctctttagcagcttatgcatttttaagactcagacagagagaaagagagactaatgttttttttttagtttttcttgtttcatcatttaaaaaaccggtcttatttgttacttgttagtgcaacttaaagtttggttcttgtagtttgccatgtcatgacgtcaatatattgaatagctcatcaaacaattctggttatatcttaatgttgtgaagattttaatttaaaaaaaaaaaaaaaaaaccaagnnnnnnnnnnnnnnnnnnnnnnnnnnnnnnnnnnnnnnnnnnnnnnnnnnnnnnnnnnnnnnnnnnnnnnnnnnnnna

SEQ ID NO: 100250 - DNA, 753 bp, Arabidopsis thaliana columbia
  unsure (1)..(753): unsure at all n locations
nnnnnnnnnnnnnnnnnnnnnnnnnnnnnnnnnnnnnnnnnnnnnnnnnnnnnnnnnnnnnnnnnnnnnnnnnnnnnctttttttttttttttcaaaaaatatgttatatgattttccaatgtatattggaccaaacgacaatattcatattcacagtgacagaaataataataatgtgtatatatattaataatgaaaatctttttttatcttgacagattaaagaagaagaaaaaaaacagagcattgctccaaaattcaatgtgaaggtaagtaagtaaataaataaaggtaaaaagagagagggggtaaaattagggaccacgaccagagacaaagcagaaacagccaggtctctgatcttccgggatcattccaccgcctttggtggtgtcgacagcttcaagcaaactcacaacttcctccatctctggtcgtttctccggattagcttcccaacatctcttcattatggtcgccaatgctgttggacaacatcttgggaatatccggtctcagattctgacgaacaacagcagatgaaacatcagcaaagctgagattcaggataaggcatatcacaccattaaatcccccacaagcatatccccaagctgtaaacatcacaccttctgttgtatggttgccatcaagaccnctgggccatgntccagggccagttcccagcagctttggtcgggtnatcaggacccaanggatctagnccngaaccaaggntncngttcaacggt

SEQ ID NO: 100251 - DNA, 742 bp, Arabidopsis thaliana columbia
  unsure (1)..(742): unsure at all n locations
nnnnnnnnnnnnnnnnnnnnatgacgtcacatgcacgcgtacgtaagcttggatcctctagagcggccccccttgggttttttttttaataataatgtgtatatatattaataatgaaaatctttttttatcttgacagattaaagaagaagaaaaaaaacagagcattgctccaaaattcaatgtgaaggtaagtaagtaaataaataaaggtaaaaagagagagggggtaaaattagggaccacgaccagagacaaagcagaaacagccaggtctctgaccttccgggatcattccaccgcctttggtggtgtcgacagcttcaagcaaactcacaacttcctccatctctgggcgtttctccggattagcttcccaacatctcttcattatggtcccccatgctgttcagacaacatcttggaatatccgggctcacattctgacgaacaacagcccaagaaacctctgccaacctcagatcacgataaggcatatcacaacaataaatgtcccacaagcatatccgaaagctgtaaacatcacatcttctgttggatggcttgccatcaagaacctctggagccatgtatccaagagttccaggttctgcaagtcatgtctttttggattctggagctttcaaacttttagctaccccccaaaaaatcaagccaatccttttagaacttccctctggaatgaattcccaaaagaggcagtaatttcccccctggtttt

SEQ ID NO: 100252 - DNA, 691 bp, Arabidopsis thaliana columbia
  unsure (1)..(691): unsure at all n locations
nnnnnnnnnnnnnnnnnnnnnnnnnnnnnnnnnnnnnnnnnnnnnnnnnnnnnnnnnnnnnnnnnnnnnnnnnnnnnnnnnnnnnnnnnnnnnnnnnnnnnnnnnnnnnnnnnnnnnnnnnnnnnnnnnnnnnagggaagcataatctcaaaaatttgcctccaataaaattcgtttggacatgaattccttaagtatgggagaatactacgtttaccccacataataggttaatctaatttaaattaggggaaattttccaccaatcaatttattaattacttaaaacaacaaaaggggggaaaaacaattaaaaacacatttttccctcaaaatacccatagtgggctacaactggagatttcttgtttcacaagacacaagaaaaaaaaacctaacttagaaatcattagaaggaaggggttcatgtccattactaccgataaagatagtgtcataaacaatagctgcaatggctgccccgataaaaggacccacccaatagacccattgtttcgtccaaatccagtttaccacggccggaccaaatgaaaccggggggttcattgtgcccggtcgaagcccccccaccagaattgttgctcaacgattaacccattcggcatggcgcaatggttccatatcaccttttttggatccacgggaggagcgaaaccggttaactaaccaa

SEQ ID NO: 100253 - DNA, 389 bp, Arabidopsis thaliana columbia
gaataaaatattccccgaggcgccgtgttcttgtggcttgctacttatcttctgctgcaatccgcataaatcggatttgcaaaattttcttaacctaattcgtttcttcgcgatcaaaccacagatttttcaattttagtgaagtttcattttttaaggcatggctactctcaacggaaaagcttctccgtattctgaagaaaacatcaaattcaagtatgatgattatgatgatgatgatgatgatgatgatggtagtggtagtggtagtggtggtggttatgaagatggacctaaatggtctgttcaatcaatccccacaaagaaagaggtggagtcttcgattctcgactcaggagattactttgtcgactgatatgattcatccg

SEQ ID NO: 100254 - DNA, 668 bp, Arabidopsis thaliana columbia
aaaaagaagaagaagaaaagagaagaagctcttgttatcccggcgttcttaaaacaacgacggcgacggtgacggctaagcggaagagcttttgttgccaatgacggactcttacggcgccgtctccgtcgacgttggaacaatctatcttggtggcaaggagcatcgtgttaaaactgctagtggtgttgtgtctgtcattgtctatggagacagagaaaagccagcattgattacttatcctgatttggccctaaaccatatgtcatgcttccaagggttattcttctgtcctgaagcagcttcattgctgcttcataacttctgcatttaccatatcagtccacctgggcatgagttaggagctgctccaatttgtcctaatgattcagtcccttctgctgaaaacttggcagatcagatccttgaagttctcaactttttcggccttggtgttgtgatgtgtatgggagtgactgcaggtgcttatatcctcaccttattcgcgatgaaacatagagaacgggttcttggtttgattcttgtctcaccgttatgcaaggcgccgtcttggtctgaatggttttacaacaaggttatcacaaacttgttatattattacggaatgtgtggagtggtaaaggaatttttgcttcaaagatatttta

SEQ ID NO: 100255 - DNA, 607 bp, Arabidopsis thaliana columbia
  unsure (1)..(607): unsure at all n locations
nnnnnnnnnnnnnnnnnnnnnnnnnnnnnnnnnnnnnnnnnnnnnnnnnnnnnnnnnnnnnnnnnnnnnnnnnnnnnnnnnnnnnnnnnnnnnnnnnnnnnnnnnnggcagatatgatgattctcttattaaccaaggtattgacaaatacatggacaaggtattgtttagtaaggaaatacacaaaatctacatgaatgaataatattctcaaaacattcatttagcaaaccataatccatattgttctaacaacaaacaaggtaaaataagaaaatgcttgagtgatttagtcactcacgcttctttaatccaaactttccacttgggattctactgagaaacccagtatcaagcttcttgtaatgactatgaaacttcatgatcatagaatccataaaaccatccacttcgtcttcgtatctctcatacagaaccggcattgtgtgtgccccaacaaacccgatatacaaaacagttgggaaattgcaacagctcccgacctttgcagctacccatagtccgattacagccatgaggaactgtttcaaattccctttacaagccaagtcctgaagaaacaacaaaccgcggttaacttcttttc

SEQ ID NO: 100256 - DNA, 607 bp, Arabidopsis thaliana columbia
  unsure (1)..(607): unsure at all n locations
nnnnnnnnnnnnnnnnnnnnnnnnnatctaaactcatcgacgaccaatctatttcacttgagttactggattgttctatctgttcatgtctagatgggggctaagtagctctttgaagcagaaaatttagttcaataggaaaatatttacaatcagatgtgtacatatatttgtggaagataaatatgtgcaaagcagaacagagtatttagtattttaccaactactagacttaacctttgctctgaaaaattgaatcatgtgcttatagacatcttctttagcacttgagccaagcacaaagtcaatgtgaccataatcctcaagatatagtaactctggactggaaggtagttccgcgagagtatgttccacatctgtcacatctgctaaaccatcagttccaccataccccatccacattggtaatgatgccgggatgtggcttagtatgaattctagaggtttcgacagcccataagtccggagatttttgaaatacccgtagtcgttttgcgcaaaggttcccttccgaatcatttggaaaagatgtcgaatattcttgacagatgatgggtgaaggctcgaatccagatagtattctatt

SEQ ID NO: 100257 - DNA, 569 bp, Arabidopsis thaliana columbia
atacgactcactttagggaaagctgcgtacgcctgcaggtaccggtccggaattcccgggtcgacccacgcgtccgcaggcttctgcttacatcatcggtgttgccggatgggccactggtctcaaactcggtggcgactcaccagggattcagtacagcacccaccgtgccatcgggatcgctctcttctctctagcgacagttcaggtgtttgcgatgtttctgaggccaaaaccagagcacaagcataggctctactggaacatttaccaccacacgatcggctacacgataatcatcctaggggtggtgaacgttttcaaagggctaggcatattgagtcccaagaagcagtggaaaaatgcctacatcggtatcattgttgttctcgccattgtggccaccctactcgaagccttcacctggtatgtagtcattaaaagaaggaaactggaggctaaaacggctcagcatggagcatctaacggcactcggtctcagtatgcttaagattagcaacagacttgcttccttttctctttgtgcatagagacacagttatttatct

SEQ ID NO: 100258 - DNA, 763 bp, Arabidopsis thaliana columbia
  unsure (1)..(763): unsure at all n locations
nnnnnnnnnnnnnnnnnnnnnnnnnnnnnnnnnnnnnnnnnnnnnnnnnnnnnnnnnnnnnnnnnnnnnnnnnnnnncttttttttttttttttgtatgaaccgagcgaaattttatatcaatacctttccactaatattgagcctagtggtgaatggcccaatgacaaaatcccaagtcaaaaacattagctaatataagtagtaatctgtgtcttggagatagaaccaaaaagaaaaaacagagagaacaaaaagacttagcagagctcttgaaaaagagactatacatatatcaaatcaaagcagaagaaggattatactctatatctctgtgtgactgacttagagacctttaccttcgtcttcgtttaagattcggttacggaagtcactaaccatgcgaggcagtccctccctcagagatatctttggttcccagttcaactgttcctttgctttgcttatgtctggtttcctcttgtgaggatcgtctgctgctggtttgggttgaactctatggtcgcgcttgggtcgatcacctccttaaccacctctgcaagttcaagctttggggattctccagggttaccaaggttgaggggccctactgaccgctttccattaaagcgacaagtccctccaccagccagaaacatattgaaagctacgagcctggtttccatcacaataagcaggcttaggggttggcatggtgggaaagtntaaaangccntnaggatnggccatgngaaaggatnacc

SEQ ID NO: 100259 - DNA, 774 bp, Arabidopsis thaliana columbia
  unsure (1)..(774): unsure at all n locations
tgnnnnnnnnnnnnnnnnnnnnnnnnnnnnnnnnnnnnnnnnnnnnnnnnnnnnnnnnnnnnnnnnnnnnnnnnnnnctttttttttttttttcaccaaattcaatattgtctcctccttcaagaacctttccttcagactctatctgcacagaatctccagtatctttttcttttccagaagactcgatattgtctccttcttcaagaaccttcctttcaggctctatctgcacaggatctgcagtatctttctccttttcagtaaacacaatattttctccttctcctccttcaagaacattccctgaaaccttcccttcagactctatctgcacagaatctgtagtatctttctccttttcagcaaactcaatattgtctcctccttcaagaacattctctgaaactttcccttcaggctgtatttgcacagaagaatcgggaatatctttcttcttcttctcagcagatctaagggtggctttctttgacccgttcgaaagagaagaccttttgagactaggactgggcttctcatctttaatctccaaaggcgacccctcctttgagccgcttctactttttctcgaattgagatttgctttgtcactctcatttctcaggggatctntactaagcgtggaagccttcctcacatttcgtttaggtttatttctttcagctgtaaaacggctagggccagttccactagttgtgccagatggttncttgatacttcgctttggccttttcttttctgcttcaccactgc

SEQ ID NO: 100260 - DNA, 771 bp, Arabidopsis thaliana columbia
  unsure (1)..(771): unsure at all n locations
ggacacactatagaagagttatgacgtcacctgcacgcgtacgtaagcttggatcctctagagcgtgccgctcgcgatctagaaccggacgcgtgggcggacgcgtgggcggacgcgtggggagcagtgaaggcggagtcaccggcaggggaattccaaatagcgtctctatctgaaacaactctcgcttcagaattgtgtcagagtcacgtgttgttctatatcccatggtttacttgttctacaagttataaactttgattattgttataataaacatcagaataaagcaagtctatacatattaaaaaaaaaaaaaaaaaagggcggccgcccttttttttttttttttggtttctctctttctatttccaatcaataaacatatctctctgttcgtgtgtctgtaactctacaatgatctgtatagnttctttctctctttttttctctccattttcctggaaacaaatctgtaacaaagaagaataggaacaaaaaaaagctcagctaacaataatacaaacctcactcgatttttctcaccactctgtacagttttataaatccgatgggcaaccaaagtctgaacgttcgatcttcctctgaactgcnggacatcaccttcccaagagcnatcattcctgagttcatttgcgacacaatccgactagacattccactttgttcttgaacacagntctctcagcaagtcgtgcttcatcgaaagatccgtngtgcgctcattgatcatccgggactgtaatcgct

SEQ ID NO: 100261 - DNA, 2877 bp, Arabidopsis thaliana columbia
  unsure (1)..(2877): unsure at all n locations
cgaacacacaccgagagaaaatcagaaattaaattagagagagagcagagtgaatcaaaacttcaacttcacccaaaaagatgttcggagaacttagggatctgctcaccggcggcggaaatgagacgacgacgaagaaggtgaaaggaacggtggttctgatgaagaagaacgtcctcgatttcaacgatttcaatgcttcgtttctcgatcgtcttcatgaatttctcggaaacaaaatcactcttcgtcttgtaagctctgatgttactgattcagaaaacggttctaaaggcaaactagggaaggctgctcacttggaggattggatcacaacaatcacgtcgttaaccgcaggcgaatccgctttcaaggtcacgttcgattacgaaaccgatttcggttaccctggagcattcttgatcagaaacagccatttcagtgagtttcttctcaaaagtctcacacttgaagacgttccaggccatggcagagtccattacatctgtaattcttggatttaccctgctaaacactacactacagaccgagtcttcttctccaacaagacttatcttccacatgaaacaccagcgacgctgctcaagtatagagaagaagagctagtgagtttgagaggaaccggcgaaggagagcttaaggaatgggacagagtatatgactatgcttactacaatgatttaggcgtcccaccaaagaacccacggcctgtacttggagggacacaggagtatccttacccaagaagaggaagaaccgggcggaaaccaactaaagaagatcctcaaaccgagagcaggctaccgatcacatcgagcctagacatatatgttccacgagatgagagatttggacacttgaagatgtctgatttccttgcttatgctctaaaagcgattgctcagttcatccaacctgcacttgaggctgtattcgacgatactcctaaagagtttgattcttttgaagatgttcttaagatctatgaagaaggaatcgatctaccaaaccaagctttgattgatagtatcgttaagaatataccgcttgagatgttaaaggagatattcagaacagatggccagaaattccttaagtttccagtgcctcaggtcatcaaagaggacaaaactgcatggagaacagatgaggaatttgctagagaaatgttggctggactaaaccctgttgttattcaacttcttaaggagtttcctccaaagagtaagcttgacagtgaatcatacggtaaccagaacagtacaatcactaaaagccacatagaacacaatttggatggactcactgttgaagaggctctggagaaggagaggttgtttatattagaccaccatgacacactgatgccatacttgggacgcgtaaacaccaccacgaccaagacttatgcaagcaggacacttctgttcttgaaagatgatgggaccttgaagccgttggtgatagagctgagcttgcctcatcctaatggagacaaatttggagcagtgagtgaagtatatacgcctggtgaaggtgtctacgactcgctatggcagttggctaaggcttttgtcggtgtaaatgactccggaaatcatcagcttattagccactggatgcaaacacacgcatcgattgaaccgtttgtgattgccacaaacagacagctgagtgttcttcacccggtctttaagctccttgaacctcacttccgtgatacgatgaatatcaatgcacttgctaggcaaatcttgatcaatggtggtggtatatttgaaatcactgtgtttccttctaaatacgccatggagatgtcatctttcatttacaaaaaccactggaccttccctgaccaagcattaccagcagaacttaaaaagagagggatggccgttgaggatccagaagcaccacacggattacgtctgaggataaaagactatccttacgcagtggatgggcttgaggtttggtatgctattgaatcatgggtccgagactacattttcttgttctacaagatagaggaggatatccaaaccgacacagagctccaagcctggtggaaggaggtgcgcgaggaaggtcatggagacaaaaagtcagaaccatggtggcctaaaatgcaaacccgtgaagaacttgttgagtcttgcaccatcattatttgggtggcttctgctcttcatgcagctgttaacttcggacagtatccagttgctgggtacctcccaaacagaccgactataagccgtcagtacatgccaaaggaaaacactccagagtttgaagaacttgagaagaatcctgataaagtgtttttgaagaccatcacagctcagcttcagacacttctagggatatctctgattgagattctctctactcattctagcgacgaggtctatttgggacagagagattctaaagaatgggcggctgagaaagaagcgttggaggcgttcgagaagtttggagagaaagtaaaggagattgagaagaacattgatgagaggaacgacgacgagactctcaagaacaggactggtttggttaagatgccatacactttattgtttccgagcagtgaaggcggagtcaccggcaggggaattccaaatagcgtctctatctgaaacaactctcgcttcagaattgtgtcagagtcacgtgttgttctatatcccatggtttacttgttctacaagttataaactttgattattgttataataaacatcagaataaagcaagtctatacatattaaaaaaaaaaaaagnnnnnnnnnnnnnnnnnnnnnnnnnnnnnnnnnnnnnnnnnnnnnnnnnnnnnnnnnnnnnnnnnnnnnnnnn

SEQ ID NO: 100262 - DNA, 676 bp, Arabidopsis thaliana columbia
cactatactagagctatgacctcgcatgcacgcgtacgtaagcttggatcctctagagcggccgcccttccttttttttttttttttttcctatccaaaaaaattttaaaaaccagaaaagttcaaaaaaagttgagcagcatattattgttttttttcttatgagactgagtatcaatcagttcatatccaattctcgacttttcacaaaaagggaaaggaagagagatgggcttgcaaacacatctttctttctctctcttagtagcatctctcttacactccctctctgctcctctctgatagagtcatgctctcaatttgagacaccagtgaggcattgttgctagcccccgcagctggaccggaccttgaaggctcacgaggcaataaatacttgtcccaatctcctcgcctccttaatgtttcaccctgaatttccacgacttctgaacttctcagggcttccatatagtctgggatgtattggccaattccggaaggcctctgaatgctgcttttactctaacaggaaacccaacctttataattcatctgatccccgaaatgtcatttctcgtaaggttatcaaccctgaaaaaatttccacttggggcatatctttatggaccaaatgcgtcaaaatggcaaaaaccttgggtggaggggggaaggg

SEQ ID NO: 100263 - DNA, 444 bp, Arabidopsis thaliana columbia
acttacaaaatggagataaaaccctctaggatattctccaccatcaccatcttctttctctgccttctactagcacacgtcacctccaaggcatcatcatcatctctgtgcaatggatctgtggcggagtgcagcagcatggtggagacagaggaaatgagtgtgataatggagtcttggtcaagccagaggttgacggaggagcaggcacataagctttcgtatggagctttgaggaggaatcagcctgcttgcgatggtggtaaacgaggcgagtcttactcaactcaatgtcttcctccaccgtcctaacccttatagtagaggctgctctaagcattaccgatgcggccgtgactcttgaccattcaccatcatgaatctttatgttggaaaacacctatgttctttattttgttggtggaattgaattgttttggtttc

SEQ ID NO: 100264 - DNA, 677 bp, Arabidopsis thaliana columbia
  unsure (1)..(677): unsure at all n locations
aaatataaattaaaagttttttaaaaagacatattcacgaatgataatcaaagagagaagcaaccacacatcagtcatgaaaccattttctgtcttctttttttcttgttttattactttcatttccatatgaaactcctatgctcttacagagaaggagacacatattgtctagacaagctaaagatatcttttccttcaaatggtgaagtccaatctggagaggtagctgcttgttgtgtttccacgataacaccagcacctgaattctccatagatacaccgttgctgttgttgagtctacctcccatggaaccatttagactgtaccggttcatgttctcatcatatatttggctgctgctctttaacccggaccagtttccattgactctactattttgtgataaactttgatctagactccagtctatggtttgtgtagtccactggaaccgccagagatccaatctatagggggaagatgcacccggatgttccagctggaaccaccgcagggggtaatcccagcgaggacgcgcagatattggggggggtgatgctgtattttagccatggccgcatcccctggcaaaacatgggncatggtgtgaagaccgtcggttaacnangggaccgtngtaangtgatgggccncanggaanngtnnancctnt

SEQ ID NO: 100265 - DNA, 508 bp, Arabidopsis thaliana columbia
tggacacctatagaagatcttgacgtcgcatgcacgcgtacgtaagcttggatcctctagagcggccgccctttggttttttttttttaaacgcaatgcccatttagataaaaagtacaccaaaaacacacacacaaaagtcagcttcaaatagccatccacaataagcctttgcatctacacaaattcagcttgtgctaagctttctccaaatctttgcgtttgttttttacgcgggataaagctccaaagccttgcctgcctttacaaaaaaactgacccaaaaaatgtgtcgtccgtctcctgcacaactactcctctagatggcccaatgactctttctcagttctcacgcattctgtttttacactttgatcacaaagtcacaatgttctagcgggcttcagaagagatattcccaggcaatggcgtccctggaaacccttcttcgatatcttgagcccccggtttcttttcacatactcatcagcgttatggggggggtcat

SEQ ID NO: 100266 - DNA, 710 bp, Arabidopsis thaliana columbia
  unsure (1)..(710): unsure at all n locations
attgacgtgcacttgcnnnnnnnnnnnnnnnnnnnnnnnnnnnnnnnnnnnnnnnnnnnnnnnnnnnnnnnnnnnnnnnnnnnnnnttcctttttttttttttttttcggccggagaaaacttttcaggtttgatattctaaaaaagattaacataagaaatctgtagctgtaaaactaatgatgagttaagcatttagattacactgaatgatgaagattctcccaaactaactttttatttttgttttgtttcttccttggggatctgttgtttgtctacacagctgagttgagagtcttccatcagaaaaatagttaaacagtaaagagagaagtcctgaagaacctcaagataagagctcgttctctctatcactgttaactctgaaactccgagattatccagcaaaagaccaatactttcaattatcgattttgggacgctttggctgtggagattctagttcctcacatttcctggtttcttcttctggaacctccttcgaatcagcagtcttcttgtcttcttgttcagatttggctgcggaatctgatgttgaggctgtccctttggtaagaccagagttttgcttctcgaacatcatttgcaggtacttgccttgttcttctattcggagttgcaggtttctttgaatctcgagctggcggccgcgaattcgatatcaagaatatcgatacggtcgacct

SEQ ID NO: 100267 - DNA, 559 bp, Arabidopsis thaliana columbia
  unsure (1)..(559): unsure at all n locations
nnnnnnnnnnnnnnnnnnnnnnnnnnnnnnnnnnnnnnnnnnnnnnnnnnnnnnnnnnnnnnnnnnnnnnnnnnnnnnnnnnnccacgcgtccgcccacgcgtccgcccacgcgtccgcactctttcctttttttctctctctttgatctcctcgaacccatcatcttaaatcgcccgatcaattctatctccggcggtctagcatttttcatcgccggcgaaacattttttaccaattctccagcttggctaatcaactccgatcacgttccgtattcccaaattcgatctcgaagggggacatagagaagtctttcgcgaaggagaatcacgagactttgattacttttggcactcttatgttttcttactgaataaagggacttcatttacagcaactggagctgtttttattgtttacctccaagcgcataattaaacgagaggcatgaagaactgctgaattcaatcaatgcaagtttgtttcgttagcttgaatggatgtagcaacagatactacaaggcggcgtcttcttccatccgacaagaacaatgcag

SEQ ID NO: 100268 - DNA, 523 bp, Arabidopsis thaliana columbia
  unsure (1)..(523): unsure at all n locations
nnnnnnnnnnnnnnnnnnnnnnnnnnnnnnnnnnngccgcgtacgtaagcttggatcctctagagcggtcgccctttgtgtttttttttttttttattttttttttttttttttcaaaaaagaatattcatatatgcatatataaataggctgggaaacaacaatacacagctctcaagtattgggtttttgatacaaaaataaccatcactacattttgacatcgtactctttaaggacaggactcgagaaggataatgacaaaaaaagaatgcccaattgctgcgatgcctgcctataatgatgcagtgatgggtaatcaatcctgggaatacatactctatccacaactatttgcctccaacttgggcatcatctttggctatttaacgaatgccaaatgtatcatcttttgggcggcacacgaaaaacacatttcaaaacatagcccccatgatttcctcacaagagttcttctgagttaaacttggtccatgcttccttgagcatgtcaaaaactttc

SEQ ID NO: 100269 - DNA, 515 bp, Arabidopsis thaliana columbia
  unsure (1)..(515): unsure at all n locations
nnnnnnnnnnnnnnnnnnnnnnnnnnnnnnnnnnnnnnnnnnnnnnnnnnnnnnnnnnnnnnnnnnnnnnnnnnctttgttttttttttttttttttgtgaactgagagagataagaactggagacacagttcatatgttttatcatgttcagagcaaaggagacacagtttagagaagagatcaaacaacaagtagattcttttagggctggtggaaattcataacatgatcttactcgggggaaaaagcatatgagacctgacgaaggaaatactttgatggtggggactacatgaaacttggggaagctgggcctttggagagaccaagccgaacttccatcccggggggaaagtctactggtttcagcgtctcggattcgcgaggatcatttcagttatccctaaaaccaaaattatgtagagctcctgtgtagacttccaggccaagcattggaggaaggaattgggtccagaaggtttctgaacccggaaaaggttttgttatcaagat

SEQ ID NO: 100270 - DNA, 913 bp, Arabidopsis thaliana columbia
cattattatcaatcgaaattccaaccgactcaacaatgtcttcatccaacgcctgcgcctctccgtcaccgttccccgccgtcacgaagcttcatgtagactccgtcacgtttgtaccgtccgtcaagtcaccggcctcctccaatccattattcctcggcggcgccggtgtccgaggccttgatatccaaggtaaattcgtgatcttcaccgtcattggagtatacctagagggtaacgccgttccttctctatctgtcaagtggaagggaaaaactacggaggagctaacagaatctatcccgttcttccgtgaaatagtcaccggtgcgtttgagaagtttatcaaggtgacaatgaaactgccgttaacgggacaacaatattcggagaaagtgacggagaattgtgtggctatatggaaacaattagggctttatacggactgtgaagctaaagctgtggagaagttcttggagatcttcaaggaagaaacattccctcccggttcatcgatcctcttcgctctctcccctaccggctctcttacggttgcgttttcgaaagatgatagtatccctgaaaccgggatcgctgtgatcgagaacaaattgttggcggaggcggttctggaatccatcatcgggaagaacggtgtgtcccctggcactaggttaagtgttgcagaaagattatctcagctaatgatgaagaacaaggccgaaaaggaagttagtgatcactctcttgaggaaaaactagccaaagagaactgacaatgatagatttttcttgtgtttttgtcattttccatttcttatgttttctatatctaatttcttatgcggtactcaagtggagaataaagaacatgcatttacattataataaagaataggaatttcggtgtttt

SEQ ID NO: 100271 - DNA, 2207 bp, Arabidopsis thaliana columbia
  unsure (1)..(2207): unsure at all n locations
taattgtctccatctccatgaagctactgcttctgggtaagttttgtggtcttcgttcatcttttctctagcaatttagtattccattttctcaatccctctggttagaaatcgtgtccggtgatttttgaattatatccttttggtgttttcttcgattttgggggaattcgatggatactctgttgaaaacacccaacaagctcgattttttcatccctcagtttcatgggtttgagagattatgcagtaacaatccataccattcaagggttaggcttggtgtgaagaaaagggctatcaaaattgtctctagtgtagtgagtggtagcgctgctcttttggatcttgttcctgaaactaagaaggagaatcttgactttgagcttcctttgtacgacacttccaagagtcaagttgttgatttggctattgttggtggtggtcctgctggtttagccgtggctcagcaggtttctgaagctggactctctgtttgttccattgatccttctcctaagctcatatggcctaacaattatggagtttgggttgatgagtttgaggctatggatttactagactgcctggataccacatggtctggtgctgttgtctatgtcgatgaaggtgtcaagaaggatttgagccggccttatgggagagttaaccggaaacagctcaaatccaaaatgcttcagaaatgtattaccaacggtgttaaatttcatcagtctaaggtcactaatgtggttcacgaggaggcaaactccactgtggtctgcagtgacggtgtaaagattcaggcttccgtggttcttgatgccactgggttttcccgatgcttggttcagtatgacaaaccttacaaccctgggtaccaagtagcttacgggattgtagctgaagttgatggtcacccattcgatgtagacaaaatggtgttcatggattggagagacaaacatctggactcatatcctgagctgaaagaacggaacagcaagatcccaacgttcttgtacgctatgccattttcttccaaccgaatatttcttgaagaaacttctttagttgctagacctggtctgagaatggaagatatccaagaaagaatggctgctagactgaaacatctggggatcaatgtgaagaggattgaggaagacgagcgttgtgtgatcccgatgggcggtcctttaccagtcttacctcaacgggttgtggggattggtgggacagcaggaatggttcatccttcaactggttacatggttgctaggactcttgcagctgcaccaatagttgcaaatgccattgtgagatacctcggttcaccaagtagtaatagcctgagaggagatcaactctctgctgaggtttggagagacttgtggcctatcgaacggcgtagacagagggagttcttctgttttggaatggatattctgctgaaactcgatttagacgctactagaaggttctttgatgcattctttgatctgcaacctcattactggcacggattcttgtcttccaggctgtttctcccggaactgttggtcttcgggttgtcgctcttctcacacgcttccaatacctcaagattggagatcatgacaaaggggactgttcctcttgctaagatgatcaacaatttggtacaagatagagactaaggaccagaaacttagacatataagtacatctgttctttggttcttgaccagtagtatatccgcattgcaagtcgttggataattgtgtataaaccacagatcataacctgaatccttgtgaaatcaaattgttactactagttcattaaaattaatactttgtgctgcattgtgtttcaccaactcttgtaaatccaaaactagaggcaaaatgtaataagataaaagagtggattttgaacaccaaagcaaatctttcaaactccttccgctccttaatatttgatgctttcgggaaaggcttatatttcatcttcctcgaaagggtctctgttccggataatcaccaacctttactttgtcaggcctgaccataccaccttgaagccgagggcactcaaagaatcttgttcctttcaccctgccatcatgttttccaaggggctcatcattctggaattccaacccaattggccngggncccaacggacttctgctcgttcaacatatttgacccattcctntttt

SEQ ID NO: 100272 - DNA, 445 bp, Arabidopsis thaliana columbia
  unsure (1)..(445): unsure at all n locations
taggacnnnnnnnnnnnnnnnnnnnnnnnnnnnnnnnnnnnnnnnnnnnnnnnnnnnnnnnnnnnnnnnnnnncttttttttttttttttgattctaacatttaattatataaagtagaagctaagaaaccgtaagacatatctacatcactgatacaaattcttcttgaggagtgttccaaggcaagcatactaatacatagttgctttccaaatgatgaaccctacttttaataaagggccctctctctatatgtaactcccactaaagaacatagacggcaaatttgttcctattgattcacgaagctataagatcttttgtaatgtctactagaatcacgcagcgagtaccagaactttgatggttcccttgactattcgcaggcaacatcgngggactatcactcttccaacaaccccactaataaagtaggaacctgcc

SEQ ID NO: 100273 - DNA, 836 bp, Arabidopsis thaliana columbia
  unsure (1)..(836): unsure at all n locations
cgnnnnnnnnnnnnnnnnnnnnnnnnnaaagacggtacgcctgcaggtaccggtccggaattcccttgtcgacccacgcgtacggtgaatggagctgtagagacttgttttgggtcgtttcatcggtacgctcaatacatgaatttctcacatcctttgatcaaagagaagtttaatcccaaagcatgtgcgtgggcgtatggaatgaacttctttgatcttgatgcttggagaagagagaagtgcacagaagaatatcactactggcaaaatctgaacgagaacagggctctatggaaactggggacgttaccaccgggactgatcaccttttactcaaccacaaagccgctggacaaatcatggcatgtgcttgggctgggttacaatccgagcattagcatggatgagatccgcaacgctgcagtggtacacttcaacggtaacatgaagccatggcttgacatagctatgaaccagtttcgaccactttggaccaaacacgtcgactatgacctcgagtttgttcaggcttgcaattttggcctctgaactatgaaaattttctttatcatcaaaatctgaaagcatatgttgtttgttacttcagctctacgaagttttaaccttagtttttgtttgtgtttatttatatatttttgggggtttagtagaacacttgtattttgttcatagctatctttgttctatggcaacctataatcaaagcttaattataaaaaaaaaaaaaaagggcggccgctctagaggatccaagcttacgtacgcgtgcaggcacgctcataatcttctattagttgttcctaatacaatcg

SEQ ID NO: 100274 - DNA, 487 bp, Arabidopsis thaliana columbia
  unsure (1)..(487): unsure at all n locations
cactatagaagatgcttgacgtcgcatgcacgcgtacgtaagcttggatcctctagagcggccgccctntggtttttttttttttttttttttttttttttttttttttttttttttttttttttttggaaaaaaacatagtctttcaacgggtttagtcttttagagttcaacccttacattactttataaggccctactctggggagaattcacattccgaaccctggctggggaaccaccctttacagaaaaaaaagccaaccttcttcagagacaactaaggctgtttcccctacgaaacctaaatcagggggaaacctgggtaaaccggaagagatagggggttcggtttagtcaggtacagaacaaaccggatcatcctaaagcactttgtttcagctcggagccttttacttttttttcatctcccaaagttggttggttggttgttgttgcggtaaacctacttgttttttgccttttc

SEQ ID NO: 100275 - DNA, 913 bp, Arabidopsis thaliana columbia
acggatctatggtccctggctcgagaaatccaatgtggggtgaagagttcaattttcccacagatgaacttcctgctaagattaatgtaacaattcatgattgggatatcatttggaaaagtactgttcttggctcagtaactattaatgttgaacgtgaaggccaaacgggtccagtgtggcactcattagacagcccgtctgggcaggtttgccttaacattaatgcaatcaaactacccgtgaatgctcctagggctgtaactggatatgctggagccggtagaagaagggtcacattggatcagcaaggcccaacaattgtacatcaaaagccagggcctctgcagacgatatttgatctcctcccggatgaggttgtcgagcacagttattcatgtgccctggagaggtcattcctgtatcatggccgaatgtatgtttccgcgtggcacatatgtttccactccaatgttttctctaagcaaatgaaggttgttgtccctctcggagatatagatgagattcgtagaagtcaacacgcgttgataaacccagctataacaatcatactacggatgggtgctggtggacatggtgttccccctcttgggactcctgatggtagagtgaggtataaatttgcatcattttggaacaggaaccatacactaaaagcattgcaacgtgcggtgaataattatcatgcaatgttagaagtcgaaaagaaggagagagcacagtctgctttgcgtgctcatagtagctctgtgaaaggaggtggtaaagtacaagtgaaagctcctgaagatactgcagctgtaccttgtaagtttcaagctttcaataaaggagaagtccttggtaacatctacaatgatgtttttgccagtacacctgagccagttcctga

SEQ ID NO: 100276 - DNA, 510 bp, Arabidopsis thaliana columbia
  unsure (1)..(510): unsure at all n locations
nnnnnnnnnnnnnnnnnnnnnnnnnnnnnnnnnnnnnnnnnnnnnnnnnnnnnnnnnnnnnnnnnnnnnnnnnctttttttttttttttttttcaacttaaaagcttctgattcatatagagggtctccaaagacaaaacacaacaggcaacacaaagcctaaaataccaaaagctacagtcaaaatgtcaaataccgattctaccctcatcttcttctccttcatctctctcttctgcgccataaactcttcgggtctcttcttcgattctacttccctcctacttccatttacccttttaccctccatgacactccttaaaataaccaaactgtccctcccgtttaaatgcgttccctccatcttctctaccttgagactcacttccctcacgtgcatctcctcctcaccgcacgtgaccatccgtgatcacacactccaccgcccccaccaccgtcgggaatggcgcctccacttctccgcttatccagttcctctgcaccgacacc

SEQ ID NO: 100277 - DNA, 501 bp, Arabidopsis thaliana columbia
taggaaccactatagaagattctatgacgtcgcctgcacgcgtacgtaagcttggatcctctagagcggccgccctttggtttttttttttttttttgaacttaacgattcaattcattgcaaaagaagatcaatcaacaagaacagagtacaaggtttcaacaatctgtctagttatttcagcaaaagtgatatgattatttcataaatgatcatccaaagcacatctcttaagagggtggaaccaccaaaagtccaaaacgagcaaagaaccaggctttatctctactgcttcaaatctgcagagcatcagcaatggatccagcgaggctcaagacttcgaaaggagccttgtttccgatggccttaaccgcgtgtggacaagaatccgtgatccagaagtatccaaacgcttcttctaatccgttcttcttgtgggggaaacgctcccacgagctctttgggaagacaccatgagttacataaccactcaccttcaca

SEQ ID NO: 100278 - DNA, 709 bp, Arabidopsis thaliana columbia
cttttaatctcaggcaggaaggtgaaatttttcgatttcgtagatcaaaatggcggcaccattcgcgttaaggaaaatcggtgttcctccgaactcggcgaacctgacggaagctcgccgccgtgttttcgatttctttagagctgcctgtagatctatccccaccatcatggacatttacaatcttcaagatgtcgtcgctccttctcagctccgctatgctatctctgctcagattcggaataacgctcacatcaccgatcctaaggtaattgatcttcttatattcaaaggaatggaagagctgactgacattgtggatcacgcaaagcagcgtcaccacatcatcggtcaatatgtggtgggtgaagggctcgtgcagaatactggaaacaaggatcaaggaaagactgattttctcaagaatttctacaccagcaactacttttgaactggtgatgtttacttttcgagtttcacataagctgtactgtttatgctgcttcagttcttgctcaagtttgcatatgtcttgccagtattgtattctcgacatttggaagaagtcttcttcctggaaataattagatcttttcatttgtatgagtattttctctgactcaggttggttatacatagtattagccaaacctctgtaagctttatgtgtgacagtgtttactgggcaatcttgctatgatttcaagat

SEQ ID NO: 100279 - DNA, 557 bp, Arabidopsis thaliana columbia
  unsure (1)..(557): unsure at all n locations
tcctcttcagctccaacaggctcaaaaagtgatccaactgatcacaactccataaattctgaagatgatttactcttgtctgcaatgaccaaagatggacagaccattcttttggatggcaatactgggaaaatacttgcctcttgcctgagacctctaaagaacccaactgcgatttgtatgcacattatagagaactgctatgaaaactatgaaacgcccagtgaaaaaccagctgaaaatccatctgggaaggataaacatgagaacaaatctcatataatcaaagctagtgagagtcattcaccagacggtgaacagaatgctgtcacaggaacaaaacttttttgatccagatatttgcggattcattatttctcatggtgttctgagggtgcactgcgcttgtatacctgtaaaggttctatctcagggaggctttnagggctttttggggggnaatntccaaggcgnnttcttggtggggtccttaaaaagntggnggggntttgaggctcctttttccnncaggggtttttaanaggnttccggnntgc

SEQ ID NO: 100280 - DNA, 680 bp, Arabidopsis thaliana columbia
  unsure (1)..(680): unsure at all n locations
cgatttactannnnnnnnnnnnnnnnnnnnnnnnnnnnnnnnnnnnnnnnnnnnnnnnnnnnnnnnnnnnnnnnnnnnnnnnnnctttgttttttttttttgtttttaaaagaaaaatatttattaatttctcattacttatttggttgcatctttacaacaagggattgtataacttatttatgacacttcattattgaggagacttgtttaatcataaacaaactaaacaagacctaaattaatgtgttgtagtgttggagattactcttctttcttctggatagtctcttactcaacaagagggtttgactttctcaaactttctgaatgactttgactttgactttgaccatgaccatgaaccattgtttcctccatgtgtggtattctctcgtgaacaaagaatctcataaatagaagatgaaacttgaattcggggagaccaaaactatcacgagttgtgacgctgctgcagcaagtaattcttcagctttatgaccaaagcgaagaccgcaaagcatggtatatgcatcacagccactcccaagtaccataagggggcgtatggtgacgaaagatcaaaaaatggggccccgcagtcttgccgtatggtttcccttggnagcccgnaaatcagnccnagtcaaggnggatccggnccnggggtnccaaggntt

SEQ ID NO: 100281 - DNA, 592 bp, Arabidopsis thaliana columbia
ggcagctgctgtttagaccatcgatccgacaatttcatagcgaaaaacctactgtgagctacaagaatctgcctatgaacacacatggtgatactaatcccatctttagagctcagagtcagcttcacatcactcgaattcgggtcattgaactgattcccggggctccgaatcaccagaagatccgaaatccgttgcatcgcaagcgcttgcttatcctgagctgaaataacaagatgattcacattcgtcgtcctcgcagccgtagccgccgcagaagaagacgatgaagacgacggcggagatgcaagcacaccgttatggatctgaactggaactttccctatggtatcagcttcactagccatcatttcgaacagcgtcggacttgatcgtgtcttgtcgtgcatcgccggaggcggcggaggagacattggatttagaagacctgccgttaaagcggagttgcgcttagtgaagctcgaagggaaagaagagtcacgcggcgagctgtaaccgttccccccagacgtcgtagccgtacagtaatccatgaccggtggagatcctttcggatccgaaaacgaagttg

SEQ ID NO: 100282 - DNA, 440 bp, Arabidopsis thaliana columbia
tttattcgcctctatcagaagcttgacgaaatctcttctccgtctctctctctctttccctcgtccattccacgatcttcttccaatctcaaatctcccattttctagtgtttcattttgatccttcttccttcctctggagatttctcaaatctcttcaactattttgatttgccgccatgtatcgacgcgccacttccggcgtgcgttctgcctccgcaaggctttcttcttccctctccaggatcgcctctagcgagacagcttcggtttcggctccatctgcgtcgtcgcttcgcaatcagacgaaccgatctaagagtttctcctcggctctccgctcctttcgagtttgctctgcttccacgcggtggagccatggtgggagctggggatcgcctgctagccttcgcgctcaagctaggaattccactccggtt

SEQ ID NO: 100283 - DNA, 481 bp, Arabidopsis thaliana columbia
  unsure (1)..(481): unsure at all n locations
taggaccactatagaagagtctatgacgtcgcactgccgcgtacgtaagcttggatcctctagagcggccgcccttttttttttttttttttttaatttcgaagaagacaaaaatatcaataaatatcatcgagtgagttcactcacttctgactgtttgttacaatatatatttacatttacatagttattccttgtatagatcgctcgactgatctatggctggcctatacagatattggttttatttacaacaaaaacaaaagtagtattaacatagggcattattttagttatgcctttgatttcaatttgtgttcattttgccaacagaagatgaagtagttgatgatgactttgtctcgctctgaatagcggtctctacgaattgggttgtgacttgttcccacttagtaattgttgccttaatctgngtttgttgtgctggtgtgcatgtcanagatccttctttcttgccttg

SEQ ID NO: 100284 - DNA, 1021 bp, Arabidopsis thaliana columbia
aggtctctacgactcactatttggaaagctggatccgcctgcaggtaccggtccggaattcccgggtcgatccacgcgtccgctctcctccatatcttaacaatttcatagcaaaccctaaaattgagaaagagatagagagagaaagatgggtagaggaaagatcgagataaagaggatagagaacgcaaacaacagagtggtgacgttctcaaagaggaggaatggattggtgaagaaggctaaagagatcacagttctttgtgatgcaaaagttgccctcataatctttgcaagtaatggtaagatgattgattactgttgtccttccatggatcttggtgctatgttggaccaataccagaagttatctggcaagaaactatgggatgctaagcatgagaaccttagcaatgagattgataggatcaagaaagagaatgatagcttacaactggagctcaggcatttgaagggagaagatatacagtctctcaacttgaaaaatctgatggctgtcgagcacgccattgaacatggcctcgacaaagtccgagaccaccagatggagatccttatatcaaagaggagaaatgagaagatgatggcggaggagcaacggcaactcactttccagctgcaacaacaggagatggctatagcaagcaacgcaagaggaatgatgatgagagatcatgatgggcagtttggatatagagtgcaaccgattcagccaaatcttcaggaaaagattatgtctttggtcatcgattgatcatcgagattttataatctcatcctgatcaactcctatctatactatcgtggtctttagtttgtctttatcaatctgtgtgtcttaatctcgagcaacatatatactcgctatcagactttttacttaagctatatgtgtgttgtttgcttatgacctctatgtattggttgtgttgtgtgcttaaacgtttcgaactaattgatctgtgtgaaacttattattctgtgataagctatttgtgat

SEQ ID NO: 100285 - DNA, 515 bp, Arabidopsis thaliana columbia
  unsure (1)..(515): unsure at all n locations
tttgggacgnnnnnnnnnnnnnnnnnnnnnnnnnnnnnnnnnnnnnnnnnnnnnnnnnnnnnnnnnnnnnnnnnncttggttttttttttttttacagagcaattgttgttttgttatgggttttgaataatggagtgaagaaattatgacatttgtacaaatgaatctttttcatgagattaataaattcccgagcaaatcttgtttccaaaaaagacaattgaattttatcttcttcttttgtctctcaacaatacaaatatgtgaaaacgttctctgtttttgctttttgtctttttttgctctccccattgattgattgattgatctttgtctctctctctgtgttattatgtagtgatcacttcattgtttggtagttaaaagcgttggaatttgtccgtgattcacgaaatcaatcttgttcagcctgacacaacacagtacttgctctggaagttcctctggtgattgagcctgatttgtaatcccaaatcaagaatcccgttcttga

SEQ ID NO: 100286 - DNA, 622 bp, Arabidopsis thaliana columbia
acggacgcgtgggcggacgcgtggccgactcagagcttttgagtcttctaaatctctatcgaatttttctagggttagggctcctgatcgatttcgcgagctctgcgattattttaagtattaggatccgaaattagaaatgggtggagagggagattcaagtcagccgcagagtggtgaaggagaagctgtggctgtgaacatcaggtgctctaatggcacgaaatttagtgtgaagacgagtctcgattcaacggtggagtctttcaaagagttggtggctcagagcagcgatgttccagctaatcagcagcgcttgatttacaagggtcgtatcctcaaggacgatcaaactctcctcagctatggtttgcaggctgatcacaccattcatatggttagaggctctgcaccttcttcagcaccacctcctgctccggccgcaagccaaaccactgcacctagtgttactcgaggggttggttcagataatagctcgaatctaggaggagcgagtcctggggaatctttgttccctgggcttggatttaatcctccgggttgttgaaaatgcaaggtctgggttatttggagctggtcttccggatcttgtgcagacaca

SEQ ID NO: 100287 - DNA, 518 bp, Arabidopsis thaliana columbia
  unsure (1)..(518): unsure at all n locations
nnnnnnnnnnnnnnnnnnnnnnnnnnnnnnnnnnnnnnnnnnnnnnnnnnnnnnnnnnnnnnnnnnctttttttttttttttttgcaaaagtcattaattaaacagttttaaaatattcacttgcaaaagccattgatttttttaattacaacctcacaagacaagacaaaaacccaccaatattttaaaccttaaatgaacgtaattaacctcctaatgggctacaaatgcttattaaactcttgtcgtttttattacattctttgaccgtatggtcttctagttcttcctcatcgctgccgcattgcttgcaaaccaccttgcacttaaccacactcccatagacataaaacccgggctgaaccatagctctaaccagactcttaaaccgttccccaccggtttcctccatgtaaatcggatcaaaccggtcatctttctccacacgaaagatttgcaaccccgggttcactgaattagccaaaagatgaaccaaccaaacactctttgacgcacc

SEQ ID NO: 100288 - DNA, 784 bp, Arabidopsis thaliana columbia
acgttcgttacactaccagacgagctatgacgtcgcatgcacgcgtacgtaagcttggatcctctagagcggccgccctttttttttttttttttttttttgttaccaacgacaaaaatatgtatatatatatattcaagaacaatgacaggaacaaaaggttattcaacataaaaacaacccatatatgctaaattcagcaataaaccccccttaaaatattgaaagaagaagaaaatacattaaaaattattgttatgctttagagtctccaagctgaatttagcatatgttcccatccgtcttgacaaccacaaccctctctctttaatcacctgaaattgttgcccccaaacgttggtgtccaaaaatcggctgttgtttcgttagccaccggaaacgtgcttgatattgggacgagacatagaccatgtcctcttagttcgtgattctcattttcatcttgactcttcgatttaccagatatctacatgaatccatactgaaattagtacttatttaaccatgattatagcacgaagactccaacttggacaaaactaaaacactagatcgtgtattgaacctgctgttgttgttggttcgaggcaccttgtttcatgtatggagtgcttagaacagtgacttggtcgtgaaggaacttgatgtactctatagcttcttggagaacagatgcagtatctgtctttccgaaaggtgaaactagttgttgtaatgaagttatctggtcccttagattctcttttctcacctttaaagttgg

SEQ ID NO: 100289 - DNA, 664 bp, Arabidopsis thaliana columbia
  unsure (1)..(664): unsure at all n locations
nnnnnnnnnnnnnnnnnnnnnnnnnnnnnnnnnnnnnnnnnnnnnnnnnnnnnnnnnnnnnnnnntctttttttttttttttgtaaataagagatgttttgatttattgacaaattcttacaagtttagggtaagcttttgttcaataagtttctttggtatataataaatatgaaaatggcaatcaatagatgcgaaatttattcccacgtcacggcgattgggcttctgacgttgtatttgtcacatatccaaaccaaaactccaaaggaagacgaagacgaatttctcgaagcttctgcatcatacgtcaccgtataactcaacctctctctggccttctggaacttgagcacctttggttcaactctcaccttcacaccttttggttcctcaacgtgcaccatatactcacaagtcggtgacccaacgttagtcacagtcctcttatatctcaccggttttcaaaattcggcgccattaacggagggttgancgcgaacgagggntagttcaaatcaccggggctcaaaacgacgggngttactagcacacgtgtagttagtgccggggaacaagagtatctctcacccgnggagtcaagtgnacaagtagttggatatcgncggngggggatngnanncagccggggttnccgccggga

SEQ ID NO: 100290 - DNA, 723 bp, Arabidopsis thaliana columbia
  unsure (1)..(723): unsure at all n locations
caatnngggtccatggcttccaagctggatcaacccgggagctaatttctacattgttggtcccgatcctgccgtgggccatccgacagagaagagagatctttatgatgccgatcacgggaagaaagtgcttagcatggcaccaggacttgaacgcctcaacattcttcccttcaaggtcgctgcatatgacaaaactcaggggaaaatggccttctttgatccctccaggtctcaagacttcctcttcatatcaggaaccaagatgcgtggcttggcgaagaagaaagagaacccaccagatggtttcatgtgtccctctggttggaaggtgttggttgattactacgacagtctcagtgcagagtctggtaatggaagggtttcagaggctgttgcttctgcttgaatgcaaaaggttcccttgtccccacaagtttcacatttcctgtttgttagtaactaaactccgtgacaaaaagcttccaataaaaccaatgtaacatctgtgtgttctttgcgtctctgttgtcaaacttgtcgtcgagtcgcatcgatttgtaccatatttgcttattgtgttttaaatgtaacaacatttgtgtataaactatttctcgtggaaacagaaactttaagctnnnnnnnnnnnnnnnnnnnnnnnnnnnnnnnnnnnnnnnnnnnnnnnnnnnnnnnnnnnnnnnnnnnnnnnnnnnnnnnnng

SEQ ID NO: 100291 - DNA, 625 bp, Arabidopsis thaliana columbia
  unsure (1)..(625): unsure at all n locations
nnnnnnnnnnnnnnnnnnnnnnnnnnnnnnnnnnnnnnnnnnnnnnnnnnnnnnnnnnnnnnnnnnnnnnnnnnttnnnnnnntagtattnnttttatttaatttattttttttttgcacttaaatttcagattttattgaactggttgatacagttgagtttgcaacataaaaaaaaaacaccattacaaaatctacgaaaatatccctggaaacaatcctaccctctgtgtcttgggtaaaggagatttatccagagaggattaaatatgaaagctgagctcattcctcattcctcactcaaatttggccttaggtttctcttgttcttcggggagagggttaaacacaactttgaagaaccaaactgcaagcaacgtagcctttacaggtccaagccaatacacaagtaaatgctctttcgttatatgttcaccgcgtgcataagcccatcccataacagctgcgggggtcatgcatccaccgggtaagatcagagccaagaatatgaagaggttacttagcaagctaccggtccaggcttcatgaagaacttcccggggtttcctngtagcccatggnggcgtcatgagatgtagaccctctgtaaagncgggggatgnna

SEQ ID NO: 100292 - DNA, 475 bp, Arabidopsis thaliana columbia
tgacgtcgcatgcacgcgtacgtaagcttggatcctctagagcgggcgccctttttttttttttttgcgattagattatttggtaaaactaagaaatgaagattaccagagaaaagattttaattattgacgcttcctttggtagagagagtaaccaacgagcgcagacatcaaaaatgtccatagtaccgtattgatggtgtgccaacgttcgagtcgtttaattcttgattgcatatcttctaaaacgttgtctatggaagaaccatctcttcttggtgatgattccgacacactgttactacttccctgcgattgtatgaattccacaagctcttgcaaccgcgctgcttgctgtgtatgtattccacttgaacttctctggaccggtggcagtctttccaacactatttgaagggaactctttggtgtgtatgaaccatctagtttgagagctgaaccagcagccgtcact

SEQ ID NO: 100293 - DNA, 526 bp, Arabidopsis thaliana columbia
  unsure (1)..(526): unsure at all n locations
gtacnnnnnnnnnnnnnnnnnnnnnnnnnnnnnnnnnnnnnnnnnnnnnnnnnnnnnnnnnnnnnnnnnnnctttttttttttttttttattgaactagtaaaaaatcctttataaattaaaaaaaaaaaacaaacagatcgtatgctctcacaactcaatcaaaaatcatctcaaataggaaattaaatttgaaaaaaagaaaagaaattaagaagcatcatcatcatcatcatcatcatcataattcataaaatatagtaatgataaattaagaagaacactatggttttcttttgcccacgtaaacctgtaatactccatcagatcctccagccactagggtacactggtccacacctgattgcctccaacagacgctactcacgaaaccgcttatccgaaccagaattcataccaactggttcaaacccatctaccccaaacccgcttcccccatctcctatcggacacaaacaccctgtttgttttccgatccacaaccaaacaacgcgccgtttctccac
